(19) United States
(12) Patent Application Publication
(10) Pub. No.: US 2007/0243176 A1
(43) Pub. Date: Oct. 18, 2007

(54) Human genes and gene expression products

(76) Inventors: Jaime Escobedo, Alamo, CA (US); Pablo Dominguez Garcia, San Francisco, CA (US); Julie Sudduth-Klinger, Kensington, CA (US); Christoph Reinhard, Alameda, CA (US); Filippo Randazzo, Oakland, CA (US); George Lamson, Moraga, CA (US); Elizabeth M. Scott, Sonoma, CA (US); Guozhong Zhang, Fremont, CA (US); Altaf Kassam, Oakland, CA (US); David Pot, Arlington, VA (US); Radoje Drmanac, Palo Alto, CA (US); Ivan Labat, Mountain View, CA (US); Birgit Stache-Crain, Sunnyvale, CA (US)

Correspondence Address: Chiron Corporation - Intellectual;Property - R440, P.O. Box 8097, Emeryville, CA, 94662, US

(21) Appl. No.: 10/615,618

(22) Filed: Jul. 7, 2003

Related U.S. Application Data
(63) Continuation of application No. 09/932,076, filed on Aug. 16, 2001, now abandoned.
(60) Provisional application No. 60/226,326, filed on Aug. 16, 2000.

(51) Int. Cl. A61K 48/00; C07H 21/02; C07H 21/04; C07K 14/47; C07K 16/18; C12N 15/85; C12N 5/10; C12P 21/00; C12Q 1/68

(52) U.S. Cl. 424/93.21; 435/320.1; 435/325; 435/6; 435/69.1; 530/350; 530/387.9; 536/23.1

(57) ABSTRACT

This invention relates to novel human polynucleotides and variants thereof, their encoded polypeptides and variants thereof, to genes corresponding to these polynucleotides and to proteins expressed by the genes. The invention also relates to diagnostic and therapeutic agents employing such novel human polynucleotides, their corresponding genes or gene products, e.g., these genes and proteins, including probes, antisense constructs, and antibodies.

### CROSS-REFERENCE TO RELATED APPLICATION

[0001] The application claims the benefit of earlier filed U.S. provisional application Ser. No. 60/226,326, filed Aug. 16, 2000, which application is incorporated herein by reference in its entirety.

### FIELD OF THE INVENTION

[0002] The present invention relates to polynucleotides of human origin, particularly in human colon, breast, prostate, and/or lung tissue, and the encoded gene products.

### BACKGROUND OF THE INVENTION

[0003] Identification of novel polynucleotides, particularly those that encode an expressed gene product, is important in the advancement of drug discovery, diagnostic technologies, and the understanding of the progression and nature of complex diseases such as cancer. Identification of genes expressed in different cell types isolated from sources that differ in disease state or stage, developmental stage, exposure to various environmental factors, the tissue of origin, the species from which the tissue was isolated, and the like is key to identifying the genetic factors that are responsible for the phenotypes associated with these various differences.

[0004] This invention provides novel human polynucleotides, the polypeptides encoded by these polynucleotides, and the genes and proteins corresponding to these novel polynucleotides.

### SUMMARY OF THE INVENTION

[0005] This invention relates to novel human polynucleotides and variants thereof, their encoded polypeptides and variants thereof, to genes corresponding to these polynucleotides and to proteins expressed by the genes. The invention also relates to diagnostics and therapeutics comprising such novel human polynucleotides, their corresponding genes or gene products, including probes, antisense nucleotides, and antibodies. The polynucleotides of the invention correspond to a polynucleotide comprising the sequence information of at least one of SEQ ID NOS: 1-6010.

[0006] Various aspects and embodiments of the invention will be readily apparent to the ordinarily skilled artisan upon reading the description provided herein.

### DETAILED DESCRIPTION OF THE INVENTION

[0007] Before the present invention is described, it is to be understood that this invention is not limited to particular embodiments described, as such may, of course, vary. It is also to be understood that the terminology used herein is for the purpose of describing particular embodiments only, and is not intended to be limiting.

[0008] Unless defined otherwise, all technical and scientific terms used herein have the same meaning as commonly understood by one of ordinary skill in the art to which this invention belongs. Although any methods and materials similar or equivalent to those described herein can be used in the practice or testing of the present invention, the preferred methods and materials are now described.

[0009] All publications and patent applications cited in this specification are herein incorporated by reference as if each individual publication or patent application were specifically and individually indicated to be incorporated by reference. The citation of any publication is for its disclosure prior to the filing date and should not be construed as an admission that the present invention is not entitled to antedate such publication by virtue of prior invention.

[0010] It must be noted that as used herein and in the appended claims, the singular forms “a,” “and,” and “the” include plural referents unless the context clearly dictates otherwise. Thus, for example, reference to “a polynucleotide” includes a plurality of such polynucleotides and reference to “the colon cancer cell” includes reference to one or more cells and equivalents thereof known to those skilled in the art, and so forth.

[0011] The publications and applications discussed herein are provided solely for their disclosure prior to the filling date of the present application. Nothing herein is to be construed as an admission that the present invention is not entitled to antedate such publication by virtue of prior invention. Further, the dates of publication provided may be different from the actual publication dates which may need to be independently confirmed.

[0012] Definitions

[0013] The terms “polynucleotide” and “nucleic acid,” used interchangeably herein, refer to a polymeric forms of nucleotides of any length, either ribonucleotides or deoxynucleotides. Thus, these terms include, but are not limited to, single-, double-, or multi-stranded DNA or RNA, genomic DNA, cDNA, DNA-RNA hybrids, branched nucleic acid (see, e.g., U.S. Pat. Nos. 5,124,246; 5,710,264; and 5,849,481), or a polymer comprising purine and pyrimidine bases or other natural, chemically or biochemically modified, non-natural, or derivatized nucleotide bases. These terms further include, but are not limited to, mRNA or cDNA that comprise intronic sequences (see, e.g., Niwa et al. (1999) Cell 99(7):691-702). The backbone of the polynuclotide can comprise sugars and phosphate groups (as may typically be found in RNA or DNA), or modified or substituted sugar or phosphate groups. Alternatively, the backbone of the polynucleotide can comprise a polymer of synthetic subunits such as phosphoramidites and thus can be an oligodeoxynucleoside phosphoramidate or a mixed phosphoramidate-phosphodiester oligomer. Peyrottes et al. (1996) Nucl. Acids Res. 24:1941-1848; Chaturvedi et al. (1996) Nucl. Acids Res. 24:2318-2323. A polynucleotide may comprise modified nucleotides, such as methylated nucleotides and nucleotide analogs, uracyl, other sugars, and linking groups such as fluororibose and thioate, and nucleotide branches. The sequence of nucleotides may be, interrupted by non-nucleotide components. A polynucleotide may be further modified after polymerization, such as by conjugation with a labeling component. Other types of modifications included in this definition are caps, substitution of one or more of the naturally occurring nucleotides with an analog, and introduction of means for attaching the polynucleotide to proteins, metal ions, labeling components, other polynucleotides, or n solid support.

[0014] The terms “polypeptide” and “protein,” used interchangeably herein, refer to a polymeric form of amino acids of any length, which can include coded and non-coded amino acids, chemically or biochemically modified or derivatized amino acids, and polypeptides having modified peptide backbones. The term includes fusion proteins, including, but not limited to, fusion proteins with a heterologous amino acid sequence, fusions with heterologous and homologous leader sequences, with or without N-terminal methionine residues; immunologically tagged proteins, and the like.

[0015] “Diagnosis” as used herein generally includes determination of a subject's susceptibility to a disease or disorder, determination as to whether a subject is presently affected by a disease or disorder, prognosis of a subject affected by a disease or disorder (e.g., identification of pre-metastatic or metastatic cancerous states, stages of cancer, or responsiveness of cancer to therapy), and therametrics (e.g., monitoring a subject's condition to provide information as to the effect or efficacy of therapy).

[0016] “Sample” or “biological sample” as used herein encompasses a variety of sample types, and are generally meant to refer to samples of biological fluids or tissues, particularly samples obtained from tissues, especially from cells of the type associated with a disease or condition for which a diagnostic application is designed (e.g., ductal adenocarcinoma), and the like. “Sample” or “biological sample” are meant to encompass blood and other liquid samples of biological origin, solid tissue samples, such as a biopsy specimen or tissue cultures or cells derived therefrom and the progeny thereof. These terms encompass samples that have been manipulated in any way after their procurement as well as derivatives and fractions of samples, where the samples may be maniuplated by, for example, treatment with reagents, solubilization, or enrichment for certain components. The terms also encompass clinical samples, and also includes cells in cell culture, cell supernatants, cell lysates, serum, plasma, biological fluids, and tissue samples. Where the sample is solid tissue; the cells of the tissue can be dissociated or tissue sections can be analyzed.

[0017] The terms “treatment,” “treating,” “treat” and the like are used herein to generally refer to obtaining a desired pharmacologic and/or physiologic effect. The effect may be prophylactic in terms of completely or partially preventing a disease or symptom thereof and/or may be therapeutic in terms of a partial or complete stabilization or cure for a disease and/or adverse effect attributable to the disease. “Treatment” as used herein covers any treatment of a disease in a mammal, particularly a human, and includes: (a) preventing the disease or symptom from occurring in a subject which may be predisposed to the disease or symptom but has not yet been diagnosed as having it; (b) inhibiting the disease symptom, i.e., arresting its development; or relieving the disease symptom, i.e., causing regression of the disease or symptom.

[0018] The terms “individual,” “subject,” “host,” and “patient,” used interchangeably herein and refer to any mammalian subject for whom diagnosis, treatment, or therapy is desired, particularly humans. Other subjects may include cattle, dogs, cats, guinea pigs, rabbits, rats, mice, horses, and so on.

[0019] As used herein the term “isolated” refers to a polynucleotide, a polypeptide, an antibody, or a host cell that is in an environment different from that in which the polynucleotide, the polypeptide, the antibody, or the host cell naturally occurs. A polynucleotide, a polypeptide, an antibody, or a host cell which is isolated is generally substantially purified. As used herein, the term “substantially purified” refers to a compound (e.g., either a polynucleotide or a polypeptide or an antibody) that is removed from its natural environment and is at least 60% free, preferably 75% free, and most preferably 90% free from other components with which it is naturally associated. Thus, for example, a composition containing A is “substantially free of” B when at least 85% by weight of the total A+B in the composition is A. Preferably, A comprises at least about 90% by weight of the total of A+B in the composition, more preferably at least about 95% or even 99% by weight.

[0020] A “host cell,” as used herein, refers to a microorganism or a eukaryotic cell or cell line cultured as a unicellular entity which can be, or has been, used as a recipient for a recombinant vector or other transfer polynucleotides, and include the progeny of the original cell which has been transfected. It is understood that the progeny of a single cell may not necessarily be completely identical in morphology or in genomic or total DNA complement as the original parent, due to natural, accidental, or deliberate mutation.

[0021] The terms “cancer,” “neoplasm,” “tumor,” and “carcinoma,” are used interchangeably herein to refer to cells which exhibit relatively autonomous growth, so that they exhibit an aberrant growth phenotype characterized by a significant loss of control of cell proliferation. In general, cells of interest for detection or treatment in the present application include precancerous (e.g., benign), malignant, metastatic, and non-metastatic cells. Detection of cancerous cell is of particular interest.

[0022] The use of “e”, as in 10e-3, indicates that the number to the left of “e” is raised to the power of the number to the right of “e” (thus, 10e-3 is 10⁻³).

[0023] The term “heterologous” as used herein in the context of, for example, heterologous nucleic acid or amino acid sequences, heterologous polypeptides, or heterologous nucleic acid, is meant to refer to material that originates from a source different from that with which it is joined or associated. For example, two-DNA sequences are heterologous to one another if the sequences are from different genes or from different species. A recombinant host cell containing a sequence that is heterologous to the host cell can be, for example, a bacterial cell containing a sequence encoding a human polypeptide.

[0024] The invention relates to polynucleotides comprising the disclosed nucleotide sequences, to full length cDNA, mRNA, genomic sequences, and genes corresponding to these sequences and degenerate variants thereof, and to polypeptides encoded by the polynucleotides of the invention and polypeptide variants. The following detailed description describes the polynucleotide compositions encompassed by the invention, methods for obtaining cDNA or genomic DNA encoding a full-length gene product, expression of these polynucleotides and genes, identification of structural motifs of the polynucleotides and genes, identification of the function of a gene product encoded by a gene corresponding to a polynucleotide of the invention, use of the provided polynucleotides as probes and in mapping and in tissue profiling, use of the corresponding polypeptides and other gene products to raise antibodies, and use of the polynucleotides and their encoded gene products for therapeutic and diagnostic purposes.

Polynucleotide Compositions

[0025] The scope of the invention with respect to polynucleotide compositions includes, but is not necessarily limited to, polynucleotides having a sequence set forth in any one of SEQ ID NOS: 1-6010; polynucleotides obtained from the biological materials described herein or other biological sources (particularly human sources) by hybridization under stringent conditions (particularly conditions of high stringency); genes corresponding to the provided polynucleotides; variants of the provided polynucleotides and their corresponding genes, particularly those variants that retain a biological activity of the encoded gene product (e.g., a biological activity ascribed to a gene product corresponding to the provided polynucleotides as a result of the assignment of the gene product to a protein family(ies) and/or identification of a functional domain present in the gene product). Other nucleic acid compositions contemplated by and within the scope of the present invention will be readily apparent to one of ordinary skill in the art when provided with the disclosure here. “Polynucleotide” and “nucleic acid” as used herein with reference to nucleic acids of the composition is not intended to be limiting as to the length or structure of the nucleic acid unless specifically indicated.

[0026] The invention features polynucleotides that are expressed in human tissue, especially human colon, prostate, breast, lung and/or endothelial tissue. Novel nucleic acid compositions of the invention of particular interest comprise a sequence set forth in any one of SEQ ID NOS: 1-6010 or an identifying sequence thereof. An “identifing sequence” is a contiguous sequence of residues at least about 10 nt to about 20 nt in length, usually at least about 50 nt to about 100 nt in length, that uniquely identifies a polynucleotide sequence, e.g., exhibits less than 90%, usually less than about 80% to about 85% sequence identity to any contiguous nucleotide sequence of more than about 20 nt. Thus, the subject novel nucleic acid compositions include fall length cDNAs or mRNAs that encompass an identifying sequence of contiguous nucleotides from any one of SEQ ID NOS: 1-6010.

[0027] The polynucleotides of the invention also include polynucleotides having sequence similarity or sequence identity. Nucleic acids having sequence similarity are detected by hybridization under low stringency conditions, for example, at 50° C. and 10×SSC (0.9 M saline/0.09 M sodium citrate) and remain bound when subjected to washing at 55° C. in 1×SSC. Sequence identity can be determined by hybridization under stringent conditions, for example, at 50° C. or higher and 0.1×SSC (9 mM saline/0.9 mM sodium citrate). Hybridization methods and conditions are well known in the art, see, e.g., U.S. Pat. No. 5,707,829. Nucleic acids that are substantially identical to the provided polynucleotide sequences, e.g. allelic variants, genetically altered versions of the gene, etc., bind to the provided polynucleotide sequences (SEQ ID NOS: 1-6010) under stringent hybridization conditions. By using probes, particularly labeled probes of DNA sequences, one can isolate homologous or related genes. The source of homologous genes:can be any species, e.g. primate species, particularly human; rodents, such as rats and mice; canines, felines, bovines, ovines, equines, yeast, nematodes, etc.

[0028] Preferably, hybridization is performed using at least 15 contiguous nucleotides (nt) of at least one of SEQ ID NOS:1-6010. That is, when at least 15 contiguous nt of one of the disclosed SEQ ID NOS. is used as a probe, the probe will preferentially hybridize with a nucleic acid comprising the complementary sequence, allowing the identification and retrieval of the nucleic acids that uniquely hybridize to the selected probe. Probes from more than one SEQ ID NO. can hybridize with the same nucleic acid if the cDNA from which they were derived corresponds to one mRNA. Probes of more than 15 nt can be used, e.g., probes of from about 18 nt to about 100 nt, but 15 nt represents sufficient sequence for unique identification.

[0029] The polynucleotides of the invention also include naturally occurring variants of the nucleotide sequences (e.g. degenerate variants, allelic variants, etc.). Variants of the polynucleotides of the invention are identified by hybridization of putative variants with nucleotide sequences disclosed herein, preferably by hybridization under stringent conditions. For example, by using appropriate wash conditions, variants of the polynucleotides of the invention can be identified where the allelic variant exhibits at most about 25-30% base pair (bp) mismatches relative to the selected polynucleotide probe. In general, allelic variants contain 15-25% bp mismatches, and can contain as little as even 5-15%, or 2-5%, or 1-2% bp mismatches, as well as a single bp mismatch.

[0030] The invention also encompasses homologs corresponding to the polynucleotides of SEQ ID NOS:1-6010, where the source of homologous genes can be any mammalian species, e.g., primate species, particularly human; rodents, such as rats; canines, felines, bovines, ovines, equines, yeast, nematodes, etc. Between mammalian species, e.g., human and mouse, homologs generally have substantial sequence similarity, e.g., at least 75% sequence identity, usually at least 90%, more usually at least 95% between nucleotide sequences. Sequence similarity is calculated based on a reference sequence, which may be a subset; of a larger sequence, such as a conserved motif, coding region, flanking region, etc. A reference sequence will usually be at least about 18 contiguous nt long, more usually at least about 30 nt long, and may extend to the complete sequence that is being compared. Algorithms for sequence analysis are known in the art, such as gapped BLAST, described in Altschul, et al. Nucleic Acids Res. (1997) 25:3389-3402.

[0031] In general, variants of the invention have a sequence identity greater than at least about 65%, preferably at least about 75%, more preferably at least about 85%, and can be greater than at least about 90% or more as determined by the Smith-Waterman homology search algorithm as implemented, in MPSRCH program (Oxford Molecular). For the purposes of this invention, a preferred method of calculating percent identity is the Smith-Waterman algorithm, using the following. Global DNA sequence identity must be greater than 65% as determined by the Smith-Waterman homology search algorithm as implemented in MPSRCH program (Oxford Molecular) using an affine gap search with the following search parameters gap open penalty, 12; and gap extension penalty, 1.

[0032] The subject nucleic acids can be cDNAs or genomic DNAs, as well as fragments thereof, particularly fragments that encode a biologically active gene product and/or are useful in the methods, disclosed herein (e.g., in diagnosis, as a unique identifier of a differentially expressed gene of interest, etc.). The term “cDNA” as used herein is intended to include all nucleic acids that share the arrangement of sequence elements found in native mature mRNA species, where sequence elements are exons and 3′ and 5′ non-coding regions. Normally mRNA species have contiguous exons, with the intervening introns, when present, being removed by nuclear RNA splicing, to create a continuous open reading frame encoding a polypeptide of the invention.

[0033] A genomic sequence of interest comprises the nucleic acid present between the initiation codon and the stop codon, as defined in the listed sequences, including all of the introns that are normally present in a native chromosome. It can further include the 3′ and 5′ untranslated regions found in the mature mRNA. It can further include specific transcriptional and translational regulatory sequences, such as promoters, enhancers, etc., including about 1 kb, but possibly more, of flanking genomic DNA at either the 5′ and 3′ end of the transcribed region. The genomic DNA can be isolated as a fragment of 100 kbp or smaller; and substantially free of flanking chromosomal sequence. The genomic DNA flanking the coding region, either 3′ and 5′, or internal regulatory sequences as sometimes found in introns, contains sequences required for proper tissue, stage-specific, or disease-state specific expression.

[0034] The nucleic acid compositions of the subject invention can encode all or a part of the subject polypeptides. Double or single stranded fragments can bc obtained from the DNA sequence by chemically synthesizing oligonucleotides in accordance with conventional methods, by restriction enzyme digestion, by PCR amplification, etc. Isolated polynucleotides and polynucleotide fragments of the invention comprise at least about 10, about 15, about 20, about 35, about 50, about 100, about 150 to about 200, about 250 to about 300, or about 350 contiguous nt selected from the polynucleotide sequences as shown in SEQ ID NOS:1-6010. For the most part, fragments will be of at least 15 nt, usually at least 18 nt or 25 nt, and up to at least about 50 contiguous nt in length or more. In a preferred embodiment, the polynucleotide molecules comprise a contiguous sequence of at least 12 nt selected from the group consisting of the polynucleotides shown in SEQ ID NOS: 1-6010.

[0035] Probes specific to the polynucleotides of the invention can be generated using the polynucleotide sequences disclosed in SEQ ID NOS: 1-6010. The probes are preferably at least about 12, 15, 16, 18, 20, 22, 24, or 25 nt fragment of a corresponding contiguous sequence or SEQ ID NOS:1-6010, and can be less than 2, 1, 0.5, 0.1, or 0.05 kb in length. The probes can be synthesized chemically or can be generated from longer polynucleotides using restriction enzymes. The probes can labeled, for example, with a radioactive, biotinylated, or fluorescent tag. Preferably, probes are designed based upon an identifying sequence of a polynucleotide of one of SEQ ID NOS:1-6010. More preferably, probes are designed based on a contiguous sequence of one of the subject polynucleotides that remain unmasked following application of a masking program for masking low complexity (e.g., XBLAST) to the sequence, i.e., one would select an unmasked region, as indicated by the polynucleotides outside the poly-n stretches of the masked sequence produced by the masking program.

[0036] The polynucleotides of the subject invention are isolated and obtained in substantial purity, generally as other than an intact chromosome. Usually, the polynucleotides, either as DNA or RNA, will be obtained substantially free of other naturally-occurring nucleic acid sequences, generally being at least about 50%, usually at least about 90% pure and are typically “recombinant,” e.g., flanked by one or more nucleotides with which it is not normally associated on a naturally occurring chromosome.

[0037] The polynucleotides of the invention can be provided as a linear molecule or within a circular molecule, and can be provided within autonomously replicating molecules (vectors) or within molecules without replication sequences. Expression of the polynucleotides can be regulated by their own or by other regulatory sequences known in the art. The polynucleotides of the invention can be introduced into suitable host cells using a variety of techniques available in the art, such as transferrin polycation-mediated DNA transfer, transfection with naked or encapsulated nucleic acids, liposome-mediated DNA transfer, intracellular transportation of DNA coated latex beads, protoplast fusion, viral infection, electroporation, gene gun, calcium phosphate-mediated transfection, and the like.

[0038] The subject nucleic acid compositions can be used to, for example, produce polypeptides, as probes for the detection of mRNA of the invention in biological samples (e.g., extracts of human cells) to generate additional copies of the polynucleotides, to generate ribozymes or antisense oligonucleotides, and as single stranded DNA probes or as triple-strand forming oligonucleotides. The probes described herein can be used to, for example, determine the presence or absence of the polynucleotide sequences as shown in SEQ ID NOS: 1-6010 or variants thereof in a sample. These and other uses are described in more detail below.

Use of Polynucleotides to Obtain Full-Length cDNA, Gene, and Promoter Region

[0039] In one embodiment, the polynucleotides are useful as starting materials to construct larger molecules. In one example, the polynucleotides of the invention are used to construct polynucleotides that encode a larger polypeptide (e.g., up to the full-length native polypeptide as well as fusion proteins comprising all or a portion of the native polypeptide) or may be used to produce haptens of the polypeptide (e.g., polypeptides useful to generate antibodies).

[0040] In one particular example, the polynucleotides of the invention are used to make or isolate cDNA molecules encoding all or portion of a naturally-occurring polypeptide. Full-length cDNA molecules comprising the disclosed polynucleotides are obtained as follows. A polynucleotide having a sequence of one of SEQ ID NOS:1-6010, or a portion thereof comprising at least 12, 15, 18, or 20 nt, is used as a hybridization probe to detect hybridizing members of a cDNA library using probe design methods, cloning methods, and clone selection techniques such as those described in U.S. Pat. No. 5,654,173. Libraries of cDNA are made from selected tissues, such as normal or tumor tissue, or from tissues of a mammal treated with, for example, a pharmaceutical agent. Preferably, the tissue is the same as the tissue from which the polynucleotides of the invention were isolated, as both the polynucleotides, described herein and the cDNA represent expressed genes. Most preferably, the cDNA library is made from the biological material described herein in the Examples. The choice of cell type for library construction can be made after the identity of the protein encoded by the gene corresponding to the polynucleotide of the invention is known. This will indicate which tissue and cell types are likely to express the related gene, and thus represent a suitable source for the mRNA for generating the cDNA. Where the provided polynucleotides are isolated from cDNA libraries, the libraries are prepared from mRNA of human colon cells, more preferably, human colon cancer cells, even more preferably, from a highly metastatic colon cell, Km12L4-A.

[0041] Techniques for producing and probing nucleic acid sequence libraries are described, for example, in Sambrook et al., Molecular Cloning: A Laboratory Manual, 2nd Ed., (1989) Cold Spring Harbor Press, Cold Spring Harbor, N.Y. The cDNA can be prepared by using primers based on polynucleotides comprising a sequence of SEQ ID NOS:1-6010. In one embodiment, the cDNA library can be made from only poly-adenylated mRNA. Thus, poly-T primers can be used to prepare cDNA from the mRNA.

[0042] Members of the library that are larger than the provided polynucleotides, and preferably that encompass the complete coding sequence of the native message, are obtained. In order to confirm that the entire cDNA has been obtained, RNA protection experiments are performed as follows. Hybridization of α-full-length cDNA to an mRNA will protect the RNA from RNase degradation. If, the cDNA is not full length then the portions of the mRNA that are not hybridized will be subject to RNase degradation. This is assayed, as is known in the art, by changes in electrophoretic mobility on polyacrylamide gels, or by detection of released monoribonucleotides. Sambrook et al., Molecular Cloning: A Laboratory Manual, 2nd Ed., (1989) Cold Spring Harbor Press, Cold Spring Harbor, N.Y. In order to obtain additional sequences 5′ to the end of a partial cDNA, 5′ RACE (PCR Protocols: A Guide to Methods and Applications, (1990) Academic Press, Inc.) can be performed.

[0043] Genomic DNA is isolated using the provided polynucleotides in a manner similar to the isolation of full-length cDNAs. Briefly, the provided polynucleotides, or portions thereof, are used as probes to libraries of genomic DNA. Preferably, the library is obtained from the cell type that was used to generate the polynucleotides of the invention, but this is not essential. Most preferably, the genomic DNA is obtained from the biological material described herein in the Examples. Such libraries can be in vectors suitable for carrying large segments of a genome, such as PI or YAC, as described in detail in Sambrook et al., supra, 9.4-9.30. In addition, genomic sequences can be isolated from human BAC libraries, which are commercially available from Research Genetics, Inc., Huntsville, Ala., USA, for example. In order to obtain additional 5′ or 3′ sequences; chromosome walking is performed, as described in Sambrook et al., such that adjacent and overlapping fragments of genomic DNA are isolated. These are mapped and pieced together, as is known in the art, using restriction digestion enzymes and DNA ligase.

[0044] Using the polynucleotide sequences of the invention, corresponding full-length genes can be isolated using both classical and PCR methods to construct and probe cDNA libraries. Using either method, Northern blots, preferably, are performed on a number of cell types to determine which cell, lines express the gene of interest at the highest level. Classical methods of constructing cDNA libraries are taught in Sambrook et al., supra. With these methods, cDNA can be produced from mRNA and inserted into viral or expression vectors. Typically, libraries of mRNA comprising poly(A) tails can be produced with poly(T) primers. Similarly, cDNA libraries can be produced using the instant sequences as primers.

[0045] PCR methods are used to amplify the members of a cDNA library that comprise the desired insert. In this case, the desired insert will contain sequence from the full length cDNA that corresponds to the instant polynucleotides. Such PCR methods include gene trapping and RACE methods. Gene trapping entails inserting a member of a cDNA library into a vector. The vector then is denatured to produce single stranded molecules. Next, a substrate-bound probe, such as a biotinylated oligo, is used to trap cDNA inserts of interest. Biotinylated probes can be linked to an avidin-bound solid substrate. PCR methods can be used to amplify the trapped cDNA. To trap sequences corresponding to the full length genes, the labeled probe sequence is based on the polynucleotide sequences of the invention. Random primers or primers specific to the library vector can be used to amplify the trapped cDNA. Such gene tapping techniques are described in Gruber et al., WO 95/04745 and Gruber et al., U.S. Pat. No. 5,500,356. Kits are commercially available to perform gene trapping experiments from for example, Life Technologies, Gaithersburg, Md., USA.

[0046] “Rapid amplification of cDNA ends,” or RACE, is a PCR method of amplifying cDNAs from a number of different RNAs. The cDNAs are ligated to an oligonucleotide linker, and amplified by PCR using two primers. One primer is based on sequence from the instant polynucleotides, for which full length sequence is desired, and a second primer comprises sequence that hybridizes to the oligonucleotide linker to amplify the cDNA A description of this method is reported in WO 97/19110. In preferred embodiments of RACE, a common primer is designed to anneal to an arbitrary adaptor sequence ligated to cDNA ends (Apte and Siebert, Biotechniques (1993) 15:890-893; Edwards et al., Nuc. Acids Res. (1991) 19:5227-5232). When a single gene-specific RACE primer is paired with the common primer, preferential amplification of sequences between the single gene specific primer and the common primer occurs. Commercial cDNA pools modified for use in RACE are available.

[0047] Another PCR-based method generates full-length cDNA library with anchored ends without needing specific knowledge of the cDNA sequence. The method uses lock-docking primers (I-VI), where one primer, poly TV (I-II) locks over the polyA tail of eukaryotic mRNA producing first strand synthesis and a second primer, polyA (IV-VI) locks onto the polyC tail added by terminal deoxynucleotidyl transferase (TdT)(see, e.g., WO 96/40998).

[0048] The promoter region of a gene generally is located 5′ to the initiation site for RNA polymerase II. Hundreds of promoter regions contain the “TATA” box, a sequence such as TATTA or TATAA, which is sensitive to mutations. The promoter region can be obtained by performing 5′ RACE using a primer from the coding region of the gene. Alternatively, the cDNA can be used as a probe for the genomic sequence, and the region 5′ to the coding region is identified by “walking up.” If the gene is highly expressed or differentially expressed, the promoter from the gene can be of use in a regulatory construct for a heterologous gene.

[0049] Once the full-length cDNA or gene is obtained, DNA encoding variants can be prepared by site-directed mutagenesis, described in detail in Sambrook et al., 15.3-15.63. The choice of codon or nucleotide to be replaced can be based on disclosure herein on optional changes in amino acids to achieve altered protein structure and/or function.

[0050] As an alternative method to obtaining DNA or RNA from a biological material, nucleic acid comprising nucleotides having the sequence of one or more polynucleotides of the invention can be synthesized, Thus, the invention encompasses nucleic acid molecules ranging in length from 15 nt (corresponding to at least 15 contiguous nt of one of SEQ ID NOS: 1-6010) up to a maximum length suitable for one or more biological manipulations, including replication and expression, of the nucleic acid molecule. The invention includes but is not limited to (a) nucleic acid having the size of a full gene and comprising at least one of SEQ ID NOS: 1-6010; (b) the nucleic acid of (a) also comprising at least one additional gene, operably linked to permit expression of a fusion protein; (c) an expression vector comprising (a) or (b); (d) a plasmid comprising (a) or (b); and (e) a recombinant viral particle comprising (a) or (b). Once provided with the polynucleotides disclosed herein, construction or preparation of (a)-(e) are well within the skill in the art.

[0051] The sequence of a nucleic acid comprising at least 15 contiguous nt of at least any one of SEQ ID NOS:1-6010, preferably the entire sequence of at least anyone of SEQ NOS:1-6010, is not limited and can be any sequence of A, T, G, and/or C (for DNA) and A, U, G, and/or C (for RNA) or modified bases thereof, including inosine and pseudouridine. The choice of sequence will depend on the desired function and can be dictated by coding regions desired, the intron-like regions desired, and the regulatory regions desired. Where the entire sequence of any one of SEQ ID NOS:1-6010 is within the nucleic acid, the nucleic acid obtained is referred to herein as a polynucleotide comprising the sequence of any one of SEQ ID NOS:1-6010.

Expression of Polypeptide Encoded by Full-Length cDNA or Full-Length Gene

[0052] The provided polynucleotides (e.g., a polynucleotide having a sequence of one of SEQ ID, NOS:1-6010), the corresponding cDNA, or the full-length gene is used to express a partial or complete gene product. Constructs of polynucleotides having sequences of SEQ ID NOS:1-6010 can also be generated synthetically. Alternatively, single-step assembly of a gene and entire plasmid from large numbers of oligodeoxyribonucleotides is described by, e.g., Stemmer et al., Gene (Amsterdam) (1995) 164(1):49-53. In this method, assembly PCR (the synthesis of long DNA sequences from large numbers of oligodeoxyribonucleotides (oligos)) is described. The method is derived from DNA shuffling (Stemmer, Nature (1994) 370:389-391), and does not rely on DNA ligase; but instead relies on DNA polymerase to build increasingly long DNA fragments during the assembly process.

[0053] Appropriate polynucleotide constructs are purified using standard recombinant DNA techniques, as described in, for example, Sambrook et al., Molecular Cloning: A Laboratory Manual, 2nd Ed., (1989) Cold Springs Harbor Press, Cold Spring Harbor, N.Y., and under current regulations described in United States Dept. of HHS, National Institute of Health (NIH) Guidelines for Recombinant DNA Research. The gee product encoded by a polynucleotide of the invention expressed in any expression system, including, for example, bacterial, yeast; insect, amphibian and mammalian systems. Vectors, host cells and methods for obtaining expression same are well known in the art. Suitable vectors and host cells are described in U.S. Pat. No. 5,654,173.

[0054] Polynucleotide molecule, comprising a polynucleotide sequence provided herein are generally propagated by placing the molecule in a vector. Viral and non-viral vectors are used, including plasmids. The choice of plasmid will depend on the type of cell in which propagation is desired and the purpose of propagation. Certain vectors are useful for amplifying and making large amounts of the desired DNA sequence. Other vectors are suitable for expression in cells in culture. Still other vectors are suitable for transfer and expression in cells in a whole animal or person. The choice of appropriate vector is well within the skill of the art. Many such vectors are available commercially. Methods for preparation of vectors comprising a desired sequence are well known in the art.

[0055] The polynucleotides set forth in SEQ ID NOS: 1-6010 or their corresponding full-length polynucleotides are linked to regulator sequences as appropriate to obtain the desired expression properties. These can include promoters (attached either at the 5′ end of the sense strand or at the 3′ end of the antisense strand) enhancers, terminators, operators, repressors, and inducers. The promoters can be regulated or constitutive. In some situations it may be desirable to use conditionally active promotes such as tissue-specific or developmental stage-specific promoters. Theses are linked to the desired nucleotide sequence using the techniques described above for linkage to vectors. Any techniques known in the art can be used.

[0056] When any of the above host cells, or other appropriate host cells or organisms, are used to replicates and/or express the polynucleotides or nucleic, acids of the invention, the resulting replicated nucleic acid, RNA, expressed protein or polypeptide, is within the scope of the invention as a product of the host cell or organism. The product is recovered by any appropriate means known in the art.

[0057] Once the gene corresponding to a selected polynucleotide is identified expression can be regulated in the cell to which the gene is native. For example, an endogenous gene of a cell can be, regulated by an exogenous regulatory sequence as disclosed in U.S. Pat. No. 5,641,670.

Identification of Functional and Structural Motifs

[0058] Translations of the nucleotide sequence of the provided polynucleotides, cDNAs or full genes can be aligned with individual known sequences. Similarity with individual sequences can be used to determine the activity of the polypeptides encoded by the polynucleotides of the invention. Also sequences exhibiting similarity with more than one individual sequence can exhibit activities that are characteristic of either or both individual sequences.

[0059] The full length sequences and fragments of the polynucleotide sequences of the nearest neighbors can be used as probes and primers to identify and isolate the full length sequence corresponding to provided polynucleotides. The nearest neighbors can indicate a tissue or cell type to be used to construct a library for the full-length sequences corresponding to the provided polynucleotides.

[0060] Typically, a selected polynucleotide is translated in all six frames to determine the best alignment with the individual sequences. The sequences disclosed herein in the Sequence Listing are in a 5′ to 3′ orientation and translation in three frames can be sufficient (with a few specific exceptions as described in the Examples). These amino acid sequences are referred to, generally, as query sequences, which will be aligned with the individual sequences. Databases with individual sequences are described in “Computer Methods for Macromolecular Sequence Analysis” Methods in Enzymology (1996) 266, Doolittle; Academic Press, Inc., a division of Harcourt Brace & Co., San Diego, Calif., USA. Databases include GenBank, EMBL, and DNA Database of Japan (DDBJ).

[0061] Query and individual sequences' can be aligned using the methods and computer programs described above, and include BLAST 2.0, available over the world wide web at a site supported by the National Center for Biotechnology Information, which is supported by the National Library of Medicine and the National Institutes of Health See also Altschul, et al. Nucleic Acids Res. (1997) 25:3389-3402. Another alignment algorithm is Fasta, available in the Genetics Computing Group (GCG) package, Madison, Wis., USA, a wholly owned subsidiary of Oxford Molecular Group, Inc. Other techniques for alignment are described in Doolittle, supra. Preferably, an alignment a program that permits gaps in the sequence is utilized to align the sequences. The Smith-Waterman is one type of algorithm that permits gaps in sequence alignments. See Meth. Mol. Biol. (1997) 70: 173-187. Also, the GAP program using the Needleman and Wunsch alignment method can be utilized to align sequences. An alternative search strategy uses MPSRCH software, which runs on a MASPAR computer. MPSRCH uses a Smith-Waterman algorithm to score sequences on a massively parallel computer. This approach improves ability to identify sequences that are distantly related matches, and is especially tolerant of small gaps and nucleotide sequence errors. Amino acid sequences encoded by the provided polynucleotides can be used to search both protein and DNA databases. Incorporated; herein by reference are all sequences that have been made public as of the filing date of this application by any of the DNA or protein sequence databases, including the patent databases (e.g., GeneSeq). Also incorporated by reference are those sequences that have been submitted to these databases as of the filing date of the present application but not made public until after the filing date of the present application.

[0062] Results of individual and query sequence alignments can be divided into three categories: high similarity, weak similarity, and no similarity Individual alignment results ranging from high similarity to weak similarity provide a basis for determining polypeptide activity and/or structure. Parameters for categorizing individual results include: percentage of the alignment region length where the strongest alignment is found, percent sequence identity, and p value. The percentage of the alignment region length is calculated by counting the number of residues of the individual sequence found in the region of strongest alignment, e.g., contiguous region of the individual sequence that contains the greatest number of residues that are identical to the residues of the corresponding region of the aligned query sequence. This number is divided by the total residue length of the query sequence to calculate a percentage. For example, a query sequence of 20 amino acid residues might be aligned with a 20 amino acid region of an individual sequence. The individual sequence might be identical to amino acid residues 5, 9-15, and 17-19 of the query sequence. The region of strongest alignment is thus the region stretching from residue 9-19, an 11 amino acid stretch. The percentage of the alignment region length is 11 (length of the region of strongest alignment) divided by (query sequence length) 20 or 55%.

[0063] Percent sequence identity is calculated by counting the number of amino acid matches between the query and individual sequence and dividing total number of matches by the number of residues of the individual sequences found in the region of strongest alignment. Thus, the percent identity in the example above would be 10 matches divided by 11 amino acids, or approximately, 90.9%

[0064] P value is the probability that the alignment was produced by chance. For a single alignment, the p value can be calculated according to Karlin et al., Proc. Natl. Acad. Sci. (1990) 87:2264 and Karlin et al., Proc. Natl. Acad. Sci. (1.993) 90. The p value of multiple alignments using the same query sequence can be calculated using an heuristic approach described in Altschul et al., Nat. Genet. (1994) 6:119. Alignment programs such as BLAST program can calculate the p value. See also Altschul et al., Nucleic Acids Res. (1997) 25:3389-3402.

[0065] Another factor to consider for determining identity or similarity is the location of the similarity or identity. Strong local alignment cant indicate similarity even if the length of alignment is short. Sequence identity scattered throughout the length of the query sequence also can indicate a similarity between the query and profile sequences. The boundaries of the region where the sequences align can be determined according to Doolittle supra BLAST 2.0 (see, e.g., Altschul, et al. Nucleic Acids Res., (1997) 25:3389-3402) or FAST programs; or by determining the area where sequence identity is highest.

[0066] High Similarity. In general, in alignment results considered to be of high similarity, the percent of the alignment region length is typically at least about 55% of total length query sequence, more typically, at least about 58% even more typically; at least about 60% of the total residue length of the query sequence. Usually, percent length of the alignment region can be as much as about 62%; more usually, as much as about 64%; even more usually, as much as about 66%. Further, for high similarity, the region of alignment, typically, exhibits at least about 75% of sequence identity; more typically, at least about 78%; even more typically; at least about 80% sequence identity. Usually, percent sequence identity can be as much as about 82%; more usually, as much as about 84%; even more usually, as much as about 86%.

[0067] The p value is used in conjunction with these methods. If high similarity is found, the query sequence is considered to have high similarity with a profile sequence when the p value is less than or equal to about 10e-2; more usually; less than or equal to about 10e-3; even more usually; less than or equal to about 1e-4. More typically, the p value is no more than about 10e-5; more typically; no more than or equal to about 10e-10; even more typically, no more than or equal to about 10e-15 for the query sequence to be considered high similarity.

[0068] Weak Similarity. In general, where alignment results considered to be of weak similarity, there is no minimum percent length of the alignment region nor minimum length of alignment. A better showing of weak similarity is considered when the region of alignment is, typically, at least about 15 amino acid residues in length; more typically, at least about 20; even more typically, at least about 25 amino acid residues in length. Usually, length of the alignment region can be as much as about 30 amino acid residues, more usually, as much as about 40; even more usually, as much as about 60 amino acid residues. Further, for weak similarity, the region of alignment, typically, exhibits at least about 35% of sequence identity; more typically, at least about 40%; even more typically, at least about 45% sequence identity. Usually, percent sequence identity can be as much as about 50%; more profile sequence when the p value is usually less than or equal to about 10e-2; more usually, less than or equal to about 10e-3; even more usually; less than or equal to about 10e-4. More typically, the p value is no more than about 10e-5; more usually; no more than or equal to about 10e-10; even more usually, no more than or equal to about 10e-15 for the query sequence to be considered weak similarity.

[0069] Similarity Determined by Sequence Identity Alone. Sequence identity alone can be used to determine similarity of a query sequence to an individual sequence and can indicate the activity of the sequence. Such an alignment, preferably, permits gaps to align sequences. Typically, the query sequence is related to the profile sequence if the sequence identity over the entire query sequence is at least about 15%; more typically, at least about 20%; even more typically, at least about 25%; even more typically, at least about 50%. Sequence identity alone as a measure of similarity is most useful when the query sequence is usually, at least 80 residues in length; more usually, at least 90 residues in length; even more usually, at least 95 amino acid residues in length. More typically, similarity can be concluded based on sequence identity alone when the query sequence is preferably 100 residues in length; more preferably, 120 residues in length; even more preferably, 150 amino acid residues in length.

[0070] Alignments with Profile and Multi 1e Aligned Sequences. Translations of the provided polynucleotides can be aligned with amino acid profiles that define either protein families or common motifs. Also, translations of the provided polynucleotides can be aligned to multiple sequence alignments (MSA) comprising the polypeptide sequences of members of protein families or motifs. Similarity or identity with profile sequences or MSAs can be used to determine the activity of the gene products (e.g., polypeptides) encoded by the provided polynucleotides or corresponding cDNA or genes. For example, sequences that show an identity or similarity with a chemokine profile or MSA can exhibit chemokine activities.

[0071] Profiles can be designed manually by (1) creating an MSA, which is an alignment of the amino acid sequence of members that belong to the family and (2) constructing a statistical representation of the alignment. Such methods are described, for example, in Birney et al., Nucl. Acid Res. (1996) 24(14): 2730-2739. MSAs of some protein families and motifs are publicly available. For example the Genome Sequencing Center at the Washington University School of Medicine provides a web set (Pfam) which provides MSAs of 547 different families and motifs. These MSAs are described also in Sonnhammer et al., Proteins (1997) 28: 405-420. Other sources over the world wide web include the site supported by the European Molecular Biology Laboratories in Heidelberg, Germany. A brief description of these MSAs is reported in Pascarella et al., Prot. Eng. (1996) 9(3):249-251. Techniques for building profiles from MSAs are described in Sonnhammer et al., supra; Birney et al., supra; and “Computer Methods for Macromolecular Sequence Analysis,” Methods in Enzymology (1996) 266, Doolittle, Academic Press, Inc, San Diego, Calif. USA.

[0072] Similarity between a query sequence and a protein family or motif can be determined by (a) comparing the query sequence against the profile and/or (b) aligning the query sequence with the members of the family or motif. Typically, a program such as Searchwise is used to compare the query sequence to the statistical representation of the multiple alignment, also known as a profile (see Birney et al., supra). Other techniques to compare the sequence and profile are described in Sonnhammer et al., supra and Doolittle, supra.

[0073] Next, methods described by Feng et al., J. Mol. Evol. (1987) 25:351 and Higgins et al., CABIOS (1989) 5:151 can be used align the query sequence with the members of a family or motif also known as a MSA. Sequence alignments can be generated using any of a variety of software tools. Examples include PileUp, which creates a multiple sequence alignment, and is described in Feng et al., J. Mol. Evol. (1987) 25:351. Another method, GAP, uses the alignment method of Needleman et al., J. Mol. Biol. (1970) 48:43. GAP is best suited for global alignment of sequences. A third method, BestFit, functions by inserting gaps to maximize the number of matches using the local homology algorithm of Smith et al., Adv. Appl. Math. (1981) 2:482. In general, the following factors are used to determine if a similarity between a query sequence and a profile or MSA exists: (1) number of conserved residues found in the query sequence, (2) percentage of conserved residues found in the query sequence, (3) number of frame shifts, and (4) spacing between conserved residues.

[0074] Some alignment programs that both translate and align sequences can make any number of frameshifts when translating the nucleotide sequence to produce the best alignment. The fewer frameshifts needed to produce an alignment, the stronger the similarity or identity between the query and profile or MSAs. For example, a weal, similarity resulting from no frameshiits can be a better indication of activity or structure of a query sequence, than a strong similarity resulting from two frameshifts. Preferably, three or fewer frameshifts are found in an alignment; more preferably two or fewer frameshifts; even more preferably, one or fewer frameshifts; even more preferably, no frameshifts are found in an alignment of query and profile or MSAs.

[0075] Conserved residues are those amino acids found at a particular position in all or some of the family or motif members. Alternatively, a position is considered conserved if only a certain class of amino acids is found in a particular position in all or some of the family members. For example, the N-terminal position can contain a positively charged amino, acid, such as lysine, arginine, or histidine.

[0076] Typically, a residue of a polypeptide is conserved when a class of amino acids or a single amino acid is found at a particular position in at least about 40% of all class members; more typically at least about 50%; even more typically, at least about 60% of the members. Usually, a residue is conserved when a class or single amino acid is found in at least about 70% of the members of a family or motif; more usually, at least about 80%; even more usually, at least about 95%.

[0077] A residue is considered conserved when three unrelated amino acids are found at a particular position in some or all of the members; more usually, two unrelated amino acids. These residues are conserved when the unrelated amino acids are found at particular positions in at least about 40% of all class member; more typically, at least about 50%, even more typically, at least about 60% of the members. Usually, a residue is conserved when a class or single amino acid is found in at least about 70% of the members of a family or motif, more usually, at least about 80%; even more usually, at least about 90%; even more usually, at least about 95%.

[0078] A query sequence has similarity to a profile or MSA when, the query sequence comprises at least about 25% of the conserved residues of the profile or MSA; more usually, at least about 30%; even more usually; at least about 40%. Typically the query sequence has a stronger similarity to a profile sequence or MSA when the query sequence comprises at least about 45% of the conserved residues of the profile or MS more typically, at least about 50%; even more typically, at least about 55%.

[0079] Identification of Secreted & Membrane-Bound Polypeptides. Both secreted and membrane-bound polypeptides of the present invention are of particular interest. For example, levels of secreted polypeptides can be assayed in body fluids that are convenient, such as blood, plasma, serum, and other body fluids such as urine, prostatic fluid and semen. Membrane-bound polypeptides are useful for constructing vaccine antigens or inducing an immune response. Such antigens would comprise all or part of the extracellular region of the membrane-bound polypeptides. Because both secreted and membrane-bound polypeptides comprise a fragment of contiguous hydrophobic amino acids, hydrophobicity predicting algorithms can be used to identify such polypeptides.

[0080] A signal sequence is usually encoded by both secreted and membrane-bound polypeptide genes to direct a polypeptide to the surface of the cell. The signal sequence usually comprises a stretch of hydrophobic residues. Such signal sequences can fold into helical structures. Membrane-bound polypeptides typically comprise at least one transmembrane region that possesses a stretch of hydrophobic amino acids that can transverse the membrane. Some transmembrane regions also exhibit a helical structure. Hydrophobic fragment within a polypeptide c an be identified by using computer algorithms. Such algorithms include Hopp & Woods, Proc. Natl. Acad. Sci. USA (1981) 78:3824-3828; Kyte & Doolittle, J. Mol. Biol. (1982) 157: 105-132; and RAOAR algorithm, Degli Esposti et al., Eur. J. Biochem. (1990) 19: 207-219.

[0081] Another method of identifying secreted and membrane-bound polypeptides is to translate the polynucleotides of the invention in all six frames and determine if at least 8 contiguous hydrophobic amino acids are present. Those translated polypeptides with at least 8; more typically, 10; even more typically, 12 contiguous hydrophobic amino acids are considered to be either a putative secreted or membrane bound polypeptide. Hydrophobic amino acids include alanine, glycine, histidine, isoleucine, leucine, lysine, methionine, phenylalanine, proline, threonine, tryptophan, tyrosine, and valine

Identification of the Function of an Expression Product of a Full-Length Gene

[0082] Ribozymes, antisense constructs, and dominant negative mutants can be used to determine function of the expression product of a gene corresponding to a polynucleotide provided herein. These methods and compositions are particularly useful where the provided novel polynucleotide exhibits no significant or substantial homology to a sequence encoding a gene known function. Antisense molecules and ribozymes can be constructed from synthetic polynucleotides. Typically, the phosphoramidite method of oligonucleotide synthesis is used. See Beaucage et al., Tet. Lett. (1981) 22:1859 and U.S. Pat. No. 4,668,777. Automated devices for synthesis are available to create oligonucleotides using this chemistry. Examples of such devices include Biosearch 8600, Models 392 and 394 by Applied Biosystems, a division of Perkin-Elmer Corp., Foster City, Calif., USA; and Expedite by Perceptive Biosystems, Framingham, Mass., USA. Synthetic RNA, phosphate analog oligonucleotides, and chemically derivatized oligonucleotides can also be produced, and can be covalently attached to other molecules. RNA oligonucleotides can be synthesized, for example, using RNA phosphoramidites. This method can be performed on an automated synthesizer, such as Applied Biosystems, Models 392 and 394, Foster City, Calif., USA.

[0083] Phosphorothioate oligonucleotides can also be synthesized for antisense construction. A sulfurizing reagent, such as tetraethylthiruam disulfide (TETD) in acetonitrile can be used to convert the internucleotide cyanoethyl phosphite to the phosphorothioate triester within 15 minutes at room temperature. TETD replaces the iodine reagent, while all other reagents used for standard phosphoramidite chemistry remain the same. Such a synthesis method can be automated using Models 392 and 394 by Applied Biosystems, for example.

[0084] Oligonucleotides of up to 200 nt can be synthesized, more typically, 100 nt more typically 50 nt; even more typically, 30 to 40 nt. These synthetic fragments can be annealed and ligated together to construct larger fragments. See, for example, Sambrook et al., supra. Trans-cleaving catalytic RNAs (ribozymes) are RNA molecules possessing endoribonuclease activity. Ribozymes are specifically designed for a particular target, and the target message must contain a specific nucleotide sequence. They are engineered to cleave any RNA species site-specifically in the background of cellular RNA. The cleavage event renders the mRNA unstable and prevents protein expression. Importantly, ribozymes can be used to inhibit expression of a gene of unknown function for the purpose of determining its function in an in vitro or in vivo context, by detecting the phenotypic effect. One commonly used ribozyme motif is the hammerhead, for which the substrate sequence requirements are minimal. Design of the hammerhead ribozyme, as well as therapeutic uses of ribozymes, are disclosed in Usman et al., Current Opin. Struct. Biol. (1996) 6:527. Methods for production of ribozymes, including hairpin structure ribozyme fragments, methods of increasing ribozyme specificity and the like are known in the art.

[0085] The hybridizing region of the ribozyme can be modified or can be prepares as a branched structure as descried in Horn and Urdea, Nucleic Acids Res. (1989) 17:699. The basic structure of the ribozymes can also be chemically altered in ways familiar to those skilled in the art, and chemical synthesized ribozymes can be administered as synthetic oligonucleotide derivatives modified by monomeric units. In a therapeutic context, liposome mediated delivery of ribozymes improves cellular uptake, as described in Birikh et al., Eur. J. Biochem. 1997) 245:1.

[0086] Antisense nucleic acids are designed to specifically bind to RNA, resulting in the formation of RNA-DNA or RNA-RNA hybrids, with an arrest of DNA replication, reverse transcription or messenger RNA translation. Antisense polynucleotides based on a selected polynucleotide sequence can interfere with expression of the corresponding gene. Antisense polynucleotides are typically generated within the cell by expression from antisense constructs that contain the antisense strand as the transcribed strand. Antisense polynucleotides based on the disclosed polynucleotides will bind and/or interfered with the translation of mRNA comprising a sequence complementary to the antisense polynucleotide. The expression products of control cells and cells treated with the antisense construct are compared to detect the protein product of the gene corresponding to the polynucleotide upon which the antisense construct is based. The protein is isolated and identified using routine biochemical methods.

[0087] Given, the extensive background literature and clinical experience in antisense therapy, one skilled in the art can use selected polynucleotides of the invention as additional potential therapeutics. The choice of polynucleotide can be narrowed by first testing them for binding to a “hot spot” regions of the genome of cancerous cells. If a polynucleotide is identified as binding to a “hot spot,” testing the polynucleotide as antisense compound in the corresponding cancer cells is warranted.

[0088] As an alternative method for identifying function of the gene corresponding to a polynucleotide disclosed herein, dominant negative mutations are readily generated for corresponding proteins that are active as homomultimers. A mutant polyeptide will interact with wild-type polypeptides (made from the other allele) and form a non-functional multimer. Thus, a mutation is in a substrate-binding domain, a catalytic domain, or a cellular localization domain. Preferably, the mutant polypeptide will be overproduced. Point mutations are made that have such an effect. In addition, fusion, of different polypeptides of various lengths to the terminus of a protein can yield dominant negative mutants. General strategies are available for making dominant negative mutants (see e.g., Herskowitz, Nature (1987) 329:219). Such techniques can be used to create loss of function mutations, which are useful for determining protein function.

Polypeptides and Variants Thereof

[0089] The polypeptides of the invention include those encoded by the disclosed polynucleotides, as well as nucleic acids that, by virtue of the degeneracy of the genetic code, are not identical in sequence to the disclosed polynucleotides. Thus, the invention includes within its scope a polypeptide encoded by a polynucleotide having the sequence of any one of SEQ ID NOS:1-6010 or a variant thereof.

[0090] In general, the term “polypeptide” as used herein refers to both the full length polypeptide encoded by the recited polynucleotide, the polypeptide encoded by the gene represented by the recited polynucleotide, as well as portions or fragments thereof. “Polypeptide” also includes variants of the naturally occurring proteins, where such variants are homologous or substantially similar to the naturally occurring protein, and can be of an origin of the same or different species as the naturally occurring protein (e.g., human, murine or some other species that naturally expresses the recited polypeptide, usually a mammalian species). In general, variant polypeptides have a sequence that has at least about 80%, usually at least about 90%, and more usually at least about 98% sequence identity with a differentially expressed polypeptide of the invention, as measured by BLAST 2.0 using the parameters described above. The variant polypeptides can be naturally or non-naturally glycosylated, i.e., the polypeptide has a glycosylation pattern that differs from the glycosylation pattern found in the corresponding naturally occurring protein.

[0091] The invention also encompasses homologs of the disclosed polypeptides (or fragments thereof) where the homologs are isolated from other species, i.e. other animal or plant species, where such homologs, usually mammalian species, e.g., rodents, such as mice, rats; domestic animals, e.g., horse, cow, dog, cat, and humans. By “homolog” is meant a polypeptide having at least about 35%, usually at least about 40% and more usually at least about 60% amino acid sequence identity to a particular differentially expressed protein as identified above, where sequence identity is determined using the BLAST 2.0 algorithm, with the parameters described supra.

[0092] In general, the polypeptides of the subject invention are provided in a non-naturally occurring environment, e.g. are separated from their naturally occurring environment. In certain embodiments, the subject protein is present in a composition that is enriched for the protein as compared to a control. As such, purified polypeptide is provided, where by purified is meant that the protein is present in a composition that is substantially free of non-differentially expressed polypeptides, where by substantially free is meant that less than 90%, usually less than 60% and more usually less than 50% of the composition is made up of non-differentially expressed polypeptides.

[0093] Also within the scope of the invention are variants; variants of polypeptides include mutants, fragments, and fusions. Mutants can include amino acid substitutions, additions or deletions. The amino acid substitutions can be conservative amino acid substitutions or substitutions to eliminate non-essential amino acids, such as to alter a glycosylation site, a phosphorylation site or an acetylation site or to minimize misfolding by substitution or deletion of one or more cysteine residues that are not necessary for function. Conservative amino acid substitutions are those that preserve the general charge, hydrophobicity/hydrophilicity, and/or steric bulk of the amino acid substituted. Variants can be designed so as to retain or have enhanced biological activity of a particular region of the protein (e.g., a functional domain and/or, where the polypeptide is a member of a protein family, a region associated with a consensus sequence). Selection of amino acid alterations for production of variants can be based upon accessibility (interior vs. exterior) of the amino acid (see, e.g., Go et al, Int. J. Peptide Protein Res. (1980) 15:211), the thermostability of the variant polypeptide (see, e.g., Querol et al., Prot. Eng. (1996) 9:265), desired glycosylation sites (see e.g., Olsen and Thomsen, J. Gen. Microbiol. (1991) 137:579), desired disulfide bridges (see, e.g., Clarke et al., Biochemistry (1993) 32:4322; and Wakarchuk et al., Protein Eng. (1994) 7:1379), desired metal binding sites (see, e.g., Toma et al., Biochemistry (1991) 30:97 and Haezerbrouck et al., Protein Eng. (11993) 6:643), and desired substitutions within proline lops (see, e.g., Masul et al., Appl. Env. Microbiol. (1994) 60:3579). Cysteine-depleted muteins can be produced as disclosed in U.S. Pat. No. 4,959,314.

[0094] Variants also include fragments of the polypeptides disclosed herein, particularly haptens, biologically active fragments, and/corresponding to functional domains. Fragments of interest will typically be at least about 10 aa to at least about 15 aa in length, usually at least about 50 aa in length, and can be as long as 300 aa in length or longer, but will usually not exceed about 1000 aa in length where the fragment will have a stretch of amino acids that is identical to a polypeptide encoded by a polyucleotide having a sequence of any SEQ ID NOS: 1-6010, or a homolog thereof. The protein variants described herein are encoded by polynucleotides that are within the scope of the invention. The genetic code can be used to select the appropriate codons to construct the corresponding variants.

Computer-Related Embodiments

[0095] In general, a library of polynucleotides is a collection of sequence information, which information is provided in either biochemical form (e.g., as a collection of polynucleotide molecules), or in electronic form (e.g., as a collection of polynucleotide sequences stored in a computer-readable form, as in a computer system and/or as part of a computer program). The sequence information of the polynucleotides can be used in a variety of ways, e.g., as a resource for gene discovery, as a representation of sequences expressed in a selected cell type (e.g., cell type markers), and/or as markers of a given disease or disease state. In general, a disease marker is a representation of a gene product that is present in all cells, affected by disease either at an increased or decreased level relative to a normal cell (e.g. a cell of the same or similar type that is not substantially affected by disease). For example, a polynucleotide sequence in a library can be, a polynucleotide that represents an mRNA, polypeptide, or other gene product encoded by the polynucleotide, that is either overexpressed or underexpressed in a breast ductal cell affected by cancer relative to a i.e., substantially free) breast cell.

[0096] The nucleotide sequence information of the library can be embodied in any suitable form, e.g., electronic or biochemical forms. For example, a library of sequence information embodied in electronic form comprises an accessible computer data file (or, in biochemical form, a collection of nucleic acid molecules) that contains the representative nucleotide sequences of genes that are differentially expressed (e.g., overexpressed or underexpressed) as between for example, i) a cancerous cell and a normal cell; ii) c cancerous cell and a dysplastic cell, iii) a cancerous cell and a cell affected by a disease or condition other than cancer; iv) a metastatic cancerous cell and a normal cell and/or non-metastatic cancerous cell; v) a malignant cancerous cell and a non-malignant cancerous cell (or a normal cell) and/or vi) a dysplastic cell relative to a normal cell. Other combinations and comparisons of cells affected by various diseases or stages of disease will be readily apparent to the ordinarily skilled artisan. Biochemical embodiments of the library include a collection of nucleic acids that have the sequences of the genes in the library, where the nucleic acids can correspond to the entire gene in the library or to a fragment thereof, as described in greater detail below.

[0097] The polynucleotide libraries of the subject invention generally comprise sequence information of a plurality of polynucleotide sequences, where at least one of the polynucleotides has a sequence of any of SEQ ID NOS:1-6010. By plurality is meant at least 2, usually at least 3 and can include up to all of SEQ ID NOS:1-6010. The length and number of polynucleotides in the library will vary with the nature of the library, e.g., if the library is an oligonucleotide array, a cDNA array, computer database of the sequence information, etc.

[0098] Where the library is an electronic library, the nucleic acid sequence information can be present in a variety of media. “Media” refers to a manufacture, other than an isolated nucleic acid molecule, that contains the sequence information of the present invention. Such a manufacture provides the genome sequence or a subset thereof in a form that can be examined by means not directly applicable to the sequence as it exists in a nucleic acid. For example, the nucleotide sequence of the present invention, e.g. the nucleic acid sequences of any of the polynucleotides of SEQ ID NOS:1-6010, can be recorded on computer readable media, e.g. any medium that can be read and accessed directly by a computer. Such media include, but are not limited to: magnetic storage media, such as a floppy disc, a hard disc storage medium, and a magnetic tape; optical storage media such as CD-ROM; electrical storage media such as RAM and ROM; and hybrids of these categories such as magnetic/optical storage media. One of skill in the art can readily appreciate how any of the presently known computer readable mediums can be used to create a manufacture comprising a recording of the present sequence information. “Recorded” refers to a process for storing information on computer readable medium, using any such methods as known in the art. Any convenient data storage structure can be chosen, based on the means used to access the store d information. A variety of data processor programs and formats can be used for storage, e.g. word processing text file, database format, etc. In addition to the sequence information, electronic versions of the libraries of the invention can be provided in conjunction or connection with other computer-readable information and/or other types of computer-readable files (e.g., searchable files, executable files, etc, including, but not limited to, for example, search program software, etc.).

[0099] By providing the nucleotide sequence in computer readable firm, the information can be accessed for a variety of purposes. Computer software to access sequence information is publicly available. For example, the gapped BLAST (Altschul et al. Nucleic Acids Res. (1997) 25:3389-3402) and BLAZED (Brutlag et al. Comp. Chem. (1993) 17:203) search algorithms on a Sybase system can be used to identify open reading frames (ORFs) within the genome that contain homology to ORFs from other organisms.

[0100] As used herein, “a computer-based system” refers to the hardware means, software means, and data storage means used to analyze the nucleotide sequence information of the present invention. The minimum hardware of the computer-based systems of the present invention comprises a central processing unit (CPU), input means, output means, and data storage means. A skilled artisan can readily appreciate that any one of the currently available computer-based system are suitable for use in the present invention. The data storage means can comprise any manufacture comprising a recording of the present sequence information as described above, or a memory access means that can access such a manufacture.

[0101] “Search means” refers to one or more programs implemented on the computer-based system to compare a target sequence or target structural motif, or expression levels of a polynucleotide in a sample, with the stored sequence information. Search means can be used to identify fragments or regions of the genome that match a particular target sequence or target motifs A variety of known algorithms are publicly known and commercially available, e.g. MacPattern (EMBL), BLASTN and BLASTX (NCBI). A “target sequence” can be any polynucleotide or amino acid sequence of six or more contiguous nucleotides or two or more amino acids, preferably from about 10 to 100 amino acids or from about 30 to 300 nt. A variety of comparing means can be used to accomplish comparison of sequence information from a sample (e.g., to analyze target sequences, target motifs, or relative expression levels) with the data storage means. A skilled artisan can readily recognize that any one of the publicly available homology search programs can be used as the search means for the computer based systems of the present invention to accomplish comparison of target sequences and motifs. Computer programs to analyze expression levels in a sample and in controls are also known in the art.

[0102] A “target structural motif,” “target motif,” refers to any rationally selected sequence or combination of sequences in which the sequence(s) are chosen based on a three-dimensional configuration that is formed upon the folding of the target motif, or on consensus sequences of regulatory or active sites. There are a variety of target motifs known in the art. Protein target motifs include, but are not limited to, enzyme active sites and signal sequences. Nucleic acid target motifs include, but are not limited to, hairpin structures, promoter sequences and other expression elements such as binding sites for transcription factors.

[0103] A variety of structural formats for the input and output means can be used to input and output the information in the computer-based systems of the present invention. One format for an output means ranks the relative expression levels of different polynucleotides. Such presentation provides a skilled artisan with a ranking of relative expression levels to determine a gene expression profile.

[0104] As discussed above, the “library” of the invention also encompasses biochemical libraries of the polynucleotides of SEQ ID NOS: 1-6010, e.g., collections of nucleic acids representing the provided polynucleotides. The biochemical libraries can take a variety of forms, e.g., a solution of cDNAs, a pattern of probe nucleic acids stably associated with a surface of a solid support (i.e., an array) and the like. Of particular interest are nucleic acid arrays in which one or more of SEQ ID NOS: 1-6010 is represented on the array. By array is meant a an article of manufacture that has at least a substrate with at least two distinct nucleic acid targets on one of its surfaces, where the number of distinct nucleic acids can be considerably higher, typically being at least 10, usually at least 20, and often at least 25 distinct nucleic acid molecules. A variety of different array formats have been developed and are known to those of skill in the art. The arrays of the subject invention find use in a variety of applications, including gene expression analysis, drug screening, mutation analysis and the like, as disclosed in the above-listed exemplary patent documents.

[0105] In addition to the above nucleic acid libraries, analogous libraries of polypeptides are also provided, where the polypeptides of the library will represent at least a portion of the polypeptides encoded by a gene corresponding to one or more of SEQ ID NOS 1′-6010.

Utilities

[0106] The polynucleotides of the invention are useful in a variety of applications. Exemplary, utilities of the polynucleotides of the invention are described below.

[0107] Construction of Larger Molecules: Recombinant DNAs and Nucleic Acid Multimers. In one embodiment of particular interest the polyucleotides described herein as, useful as the building blocks for larger molecules. In one example, the polynucleotide is a combonent of a larger cDNA molecule which in turn can, be adapted for expression in a host cell (e.g., a bacterial or eukaryotic (e.g. yeast or mammalian) host cell). The cDNA can include, in addition to the polypeptide encoded by the starting material polynucleotide (i.e., a polynucleotide described herein), an amino acid sequence that is heterologous to the polypeptide encoded by the polynucleotide described herein (e.g. as in a sequence encoding a fusion protein. In some embodiments, the polynucleotides described herein is used as starting; material polynucleotide for synthesizing all or a portion of the gene to which the described polynucleotide corresponds. For example, a DNA molecule encoding a full-length human polypeptide can be constructed using a polynucleotide described herein as starting material.

[0108] In another embodiment, the polynucleotides of the invention are used in nucleic acid multimers Nucleic acid multimers can be linear or branched polymers of the same repeating single-stranded oligonucleotide unit or different single-stranded oligonucleotide-units. Where the molecules are branched, the multimers are generally described as either “fork” or “comb” structures. The oligonucleotide units of the multimer may be composed of RNA, DNA modified nucleotides or combinations thereof. At least one of the units has a sequence, length, and composition that permits it to bind specifically to a first single-stranded nucleotide sequence of interest, typically analyte or an oligonucleotide bound to the analyte. In order to achieve such specificity and stability, this unit will normally be 15 to 50 nt, preferably −15 to 30 nt, in length and have a GC content in the range of 40% to 60%. In addition to such unit(s), the multimer includes a multiplicity of units that are capable of hybridizing specifically and stably to a second single-stranded nucleotide of interest, typically a labeled oligonucleotide or another multimer. These units will also normally be 15 to 50 nt, preferably 15 to 30 nt, in length and have a GC content in the range of 40% to 60%. When a multimer is designed to be hybridized to another multimer, the first and second oligonucleotide units are heterogeneous (different). One or more of the polynucleotides described herein, or a portion of a polynucleotide described herein, can be used as a repeating unit of such nucleic acid multimers.

[0109] The total number of oligonucleotide units in the multimer will usually be in the range of 3 to 50, more usually 10 to 20. In multimers in which the unit that hybridizes to the nucleotide sequence of interest is different from the unit that hybidizes to the labeled oligonucleotide, the number ratio of the latter to the former will usually be 2:1 to 30:1, more usually 5:1 to 20:1, and preferably 10:1 to 15:1.

[0110] The oligonucleotide unit the multimer may be covalently linked directly to each other through phosphodiester bonds or through interposed linking agents such as nucleic acid, amino acid, carbohydrate or polyol bridges, or through other cross-linking agents that are capable of cross-linking nucleic acid or modified nucleic acid strands. The site(s) of linkage may be at the ends of the unit (in either normal 3,-5′ orientation or randomly oriented) and/or at one or more internal nucleotides in the strand. In linear multimers the individual units are linked end-to-end to form a linear polymer. In one type of branched multimer three or more oligonucleotide units emanate from a pint of origin to form a branched structure. The point of origin may be another oligonucleotide unit or a multifunctional molecule to which at least three units can be covalently bound. In another type, there is an oligonucleotide unit backbone with one or more pendant oligonucleotide units. These latter-type multimers are “fork-like”, “comb-like” or combination “fork-” and “comb-like” in structure. The pendant units will normally depend from a modified nucleotide or other organic moiety having appropriate functional groups to which oligonucleotides may be conjugated or otherwise attached. The multimer may be totally linear, totally branched, or a combination of linear and branched portions preferably there will be at least two branch points in the multimer, mere preferably at least 3, preferably 5 to 10. The multimer may include one or more segments of double-stranded sequences.

[0111] Multimeric nucleic acid molecules are useful in amplifying the signal that results from a hybridization of one the first sequence of the multimeric molecule to a target sequence. The amplification is theoretically proportional to the number of iterations of the second segment.

[0112] Without being held to theory, forked structures of greater than about eight branches exhibited steric hindrance which inhibited binding of labeled probes to the multimer. On the other hand, comb structures exhibit little or no steric problems and are thus a preferred type of branched multimer. For a description of branched nucleic acid multimers of both the fork and comb types, as well as methods of use and synthesis, see e.g. U.S. Pat. Nos. 5,124,246 (fork-type structures); 5,710,264 (synthesis of comb structures); and 5,849,481.

[0113] Use of Polynucleotide Probes in Mapping and in Tissue Profiling. Polynucleotide probes, generally comprising at least 12 contiguous nt of a polynucleotide as shown in the Sequence Listing, are used for a variety of purposes, such as chromosome mapping of the polynucleotide and detection of transcription levels. Additional disclosure about preferred regions of the disclosed polynucleotide sequences is found in the Examples. A probe that hybridizes specifically to a polynucleotide disclosed herein should provide a detection signal at least 5-, 10-, or 20-fold higher than the background hybridization provided with other unrelated sequences.

[0114] Detection of Expression Levels. Nucleotide probes are used to detect expression of a gene corresponding to the provided polynucleotide. In Northern blots, mRNA is separated electrophoretically and contacted with a probe. A probe is detected as hybridizing to an mRNA species of a particular size. The amount of hybridization is quantitated to determine relative amounts of expression, for example under a particular condition. Probes are used for in situ hybridization to cells to detect expression. Probes can also be used in vivo for diagnostic detection of hybridizing sequences. Probes are typically labeled with a radioactive isotope. Other types of detectable labels can be used such as chromophores, fluors, and enzymes. Other examples of nucleotide hybridization assays are described in WO92/02526 and U.S. Pat. No. 5,124,246.

[0115] Alternatively, the Polymerase Chain Reaction (PCR) is another means for detecting small amounts of target nucleic acids (see, e.g., Mullis et al., Meth. Enzymol. (1987) 155:335; U.S. Pat. No. 4,683,195; and U.S. Pat. No. 4,683,202). Two primer polynucleotides nucleotides that hybridize with the target nucleic acids are used to prime the reaction. The primers can be composed of sequence within or 3′ and 5′ to the polynucleotides of the Sequence Listing. Alternatively, if the primers are 3′ and 5′ to these polynucleotides, they need not hybridize to them or the complements. After amplification of the target with a thermsostable polymerase, the amplified target nucleic acids can be detected by methods known in the art, e.g., Southern blot. mRNA or cDNA can also be detected by traditional blotting techniques (e.g., Southern blot, Northern blot, etc.) described in Sambrook et al., “Molecular Cloning: A Laboratory Manual” (New York, Cold Spring Harbor Laboratory, 1989) (e.g., without PCR amplification). In general, mRNA or cDNA generated from mRNA using a polymerase enzyme can be purified and separated using gel electrophoresis, and transferred to a solid support, such as nitrocellulose. The solid support is exposed to a labeled probe, washed to remove any unhybridized probe, and duplexes containing the labeled probe are detected.

[0116] Mapping Polynucleotides of the present invention can be used to identify a chromosome on which the corresponding gene resides. Such mapping can be useful in identifying the function of the polynucleotide-related gene by its proximity to other genes with known function. Function can also be assigned to the polynucleotide-related gene when particular syndromes or diseases map to the same chromosome. For example, use of polynucleotide probes in identification and quantification of nucleic acid sequence aberrations is described in U.S. Pat. No. 5,783,387. An exemplary mapping method is fluorescence in situ hybridization (FISH), which facilitates comparative genomic hybridization to allow total genome assessment of changes in relative copy number of DNA sequences (see, e.g., Valdes et al., Methods in Molecular Biology (1997) 68:1). Polynucleotides can also be mapped to particular chromosomes using, for example, radiation hybrids or chromosome-specific hybrid panels. See Leach et al., Advances in Genetics, (1995) 33:63-99; Walter et al., Nature Genetics (1994) 7:22; Walter and, Goodfellow, Trends in Genetics (1992) 9:352. Panels for radiation hybrid mapping are available from Research Genetics, Inc., Huntsville, Ala., USA. Databases for markers using various panels are available via the world wide web at, sites supported by the Stanford Human Genome Center (Stanford University) and the Whitehead Institute for Biomedical Research/MIT Center for Genome Research. The statistical program RHMAP can be used to construct a map based on the data from radiation hybridization with a measure of the relative likelihood of one order versus another. RHMAP is available via the world wide web at a site supported by the University of Michigan. In addition, commercial programs are available for identifying regions of chromosomes commonly associated with disease, such as cancer.

[0117] Tissue Typing of Profiling. Expression of specific mRNA corresponding to the provided polynucleotides can vary in different cell types and can be tissue-specific. This variation of mRNA levels in different cell types can be exploited with nucleic acid probe assays to determine tissue types. For example, PCR, branched DNA probe assays, or blotting techniques utilizing nucleic acid probes substantially identical or complementary to polynucleotides listed in the Sequence Listing can determine the presence or absence of the corresponding cDNA or mRNA.

[0118] Tissue typing can be used to identify the developmental organ or tissue source of a metastatic lesion by identifying the expression of a particular marker of that organ or tissue. If a polynucleotide is expressed only in a specific tissue type, and a metastatic lesion is found to express that polynucleotide, then the developmental source of the lesion has been identified. Expression of a particular polynucleotide can be assayed by detection of either the corresponding mRNA or the protein product. As would be readily apparent to any forensic scientist, the sequences disclosed herein are useful in differentiating human tissue from non-human tissue. In particular, these sequences are useful to differentiate human tissue from bird, reptile, and amphibian tissue, for example.

[0119] Use of Polymorphisms. A polynucleotide of the invention can be used in forensics, genetic analysis, mapping, and diagnostic applications where the corresponding region of a gene is polymorphic in the human population. Any means for detecting a polymorphism in a gene can be used, including, but not limited to electrophoresis of protein polymorphic variants, differential sensitivity to restriction enzyme cleavage, and hybridization to allele-specific probes.

[0120] Antibody Production. Expression products of a polynucleotide of the invention as well as the corresponding, mRNA, cDNA, or complete gene, can be prepared and used for raising antibodies for experimental, diagnostic, and therapeutic purposes. For polynucleotides to which a corresponding gene has not been assigned, this provides an additional method of identifying the corresponding gene. The polynucleotide or related cDNA is expressed as described above, and antibodies are prepared. These antibodies are specific to an epitope on the polypeptide encoded by the polynucleotide, and can precipitate or bind to the corresponding native protein in a cell or tissue preparation or in a cell-free extract of an in vitro expression system.

[0121] Methods for production of antibodies that specifically bind a selected antigen are well known in the art. Immunogens, for, raising antibodies can be prepared by mixing a polypeptide encoded by a polynucleotide of the invention with an adjuvant, and/or by making fusion proteins with larger immunogenic proteins. Polypeptides can also b& covalently linked to other larger immunogenic proteins, such as keyhole limpet hemocyanin. Immunogens are typically administered intradermally, subcutaneously, or intramuscularly to experimental animals such as rabbits, sheep), and mice, to generate antibodies. Monoclonal antibodies can be generated by isolating spleen cells and fusing myeloma cells to form hybridomas. Alternatively, the selected polynucleotide is administered directly, such as by intramuscular injection, and expressed in vivo. The expressed protein generates a variety of protein-specific immune responses, including production of antibodies comparable to administration of the protein.

[0122] Preparations of polyclonal and monoclonal a antibodies specific for polypeptides encoded by a selected polynucleotide are made using standard methods known in the art. The antibodies specifically bind to epitopes present in the polypeptides encoded by polynucleotides disclosed in the Sequence Listing. Typically, at least 6, 8, 10, or 12 contiguous amino acids are required to form an epitope. Epitopes that involve non-contiguous amino acids may require a longer polypeptide, e.g., at least 15, 25, or 50 amino acids. Antibodies that specifically bind to human polypeptide encoded by the provided polypeptides should provide a detection signal at least 5-, 10-, or 20-fold higher than a detection signal provided with other proteins used in Western blots or other immunochemical assays. Preferably, antibodies that specifically bind polypeptides contemplated by the Prevention do not bind to other proteins immunochemical assays at detectable levels and can immunoprecipitate the specific polypeptide from solution.

[0123] The invention also contemplates naturally occurring antibodies specific for a polypeptide of the invention. For example, serum antibodies to ad polypeptide of the invention in a human population can be purified by methods well known in the art, e.g., by passing antiserum over a column to which the corresponding selected polypeptide or fusion protein is bound. The bound antibodies can then be eluted from the column, for example, using a buffer with a high salt concentration.

[0124] In addition to the antibodies discussed above, the invention also contemplates genetically engineered antibodies (e.g., chimeric antibodies, humanized antibodies, human antibodies produced by a transgenic (e.g., a transgenic mouse such as, the Xenomous™), antibody derivatives (e.g., single chain antibodies, antibody fragments (e.g., Fab, etc.)), according to methods well known in the art.

Polynucleotides or Arrays for Diagnostics

[0125] Polynucleotide arrays provide a high throughput technique that can assay a large number of polynucleotides in a sample. This technology can be used as a diagnostic and as tool to test for differential expression, e.g., to determined function protein. A variety of methods of producing arrays, as well as variations of these methods, are known in the art and contemplated for use in the invention. For example, arrays cane be created b spotting polynucleotide probes onto a substrate (e.g., glass, mitrocellulose, etc.) in a two-dimensional matrix or array having bound probes. The probes can be bound to the substrate by either covalent bonds or by non-specific interactions, such as hydrophobic interactions. Samples of polynucleotides can be detectably labeled (e.g., using radioactive or fluorescent labels) and then hybridized to the probes, Double stranded polynucleotides, comprising the labeled sample polynucleotides bound to probe polynucleotides can be detected once the unbound portion of the sample is washed away. Alternatively, the polynucleotides of the test sample can be immobilized on the array, and the probes detectably labeled. Techniques for constructing arrays and methods of using these arrays are described in, for example, Schena et al. (19996) Proc. Natl Acad Sci USA. 93(20):10614-9; Schena et al. (1995) Science 270(5235):467-70; Shalon et al. (1996) Genome Res. 6(7):639-45, U.S. Pat. No. 5,807,522, EP 799 897; WO 97/29212; WO 97/27317; EP 785 280; WO 97/02357; U.S. Pat. No. 5,593,839; U.S. Pat. No. 5,578,832; EP 728 520, U.S. Pat. No. 5,599,695; EP 721 01-6; U.S. Pat. No. 5,556,752; WO 95/22058; and U.S. Pat. No. 5,631,734.

[0126] Arrays can be used to, for example, examine differential expression of genes and can be used to determine gene function. For example, arrays can be used to detect differential expression of a gene corresponding to a polynucleotide of the invention, where expression is compared between a test cell and control cell (e.g., cancer cells and normal cells). For example, high expression of a particular message in a cancer cell, which is not observed in a corresponding normal cell, can indicate a cancer specific gene product. Exemplary uses of arrays are further described in, for example, Pappalarado et al., Sem. Radiation Oncol. (1998) 8:217; and Ramsay Nature Biotechnol. (1998) 166:40. Furthermore, many variations on methods of detection using arrays are well within the skill in the art and within the scope of the present invention. For example, rather than immobilizing the probe to a solid support, the test sample can be immobilized on a solid support which is then contacted with the probe.

Differential Expression in Diagnosis

[0127] The polynucleotides of the invention can also be used to detect differences in expression levels between two cells, e.g., as a method to identify abnormal or diseased tissue in a human. For polynucleotides corresponding to profiles of protein families, the choice of tissue can be selected according to the putative biological function. In general, the expression of a gene corresponding to a specific polynucleotide is compared between a first tissue that is suspected of being diseased and a second, normal tissue of then human. The tissue suspected of being abnormal or diseased can be derived from a different tissue type of the human, but preferably it is derived from the same tissue type; for example, an intestinal polyp or other abnormal growth should be compared with normal intestinal tissue. The normal tissue can be the same tissue as that of the test sample, or any normal tissue of the patient, especially those that express the polynucleotide-related gene of interest (e.g., brain, thymus, testis, heart, prostate, placenta, spleen, small intestine, skeletal muscle, pancreas, and the mucosal lining of the colon). A difference between the polynucleotide-related gene, mRNA, or protein in the two tissues which are compared, for example, in molecular weight, amino acid or nucleotide sequence, or relative abundance, indicates a change in the gene, or a gene which regulates it, in the tissue of the human that was suspected of being diseased. Examples of detection of differential expression and its use in diagnosis of cancer are described in U.S. Pat. Nos. 5,688,641 and 5,677,125.

[0128] A genetic predisposition to disease in a hum an can also be detected by comparing expression levels of an mRNA or protein corresponding to a polynucleotide of the invention in a fetal tissue with levels associated in normal fetal tissue. Fetal tissues that are used for this purpose include but are not limited to, amniotic fluid, chorionic villi, blood and the blastomere of an in vitro-fertilized embryo. The comparable normal polynucleotide-related gene is obtained from any tissue. The mRNA or protein is obtained from a normal tissue of a human in which the polynucleotide-related gene is expressed. Differences such as alterations in the nucleotide sequence or size of the same product of the fetal polynucleotide-related gene or in RNA, or alterations in the molecular weight amino acid sequence, or relative abundance of fetal protein, can indicate a germline mutation in the polynucleotide-related gene of the fetus, which indicates a genetic predisposition to disease. In general, diagnostic, prognostic, and other methods of the invention based on differential expression involve detection of a level or amount of a gene product, particularly a differentially expressed gene product, in a test sample obtained from a patient suspected of having or being susceptible to a disease. (e.g. breast cancer, lung cancer, colon cancer and/or metastatic forms thereof), and comparing the detected levels to those levels found in normal cells (e.g., cells substantially unaffected by cancer) and/or other control cells (e.g., to differentiate a cancerous cell from a cell affected by dysplasia). Furthermore, the severity of the disease can be assessed by comparing the detected levels of a differentially expressed gene product with those levels detected in samples representing the levels of differentially expressed gene product associated width varying degrees of severity of disease it should be noted that use of the term “diagnostic” herein is not necessarily meant to exclude “prognostic” or “prognosis,” but rather is, used, as a matter of convenience.

[0129] The term “differentially expressed gene” is generally intended to encompass a polynucleotide that can, for example, include an open reading frame encoding a gene product (e.g., a polypeptide) and/or introns of such genes and adjacent 5′, and 3′ non-coding nucleotide sequences involved in the regulation of expression, up to about 20 kb beyond coding region, but possibly further in either direction. The gene an be introduced into an appropriate vector for extrachromosomal maintenance or for integration into a host genome. In general, a difference in expression level associated with a decrease in expression level of at least about 25%, usually at least about 50% to 75%, more usually at least about 90% or more is indicative of a differentially expressed gene of interest, i.e., a gene that is underexpressed or down-regulated in the test sample relative to a control sample. Furthermore, a difference impression level associated with an increase in expression of at least about 25%, usually at least about 50% to 75%, more usually at least that about 90% and a be at least about 1½-fold, usually at least about 2-fold to about 10-fold and can be about 100-fold to about 100-fold increase relative to a control sample is indicative of a differentially expressed gene of interest, i.e. an overexpressed or up-regulated gene.

[0130] “Differentially expressed polynucleotide” as used herein means a nucleic Acid molecule (RNA or DNA) comprising a sequence that represents a differentially expressed gene, e.g., the differentially expressed polynucleotide comprises a sequence (e.g., an open reading frame encoding a gene product that uniquely identifies a differentially expressed gene so that detection of the differentially expressed polynucleotide in a sample is correlated with the presence of a differentially expressed gene in a sample. “Differentially expressed polynucleotide” is also meant to encompass fragments of the disclosed polynucleotides, e.g., fragments retaining biological activity, as well as nucleic-acids to the disclosed polynucleotides.

[0131] Methods of the subject invention useful diagnosis or prognosis typically involve comparison of the abundance of a selected differentially expressed gene product in a sample of interest with that of a control to determine any relative differences in the expression of the gene product, where the difference can be measured qualitatively and/or quantitatively. Quantitation can be accomplished, for example, by comparing the level of expression produced detected in the sample with the amounts of product present in a standard curve. A comparison can be made visually; by using a technique such as densitometry, with or without computerized assistance; by preparing a representative library of cDNA clones of mRNA isolated from a test sample, sequencing the clones in the library to determine that number of cDNA clones corresponding to the same gene product, and analyzing the number of clones corresponding to that same gene product relative to the number of clones of the same gene product in a control sample; or by using an array to detect relative levels of hybridization to a selected sequence or set of sequences, and comparing the hybridization pattern to that of a control. The differences in expression are then correlated with the presence or absence of an abnormal expression pattern. A variety of different methods for determining the nucleic abundance in a sample are known to those of skill in the art (see, e.g., WO 97/27317).

[0132] In general, diagnostic assays of the invention involve detection of a gene product of a polynucleotide sequence (e.g., mRNA or polypeptide) that corresponds to a sequence of SEQ ID NOS:1-6010. The patient from whom the sample is obtained can be apparently healthy, susceptible to disease (e.g., as determined by family history or exposure to certain environmental factors), or can already be identified as having a condition in which altered expression of a gene product of the invention is implicated.

[0133] Diagnosis can be determined based on detected gene product expression levels of a gene product encoded by at least one preferably at least two or more, at least 3 or more, or at least 4 or more of the polynucleotides having a sequence set forth in SEQ ID NOS:1-6010, and can involve detection of expression of genies corresponding to all of SEQ ID NOS:1-6010 and/or additional sequences that can serve as additional diagnostic markers and/or reference sequences. Mere the diagnostic method is designed to detect the presence or susceptibility of a patient to cancer, the assay preferably involves detection of a gene product encoded by a gene corresponding to a polynucleotide that is differentially expressed in cancer. Examples of such differentially expressed polyucleotides are described in the Examples below. Given the provided polynucleotides and information regarding their relative expression levels provided herein, assays using such polynucleotides and detection of their expression levels in diagnosis and prognosis will be readily apparent to the ordinarily skilled artisan.

[0134] Any of a variety of detectable labels can be used in connection with the various embodiments of the diagnostic methods of the invention. Suitable detectable labels include fluorochromes (e.g., fluorescein isothiocyanate (FITC) rhodamine, Texas Red, phycoeythrin, allophycocyanin, 6-carboxyfluorescein (6-FAM), 2′,7-diethoxy-4′,5′-dichloro-6-carboxyfluorescein, 6-carboxy-X-rhodamine (ROX), 6-carboxy-2′,4′,7′, 4,7-hexachlorofluorescein (HEX), 5-carboxyfluorescein (5-FAM) or N,N,N′,N′-tetramethyl-6-carboxyrhodamine (TAMRA)), radioactive labels, (e.g. 32P, 35S, 3H, etc.), and the like. The detectable label can involve a two stage systems (e.g., biotin-avidin, hapten-anti-hapten antibody, etc.).

[0135] Reagents specific for the polynucleotides and polypeptides of the invention, such as antibodies and nucleotide probes, can be supplied in a kit for detecting the presence of an expression product in, a biological sample. The kit can also contain buffers or labeling components, as well as instructions for using the reagents to detect and quantify expression products in the biological sample. Exemplary embodiments of the diagnostic methods of the invention are described below in more detail.

[0136] Polypeptide detection in diagnosis. In one embodiment, the test sample is assayed for the level of a differentially expressed polypeptide. Diagnosis can be accomplished using any of a number of methods to determine the absence or presence or altered amounts of the differentially expressed polypeptide in the test sample. For example, detection can utilize staining of cells or histological sections with labeled antibodies, performed in accordance with conventional methods. Cells can be permeabilized to stain cytoplasmic molecules. In general, antibodies that specifically bind a differentially expressed polyeptide of the invention are added to a sample, and incubated for a period of time sufficient to allow binding to the epitope, usually at least about 10 minutes. The antibody can be detectably labeled for direct detection (e.g., using radioisotopes, enzymes, fluorescers, chemiluminescers, and the like), or can be used in conjunction with a second stage antibody or reagent to detect binding (e.g., biotin with horseradish peroxidase-conjugated avidin, a secondary antibody conjugated to a fluorescent compound, e.g. fluorescein, rhodamine, Texas red, etc.). The absence or presence of antibody binding can be determined by various methods, including flow cytometry of dissociated cells, microscopy, radiography, scintillation counting, etc. Any suitable alternative methods of qualitative or quantitative detection of levels or amounts of differentially expressed polypeptide can be used, for example, ELISA, western blot, immunoprecipitation, radioimmunoassay, etc.

[0137] mRNA detection. The diagnostic methods of the invention can also or alternatively involve detection of mRNA encoded by a gene corresponding to a differentially expressed polynucleotide of the invention. Any suitable qualitative or quantitative methods known in the art for detecting specific mRNAs can be used. mRNA can be detected by, or example, in situ hybridization in tissue sections, by reverse transcriptase-PCR, or in Northern blots containing poly A+ mRNA. One of skill in the art can readily use these methods to determine differences in the size or amount of mRNA transcripts between two samples. mRNA expression levels in a sample can also be determined by generation of a library of expressed sequence tags (ESTs) from the sample where the EST library is representative of sequences present in the sample (Adams, et al., (1991) Science 252:1651). Enumeration of the relative representation of ESTs within the library can be used to approximate the relative representation of the gene transcript within the starting sample. The results of EST analysis of a test sample can then be compared to EST analysis of a reference sample to determine the relative expression levels of a selected polynucleotide, particularly a polynucleotide corresponding to one or more of the differentially expressed genes described herein. Alternatively, gene expression in a test sample can be performed using serial analysis of gene expression (SAGE) methodology (e.g., Velculescu et al., Science (1995) 270:484) or differential display (DD) methodology (see, e.g., U.S. Pat. No. 5,776,683 and U.S. Pat. No. 5,807,680).

[0138] Alternatively, gene expression can be analyzed using hybridization analysis. Oligonucleotides or cDNA can be used to selectively identify or capture DNA or RNA of specific sequence composition, and the amount of RNA or cDNA hybridized to a known capture sequence determined qualitatively or quantitatively, to provide information about the relative representation of a particular message within the pool of cellular messages in a sample. Hybridization analysis can be designed to allow for concurrent screening of the relative expression of hundreds to thousands of genes by using, for example, array-based technologies having high density formats, including filters, microscope slides, or microchips, or solution-based technologies that use spectroscopic analysis (e.g., mass spectrometry). One exemplary use of arrays in the diagnostic methods of the invention is described below in more detail.

[0139] Use of a single gene in diagnostic applications. The diagnostic methods of the invention can focus on the expression of a single differentially expressed gene. For example, the diagnostic method can involve a differentially expressed gene or a polymorphism of such a gene (e.g., a polymorphism in a coding region or control region) that is associated with disease. Disease-associated polymorphisms can include deletion or truncation of the gene, mutations that alter expression level and/or affect activity of the encoded protein, etc.

[0140] A number of methods are available for an analyzing nucleic acids for the presence of a specific sequence, e.g. a disease associated polymorphism. Where large amounts of DNA are available, genomic DNA is used directly. Alternatively, the region of interest is cloned into a suitable vector and grown in sufficient quantity for analysis. Cells that express a differentially expressed gene can be used as a source of mRNA, which can be assayed directly or reverse transcribed into cDNA for analysis.

[0141] The nucleic acid can be amplified by conventional techniques, such as the polymerase chain reaction (PCR), to provide sufficient amounts for analysis, and a detectable label can be included in the amplification reaction (e.g., using a detectably labeled primer or detectably labeled oligonucleotides) to facilitate detection. Alternatively, various methods are also known in the art that utilize oligonucleotide ligation as a means of detecting polymorphisms, see, e.g., Riley et al., Nucl. Acids Res. (1990) 18:2887; and Delahunty et al., Am. J. Hum. Genet. (1996) 58:1239.

[0142] The amplified or cloned sample nucleic acid can be analyzed by one of a number of methods known in the art. The nucleic acid can be sequenced by dideoxy or other methods, and the sequence of bases compared to a selected sequence, e.g., to a wild-type sequence. Hybridization with the polymorphic or variant sequence can also be used to determine its presence in a sample (e.g., by Southern blot, dot blot, etc.). The hybridization pattern of a polymorphic or variant sequence and a control sequence to an array of oligonucleotide probes immobilized on a solid support, as described in U.S. Pat. No. 5,445,934, or in WO 95/35505, can also be used as a means of identifying polymorphic or variant sequences associated with disease. Single strand conformational polymorphism (SSCP) analysis, denaturing gradient gel electrophoresis (DGGE), and heteroduplex analysis in gel matrices are used to detect conformational changes created by DNA sequence variation as alterations in electrophoretic mobility. Alternatively, where a polymorphism creates or destroys a recognition site for a restriction endonuclease, the sample is digested with that endonuclease, and the products size fractionated to determine whether the fragment was digested. Fractionation is performed by gel or capillary electrophoresis, particularly acrylamide or agarose gels.

[0143] Screening for mutations in a gene can be based on the functional or antigenic characteristics of the protein. Protein truncation assays are useful in detecting deletions that can affect the biological activity of the protein. Various immunoassays desired to detect polymorphisms in proteins can be used in screening. Where many diverse genetic mutations lead to a particular disease phenotype, functional protein assays have proven to be effective screening tools. The activity of the encoded protein can be determined by comparison with the wildtype protein.

Diagnosis, Prognosis, Assessment of Therapy (Therametrics), and Management of Cancer

[0144] The polynucleotides of the invention, as well as their gene products, are of particular interest as genetic or biochemical markers (e.g., in blood or tissues) that will detect the earliest changes along the carcinogenesis pathway and/or to monitor the efficacy of various therapies and preventive interventions. For example, the level of expression of certain polynucleotides can be indicative of a poorer prognosis, and therefore warrant more aggressive chemo- or radio-therapy for a patient or vice versa. The correlation of novel surrogate tumor specific features with response to treatment and outcome in patients can define prognostic indicators that allow the design of tailored therapy based on the molecular profile of the tumor. These therapies include antibody targeting, antagonists (e.g., small molecules), and gene therapy. Determining expression polynucleotides and comparison of a patient's profile with known expression in normal tissue and variants of the disease allows a determination of the best possible treatment for a patient, both in terms of specificity of treatment and in terms of comfort level of the patient. Surrogate tumor markers, such as polynucleotide expression, can also be used to better classify, and thus diagnose and treat, different forms and disease states of cancer. Two classifications widely used in oncology that can benefit from identification of the expression levels of the genes corresponding to the polynucleotides of the invention are staging of the cancerous disorder, and grading the nature of the cancerous tissue.

[0145] The polynucleotides that correspond to differentially expressed genes, as well as their encoded gene products, can be useful to monitor patients having or susceptible to cancer to detect potentially malignant events at a molecular level before they are detectable at a gross morphological level. In addition, the polynucleotides of the invention, as well as the genes corresponding to such polynucleotides, can be useful as therametrics, e.g., to assess the effectiveness of therapy by using the polynucleotides or their encoded gene products, to assess, for example, tumor burden in the patient before during, and after therapy.

[0146] Furthermore, a polynucleotide identified as corresponding to a gene that is differentially expressed in, and thus is important for one type of cancer can also have implications for development or risk of development of other types of cancer, e.g., where a polynucleotide represents a gene differentially expressed across various cancer types. Thus, for example, expression of a polynucleotide corresponding to a gene that has clinical implications for metastatic colon cancer can also have clinical implications for stomach cancer or endometrial cancer.

[0147] Staging. Staging is a process used by physicians to describe how advanced the cancerous state is in a patient. Staging assists the physician in determining a prognosis, planning treatment and evaluating the results of such treatment. Staging systems vary with the types of cancer, but generally involve the following “TNM” system: the type of tumor, indicated by T; whether the cancer has metastasized to nearby lymph nodes, indicated by N; and whether the cancer has metastasized to more distant parts of the body, indicated by M. Generally, if a cancer is only detectable in the area of the primary lesion without having spread to any lymph nodes it is called Stage I. If it has spread only to the closest lymph nodes, it is called Stage II. In Stage III, the cancer has generally spread to the lymph nodes in near proximity to the site of the primary lesion. Cancers that have spread to a distant part of the body, such as the liver, bone, brain or other site, are Stage IV, the most advanced stage.

[0148] The polynucleotide of the invention can facilitate fine-tuning of the staging process by identifying markers for the aggresivity of a cancer, e.g., the metastatic potential, as well as the presence in different areas of the body. Thus, a Stage II cancer with a polynucleotide signifying a high metastatic potential cancer can be used to change a borderline Stage II tumor to a Stage III tumor, justifying more aggressive therapy. Conversely, the presence of a polynucleotide signifying a lower metastatic potential allows more conservative staging of a tumor.

[0149] Grading of cancers. Grade is a term used to describe how closely a tumor resembles normal tissue of its same type. The microscopic appearance of a tumor is used to identify tumor grade based on parameters such as cell morphology, cellular organization, and other markers of differentiation. As a general rule, the grade of a tumor corresponds to its rate of growth or aggressiveness, with undifferentiated or high-grade tumors being more aggressive than well-differentiated or low-grade tumors. The following guidelines are generally used for grading tumors. 1) GX Grade cannot be assessed; 2) G1 Well differentiated; 3) G2 Moderately well differentiated; 4) G3 Poorly differentiated; 5) G4 Undifferentiated. The polynucleotides of the invention can be especially valuable in determining the grade of the tumor, as they not only can aid in determining the differentiation status of the cells of a tumor, they can also identify factors other than differentiation that are valuable in determining the aggressiveness of a tumor, such as metastatic potential.

[0150] Detection of colon cancer. The polynucleotides corresponding to genes that exhibit the appropriate expression pattern can be used to detect colon cancer in a subject. Colorectal cancer is one of the most common neoplasms in humans and perhaps the most frequent form of hereditary neoplasia. Prevention and early detection are key factors in controlling and curing colorectal cancer. Colorectal cancer begins as polyps which are small, benign growths of cells that form on the inner lining of the colon. Over a period of several years, some of these polyps accumulate additional mutations and become cancerous. Multiple familial colorectal cancer disorders have been identified, which are summarized as follows 1) Familial adenomatous polyposis (FAP); 2) Gardner's syndrome, 3) Hereditary nonpolyposis colon cancer (HNPCC); and 4) Familial colorectal cancer in Ashkenazi Jews. The expression of appropriate polynucleotides of the invention can be used in the diagnosis, prognosis and management of colorectal cancer Detection of colon cancer can be determined using expression levels of any of these sequences alone or in combination with the levels of expression. Determination of the aggressive nature and/or the metastatic potential of a colon cancer can be determined by comparing levels of one or more polynucleotides of the invention and comparing total levels of another sequence known to vary in cancerous tissue, e.g., expression of p53, DCC ras, lor FAP (see, e.g., Fearon E R, et al., Cell (1990) 61(5):759; Hamilton S R et al., Cancer (1993) 72:957; Bodmer W, et al., Nat Genet (1994) 4(3):217; Fearon E R, Ann N Y Acad Sci. (1995) 768:101). For example, development of colon cancer can be detected by examining the ratio of any of the polynucleotides of the invention to the levels of oncogenes (e.g., ras) or tumor suppressor genes (e.g., PAP or p53). Thus, expression of specific marker polynucleotides can be use d to discriminate between normal and cancerous colon tissue, to discriminate between colon cancers with different cells of origin, to discriminate between colon cancers with different potential metastatic rates, etc. For a review of markers of cancer, see, e.g., Hanahan et al. (2000) Cell 100:57-70.

[0151] Detection of prostate cancer. The polynucleotides and their corresponding genes and gene products exhibiting the appropriate differential expression pattern can be used to detect prostate cancer in a subject. Over 95% of primary prostate cancers are adenocarcinomas. Signs and symptoms may include: frequent urination, especially at night; inability to urinate; trouble starting or holding back urination; a weak or interrupted urine flow; and frequent pain or stiffness in the lower back, hips or upper thighs.

[0152] Many of the signs and symptoms of prostate cancer can be caused by a variety of other non-cancerous conditions. For example, one common cause of many of these signs and symptoms is a condition called benign prostatic hypertrophy, or BPH. In BPH, the prostate gets bigger and may block the flow of urine or interfere with sexual function. The methods and compositions of the invention can be used to distinguish between prostate cancer and such non-cancerous conditions. The methods of the invention can be used in conjunction with conventional methods of diagnosis, e.g., digital rectal exam and/or detection of the level of prostate specific antigen (PSA), a substance produced and secreted by the prostate.

[0153] Detection of breast cancer. The majority of breast cancers are adenocarcinoma subtypes, which can be summarized as follows: 1) ductal carcinoma in situ (DCIS), including comedocarcinoma, 2) infiltrating (or invasive) ductal carcinoma (IDC); 3) lobuar carcinoma in situ (LCIS); 4) infiltrating (or invasive) lobular carcinoma (ILC); 5) inflammatory breast cancer; 6) medullary carcinoma; 7) mucinous carcinoma; 8) Paget's disease of the nipple 9) Phyllodes tumor; and 10) tubular carcinoma;

[0154] The expression of polynucleotides of the invention can be used in the diagnosis and management of breast cancer, as well as to distinguish between types of breast cancer. Detection of breast cancer can be determined using expression levels of any of the appropriate polynucleotides of the invention, either alone or in combination. Determination of the aggressive nature and/or the metastatic potential of a breast cancer can also be determined by comparing levels of one or more polynucleotides of the invention and comparing levels of another sequence known to vary in cancerous tissue, e.g., ER expression. In addition, development of breast cancer can be detected by examining the ratio of expression of a differentially expressed polynucleotide to the levels of steroid hormones (e.g., testosterone or estrogen) or to other hormones (e.g., growth hormone, insulin). Thus, expression of specific marker polynucleotides can be used to discriminate between normal and cancerous breast tissue, to discriminate between breast cancers with different cells of origin, to discriminate between breast cancers with different potential metastatic rates, etc.

[0155] Detection of lung cancer. The polynucleotides of the invention can be used to detect lung cancer in a subject. Although there are more than a dozen different cancer, the two main types of lung cancer are small cell and nonsmall cell, which encompass about 90% of all lung cancer cases. Small cell carcinoma (also called oat cell carcinoma) usually starts in one of the larger bronchial tubes, grows fairly rapidly, and is likely to be large by the time of diagnosis. Nonsmall cell lung cancer (NSCLC) is made up of three general subtypes of lung cancer. Epidermoid carcinoma (also called squamous cell carcinoma) usually starts in one of the larger bronchial tubes and grows relatively slowly. The size of these tumors can range from very small to quite large. Adenocarcinoma starts growing near the outside surface of the lung and can vary in both size and growth rate. Some slowly growing adenocarcinomas are described as alveolar cell cancer. Large cell carcinoma starts near the surface of the lung, grows rapidly, and the growth is usually fairly large when diagnosed. Other less common forms of lung cancer are carcinoid, cylindroma, mucoepidermoid, and malignant mesothelioma.

[0156] The polynucleotides of the invention, e.g., polynucleotides differentially expressed in normal cells ver cancerous lung cells (e.g., tumor cells of high or low metastatic potential) or between types of cancerous lung cells (e.g., high metastatic versus low metastatic), can be used to distinguish types of lung cancer as well as its specific to a certain patient's cancer and selecting an appropriate therapy. For example, if the patient's biopsy expresses a polynucleotide that is associated with a low metastatic potential, it may justify leaving a larger portion of the patient's lung in surgery to remove the lesion. Alternatively, a smaller lesion with expression of a polynucleotide that is associated with high metastatic potential may justify a more radical removal of lung tissue and/or the surrounding lymph nodes, even if no metastasis can be identified through pathological examination.

Use of Polynucleotides to Screen for Peptide Analog and Antagonists

[0157] Polypeptides encoded by the instant polynucleotides and corresponding full-length genes can be used to screen peptide libraries to identify binding partners, such as receptors, from among the encoded polypeptides. Peptide libraries can be synthesized according to methods known in the art (see, e.g., U.S. Pat. No. 5,010,175, and WO 91/17823). Agonists or antagonists of the polypeptides of the invention can be screened using any available method known in the art, such as signal transduction, antibody binding receptor binding, mitogenic assays, chemotaxis assays, etc. The assay conditions ideally should resemble the conditions under which the native activity is exhibited in vivo, that is, under physiologic pH, temperature, and ionic strength. Suitable agonists or antagonists will exhibit strong inhibition or enhancement of the native activity at concentrations that do not cause toxic side effects in the subject. Agonists or antagonists that compete for binding to the native polypeptide can require concentrations equal to or greater than the native concentration, while inhibitors capable of biding irreversibly to the polypeptide can be added in concentrations on the order of the native concentration.

[0158] Such screening and experimentation can lead to identification of a novel polypeptide binding partner, such as a receptor, encoded by a gene or a cDNA corresponding to a polynucleotide of the invention and at least one peptide agonist or antagonist of the novel binding partner. Such agonists and antagonists can be used to modulate, enhance, or inhibit receptor function in cells to which the receptor is native, or in cells possess the receptor as a result of genetic engineering. Further, if the novel receptor shares biologically important characterstics with a known receptor, information about agonist/antagonist binding can facilitate development of improved agonists/antagonists of the known receptor.

Pharmaceutical Compositions and Uses

[0159] Pharmaceutical compositions can comprise polypeptides, receptors that specifically bind a polypeptide produced by a differentially expressed gene (e.g., antibodies, or polynucleotides (including antisense nucleotides and ribozymes) of the claimed invention in a therapeutically effective amount. The compositions can be used to treat primary tumors as well as metastases of primary tumors. In addition the pharmaceutical compositions can be used in conjunction with conventional methods of cancer treatment, e.g., to sensitize tumors to radiation or conventional chemotherapy.

[0160] Where the pharmaceutical composition comprises a receptor (such as an antibody) that specifically binds to a gene product encoded by a differentially expressed gene, the receptor can be coupled to a drug for delivery to a treatment site or coupled to a detectable label to facilitate imaging of a site comprising colon cancer cells. Methods for coupling antibodies to drugs and detectable labels are well known in the art, as are methods for imaging using detectable labels.

[0161] The term “therapeutically effective amount” as used herein refers to an amount of a therapeutic agent to treat, ameliorate, or prevent a desired disease or condition, or to exhibit a detectable therapeutic or preventative effect. The effect can be detected by, for example, chemical markers or antigen levels. Therapeutic effects also include reduction in physical symptoms, such as decreased body temperature. The precise effective amount for a subject will depend upon the subject's size and health, the nature and extent of the condition, and the therapeutics or combination of therapeutics selected for administration. Thus, it is not useful to specify an exact effective amount in advance. However, the effective amount for a given situation is determined by routine experimentation and is within the judgement of the clinician. For purposes of the present invention, an effective dose will generally be from about 0.01 mg/kg to 50 mg/g or 0.05 mg, 1 g to about 10 mg/kg of the DNA, constructs in the individual to which it is administered.

[0162] A pharmaceutical composition can also contain a pharmaceutically acceptable carrier. The term “pharmaceutically acceptable carrier” refers to a carrier for administration of a therapeutic agent, such as antibodies or a polypeptide, genes, and other therapeutic agents. The term refers to any pharmaceutical carrier that does not itself induce the production of antibodies harmful to the individual receiving the composition, and which can be administered without undue toxicity. Suitable carriers can be large, slowly metabolized macromolecules such as proteins, polysaccharides, poly lactic acid, polyglycolic acids, polymeric amino acids, amino acid copolymers, and inactive virus particles. Such carriers are well known to those of ordinary skill in the art. Pharmaceutically acceptable carriers in therapeutic compositions can include liquids such as water, saline, glycerol and ethanol. Auxiliary substances, such as wetting or emulsifying agents, pH buffering substances, and the like, can also be present in such vehicles. Typically, the therapeutic compositions are pared as injectables, either as liquid solutions or suspensions; solid forms suitable for solution in, or suspension in, liquid vehicles prior to injection can also be prepared. Liposomes are included within the definition of a pharmaceutically acceptable carrier. Pharmaceutically acceptable salts can also be present in the pharmaceutical composition, e.g., mineral acid salts such as hydrochlorides, hydrobromides, phosphates, sulfates, and the like; and the salts of organic acids such as acetates, propionates, malonates, benzoates, and the like. A thorough discussion of pharmaceutically acceptable excipients is available in Remington's Pharmaceutical Sciences (Mack Pub. Co., N.J. 1991).

Delivery Methods

[0163] Once formulated, the compositions of the invention can be (1) administered directly to the subject (e.g., as polynucleotide or polypeptides); or (2) delivered ex vivo, to cells derived from the subject (e.g., as in ex vivo gene therapy). Direct delivery of the compositions will generally be accomplished by parenteral injection, e.g., subcutaneously, intraperitoneally, intravenously or intramuscularly, intratumorally or to the interstitial space of a tissue. Other modes of administration include oral and pulmonary administration suppositories, and transdermal applications, needles, and gene guns or hyposprays. Dosage treatment can be a single dose schedule or a multiple dose schedule.

[0164] Methods for the ex vivo delivery and reimplantation of transformed cells into a subject are known in the art and described in, e.g., WO 93/14778. Examples of cells useful in ex vivo applications include for example stem cells, particularly hematopoetic, lymph cells, macrophages, dendritic cells, or tumor cells. Generally, delivery of nucleic acids for both ex vivo and in vitro applications can be accomplished by, for example, dextran-mediated transfection, calcium phosphate precipitation polybrene mediated transfection, protoplast fusion, electroporation, encapsulation of the polynucleotide(s) in liposomes, and direct microinjection of the DNA into nuclei, all well known in the art.

[0165] Once differential expression of a gene corresponding to a polynucleotide of the invention has been found to correlate with a proliferative disorder, such as neoplasia, dysplasia, and hyperplasia, the disorder can be amenable to treatment by administration of a therapeutic agent based on the provided polynucleotide, corresponding polypeptide or other corresponding molecule (e.g., antisense, ribozyme, etc.). In other embodiments, the disorder can be amenable to treatment by administration of a small molecule drug that, for example, serves as an inhibitor (antagonist) of the function of the encoded gene product of a gene having increased expression in cancerous cells relative to normal cells or as an agonist for gene products that are decreased in expression in cancerous cells (e.g., to promote the activity of gene products that act as tumor suppressors).

[0166] The dose and the means of administration of the inventive pharmaceutical compositions are determined based on the specific qualities of the therapeutic composition, the condition, age, and weight of the patient, the progression of the disease, and other relevant factors. For example, administration of polynucleotide therapeutic composition agents of the invention includes local or systemic administration, including injection, oral administration, particle gun or catheterized administrator, and topical administration. Preferably, the therapeutic polynucleotide composition contains an expression construct comprising a promoter operably linked to a polynucleotide of at least 12, 22, 25, 30, or 35 contiguous nt of the polynucleotide of the invention. Various methods can be used to administer the therapeutic composition directly to a specific site in the body. For example, a small metastatic lesion is located and the therapeutic composition injected several times in several different locations within the body of tumor. Alternatively, arteries that serve a tumor are identified, and the therapeutic composition injected into such an artery in order o deliver the composition directly into the tumor. A tumor that has a necrotic center is aspirated and the composition injected directly into the now empty center of the tumor. The antisense composition is directly administered to the surface of the tumor, for example, by topical application of the composition. X-ray imaging is used to assist in certain of the above delivery methods.

[0167] Targeted delivery of therapeutic compositions containing antisense polynucleotide, subgenomic polynucleotides or antibodies to specific tissues can also be used. Receptor-mediated DNA delivery techniques are described in, for example, Findeis et al., Trends Biotechnol. (993) 11:202; Chiou et al., Gene Therapeutics: Methods And Applications Of Direct Gene Transfer (J. A. Wolff ed.) (1994); Wu et al., J. Biol. Chem. (1988) 263:621; Wu et al., J. Biol. Chem. (1994) 269:542, Zenke et al., Proc. Natl. Acad. Sci. (USA)(1990) 87:3655; Wu et al., J. Biol. Chem. (1991) 266:338. Therapeutic compositions containing a polynucleotide are administered in a range of about 100 ng to about 200 mg of DNA for local administration in a gene therapy protocol. Concentration ranges of about 500 ng to about 50 mg, about 1 micrograms to about 2 mg, about 5 micrograms to about 500 micrograms, and about 20 micrograms to about 1 micrograms of DNA can also be used during a gene therapy protocol Factors such as method of action (e.g., for enhancing or inhibiting levels of the encoded gene product) and efficacy of transformation and expression are considerations which will affect the dosage required for ultimate efficacy of the antisense subgenomic polynucleotides. Where greater expression is desired over a larger area of tissue, larger amounts of antisense subgenomic polynucleotides or the same amounts readministered in a successive protocol of administrations, or several administrations to different adjacent or close tissue portions of, for example a tumor site, may be required to effect a positive therapeutic outcome. In all cases, routine experimentation in clinical trials will determine specific ranges for optimal therapeutic effect. For polynucleotide related genes encoding polypeptides or proteins with antiinflammatory activity, suitable use, doses, and administration are described in U.S. Pat. No. 5,654,173.

[0168] The therapeutic polynucleotides and polypeptides of the present invention can be delivered using gene delivery vehicles. The gene delivery vehicle can be of viral or non-viral origin (see generally Jolly, Cancer Gene Therapy (1994) 1:51; Kimura, Human Gene Therapy (1994) 5:845; Connelly, Human Gene Therapy (1995) 1:185; and Kaplitt Nature Genetics (1994) 6:148) Expression of such coding sequences can be induced using endogenous mammalian or heterologous promoters. Expression of the coding sequence can be either constitutive or regulated.

[0169] Viral-based vectors for delivery of a desired polynucleotide and expression in a desired cell are well known in the art. Exemplary viral-based vehicles include, but are not limited to, recombinant retroviruses (see, e.g., WO 90/07936; WO 94/03622; WO 93/25698, WO 93/25234; U.S. Pat. No. 5,219,740, WO 93/11230, WO 93/10218; U.S. Pat. No. 4,777,127; GB Patent No. 2,200,651; EP 0 345 242; and WO 91/02805), alphavirus-based vectors (e.g., Sindbis virus vectors, Semliki forest virus (ATCC VR-67; ATCC VR-1247), Ross River virus (ATCC VR-373; ATCCVR-1246) and Venezuelan equine encephalitis virus (ATCC VR-923; ATCC VR-1250; ATCC VR 1249, ATCC VR-532), and adeno-associated virus (AAV) vectors (see; e.g., WO 94/12649, WO 93/03769; WO 93/19191; WO 94/28938; WO 95/11984 and WO 95/00655). Administration of DNA linked to killed adenovirus, as described in Curiel, Hum. Gene Ther. (1992) 3:147, can also be employed.

[0170] Non-viral delivery vehicles and methods can also be employed, including, but not limited to, polycationic condensed DNA linked or unlinked to killed adenovirus alone (see, e.g., Curiel, Hum. Gene Ther. (1992) 3:147); ligand-linked DNA (see e.g., Wu, J. Biol. Chem. (1989) 264:16985); eukaryotic cell delivery vehicles cells (see, e.g., U.S. Pat. No. 5,814,482; WO 95/07994; WO 96/17072; WO 95/30763, and WO 97/42338) and nucleic charge neutralization or fusion with cell membranes. Naked DNA can also be employed. Exemplary naked DNA introduction methods are described in WO 90/11092 and U.S. Pat. No. 5,580,859. Liposomes that can act as gene delivery vehicles are described in U.S. Pat. No. 5,422,120; WO 95/13796; WO 94/23697; WO 91/14445; and EP 0524968. Additional approaches are described in Philip, Mol. Cell. Biol. (1994) 14:2411, and in Woffendin, Proc. Natl. Acad. Sci. (1994) 91:1581.

[0171] Further non-viral delivery suitable for use includes mechanical delivery systems such as the approach described in Woffendin et al., Proc. Natl. Acad. Sci. USA (1994) 91(24):11581. Moreover, the coding sequence and the product of expression of such can be delivered through deposition of photopolymerized hydrogel materials or use of ionizing radiation (see, e.g., U.S. Pat. No. 5,206,152 and WO 92/11033). Other conventional methods for gene delivery that can be used for delivery of the coding sequence include, for example, use of hand-held gene transfer particle gun (see, e.g., U.S. Pat. No. 5,149,655); use of ionizing radiation for activating transferred gene (see, e.g., U.S. Pat. No. 5,206,152 and WO 92/11033).

[0172] The present invention will now be illustrated by reference to the following examples which set forth particularly advantageous embodiments. However, it should be noted that these embodiments are illustrative and are not to be construed as restricting the invention in any way.

### EXAMPLES

[0173] The following examples are put forth so as to provide those of ordinary skill in the art with a complete disclosure and description of how to make and use the present invention, and are not intended to limit the scope of what the inventors regard as their invention nor are they intended to represent that the experiments below are all or the only experiments performed. It will be readily apparent to those skilled in the art that the formulations dosages methods of administration, and other parameters of this invention may be further modified or substituted in various ways without departing from the spirit and scope of the invention. Efforts have been made to ensure accuracy with respect to numbers used (e.g., amounts, temperature, etc.) but some experimental errors and deviations should be accounted for Unless indicated otherwise, parts are parts by weight, molecular weight is weight average molecular weight, temperature is in degrees Centigrade, and pressure is at or near atmospheric.

### Example 1

### Source of Biological Materials and Overview of Novel Polynucleotides Expressed by the Biological Materials

[0174] Candidate polynucleotides were obtained from cDNA libraries generated from selected cell lines and patient tissues. In order to obtain the candidate polyucleotides, mRNA was isolated from several selected cell lines and patient tissues, and used to construct cDNA libraries. The cells and issues that served as sources for these cDNA libraries are summarized in Table 1 below.

[0175] Human colon cancer cell line Km12L4-A (Morikawa, et al., Cancer Research (1988) 48:6863) is derived from the KM12C cell line. The KM12 C cell line (Morikawa et al. Cancer Res. (1988) 48:1943-1948), which is poorly metastatic (low metastatic) was established in culture from a Dukes' stage B2 surgical specimen (Morikawa et al. Cancer Res. (1988) 48:6863). The KM12L4-A is a highly metastatic subline derived from KM12C (Yeatman et al. Nucl. Acids. Res. (1995) 23:4007; Bao-Ling et al. Proc Annu. Meet Am. Assoc. Cancer. Res. (1995) 21:3269). The KM12C and KM12C-derived cell lines (e.g., KM12L4, KM12L4-A, etc.) are well-recognized in the art as a model cell line for the study of colon cancer (see, e.g. Moriakawa et al., supra; Radinsky et al. Clin. Cancer Res. (1995) 1:19; Yeatman et al., (1995) supra; Yeatman et al. Clin. Exp. Metastasis (1996) 14:246).

[0176] The MDA-MB-231 cell line (Brinkley et at. Cancer Res. (1980) 40:3118-3'129) was originally isolated from pleural effusions (Cailleau, J. Natl. Cancer. Inst. (1974) 53:661), is of high metastatic potential, and forms poorly differentiated adenocarcinoma grade II in nude mice consistent with breast carcinoma. The MCF7 cell line was derived from a pleural effusion of a breast adenocarcinoma and is non-metastatic. The MV-522 cell line is derived from a human lung carcinoma and is of high metastatic potential. The UCP3 cell line is a low metastatic human lung carcinoma cell line; the MV-522 is a high metastatic variant of UCP-3. These cell lines are well-recognized in the art as models for the study of human breast and lung cancer (see, e.g., Chandrasekaran et al., Cancer Res. (1979) 39:870 (MDA MB 231 and MCF-7); Gastpar et al. J Med Chem (1,998) 41:4965, (MDA-MB-231 and MCF-7); Ranson et al., Br J Cancer (1998) 77:1586 (MDA-MB-231 and MCF-7); Kuang et al., Nucleic Acids Res. (1998) 26:1116 (MDA-MB-231 and MCF-7); Varki et al., Int J Cancer (1987) 40:46 (UCP-3); Varki et al., Tumour Biol. (1990) 11:327; (MV-522 and UCP-3); Varki et at, Anticancer Res. (1990) 10:637; (MV-522); Kelner et al., Anticancer Res (1995) 15:867 (MV-522); and Zhang et al., Anticancer Drugs (11997) 8-696 (MV522)).

[0177] The samples of libraries 15-20 are derived from two different patients (UC#2, and UC#3). The bFGF-treated HMVEC, were prepared by incubation with bFGF at 10 ng/ml for 2 hrs the VEGF-treated HMVEC were prepared by incubation with 20 ng/ml VEGF for 2 hrs. Following incubation with the respective growth factor, the cells were washed and, lysis buffer added for RNA preparation. The GRRpz and WOca cell lines were provided by Dr. Donna M. Peehl, Department of Medicine, Stanford University School of Medicine. GRRpz was derived from normal prostate epithelium. The WOca cell line is a Gleason Grade 4 cell line.

TABLE 1
Description of cDNA Libraries

| | | Number of |
|---|---|---|
| Library | | Clones in |
| (lib #) | Description | Library |
| 0 | Artificial library composed of deselected clones (clones with no | 673 |
| | associated variant or cluster) | |
| 1 | Human Colon Cell Line Km12 L4: High Metastatic Potential (derived | 308731 |
| | from Km12C) | |
| 2 | Human Colon Cell Line Km12C: Low Metastatic Potential | 284771 |
| 3 | Human Breast Cancer Cell Line MDA-MB-231: High Metastatic | 326937 |
| | Potential; micro-mets in lung | |
| 4 | Human Breast Cancer Cell Line MCF7: Non Metastatic | 318979 |
| 8 | Human Lung Cancer Cell Line MV-522: High Metastatic Potential | 223620 |
| 9 | Human Lung Cancer Cell Line UCP-3: Low Metastatic Potential | 312503 |
| 12 | Human microvascular endothelial cells (HMEC) - UNTREATED | 41938 |
| | (PCR (OligodT) cDNA library) | |
| 13 | Human microvascular endothelial cells (HMEC) - bFGF TREATED | 42100 |
| | (PCR (OligodT) cDNA library) | |
| 14 | Human microvascular endothelial cells (HMEC) - VEGF TREATED | 42825 |
| | (PCR (OligodT) cDNA library) | |
| 15 | Normal Colon - UC#2 Patient (MICRODISSECTED PCR (OligodT) | 282722 |
| | cDNA library) | |
| 16 | Colon Tumor - UC#2 Patient (MICRODISSECTED PCR (OligodT) | 298831 |
| | cDNA library) | |
| 17 | Liver Metastasis from Colon Tumor of UC#2 Patient | 303467 |
| | (MICRODISSECTED PCR (OligodT) cDNA library) | |
| 18 | Normal Colon - UC#3 Patient (MICRODISSECTED PCR (OligodT) | 36216 |
| | cDNA library) | |
| 19 | Colon Tumor - UC#3 Patient (MICRODISSECTED PCR (OligodT) | 41388 |
| | cDNA library) | |
| 20 | Liver Metastasis from Colon Tumor of UC#3 Patient | 30956 |
| | (MICRODISSECTED PCR (OligodT) cDNA library) | |
| 11 | GRRpz Cells derived from normal prostate epithelium | 164801 |
| 22 | WOca Cells derived from Gleason Grade 4 prostate cancer epithelium | 162088 |
| 23 | Normal Lung Epithelium of Patient #1006 (MICRODISSECTED PCR | 306198 |
| | (OligodT) cDNA library) | |
| 24 | Primary tumor, Large Cell Carcinoma of Patient #1006 | 309349 |
| | (MICRODISSECTED PCR (OligodT) cDNA library) | |
| 25 | Normal Prostate Epithelium from Patient IF97-26811 | 279444 |
| 26 | Prostate Cancer Epithelium Gleason 3 + 3 Patient IF97-26811 | 269406 |
| 27 | formal Breast Epithelium from Patient 515 | 239494 |
| 28 | Primary Breast tumor from Patient 515 | 259960 |
| 29 | Lymph node metastasis from Patient 515 | 326786 |
| 30 | formal Prostate Epithelium from Chiron Patient ID 884 | 298431 |
| 31 | Prostate Cancer Epithelium (Gleason 4 + 4) from Chiron Patient ID 884 | 331941 |

[0178] Characterization of Sequences in the Libraries

[0179] After using the software program Phred (ver 0.500925.c, Green and Weing @ 1993-2000) to select polynucleotides having the best quality sequence, the polynucleotides were compared against the public databases to identity any homolgous sequences. The sequences of the isolated polynucleotides were first masked to eliminate low complexity sequences using the BLASTX masking program (Claverie “Effective Large-Scale Sequence Similarity Searches,” In: Computer Methods for Macromolecular Sequence Analysis, Doolittle, ed., Meth. Enzymol. 266:212-227 Academic-Press, NY, NY (1996); see particularly Claveric in “Automated DNA Sequencing and Analysis Techniques” Adams et al., eds., Chap. 36, p 267Academic Press, San Diego, 1994 and Clavene et al Comput. Chem. (1993) 17:191). Generally, masking does not influence the final search results, except to eliminate sequences of relatively little interest due to their low complexity, and to eliminate multiple “hits” based on similarity to repetitive regions common to multiple sequences, e.g., Alu repeats. The remaining sequences were then used in a BLASTN vs. GenBank search; sequences that exhibited greater than 70% overlap; 99% identity, and a p value of less than 1×10e-40 were discarded. Sequences from this search also were discarded if the inclusive parameters were met, but the sequence was ribosomal or vector-derived.

[0180] The resulting sequences from the previous search were classified into three groups (1, 2 and 3 below) and searched in a BLASTX vs. NRP (non-redundant proteins) database search: (1) unknown (no hits in the GenBank search), (2) weak similarity (greater than 45,% identity and p value of less than 1×10e-5), and (3) high similarity; (greater than 60% overlap, greater than 80% identity and p value less than 1×10e-5). Sequences having greater than 70°% overlap, greater than 99% identity, and p value of less than 1×10e-40 were discarded.

[0181] The remaining sequences were classified as unknown (no hits), weak similarity, and high n similarity (parameters as above). Two searches were performed on these sequences. First, a BLAST vs. EST database search was performed and sequences with greater than 99% overlap greater than 99% similarity and a p value of less than 1×10e-40 were discarded. Sequences with a p value of less than 1×10e-65 when compared to a database sequence of human origin were also excluded. Second, a BLASTN vs. Patent GeneSeq database was performed and sequences having greater than 99% identity p value less than 1×10e-40, and greater than 99% overlap were discarded.

[0182] The remaining sequences were subjected to screening using other rules and redundancies in the dataset sequences with a p value of less than c 1×10e-1 in relation to 9a database sequence of human origin were specifically excluded. The final result provided the 8064 sequences listed as SEQ ID NOS:1-6010 in the accompanying Sequence Listing and summarized in Table 2 (inserted prior to claims). Each identified polynucleotide represents sequence from at least a partial mRNA transcript.

### SUMMARY OF POLYNUCLEOTIDES OF THE INVENTION

[0183] Table 2 (inserted prior to claims) provides a summary of polynucleotides isolated as described. Specifically, Table 2 provides) the SEQ ID NO (“SEQ ID”) assigned to each sequence for use in the present specification; 2) the Cluster Identification No. (“CLUSTER”); 3) the Sequence Name assigned to each sequence; 3) the sequence name (“SEQ NAME”) used as an internal identifier of the sequence; 4) the orientation of the sequence (“ORIENT”) (either forward (F) or reverse (R)); 5) the name assigned to the Clone from which the sequence was isolated (“CLONE ID”), and the name of the library from which the sequence was isolated (“LIBRARY”), where the notation indicates that name of the cell line or patient sample (e.g., UC2-NormColon indicates the sequence was isolated from normal colon tissue of the patient assigned the identification UC#2). Because at least some of the provided polynucleotides represent partial mRNA transcripts, two or more polynucleotides may represent different regions of the same mRNA transcript and the same gene and/or may be contained within the same clone. Thus, for example, if two or more SEQ ID NOS: are identified as belonging to the same clone, then either sequence can be used to obtain the full-length mRNA or gene

### Example 2

### Results of Public Database Search to Identify Function of Gene Products

[0184] SEQ ID NOS:1-6010 were translated in all three reading frames, and the nucleotide sequences and translated amino acid sequences used as query sequences to search for homologous sequences in either the GenBank (nucleotide sequences) or Non-Redundant Protein (amino acid sequences) databases. Query and individual sequences were aligned using the BLAST 2.0 programs, available over the world wide at a site sponsored by the National Center for Biotechnology Information, which is supported by the National Library of Medicine and the National Institutes of Health (see also Altschul, et al. Nucleic Acids Res. (1997) 25:33389-3402). The sequences were masked to various extents to prevent searching of repetitive sequences or poly-A sequences, using the BLASTX program for masking low complexity as described above in Example 1.

[0185] Tables 3A and 3B (inserted prior to claims) provides the alignment summaries having a p value 1×10e-2 or less indicating substantial homology between the sequences of the present invention and those of the indicated public databases. Specifically, Table 3A provides the SEQ ID NO of the query sequence, the accession number of the GenBank database entry of the homologous sequence, and the individual p value of each alignment. Table 3A provides the SEQ ID NO of the query sequence, the accession number of the Non-Redundant Protein database entry of the homologous sequence, and the individual p value of each alignment. The alignments provided in Tables 3A and 3B are the best available aliment to a DNA or amino acid sequence at a time just prior to filing of the present specification. The activity of the polypeptide encoded by the SEQ ID NOS listed in these tables can be extrapolated to be substantially the same or substantially similar to the activity of the reported nearest neighbor or closely related sequence. The accession number of the nearest neighbor is reported, providing a publicly available reference to the activities and functions exhibited by the nearest neighbor. The public information regarding the activities and functions of each of the nearest neighbor sequences is incorporated by reference in this application. Also incorporated by reference is all publicly available information regarding the sequence, as well as the putative and actual activities and functions of the nearest neighbor sequences listed in Tables 3A and 3B and their related sequences. The search program and database used for the alignment, as well as the calculation of the p value are also indicated.

[0186] Full length sequences or fragments of the polynucleotide sequences of the nearest neighbors can be used as probes and primers to identify and isolate the full length sequence of the corresponding polynucleotide. The nearest neighbors can indicate a tissue or cell type to be used to construct a library for the full-length sequences of the corresponding polynucleotides.

### Example 3

### Members of Protein Families

[0187] SEQ ID NOS:1-6010 were used to conduct a profile search as described in the specification above. Several of the polynucleotides of the invention were found to encode polypeptides having characteristics of a polypeptide belonging to a known protein family (and thus represent members of these protein families) and/or comprising a known functional domain Table 4 (inserted before claims), provides the SEQ ID NO: of the query sequence, the Sequence Name, the Cluster to which the sequence is assigned, a brief description of the profile hit, the orientation (Direction, “Dir”) of the query sequence with respect to the individual sequence) where forward (for) indicates that the alignment is in the same direction (left to right) as the sequence provided in the Sequence Listing and reverse (rev) indicates that the alignment is with a sequence complementary to the sequence provided in the Sequence Listing) and the score of the profile hit.

[0188] Some polynucleotides exhibited multiple profile hits where the query sequence contains overlapping profile regions, and/or where the sequence contains two different functional domains. Each of the profile hits of Table 4 is described in more detail below. The acronyms for the profiles (provided in parentheses) are those used to identify the profile in the Pfam, Prosite, and InterPro databases. The Pfam database can be accessed through web sites supported by Genome Sequencing Center at the Washington University School of Medicine or by the European Molecular Biology Laboratories in Heidelberg, Germany. The Prosite database can be accessed at the ExPASy Molecular Biology Server on the internet. The InterPro database can be accessed at a web site supported by the EMBL European Bioinformatics Institute. The public information available on the Pfam, Prosite, and InterPro databases regarding the various profiles, including but not limited to the activities, function, and consensus sequences of various proteins families and protein domains, is incorporated herein by reference.

[0189] Seven Transmembrane Integral Membrane Proteins—Rhodopsin Family (7tm_{—}1; Pfam Accession No. PF00001) SEQ ID NOS:2973, 5467, and 5508 correspond to sequences encoding a polypeptides that are members of the seven transmembrane (7tm) receptor rhodopsin family. G-protein coupled receptors of the (7tm) rhodopsin family (also called R7G) are an extensive group of hormones, neurotransmitters, and light receptors which transduce extacellular signals by interaction with guanine nucleotide-binding (G) proteins (Strosberg, Eur. J. Biochem. (1991) 196:1; Kerlavage, Curr. Opin. Struct. Biol. (1991) 1:394; Probst et al., DNA Cell Biol. (1992) 11:1; Savarese et al., Biochem J. (1992) 283:1. The consensus pattern that contains the conserved triplet and that also spans the major part of the third transmembrane helix is used to detect this widespread family of proteins; [GSTALIVMFYWC]-[GSTANCPDE]-{EDPKRH}-x(2)-[LIVMNQGA]-x(2)-[LIVMFT]-[GSTANC]-[LIVMFYWSTAC]-[DENH]-R-[FYWCSH]-x(2)-[LIVM].

[0190] Ank Repeats(ANK; Pfam Accession No. PF0023). SEQ ID NOS:445, 487 and 3013 represent polynucleotides encoding Ark repeat-containing proteins. The ankyrin motif is a 33 amino acid sequence named after the protein ankyrin which has 24 tandem 33-amino-acid motifs. Ank repeats were originally identified in the cell-cycle-control protein cdc10 (Breeden et al., Nature (1987) 329:651). Proteins containing ankyrin repeats include ankyrin, myotropin, I-kappaB proteins, cell cycle protein cdc10, the Notch receptor (Matsuno et al., Development (1997) 124(21):4265); G9a (or BAT8) of the class III region of the major histocompatibility complex (Biochem J. (1993) 290:811-818); FABP, GABP, 53BP2, Lin12, glp-1, SW14, and SW16. The functions of the ankyrin repeats are compatible with a role in protein-protein interactions (Bork, Proteins (1993), 17(4):363; Lambert and Bennet, Eur. J. Biochem. (1993) 211:1; Kerr et al., Current Op. Cell Biol. (1992) 4:496; Bennet et al., J. Biol. Chem (1980), 255:6424).

[0191] Basic Region Plus Leucine Zipper Transcription Factors (BZIP; Pfam Accession No. PF00170). SEQ ID NOS:108, 1714, 3931, and 4356 represent polynucleotides encoding novel members of the family of basic region plus leucine zipper transcription factors. The bZIP superfamily Hurst, Protein Prof. (1995) 2:105, and Ellenberger, Curr. Opin. Struct. Biol. (1994) 4:12) of eukaryotic DNA-binding transcription factors encompasses proteins that contain a basic region mediating sequence-specific DNA-binding followed by a leucine zipper required for dimerization. The consensus pattern for this protein family is: [KR]-x(1,3)-[RKSAQ]-N-x(2)-[SAQ](2)-x-[RKTAENQ]-x-R-x-[RK].

[0192] DEAD and DEAH box families ATP-dependent helicases (Dead box belie, Pfam Accession No. PF00270. SEQ ID NOS:38, 415, and 5756 correspond to sequence encoding a polypeptides that are members of the DEAD box family. A number of eukaryotic and prokaryotic proteins have been characterized (Schmid et al., Mol. Microbiol. (1992) 6:283; Linder et al., Nature (1989) 337:121; Wassarman et al., Nature (1991) 349:463) on the basis of their structural similarity. All are involved in ATP-dependent, nucleic-acid unwinding. All DEAD box family members of the above proteins share a number of conserved sequence motifs, some of which are specific to the DEAD family while others are shared by other ATP-binding proteins or by proteins belong to the helicases ‘superfamily’ (Hodgman, Nature (1988) 333:22 and Nature (1988) 333:578 (Errata)). One of these motifs, called the ‘D-E-A-D-box’, represents a special version of the B motif of ATP-binding proteins. Some other proteins belong to a subfamily which have His instead of the second Asp and are thus said to be ‘D-E-A-H-box’ proteins (Wassarman et al., Nature (1991) 349:463; Harosh et al., Nucleic Acids Res. (1991) 19:6331 Koonin et al., J. Gen. Virol. (1992) 73:989). The following signature patterns are used to identify member for both subfamilies: 1) [LIVMF](2)-D-E-A-D-[RKEN]-x-[LIVMFYGSTN]; and 2) [GSAH]-x-[LIVMF](3)-D-E-[ALIV]-H-[NECR].

[0193] Defensins (defensins; Pfam Accession No. PF00323. SEQ ID NO:486 corresponds to a sequence encoding a polypeptide that is a member of the mammalian defensin family. Defensins are a family of structurally related cysteine-rich peptides which are active against many Gram-positive bacteria, fungi, and enveloped viruses (Lehrer et al., ASM News (1990) 56:315-318; Lehrer et al., Cell (1991) 64:229-230; Kagan et al., Toxicology (1994) 87:131-149; Lehrer et al., Annu. Rev. Immunol. (1993) 11:105-128; White et al, Curr. Opin. Struc/Biol. (1995) 5:521-527). Some defensins inhibit corticotropoid-stimulaed corticosteroid production and also play a significant role in innate immunity to infection and neoplasia. The peptides known to belong to his family range in length from 29 to 35 amino acids and have seven invariant residues, including six cysteines that are all involved in intrachain disulfide bonds. The following consensus pattern is used to identify members of this protein family: C-x-C-x(3,5)-C-x(7)-G-x-C-x(9)-C-C.

[0194] EF Hand (Efhand; Pfam Accession No. PF00036). SEQ ID NO:4373 corresponds to a polynucleotide encoding a member of the EF-hand protein family, a calcium binding domain shared by many calcium-binding proteins belonging to the same evolutionary family (Kawasaki et al., Protein Prof. (1995) 2:305-490). The domain is a twelve residue loop flanked on both sides by a twelve residue alpha-helical domain, with a calcium ion coordinated in a pentagonal bipyramidal configuration. The six residues involved in the binding are in positions 1, 3, 5, 7, 9 and 12; these residues are denoted by X, Y, Z, —Y, —X and —Z. The invariant Glu or Asp at position 12 provides two oxygens for liganding Ca (bidentate ligand). The consensus pattern includes the complete EF-hand loop as well as the first residue which follows the loop and which seem to always be hydrophobic: D-x-[DNS]-{ILVFYW}-[DENSTG]-[DNQGHRK]-{GP}-[LIVMC]-[DENQSTAGC]-x(2)-[DE]-[LIVMFYW].

[0195] Epidermal Growth Factor (EGF; Pfam Accession No. PF00008). SEQ ID NO:3689 represents a polynucleotide encoding a member of the EGF family of proteins. The distinguishing characteristic of this family is the presence of a sequence of about thirty to forty amino acid residues found in epidermal growth factor (EGF) which has been shown to be present, in a more or less conserved form, in a large number of other proteins (Davis, New Biol. (1990) 2:410-419; Blomquist et al., Proc. Natl. Acad. Sci. U.S.A. (1984) 81:7363-7367; Barkert et al., Protein Nucl. Acid Enz. (1986) 29:54-86; Doolittle et al., Nature (1984) 307:558-560; Appella et al., FEBS Lett. (1988) 231:1-4; Campbell and Bork, Curr. Opin. Struct. Biol. (1993) 3:385-392). A common feature of the domain is that the conserved pattern is generally found in the extracellular domain of membrane-bound proteins or in proteins known to be secreted. The EGF domain includes six cysteine residues which have been shown to be involved in disulfide bonds. The main structure is a two-stranded beta-sheet followed by a loop to a C-terminal short two-stranded sheet. Subdomaims between the conserved cysteines strongly vary in length. The following consensus patterns are used to identify members of this family: C-x-C-x(5)-G-x(2)-C and C-x-C-x(s)-[GP]-[FFW]-x(4,8)-C.

[0196] Ets Domain (Ets_Cterm; Pfam Accession No. PF00178). SEQ ID NO:6 represents a polynucleotide encoding a polypeptide with C-terminal homology in the ETS domain. Proteins of this family contain a conserved domain, the “ETS-domain,” that is involved in DNA binding. The domain appears to recognize purine-rich sequences; it is about 85 to 90 amino acids in length, and is rich in aromatic and positively charged residues (Wasylyk et al., Eur. J. Biochem. (1993) 211:718). The ets gene family encodes a novel class of DNA-binding proteins, each of which binds a specific DNA sequence and comprises an ets domain that specifically interacts with sequences containing the common core tri-nucleotide sequence GGA. In addition to an ets domain native ets proteins comprise other sequences which can modulate the biological specificity of the protein. Ets genes and proteins are involved in a variety of essential biological processes including cell growth) differentiation and development, and three members are implicated in oncogenic process.

[0197] Pleckstrin Homology (PH; Pfam Accession No. PF00169). SEQ ID NOS:228 and 6001 correspond to polynucleotides encoding members of the PH family. The pleckstrin homology domain is a domain of about 100 residues that occurs in a wide range of proteins involved in intracellular signaling or as constituents of the cytoskeleton (Mayer et al., Cell (1993) 73.629-630; Haslam et al., Nature (1993) 363:309-310; Musacchio et al., Trends Biochem. Sci. (1993) 18:343-348; Gibson et al., Trends Biochem. Sci. (1994) 19:349-353 Pawson, Nature-(1995) 373:573-580; Ingley and Hemmings, J. Cell Biochem. (1994) 56:436-443, Saraste and Hyvonen, Curr. Opin. Struct. Biol. (1995) 5:463-408). All known structures of PH domains have two perpendicular anti-parallel beta sheets, followed by a C-terminal amphipathic helix. The loops connecting the beta-strands differ greatly in length, making the PH domain relatively difficult to detect (Riddihough, Nat. Struct. Biol. (1994) 1:755-757). There are no totally invariant residues within this domain.

[0198] Protein Kinase (protkinase; Pfam Accession No. PF00069). SEQ ID NOS:9, 39, 118, 229 and 4151 represent polynucleotides encoding-protein kinases, which catalyze phosphorylation of proteins in a variety of pathways, and are implicated in cancer. Eukaryotic protein kinases (Hanks et al., FASEB J. (1995) 9:576; Hunter, Meth. Enzymol. (1991) 200:3; Hanks et al., Meth. Enzymol. (1991) 200:38; Hanks, Curr. Opin. Struct. Biol. (1991) 1:369; Hanks et al., Science (1988) 241.42) belong to a very extensive family of proteins that share a conserved catalytic core common to both serine/threonine and tyrosine protein kinases. There are a number of conserved regions in the catalytic domain of protein kinases. The first region, located in the N-terminal extremity of the catalytic domain, is a glycine-rich stretch of residues in the vicinity of a lysine residue, which has been shown to be involved in ATP binding. The second region, located in the central part of the catalytic domain, contains a conserved aspartic acid residue that is important for the catalytic activity of the enzyme (Knighton et al., Science (1991) 253:407).

[0199] The protein kinase profile includes two signature patterns for this second region: one specific for serine/threonine kinases and the other for tyrosine kinases. A third profile is based on the alignment m Hanks et al. (FASEB J. (1995) 9:576) and covers the entire catalytic domain. The consensus patterns are as follows: 1) [LIV]-G-{P}-G-{P}-[FYWMCGSTNH]-[SGA]-{PW}-[LIVCAT]-{PD}-x-[GSTACLIVMFY]-x(5,18)-[LIVMFYWCSTAR]-[AIVP]-[LIVMFAGCKR]-K, where K binds ATP; 2) [LIVMFYC]-x-[HY]-x-D-[LIVMFY]-K-x(2)-N-[LIVMFYCT](3), where D is an active Site residue; and 3) [LIVMFYC]-x-[HY]-x-D-[LIVMFY]-[RSTAC]-x(2)-N-[LIVMFYC], where D is an active site residue.

[0200] Retroviral_aspartyl_protease (RVP; Pfam Accession No. PF00077). SEQ ID NO:2038 corresponds to a polynucleotide encoding a member of the Aspartyl Protease family. Aspartyl proteases also know as acid proteases, are a widely distributed family of proteolytic enzymes known to exist in vertebrates, fungi, plants, retoviruses and some plant viruses (Foltman, Essays Biochem. (1981) 17.52-84, Davies, Annu. Rev. Biophys. Chem. (1990) 19:189-215; Rao et al., Biochemistry (1991) 30:4663-4671). Most retroviral aspartyl proteases (RVP) are homodimers of a chain of about 95 to 125 amino acids. In most retroviruses, the protease is encoded as a segment of a polyprotein which is cleaved during the maturation process of the virus. RVP is generally part of the pol polyprotein and, more rarely, of the gag polyprotein. The consensus pattern is as follows: [LIVMFGAC]-[LIVMTADN]-[LIVFSA]-D-[ST]-G-[STAV]-[STAPDENQ]-x-[LIVMFSTNC]-x-[LIVMFGTA] [D is the active site residue].

[0201] Reverse Transcriptase (rvt; Pfam Accession-No. PF00078). SEQ ID NOS: 1511 and 2514 represent polynucleotides encoding reverse transcriptases, which occur in a variety of mobile elements, including retrotransposons, retoviruses, group II introns, bacterial msDNAs, hepadnaviruses, and caulimoviruses (Xiong Eickbush, EMBO J (1990) 9:3353-3362). Reverse transcriptases catalyze RNA-template-directed extension of the 3′-end of a DNA strand by one deoxnucleotide at a time and require an RNA or DNA primer.

[0202] Transforming growth factor beta like domain (TGF_beta; Pfam Accession No. PF00019). SEQ ID NO:5522 represents a polyucleotide encoding a polypeptide of the TGF-beta family, Proteins from the transforming growth factor-beta family are active as homo- or hetero-dimers with the two chains being linked by a single disulfide bond (Roberts and Sporn, In Peptide growth factors and their receptors, Handbook of Experimental Pharmacology, Vol. 95, pp 419-475, Springer Verlag, Heidelberg, (1990); Burt, Biochem. Biophys. Res. Commun. (1992) 184:590-595; Burt and Law, Prog. Growth Factor Res. (1994) 5:99-118). It is known from X-ray studies that all the other cysteines of the sequence are involved in interchain disulfide bonds (Daopin et al., Science (1992) 257:369-373). Members of this family can be recognized by the following consensus pattern: [LIVM]-x(2)-P-x-(2)-[FY]-x)(4)-C-x-G-x-C (The two C's are involved in disulfide bonds).

[0203] WD Domain (WD40), G-Beta Repeats (WD domain; Pfam Accession No. PF00400). SEQ ID NO:117 represents a member of the WD domain/G-beta repeat family. Beta-transducin (G-beta) is one of the three subunits (alpha, beta, and gamma) of the guanine nucleotide-binding proteins (G proteins) which act as intermediaries in the transduction of signals generated by transmembrane receptors (Gilman, Annu. Rev. Biochem. (1987) 56:615). The alpha subunit binds to and hydrolyzes GTP; the beta and gamma subunits are required for the replacement of GDP by GTP as well as for membrane anchoring and receptor recognition. In higher eukaryotes G-beta exists as a small multigene family of highly conserved proteins of about 340 amino acid residues. Structurally, G-beta has eight tandem repeats of about 40 residues, each containing a central Tr-Asp motif (this type of repeat is sometimes called a WD-40 repeat). The consensus pattern for the WD domain/G Beta repeat family is: [LIVMSTAC]-[LIVMFYWSTAGC] [LIMSTAG]-[LIVMSTAGC]-x(2)-[DN]-x(2)-[LIVMSTAC]-x-[LIVMFSTAG]-W-[DEN]-[LIVMFSTAGCN].

[0204] Zinc Finger, C2H2 Type (Zincfing_C₂H₂; Pfam Accession No. PF00096). SEQ ID NOS: 61, 502, 700, 847, 2034, 2054, 3403, 3524, 3653, 3723, 4688, and 4979 correspond to polynucleotides encoding members of the C₂H₂ type zinc finger protein family, which contain zinc finger domains that facilitate nucleic acid binding (Klug et al., Trends Biochem. Sci. (1987) 12:464, Evans et al., Cell (1988) 52:1; Payre et al., FEBS Lett. (1988) 234:245; Miller et al., EMBO J. (1985)-4:1609; and Berg, Proc. Natl. Acad. Sci. USA (1988) 85:99). In addition to the conserved zinc ligand residues, a number of other positions are also important for the structural integrity of the C₂H₂ zinc fingers (Rosenfeld et al., J. Biomol. Struct Dyn. (1993) 11:557). The best conserved position, which is generally an aromatic or aliphatic residue, is located four residues after the second cysteine. The consensus pattern for C₂H₂ zinc fingers is: C-x(2,4)-C-x(3)-[LIVMFYWC]-x(8)-H-x(3,5)-H. The two C's and two H's are zinc ligands.

[0205] Zinc Finger, C2HC Type (Zincfing C2HC; Pfam Accession No. PF01530). SEQ ID NO:3814 represents a member of the C2HC zinc finger family. The 18 residue C2HC domain is mainly found in the retroviral nucleocapsid protein, and is required for viral genome packaging and for the early infection process (Katz and Jentoft, Bioessays (1989) 11:176-181; Urbaneja et al., J Mol Biol. (1999) 287:59-75). In addition, the CCHC domain is found in eukaryotic proteins involved in RNA binding or single-strand DNA binding.

[0206] Zinc finger, C3HC4 type (RING finger), signature (Zincfing C3HC4; Pfam Accession No. PF00097). SEQ ID NO:3140 represents a polynucleotide encoding a polypeptide having a C3HC4 type zinc-finger signature A number of eukaryotic and viral proteins contain this signature, which is primarily a conserved cysteine-rich domain of 40 to 60 residues (Borden et al., Curr. Opin. Struct. Biol. (1996) 6'395) that binds two atoms of zinc, and is probably involved in mediating protein-protein interactions. The 3D structure of the zinc ligation system is unique to the RING domain and is referred to as the “cross-brace” motif. The spacing of the cysteines in such a domain is C-x(2)-C-x(9 to 39)-C-x(1 to 3)-H-x(2 to 3)-C-x(2)-C-x(4 to 48)-C-x(2)-C. The signature patter for the C3HC4 finger is based on the domain's central region: C-x-H-x-[LIVMFY]-C-x(2)-C-[LIVMYA].

[0207] Zinc finger, CCCH type (Zincfing CCCH; Pfam Accession No. PF00642). SEQ ID NO:877 corresponds to a polynucleotide encoding a member of the CCCH zinc finger protein family. This domain is present in many eukaryotic proteins including zinc finger proteins involved in cell cycle or growth phase-related regulation and regulatory proteins involved in regulating the response to growth factors. It has been shown that proteins containing the CCCH, zinc finger interact with the 3′ untranslated region of various mRNA (Carballo et al. Science (1998) 281:1001-1005; Lai et al. Mol. Cell Biol. (1999) 19:4311-4323) and that this domain is often present in two copies. The consensus pattern for the CCCH zinc fingers is: C-x8-C-x5-C-x3-H.

### Example 4

### Description of Libraries and Detection of Differential Expression

[0208] The relative expression levels of the polynucleotides of the invention were assessed in several libraries prepared from various sources, including cell lines and patient tissue samples. Table 1 above provides a summary of these libraries, including the shortened library name, the mRNA source used to prepared the cDNA library, the “nickname” of the library that is used in the tables below (in quotes), and the approximate number of clones in the library.

[0209] Each of the libraries is composed of a collection of cDNA clones that in turn a representative of the mRNAs expressed in the indicated mRNA source. In order to facilitate the analysis of the millions of sequences in each library, the sequences were assigned to clusters. The concept of “cluster of clones” is derived from a sorting grouping of cDNA clones based on their hybridization pattern to a panel of roughly 300 7 bp oligonucleotide probes (see Drmanac et al., Genomics (1996) 37(1):29) Random cDNA clones from a tissue library are hybridized at moderate stringency to 300 7p oligonucleotides. Each oligonucleotide has some measure of specific hybridization to that specific clone. The combination of 300 of these measures of hybridization for 300 probes equals the “hybridization signature” for a specific clone. Clones with similar sequence will have similar hybridization signatures. By developing a sorting/grouping algorithm to analyze these signatures, groups of clones in a library can be identified and brought together computationally. These groups of clones are termed “clusters” Depending on the stringency of the selection in the algorithm (similar to the stringency of hybridization in a classic library cDNA screening protocol), the “purity” of each cluster can be controlled. For example, artifacts of clustering may occur in computational clustering just as artifacts can occur in “wet-lab” screening of a cDNA library, with 400 bp cDNA fragments, at even the highest stringency. The stringency used in the implementation of cluster herein provides groups of clones that are in general from the same cDNA or closely related cDNAs. Closely related clones can be a result of different length clones of the same cDNA, closely related clones from highly related gene families, or splice variants of the same cDNA.

[0210] Differential expression for a selected cluster was assessed by first determining the number of cDNA clones corresponding to the selected cluster in the first library (Clones in 1^{st}), and the determining the number of cDNA clones corresponding to the selected cluster in the second library (Clones if 2^{nd}). Differential expression of the selected cluster in the first library relative to the second library is expressed as a “ratio” of percent expression between the two libraries. In general “ratio” is calculated by 1) calculating the percent of the selected cluster in the first library by dividing the number of clones corresponding to a selected cluster in the first library by the total number of clones analyzed from the first library; 2) calculating the percent expression of the selected cluster in the second library by dividing the number of clones corresponding to a selected cluster in a second library by the total number of clones analyzed library 3) dividing the calculated percent expression from the first library by the calculated percent expression from the second library. If the “number of clones” corresponding to a selected cluster in a library is zero, the value is set at 1 to aid in calculation. The formula used in calculating the ratio takes into account the “depth” of each of the libraries being compared; i.e., the total number of clones analyzed in each library.

[0211] In general, a polynucleotide is significantly differentially expressed between two samples when the ratio value is greater than at least about 2, preferably greater than at least about 3, more preferably greater than at least about 5, where the ratio value is calculated using the method described above. The significance of differential expression determined using a z score test (Zar, Biostatistic Analysis, Prentice, Hall. Inc. USA, “Differences Between Proportions,” pp 296-298 (1974).

[0212] Using this approach, a number Of polynucleotide sequences were identified as being differentially expressed between, for example high metastatic potential cancer tissue and low metastatic cancer cells, and between cells derived from metastatic cancer tissue and normal tissue Evaluation of the levels of expression of the genes corresponding to these sequences can be valuable in diagnosis, prognosis, and/or treatment (e.g., to facilitate rationale design of therapy, expressed sequences described herein can be therapeutic targets due to their involvement in regulation (e.g., inhibition or promotion) of development of, for example, the metastatic phenotype. For example, sequences that correspond to genes that are increased in expression in high metastatic potential cells relative to normal or non-metastatic tumor cells may encode genes or regulatory sequences involved in processes such as angiogenesis, differentiation, cell replication, and metastasis.

[0213] Detection of the relative expression levels of differentially expressed polynucleotides described herein can provide valuable information to guide the clinician in the choice of therapy. For example, a patient sample exhibiting an expression level of one or more of these polynucleotides that corresponds to a gene that is increased in expression in metastatic or high metastatic potential cells may warrant more aggressive treatment for the patient. In contrast, detection of expression levels of a polynucleotide sequence that corresponds to expression levels associated with that of low metastatic potential cells may warrant a more positive prognosis than the gross pathology would suggest.

[0214] A number of polynucleotide sequences of the present invention are differentially expressed between human microvascular endothelial cells (HMVEC) that have been treated with growth factors relative to untreated HMVEC Sequences that are differentially expressed between growth factor-treated HMVEC and untreated HMVEC can represent sequences encoding gene products involved in angiogenesis, metastasis (cell migration) and other development and oncogenic processes. For example, sequences that are more highly expressed in HMVEC treated with growth factors (such as bFGF or VEGF) relative to untreated HMVEC can serve as drug targets for chemotherapeutics, e.g., decreasing expression of such up-regulated genes or inhibiting the activity of the encoded gene product would serve to inhibit tumor cell angiogenesis. Detection of expression of these sequences in colon cancer tissue can be valuable in determining diagnostic, prognostic and/or treatment information associated with the prevention of achieving the malignant state in these tissues, and can be important in risk assessment for a patient. A patient sample displaying an increased level of one or more of these polynucleotides may thus warrant closer attention or more frequent screening procedures to catch the malignant state as early as possible.

[0215] The differential expression of the polynucleotides can thus be used as, for example, diagnostic and/or prognostic markers, for risk assessment, patient treatment and the like. These polynucleotides can also be used in combination with other molecular and/or biochemical markers.

[0216] The differential expression data for polynucleotides of the invention that have been identified as being, differentially expressed across various combinations of the libraries described above is summarized in Table 5 (inserted prior to the claims). Table 5 provides: 1) the Sequence Identification Number (“SEQ ID NO”) assigned to the polynucleotide; 2) the cluster (“CLUSTER”) to which the polynucleotide has been assigned as described above; above; 3) the library comparisons that resulted in identification of the polynucleotide as being differentially expressed (“PAIR AB”), where the cDNA libraries used are referenced by their library numbers; 4) the number of clones corresponding to the polynucleotide in the first library listed (“CLONES A”); 5) the number of clones corresponding to the polynucleotide in the second library listed (“CLONES B”); 6) the “RATIO PLUS” where the comparison resulted in a finding that the number of clones in library A is greater than the number of clones in library B; and 7) the “RATIO MINUS” where the comparison resulted in a finding that the number of clones in library B is greater than the number of clones in library A.

[0217] Detection of expression of genes that correspond to the above polynucleotides may be of particular interest in diagnosis, prognosis, risk assessment, and monitoring of treatment Furthermore, differential expression of a specific gene across multiple libraries can also be indicative of a gene whose expression is associated with, for example, suppression of the metastatic phenotype or with development of the cell toward a metastatic phenotype. For example, SEQ ID NO 3744 corresponds to a gene that is expressed at relatively higher levels in metastatized colon tumor then in normal colon tissue. Thus a relatively increased level of expression of the gene corresponding to SEQ ID NO:3744 may be used as marker of a metastatic or pre-metastatic colon cells either alone or in combination with other markers.

[0218] Some polynucleotides exhibited similar differential expression trends in libraries of different tissue origin (see, e.g., SEQ ID NO:337). These data suggest that the differential expression patterns of some genes associated with development of tumor indicate a role for those genes that is non-specific to the tissue of origin.

### Example 5

### Detection of Differential Expression Using Arrays

[0219] mRNA isolated from samples of cancerous and non colon tissue obtained from patients were analyzed to identify genes differentially expressed in cancerous and normal cells. Normal and cancerous cells collected from cryopreserved patient tissues were isolated using laser capture microdissection (LCM) techniques, which techniques are well known in the art (see, e.g., Ohyama et al. (2000) Biotechniques 29:530-6; Curran et al. (2000) Mol. Pathol. 53:64-8, Suarez-Quian et al. (1999) Biotechniques 26:328-35; Simone et al. (1998) Trends Genet 14:272-6; Conia et al. (1997) J. Clin. Lab. Anal. 11:28-38; Emmert-Buck et al. (1996) Science 274:998-1001).

[0220] Table 6 (inserted before the claims) provides information about each patient from which colon tissue samples were isolated, including: the Patient ID (“PT ID”) and Path ReportID (“Path ID”), which are numbers assigned to the patient and the pathology reports for identification purposes; the group (“Grp”) to which the patients have been assigned; the anatomical location of the tumor (“Anatom Loc”); the primary tumor size (“Size”); the primary tumor grade (“Grade”); the identification of the histopathological grade (“Histo Grade”); a description of local sites to which the tumor had invaded (“Local Invasion”); the presence of lymph node metastases (“LN Met”); the incidence of lymph node metastases (provided as a number of lymph-nodes positive for metastasis over the number of lymph nodes examined) (“Incidence Lymphnode Met”); the “Regional Lymphnode Grade”; the identification or detection of metastases to sites distant to the tumor and their location (“Dist Met & Loc”); the grade of distant metastasis (“Dist Met Grade”); and general comments about the patient or the tumor (“Comments”). Histophatology of all primary tumors indicated the tumor was adenocarcinoma except for Patient D Nos. 130 (for which no information was provided), 392 (in which greater than 50% of the cells were mucinous carcinoma), and 784 (adenosquamous carcinoma). Extranodal extensions were described in three patients, Patient ID Nos. 784, 789, and 791. Lymophovascular invasion was described in Patient ID Nos. 128, 278, 517, 534, 74, 786, 789, 791, 890, and 892. Crohn's-like infiltrates were described in seven patients, Patient ID Nos. 52, 264, 268, 392, 393, 784, and 791. Table 7 (below) provides information about the patients from whom the prostate tissue was isolated.

TABLE 7
Prostate paitent data.

| | | Normal Prostate |
|---|---|---|
| Prostate Patient ID | Tumor Gleason Grade | Description |
| 96 | 3 + 3 Adenocarcinoma | Normal prostate; |
| | | Benign hyperplasia |
| 282 | 4 + 3 Adenocarcinoma | Normal prostate; |
| | | Benign hyperplasia |
| 286 | 3 + 3 Adenocarcinoma | Normal prostate; |
| | | Benign hyperplasia |
| 294 | 3 + 4 Adenocarcinoma | Normal prostate; |
| | | Benign hyperplasia |
| 362 | 3 + 3 Adenocarcinoma | Normal prostate; |
| | | Benign hyperplasia |
| 428 | 4 + 3 Adenocarcinoma | Normal prostate; |
| | | Benign hyperplasia |
| 492 | 3 + 3 Adenocarcinoma | Normal prostate; |
| | | Benign hyperplasia |
| 492 | 3 + 3 Adenocarcinoma | Normal prostate; |
| | | Benign hyperplasia |
| 493 | 3 + 4 Adenocarcinoma | Normal prostate; |
| | | Benign hyperplasia |
| 510 | 3 + 3 Adenocarcinoma | Normal Prostate; |
| | | Benign hyperplasia |

[0221] Identification of Differentially Expressed Genes

[0222] cDNA probes were prepared from total RNA isolated from the patient cells described above. Since LCM provides for the isolation of specific cell types to provide a substantially homogenous cell sample, this provided for a similarly pure RNA sample.

[0223] Total RNA was first reverse transcribed into cDNA using a primer containing a T7 RNA polymerase promoter, followed by second strand DNA synthesis. cDNA was then transcribed in vitro to produce antisense RNA using the T7 promoter-mediated expression (see, e.g., Luo et al. (1999) Nature Med 5:117-122), and the antisense RNA was then converted into cDNA. The second set of cDNAs were again transcribed in vitro, using the T7 promoter, to provide antisense RNA. Optionally, the RNA was again converted into cDNA, allowing for up to a third round of T7-mediated amplification to produce more antisense RNA. Thus the procedure provided for two or three rounds of in vitro transcription to produce the final RNA used for fluorescent labeling.

[0224] Fluorescent probes were generated by first adding control RNA to the antisense RNA mix, and producing fluorescently labeled cDNA from the RNA starting material. Fluorescently labeled cDNAs prepared from the tumor RNA sample were compared to fluorescently labeled cDNAs prepared from normal cell RNA sample. For example, the cDNA probes from the tumor cells were labeled with Cy3 fluorescent dye (green) and the cDNA probes prepared from the tumor cells were labeled with Cy5 fluorescent dye (red), and vice versa.

[0225] each array used had an identical layout and control spot et. Each microarray was divided into two areas, each area having an array with, on each half, twelve groupings of 32×12 spots, for a total of about 9,216 spots on each array. The two areas are spotted identically which provide for at least two duplicates of each clone per array.

[0226] Polynucleotides for use on the arrays were obtained from both publicly available sources and from cDNA libraries generated from selected cell lines and patent tissues. PCR products of from about 0.5 kb to 2.0 kb amplified from these sources were spotted onto the array using a Molecular Dynamics Gen III spotter according to the manufacturer's recommendations. For polynucleotides described herein, the microarray spot contained a clone having a cDNA from which the sequence was derived. The first row of each of the 24 regions on the array had about 32 control spots, including 4 negative control spots and 8 test polynucleotides. The test polynucleotides were spiked into each sample before the labeling reaction with a range of concentrations from 2-600 pg/slide and ratios of 1:1. For each array design, two slides were hybridized with the test samples reverse-label the labeling reaction. This provided for about four duplicate measurements for each clone, two of one color, and two of the other, for each sample.

[0227] Table 8 (inserted before the claims) describes sequences present on the arrays. Table 8 includes: 1) at the SEQ ID NO of the sequence of the polynucleotide; and 2) the Spot ID, which is a unique identifier for each spot containing target sequence of interest on all arrays used.

[0228] The differential expression assay was performed by mixing equal amounts of probes from tumor cells and normal cells of the same patient. The arrays were prehybridized by incubation for about 2 hrs at 60° C. in 5×SSC/0.2% SDS/1 mM EDTA, and then washed three times in water and twice in isopropanol. Following prehybridization of the array, the probe mixture was then hybridized to the array under conditions; of high stringency (overnight at 42° C. in 50% formamide, 5×SSC, and 0.2% SDS. After hybridization, the array washed at 550C three times as follows: 1) first wash in 1× SSC/0.2% SDS; 2)-second wash in 0.1×SSC/0.2% SDS; and 3) third wash in 0.1×SSC.

[0229] The arrays were then scanned for green and red fluorescence using a Molecular Dynamics Generation III dual color laser-scanner/detector. The images were, processed using BioDiscovery Autogene software, and the data from each scan set normalized to provide for a ratio of expression relative to normal. Data from the microarray experiments was analyzed according to the algorithms described in U.S. application Ser. No. 60/252,358, filed Nov. 20, 2000, by E. J. Moler, M. A. Boyle, and F. M. Randazzo, and entitled “Precision and accuracy in cDNA microarray data,” which application is specifically incorporated herein by reference.

[0230] The experiment was repeated, this time labeling the two probes with the opposite color in order to perform the assay in both “color directions.” Each experiment was sometimes repeated with two more slides (one in each color direction). The level fluorescence for each sequence on the array expressed as a ratio of the geometric mean of 8 repliate spots/genes from the four arrays or 4 replicate spots/gene from 2 arrays or some other permutation. The data were normalized using the spiked positive controls present in each duplicated area, and the precision of this normalization was included in the final determination of the significance of each differential. The fluorescent intensity of each spot was also compared to the negative controls in each duplicated area to determine which spots have detected significant expression levels in each sample.

[0231] A statistical analysis of the fluorescent intensities was applied to each set of duplicate spots to assess the precision and significance of each differential measurement, resulting in a p-value testing the null hypothesis that there is no differential in the expression level between the tumor and normal samples of each patient. During initial analysis of the microarrays, the hypothesis was accepted if p>10⁻³ and the differential ratio was, set to 1.000 for those spots. All other spots have a significant difference in expression between the tumor and normal sample. If the tumor sample has detectable expression and the normal does not the ratio is truncated at 1000 since the value for expression in the normal sample would be zero, and the ratio would not be a mathematically useful value (e.g., infinity). If the normal sample has detectable expression and the tumor does not, the ratio is truncated to 0.001, since the value, for expression in the tumor sample would be zero and the ratio would not be a mathematically useful value. These latter two situations are referred to herein as “on/off.” Database tables were populated using 95% confidence level (p>0.05).

[0232] Table 8 (inserted before the claims) provides the results for gene products differentially expressed in the colon tumor samples relative to normal tissue samples. Table 8 includes: 1) SEQ ID NO 2) the spot identification number (“SpotID”); 3) the percentage of patients tested in which expression levels, of the gene (as detected using the corresponding clone) was at least 2-fold greater in cancerous colon tissue (primary colon tumor) than in matched normal tissue (“Colon>2×T/N,”); 4) the percentage of patients tested in which expression levels of the gene was less than or equal to one-half of the expression level in matched normal cells (“Colon<=halfx T/N”); and 5) the colon number ratios, indicating the number of patients upon which the provided ratios was based.

[0233] Table 9 below provides the data for differential expression analysis on the arrays using samples from metastazed colon tissue. In this example, the samples used for hybridization to sequences on the microarray were derived from the matched metastasized (MT) colon tissue and normal(N) colon tissues of the patients. Table 9 includes: 1) the SEQ ID NO; 2) the percentage of patients tested in which expression levels of the gene (as detected using the corresponding clone) was at least 2 fold greater in metastisized cancerous colon tissue (MT) than in matched normal tissue (“Colon>2×MT/N”); 5) the percentage of patients tested in which expression levels of the gene was less than or equal to one-half of the expression level in matched normal cells (“Colon<=halfx T/N”); and 8) the colon number ratios, indicating the number of patients upon which the provided ratios was based. The corresponding data with the same sequence of the colon tumor tissue versus matched normal colon tissue (T/N) are provide for convenience in comparison.

TABLE 9
Polynucleotides Corresponding to Differnetially Expressed
Genes in Metastasized Colon Cancer Tissue

| SEQ | | | Colon MT/N | | | |
|---|---|---|---|---|---|---|
| ID | Colon | Colon MT/N < | Num Ratios | Colon T/N > | Colon T/N < | Colon T/N |
| NO | MT/N > 2× | half× | by Clone | 2× | half× | Num Ratios |
| 217 | 40.0 | 0.0 | 5.0 | 0.0 | 50.0 | 8.0 |
| 324 | 0.0 | 40.0 | 5.0 | 0.0 | 37.5 | 8.0 |
| 1653 | 0.0 | 40.0 | 5.0 | 0.0 | 37.5 | 8.0 |
| 1972 | 40.0 | 0.0 | 5.0 | 0.0 | 42.9 | 7.0 |
| 2346 | 20.0 | 40.0 | 5.0 | 0.0 | 85.7 | 7.0 |
| 2352 | 20.0 | 80.0 | 5.0 | 0.0 | 71.4 | 7.0 |
| 2353 | 20.0 | 40.0 | 5.0 | 0.0 | 85.7 | 7.0 |
| 2647 | 0.0 | 40.0 | 5.0 | 0.0 | 62.5 | 8.0 |
| 5341 | 0.0 | 40.0 | 5.0 | 0.0 | 37.5 | 8.0 |

[0234] Table 10 below provides the data for differential expression analysis on the arrays using samples from matched cancerous and normal prostrate (PT/N). Table 10 includes 1) the SEQ ID NO; 2) the percentage of patients tested in which expression levels of the gene (as described using the corresponding clone) was at least 2-fold greater in metastisized cancerous prostate tissue (PT) than in matched normal tissue (“Con>2× PT/N”); 3) the percentage of patients tested in which expression levels of die gene was less than or equal to one-half of the expression level in match led normal cells (“Colon<=halfx PT/N”); and 4) the prostate PT/N number ratios, indicating the number of patients upon which provide ratios based. The corresponding data with the same sequences for the colon tumor versus normal (T/N) and metastasized-colon tissue versus normal (MT/N) are provided for convenience in comparison.

TABLE 10
Polynucleotides Corresponding to Differnetially Expressed Genes in Prostate Cancer Tissue

| | | | Prostate | | | | | | Colon |
|---|---|---|---|---|---|---|---|---|---|
| SEQ | Prostate | Prostate | (PT/N) | Colon | Colon | Colon T/N | Colon | Colon | MT/N |
| ID | (PT/N) > | (PT/N) < | Num | T/N > | T/N < | Num | MT/N > | MT/N < | Num |
| NO | 2× | half× | Ratios | 2× | half× | Ratios | 2× | half× | Ratios |
| 139 | 11.1 | 33.3 | 9.0 | 0.0 | 50.0 | 8.0 | | | |
| 490 | 37.5 | 12.5 | 8.0 | 0.0 | 71.4 | 7.0 | | | |
| 629 | 33.3 | 11.1 | 9.0 | | | | | | |
| 644 | 12.5 | 37.5 | 8.0 | 0.0 | 42.9 | 7.0 | | | |
| 1674 | 33.3 | 0.0 | 9.0 | | | | | | |
| 2346 | 37.5 | 25.0 | 8.0 | 0.0 | 85.7 | 7.0 | 20.0 | 40.0 | 5.0 |
| 2352 | 37.5 | 12.5 | 8.0 | 0.0 | 71.4 | 7.0 | 20.0 | 80.0 | 5.0 |
| 2420 | 22.2 | 33.3 | 9.0 | | | | | | |
| 3296 | 33.3 | 0.0 | 9.0 | 0.0 | 37.5 | 8.0 | | | |

### Example 6

### Antisense Regulation of Gene Expression

[0235] The expression of the differentially expressed genes represented by the polynucleotides in the cancerous cells can be further analyzed using antisense knockout technology to confirm the role and function of the gene product in turnorigenesis, e.g., in promoting a metastatic phenotype.

[0236] Methods for analysis using antisense technology are well known in the art. For example, a number of different oligonucleotides complementary to the mRNA generated by the differentially, expressed genes identified herein can be designed as antisense oligonucleotides and tested for their ability to suppress expression of the genes. Sets of antisense oligomers specific to each candidate target are designed using the sequences of the polynucleotides corresponding to a differentially expressed gene and the software program HYBsimulator Version 4 (available for Windows 95/Windows NT or for Power Macintosh, RNAture, Inc. 1003 Health Sciences Road, West, Irvine, Calif. 92612 USA). Factors considered when designing antisense oligonucleotides in 1) the secondary structure of oligonucleotides 2) the secondary structure of the target gene; 3) the specificity with no or minimum cross-hybridization to other expressed genes; 4) stability; 5) length and 6) terminal GC content. The antisense oligonucleotide is designed to so that it will hybridize to its target sequence under conditions of high stringency at physiological temperatures (e.g., an optimal temperature for the cells in culture to provide for hybridization in the cell, e.g., about 37° C.), but with minimal formation of homodimers.

[0237] Once synthesized and quantitated, the oligomers are screened for efficiency of a transcript knock-out in a panel of cancer cell lines. The efficiency of the knock-out is determined by analyzing mRNA levels using lightcycler quantification. The oligomers that resulted in the highest level of transcript knock-out, wherein the level was at least about 50%, preferably about 80-90%, up to 95% or more up to undetectable message, are selected for use in a cell-based proliferation assay, an anchorage independent growth assay, and an apoptosis assay.

[0238] For example, where the polynucleotide is identified as having a role in colon cancer, the ability of the corresponding designed antisense oligonucleotide to inhibit gene expression is tested through transfection into SW620 colon colorectal carcinoma cells. For each transfection mixture, a carrier molecule, preferably a lipitoid or cholesteroid, is prepared to a working concentration of 0.5 mM in water, sonicated to yield a uniform solution and filtered through a 0.45 μm PVDF membrane. The antisense or control oligonucleotide is then prepared to a working concentration of 100 μmM in sterile Milllipore water. The oligonucleotide is further diluted in OptiMEM™ (Gibco/BRL), in a microfuge tube, to, 2 μM, or approximately 20 μg oligo/ml of OPtiMEM™. In a separate microfuge tube, lipitoid or cholesteroid, typically in the amount of about 1.5-2 nmol lipitoid/μg antisense oligonucleotide, is diluted into the same volume of OPtiMEM™ used t dilute the olionucleotide. The diluted antisense oligonucleotide is immediately added to the diluted lipitoid and mixed by pipetting up and down. Oligonucleotide is added to the cells to a final concentration of 30 nM.

[0239] The level of target RNA that corresponds to a target gene of interest in the transfected cells quantitated in the cancer cell lines using the Roche LightCycler™ realtime PCR machine. Values for the target mRNA are normalized versus an internal control (e.g., beta-actin). For each 20 μl reaction, extracted RNA (generally 0.2-1 g total) is placed into a sterile 0.5 or 1.5 ml microcentrifuge tube, and water added to a total volume of 12.5 μl. To each tube 7.5 μl of a buffer/enzyme mixture is added, which is prepared by mixing (in the order listed) 2.5 μl H₂O, 2.0 μl 10× reaction buffer, 10 μl oligo dT (20 μmol), 1.0 it dNTP mix (10 mM each), 0.5 μl RNAsin® (20u) (Ambion, Inc, Hialeah, Fla.), and 0.5 μl MMLV reverse transcriptase (50u) (Ambion, Inc.). The contents are mixed by pipetting up and down, and the reaction mixture incubated at 42° C. for 1 hour. The contents of each tube are centrifuged prior to amplification.

[0240] An amplification mixture is prepared by mixing in the following order: 1×PCR buffer II, 3 mM MgCl₂, 140 μM each dNTP, 0.175 μmol each oligo, 1:50,000 dil of SYBR® Green, 0.25 mg/ml BSA, 1 unit 7Taq polymerase, and H₂O to 20 μl. (PCR buffer II is available in 10× concentration from Perkin-Elmer, Norwalk, Conn.). In 1× concentration it contains 110-M Tris pH 8.3 and 50 mM KCl. SYR® Green (Molecular Probes, Eugene, Oreg.) is a dye which fluoresces when bound to double stranded DNA. As double stranded PCR product is produced during amplification, the fluorescence from SYBR® Green increases. To each 20 μl aliquot of amplification mixture, 2 μl of template RT are added, and amplification carried out according to standard protocols.

[0241] The results can be expressed as the percent decrease in expression of the corresponding gene product relative to non-transfected cells, vehicle-only transfected (mock-transfected) cells, or cells transfected with reverse control oligonucleotides.

### Example 7

### Effect of Expression on Proliferation

[0242] The effect of gene expression on the inhibition of cell proliferation can be assessed in, for example, metastatic breast cancer cell lines (MDA-MB-231 (“231”)), SW620 colon colorectal carcinoma cells or SKOV3 cells (a human ovarian carcinoma cell line).

[0243] Cells are plated to approximately 60-80% confluency in 96-well dishes. Antisense or reverse control oligonucleotide is diluted to 2 μM in OptiMEM™ and added to OptiMEM™ into which the delivery vehicle, lipitoid 116-6 in the case of SW620 cells or 1:1 lipitoid 1:cholesteroid 1 in the case of MDA-MB-231 cells, had been diluted. The oligo/delivery vehicle mixture is then further diluted into medium with serum on the cells. The final concentration of oligonucleotide for all experiments was 300 nM, and the final ratio of oligo to delivery vehicle for all experiments is 1.5 nmol lipitoid/μg oligonucleotide.

[0244] Antisense oligonucleotides are prepared as described above (see Example 6). Cells are transfected overnight at 37° C. and the transfection mixture replaced with fresh medium the next morning. Transfection is carried out as described above in Example 3.

[0245] Those antisense oligonucleotides that inhibit proliferation represent genes that lay a role in production or maintenance of the cancerous phenotype.

### Example 8

### Effect of Gene Expression on Colony Formation

[0246] The effect of gene expression upon colony formation of, for example SVS20 cells, SKOV3 cells, and MD-MBA-231 cells can be tested in a soft agar assay. Soft agar assays are conducted by first-establishing a bottom layer of 2 ml of 0.6% agar in media plated fresh within a few hours of layering on the cells. The cell layer is formed on the bottom layer by removing cells transfected as described above from plates using 0.05% trypsin and washing twice in media. The cells are counted in a Coulter counter, and resuspended to 10⁶ per ml in media. 10 μl aliquots are placed with media in 96-well plates (to check counting with WST1), or diluted further for the soft agar assay. 2000 cells are plated in 800 μl 0.4% agar in duplicate wells above 0.6% agar bottom layer. After the cell layer agar solidifies, 2 ml of media is dribbled on top and antisense or reverse control oligo (produced as described in Example 6) added without delivery vehicles. Fresh media and oligos are added every 3-4 days: Colonies usually are expected to form in 10 days to 3 weeks. Fields of colonies are counted by eye. Wst-1 metabolism values can be used to compensate for small differences in starting cell number. Larger fields can be scanned for visual record of differences.

[0247] Those antisense oligonucleotides that inhibited colony formation represent genes that play a role in production or maintenance of the cancerous phenotype.

### Example 9

### Induction of Cell Death upon Depletion of Polypeptides by Depletion of mRNA (“Antisense Knockout”)

[0248] In order to assess the effect of depletion of a target message upon cell death SW620 cells or other cells derived from a cancer of interest are transfected for proliferation assays. For cytotoxic effect in the presence of cisplatin (cis), the same protocol is followed but cells are left in the presence of 2 μM drug. Each day, cytotoxicity was monitored by measuring the amount of LDH enzyme released in the medium due to membrane damage. The activity of LDH is measured using the Cytotoxicity Detection Kit from Roche Molecular Biochemicals. The data is provided as a ratio of LDH released in the medium vs. the total LDH present in the well at the same time point and treatment (rLDH/tLDH). DA positive control using antisense and reverse control oligonucleotides for BCL2 (a known anti-apoptotic gene) is included; loss of message for BCL2 leads to an increase in cell death compared with treatment with the control oligonucleotide (background cytotoxicity due to transfection).

### Example 10

### Functional Analysis of Gene Products Differentially Expressed in Cancer

[0249] The gene products of sequences of a gene differentially expressed in cancerous cells can be further analyzed to confirm the role and function of the gene product in tumorigenesis, e.g., in promoting or inhibiting development of a metastatic phenotype. For example, the function of gene products corresponding to genes identified herein can be assessed by blocking function of the gene products in the cell. For example, where the gene product is secreted or associated with a cell surface membrane, blocking antibodies can be generated and added to cells to examine the effect upon the cell phenotype in the context of, for example, the transformation of the cell to a cancerous, particularly a metastatic, phenotype.

[0250] Where the gene product of the differentially expressed genes identified herein exhibits sequence homology to a protein of known function (e.g., to a specific kinase or protease) and/or to a protein family of known function (e.g., contains a domain or other consensus sequence present in a protease family or in a kinase family), then the role of the gene product in tumorigenesis, as well as the activity of the gene product, can be examined using small molecules that inhibit or enhance function of the corresponding protein or protein family.

[0251] Additional functional assays include, but are not necessarily limited to, those that analyze the effect of expression of the corresponding gene upon cell cycle and cell migration. Methods for performing such assays are well known in the art.

### Example 11

### Contig Assembly and Additional Gene Characterization

[0252] The sequences of the polynucleotides provided in the present invention can be used to extend the sequence information of the gene to which the polynucleotides correspond (e.g., a gene, or mRNA encoded by the gene having a sequence the polynucleotide descried herein). This expanded sequence information can in turn be used to further characterize the corresponding gene, which in turn provides additional information about the nature of the gene product (e.g., the normal function of the gene product). The additional information can serve to provide additional evidence of the gene product's use as a therapeutic target, and provide further guidance as to the types of agents that can modulate its activity.

[0253] For example, a contig can be assembled using the sequence of a polynucleotide described herein. A “contig” is a contiguous sequence of nucleotides that is assembled from nucleic acid sequences having overlapping (e.g., shared or substantially similar) sequence information. The sequences of publicly-available ESTs (Expressed Sequence Tags) and the sequences of various clones from several cDNA libraries synthesized at Chiron were used in the contig assembly. The contig is assembled using the soft are program Sequencher, version 4.05, according to the manufacturer's instructions. The resulting contig can then be used to search both the public databases as well as databases internal to the applications to match the polyucleotide contiged with homology data and/or differential gene expressed data.

[0254] The sequence information obtained in the contig assembly described above can be used to obtain a consensus sequence derived from the contig using the Sequenchler program. The consensus sequence can then be used as a query sequence in a BLASTN search of the DGTI DoubleTwist Gene Index (DoubleTwist, Oakland, Calif.), which contains all the EST and non-redundant sequence in public databases. Alternatively, a sequence of a polynucleotide described herein can be used directly as a query sequence in a BLASTN search of the DGTI DoubleTwist Gene Index.

[0255] Through contig assembly and the use of homology searching software programs, the sequence information provided herein can be readily extended to confirm or confirm a predicted, gene having the sequence of the polynucleotides described in the present invention. Further the information obtained can be used to identify the function of the gene product of the gene corresponding to the polynucleotides described herein. Wile not necessary to the practice of the invention, identification of the function of the corresponding gene, can provide guidance in the design of therapeutics that target the gene to modulate its activity and modulate the cancerous phenotype (e.g., inhibit metastasis, proliferation, and the like).

[0256] Although the foregoing invention has been described in some detail by way of illustration and example for purposes of clarity of understanding, it is readily apparent to those of ordinary skill in the art in light of the teachings of this invention that certain changes and modifications may be made thereto without departing from the spirit or scope of the appended claims. Those skilled in the art will recognize, or be able to ascertain using not more than routine experimentation, many equivalents to the specific embodiments of the invention described herein. Such specific embodiments and equivalents are intended to be encompassed by the following claims.

Deposit Information

[0257] A deposit of the biological materials in the tables referenced below was made with the American Type Culture Collection 10801 University Blvd., Manasas, Va. 20110-2209, under the provisions of the Budapest Treaty on or before the filing date of the present application. The accession number indicated is assigned after successful viability testing, and the requisite fees were paid. Access to said cultures will be available during pendency of the patent application to one determined by the Commissioner to be entitled such under 37 C.F.R. §1.14 and 35 U.S.C. §122. All restriction on availability of said cultures to the public will be irrevocably removed upon the granting of a patent based upon the application. Moreover, the designated deposits will be maintained for a period of thirty (30) years from the date of deposit, or for five (5) years after the last request for the depositor for the enforceable life of the U.S. patent, whichever is longer. Should a culture become nonviable or be inadvertently destroyed or, in the case of plasmid-containing stains, lose its plasmid, it will be replaced with a viable culture(s) of the same taxonomic description.

[0258] These deposits are provided merely as a convenience to those of skill in the art, and are not an admission that a deposit is required. A license may be required to make, use, or sell the deposited materials, and no such license is hereby granted. The deposit below was received by the ATCC on or before the filing date of the present application.

TABLE 11
Cell Lines Deposited with ATCC

| | | ATCC | CMCC |
|---|---|---|---|
| Cell Line | Deposit Date | Accession No. | Accession No. |
| KM12L4-A | Mar. 19, 1998 | CRL-12496 | 11606 |
| Km12C | May 15, 1998 | CRL-12533 | 11611 |
| MDA-MB- | May 15, 1998 | CRL-12532 | 10583 |
| 231 | | | |
| MCF-7 | Oct. 9, 1998 | CRL-12584 | 10377 |

[0259] In addition, pools of selected clones, as well as libraries containing specific clones, were assigned an “ES” number (internal reference) and deposited with the ATCC. Table 13 below provides the ATCC Accession Nos of the ES deposits all of which were deposited on or before Jun. 13, 2000. The names of the clones contained within each of these deposits are provided in the tables numbered 22 and greater (inserted before the claims).

TABLE 12
Pools of Clones and Libraries Deposited
with ATCC on or before Jun. 13, 2000.

| Library No. | CMCC No. | ATCC Accession No. |
|---|---|---|
| ES168 | 5276 | PTA-2027 |
| ES169 | 5277 | PTA-2028 |
| ES170 | 5284 | PTA-2029 |
| ES171 | 5285 | PTA-2030 |
| ES172 | 5286 | PTA-2031 |
| ES173 | 5287 | PTA-2032 |
| ES174 | 5288 | PTA-2033 |
| ES175 | 5289 | PTA-2034 |
| ES176 | 5290 | PTA-2035 |
| ES177 | 5291 | PTA-2036 |
| ES178 | 5292 | PTA-2037 |
| ES179 | 5293 | PTA-2038 |
| ES180 | 5294 | PTA-2039 |
| ES181 | 5295 | PTA-2040 |
| ES182 | 5296 | PTA-2041 |
| ES183 | 5297 | PTA-2042 |
| ES184 | 5298 | PTA-2043 |
| ES185 | 5299 | PTA-2044 |
| ES186 | 5301 | PTA-2045 |
| ES187 | 5302 | PTA-2046 |
| ES188 | 5303 | PTA-2047 |
| ES189 | 5304 | PTA-2052 |
| ES190 | 5305 | PTA-2053 |
| ES191 | 5306 | PTA-2054 |
| ES192 | 5307 | PTA-2055 |
| ES193 | 5308 | PTA-2056 |
| ES194 | 5309 | PTA-2057 |
| ES195 | 5310 | PTA-2058 |
| ES196 | 5311 | PTA-2059 |
| ES197 | 5312 | PTA-2060 |
| ES198 | 5313 | PTA-2061 |
| ES199 | 5314 | PTA-2062 |
| ES200 | 5315 | PTA-2048 |
| ES201 | 5316 | PTA-2049 |
| ES202 | 5317 | PTA-2063 |
| ES203 | 5318 | PTA-2064 |
| ES204 | 5319 | PTA-2065 |
| ES205 | 5320 | PTA-2066 |
| ES206 | 5321 | PTA-2067 |
| ES207 | 5322 | PTA-2068 |
| ES208 | 5253 | PTA-2050 |
| ES209 | 5324 | PTA-2051 |

Table 13 (inserted before the claims) provides the names of the clones in each of the above libraries.

[0260] Retrieval of Individual Clones from Deposit of Pooled Clones. Where the ATCC deposit is composed of a pool of cDNA clones or a library of cDNA clones, the deposit was prepared by first transfecting each of the clones into separate bacterial cells. The clones in the pool or library were then deposited as a pool of equal mixtures in the composite deposit. Particular clones can be obtained from the composite deposit using methods well known in the art. For example, a bacterial cell containing a particular clone can be identified by isolating single colonies, and identifying colonies containing the specific clone though standard colony hybridization techniques, using an oligonucleotide probe or probes be designed to specifically hybridize to a sequence of the clone, insert (e.g., a probe based upon unmasked sequence of the encoded polynucleotide having the indicated SEQ ID NO). The probe should be designed to have a Tₘ of approximately 80° C. (assuming 2° C. for each A or T and 4° C. for each G or C). Positive colonies can the be picked, grown in culture, and the recombinant clone isolated. Alternatively, probes designed in this manner can be used to PCR to isolate a nucleic acid cDNA from the deposited culture pool, and using the probes in PCR reactions to produce an amplified product haying the corresponding desired polynucleotide sequence.

LENGTHY TABLE REFERENCED HERE
US20070243176A1-20071018-T00001
Please refer to the end of the specification for access instructions.

LENGTHY TABLE REFERENCED HERE
US20070243176A1-20071018-T00002
Please refer to the end of the specification for access instructions.

LENGTHY TABLE REFERENCED HERE
US20070243176A1-20071018-T00003
Please refer to the end of the specification for access instructions.

LENGTHY TABLE REFERENCED HERE
US20070243176A1-20071018-T00004
Please refer to the end of the specification for access instructions.

LENGTHY TABLE REFERENCED HERE
US20070243176A1-20071018-T00005
Please refer to the end of the specification for access instructions.

LENGTHY TABLE REFERENCED HERE
US20070243176A1-20071018-T00006
Please refer to the end of the specification for access instructions.

LENGTHY TABLE REFERENCED HERE
US20070243176A1-20071018-T00007
Please refer to the end of the specification for access instructions.

LENGTHY TABLE REFERENCED HERE
US20070243176A1-20071018-T00008
Please refer to the end of the specification for access instructions.

LENGTHY TABLE
The patent application contains a lengthy table section. A copy of the table is available in electronic form from the USPTO web site (http://seqdata.uspto.gov/?pageRequest=docDetail&DocID=US20070243176A1). An electronic copy of the table will also be available from the USPTO upon request and payment of the fee set forth in 37 CFR 1.19(b)(3).

The application's sequence listing, which the Patent Office published only in electronic form, follows.

SEQUENCE LISTING (6010 sequences)

SEQ ID NO: 1 - DNA, 611 bp, Homo sapiens
ccttgaaaagcctttaattaagtcctagaaactgttacatatgcattgagagtgttcaaaaggattggctagctttcaggagagcagaagattaggaggagcctcctaggagatctttgacttgatcaggacaaaatcaggttttgccatattaggatagaggggatgagagaaacaacattgcacatagtttggataatgacgtgggtttgtaagacaactcttcaaacggtgtaaatgacaggagcacaggggccaggctggtatcagagaggggaacaaggaccagttcttagatggatttgtgtatcatttaaggaatttgaatttcacatagattggggatcccttgaagggtactcagaaggagttatattatcaggcagaaacatcactctggcggcagcatgagggatgggttgaaaaatttaaaacttgaagcggcaagtccattcaggcgactactgcaatagtcttggcatgaaatgacacattaaggcaagattgcccagggctttaacattgatattattttaaaaataaattgcctgtgctagtaatgtcctgtttctttgcttactggttgaagactcaatttttatagataatgc

SEQ ID NO: 2 - DNA, 273 bp, Homo sapiens
ttgaaacaagtatttgaagttctgattctaatatttccagcaatgggccaagtggaggtgccagataatagcagaatcagaacttcaaatacttggcccattgctggaaatattaggactagaaaacatcaagatcaggcaccgaacaggcaaatctccactgagtggttctgatgtgcaaatagctgatgaagactggttatggttataaaatggaacacagttttctaattacatagtgtgtgggtctcgtgtggtgtgtgtgtgtgtgca

SEQ ID NO: 3 - DNA, 649 bp, Homo sapiens
tgtggagaaaggttaaataagcattctgagggcagcataatgtgagggttaaaaactccggtagccaagactctgaagccaggctgcctgggttggaatctcaaatctcccacttactaaactgttggttacttacaaagactctctgtgcctcagtttcttcatctgtaaaataggggtaataacacctacctcatggtattctgaggattcaaagaattaacgtaggtaatgctcttagaatgttagctactgctgttattatcagtattggaagtccagtgtttcttcctgtgggaagacgcagtcaaattttagtgttgtgaaagattctcaggctagctcacaaaagcctgccgactgtatgatgcagcctacctgtaacactgctggcctcttgactacccggagcctggtagcatgggactgctgctcacgatgggcagcagcctggcatgggggcggtgtctgttggcagctagggcgagcctctgccacttcacctgtgatcctgggcaagttccttatctgctttgtgtctccgtctcctcgtttgtaaagttagagctgagaggattaatttcgcacatataaagtacttagtgcctggtacagggtaagtattctgtaagtattagctatttggtct

SEQ ID NO: 4 - DNA, 617 bp, Homo sapiens
agcaacagaataatttccaaaagaccagatataaattctttcctccaaccaaaagtcaatcattttcttctgtgtgtaaaatagcacacattcttattcaccacagctgtaagcttaaggccattcactcactactctgctgtagtcctatgacactagctatatcatggccaacttactgccccacttctgtttccagaagtcacacacactagagtcagtttcatttctttgtagttaccctttttgcaactacagggctattacaaagtcacctgaggccactactttaaacagaaacatagtactacaaagccctagaatctaagacagccccccaatctgagggtcatctcagtccttgacactcctttctttgttaattccacaagaagaagaaattatagagctggcaccaatggtggcttcagcaccaatagtaaagggctggaggcaattgtaaacatcacctccacaatgaaggtaaccttattactcatcacattcaaagtgcagccctaaagaaaataatcacttcttattccttttcttgtatttttttcttggccactcattttcagctgagtgaagtattctactatgtgaaaatgattact

SEQ ID NO: 5 - DNA, 304 bp, Homo sapiens
agagttatctatgtcagtattccctctatgcaaagatagttgagagttcacaagttgtaggctttcaagttgagctatgttagatatatgctcccctgatggaagacagacatgtctccagggttttgagggtcaaatgacagaatgtatataaagtgttttgaacattataaattgcctccttagaggcaagggaacatcaaatttggttgttttcttgcatcagagacttctagctcagatttctttgttggccatttttaagggcatttccaatgagtttttaagtgtaatgagtttttaa

SEQ ID NO: 6 - DNA, 574 bp, Homo sapiens
tgaagcctcagtttaggtcatctggtggttcagaacactcaacagagggctctgtatccttgggggatggacagttgaacagatatagttcaagaaactttccagctgaacggcataaccccacagtaactgggcatcaggagcaaacttaccttcagaaggagacttccactttgcaggtggaacagaatggggactatggtaggggcaggagaactctcttcagaggtcgaagacgacgagaagatgacaggatctcaagacctcatccttcaacagctgaatcaaaggctccaacaccaaagtttgacttattagcctcaaattttccacctttacctggaagttcatcaagaatgccaggtgaactcgttttggagaataggatgtctgatgttgttaaaggtgtctacaaagaaaaggataatgaagagttgacaattagttgcccagtgcctgcagatgagcagacagaatgcacttctgcccagcaactcaatatgagtaccagttctccatgtgctgctgagcttactgcattaagcacaactcagcaagaaaaggatctaataga

SEQ ID NO: 7 - DNA, 544 bp, Homo sapiens
agactgtgcaggggcatcagagctccagagctatctggaggagctgaaggggcttggcttcctgacttttggacttcacatccttgagattggagaaaacagcctgattgtcagtcctgagcatgtatgtcagcacttggagcaggtgctgcttggtaccatagcctttgtggatgtttccagctgccagcgtcacccttctgtctgctccctggaccagcttcaggacttgaaggccctcgtggctgagatcatcacacatttgcaggggctgcagagggacttatctctagcagtctcctacagcaggctccattcctcagactggaatctgtgtactgtatttgggatcctcctgggctatcctgttccctatacctttcacctgaaccagggagatgacaactgcttagctctgactccactacgagtattcactgcccggatctcatggttgctaggtcaacccccaatcctgctctattcttttagtgtcccagagagtttgttcccaggcctgagggacattctaaacacctgggag

SEQ ID NO: 8 - DNA, 536 bp, Homo sapiens
  misc_feature 430: n = A,T,C or G
aattcgctataacagcaataggaatctaatacatatagaaaccagttcacaaactacactactgagagttcagagttttagaactcacttgttctggtgactatagaagcatcctgcatctgctgccactccaatggatatcaatgttcccagacagctgggtctattccctcatctgcaagtgcatcttccaagccttcctgcctctctgcacgaatgcttttactgttcccttcttgtgaaatgacctcttgttattctgttcagattcctttccagccagcaggttcacttgtttctataggtgcacgattgtctctttgttctgtattacagtcacttggctgagagaagtcacctatcttggattagttgtagaaaactacatactctcttgtgagcaaatattttccatgtaagtgagtcccanatctaagtatggccaagagttgagacgagaaagttcaatttcaactcaataaacacttggtgaatagcagctatcttcatggcagggagattattgaaagaagaat

SEQ ID NO: 9 - DNA, 526 bp, Homo sapiens
cgaattcggcacgaggaggagcccgccccggaggctgaggctctggccgcagcccgggagcggagcagccgcttcttgagcggcctggagctggtgaagcagggtgccgaggcgcgcgtgttccgtggccgcttccagggccgcgcggcggtgatcaagcaccgcttccccaagggctaccggcacccggcgctggaggcgcggcttggcagacggcggacggtgcaggaggcccgggcgctcctccgctgtcgccgcgctggaatatctgccccagttgtcttttttgtggactatgcttccaactgcttatatatggaagaaattgaaggctcagtgactgttcgagattatattcagtccactatggagaactgaaaaactccccagggtctctccaacttagccaagacaattgggcaggttttggctcgaatgcacgatgaagacctcattcatggtgatctcaccacctccaacatgctcctgaaaccccccctggaacagctgaacattgtgctcatag

SEQ ID NO: 10 - DNA, 594 bp, Homo sapiens
cgaattcggcacgagcaaggtctatgactactacctaccagatgaacaggcaacaattcagtattctgatccctgtgaatgaggataggagctggaaactcaattagtcctctgtgacattactggagggtggaacattcttctgtcgcttgaagcagaactcattcaatcaaataatttaatttctctgactagtatatgggtaacaaatgaatatgtctgaacctcagctataatactttctactacctttgcaaggagatgggataggaacaatcactcagaggaggcgttgcatggacagggtcatagggggaagaaaggtggtttagctgttttatttagccattcaaggggcttctcaaaagaggagacggtggtagagggtgaactagagaagataagaatgtcttcctaggccggatgcggtggctcacgcctgtaatcccagcactttgggattgcgaggtgggcggatcacttgaggtcaggagttcaagaccagcctggccaacatggtaaaacccgtctctactaacaatacaaagattagcctggtgtggtggcacgggcctgtaatcgcagccccttgga

SEQ ID NO: 11 - DNA, 588 bp, Homo sapiens
  misc_feature 241: n = A,T,C or G
cacgagagatcggagcactgagtacatggattatattcactaaagattggagagctaaaagtttctctgcaagagtgacctgatctagtaagaatgtcaaaattgttactatatttgtacccttgctcttcggtttagagggcaggtgcttccgtgtgtacatagaagcagagcttgttggagaagaggagctaaaaaggaattagattagaatccacctctgtacaatggcaccatctgngctcccaaaagctcattgttaaactttcgagaattttgagagccagttgtaaaacacagccattataaaaactaaatcatataaacttacaattaaacacattatatgaagagccaagataataaatactcaaaactcttcctaattattttgctatgtttcactattatctattctcttgaggttagttacatctattgtggctatatggtggaaatactgtataaaatgctgtgcaactgagcttctcctcccaattcttcattcagtgatgtcatattcagaacttgaaattgaccatgatggaagtaattacaccacagaaatcagcccatgctacaaagcag

SEQ ID NO: 12 - DNA, 388 bp, Homo sapiens
tatacaagatacctgccaaaggaaatggtcttactttcaaacgactttgggagcatgtataatcgcggacagagcaggagaagactttaaacagaatggccttgtgtccttttcctttactaagtgttttgaataaagaaaaaaaaaatgtatgacctcagagaatgaatacccttcaggaagccacttcctgattttaggggataatattgttctctgtagcacaaagatttaaagtcctagaatttctaatcctagttctcagaattgtagaatatgacaaaaataatggtttccccatttgtccactgacttcagggatatttcacaagttatttatttatagaatgaaaactatgtagttaaatctgtcattcagttaaacctg

SEQ ID NO: 13 - DNA, 613 bp, Homo sapiens
ggcagagaaactagggagcccggggacctctccacatattctttgctctgtacacttaatcaagataagaaataaagacagcaagactgcaaaaagtctattatgtagacttgcaaaaagtctacataataatataaattcaagccaagtagaagtgattttgcaagtctgtgtatgattaattggctagtgaaatatatggataaaattagttgtaggaattaaagcatctgaagtgatctcttgaggctctggtggcaaagcagaaaggggaatttgaatttgaactaggtttaaaagtgtgagtagtagccctttcttttggcaggggaggtgatcctacccattctccttagagcctgtgcaattggtctcagtgtttctcaacatctaagaatgaagctgcattcttaatgctttagtagctgtgcttcaaaacggcaagtttccttttgagagtgattttctctttgttctagcttgtttcactaggcggataagcgtgggcagtaaactgggaggtgtccctttatcagcacctctcagcttcacccaccctgctgcttgccctgggcagtagcctggtcacatctttgaaaacctctgtttagtc

SEQ ID NO: 14 - DNA, 578 bp, Homo sapiens
taaatgaacaagtatacttccctgatgtggctgataaaaggtaataatacagtatcatgatgaagagagatgacactgaggctccagtctactttaaaaatatgtaagtctctgataggtcatgattttagaccacatacagactgtcctatggggaaaacacagggaagaaaagcagcataaacatttttatcctttattgtgtttgtccaaagcagagttaagagggtagcctaagagtataatacttgcctttccaactacagaataatcttttcctttctccaaattgtataaagtagatttttttttttcagtgagtgaaacgatgaaacttagactcacttaaatgtatttcctaatgtaagaatgtgtgtgtgccaagtaaatttactaagcattagaacatggaaagcagagtatgattaataccctcgtttacctcactttttcccccattttcaaaatttgttttcaaatatggaaattcttctgtacactaaaatgatcttaggaaacaggtagctcatggtctaaagtttagcagttcatgattaagggttgccgcaatctaatct

SEQ ID NO: 15 - DNA, 612 bp, Homo sapiens
cgcctggctaggagcgccgaccgcagggcctctacggaccttactagaaaaatgaaacctgatgaaactcctatgtttgacccaagtctactcaaagaagtggactggagtcagaatacagctacattttctccagccatttccccaacacatcctggagaaggcttggttttgaggcctctttgtactgctgacttaaatagaggtttttttaaggtattgggtcagctaacagagactggagttgtcagccctgaacaatttatgaaatcttttgagcatatgaagaaatctggggattattatgttacagttgtagaagatgtgactctaggacagattgttgctacggcaactctgattatagaacataaattcatccattcctgtgctaagagaggaagagtagaagatgttgttgttagtgatgaatgcagaggaaagcagcttggcaaattgttattatcaacccttactttgctaagcaagaaactgaactgttacaagattacccttgaatgtctaccacaaaatgttggtttctataaaaagtttggatatactgtatctgaagaaactacatgtgtcggaggtttctaaagtaaaaatctt

SEQ ID NO: 16 - DNA, 629 bp, Homo sapiens
tcaaacgtaagccttcctgacctctaagacctacctttgtcatgtacctttaccctcaggcaaggagcaatctcttctcttcctcttctaccttgctgtagcttctccccaaggatttatcacattctgccttgaatcatagggaacagcatgtgtagtggaatgaacacaggcctctgaatccaagatacgagtttaaatcccagctttggaggtggttacttaaagtctcagtgccttcattcttcttcctatataaagtagatattacaatatctaacttacagagtcattgggagctatacatgcagcgattgggtaaagcacctggcacatggcaagcgattagcaaatgctggttacttctacttctttctcttcccttttcccagtctatcataatttccttgagagcaggcaccatgtcttatttacccttgtatttcccacagtacttcccatagtgagttacccttagtaaatactcagtaagttgaattgaatttaaattacctgtaagtcttaaaatgtgggattaaattaagaatatattgtcctggaaatacccaaatgtctattgatggatgaatggataaacaaaatgtggtatacacataatggaatattat

SEQ ID NO: 17 - DNA, 628 bp, Homo sapiens
ggcacgagctagctgcacctctaaagtgacttttaatcccaggattctatgattatatttaattggagttgttaaaagtaacaattaattagaataatttatctgtttatttttgataacctggtgcttgtactgaagaagaataatatcatgaagtaaaaagcataatctagatcagtgctactgaaagaagggtttgcatactgtttgagataagttcaaaaattgaaagtgagcttttggaaactttggtaacaatttgatattgccgggacatccaagcacatcatcattctttgagtaacttctgtttttattgtactttatatcagtccataatggaacacacacatacacacaataaaactggccccttcgccacagattatttgagaagcacgggtatagacaaccatcaaattcaaatgatcagcactagaatgatcagcaataatctgaactttgtatgtggctaacgaggtacatattaaactattgctttttctttgtgggtctggtcaagaggagtaacagatgaattcttcacactactttctttcgctttgcagaaggatttctccagtcagttattttatgtgactcctacagtctagctaaggaaaaaatt

SEQ ID NO: 18 - DNA, 627 bp, Homo sapiens
caggcccctttgagaatgtgatcattgttattgaccataggcacaaaatacacacaaatacttaacatacacaattttgcataaaatctcagtgagttgactctctaagacatatctagagatctaaggactccagatgaaaagcaactatcctaacataatcccaattatttcaagaaattaaaccaaattctcaaaacaaatttaccttcagtttacttaatttgaaaagtacttgtatgtattacttaaagtcagacagacaacaatattgtgatgcagttataagaaagtggcctgaccttaggtgaaggaactccagaagtaaaaattgatgtctgacaaagatcttcttatgtgtagtaaatgaattctgctctccaaatatgaagtgaaactgcatcaattcaagaaatgcctacaatcccttcagcatggtggttccactgaaaggcccttaagaataacggatattttactcacatgttttgagattagtagaaccgtcgtggctttatgtgtctatttagttactacattcagaaaactgagggtataaaacaaactttaactttgttttcttcccgtgtctttagtttccagtctttaagctccattgctttccct

SEQ ID NO: 19 - DNA, 630 bp, Homo sapiens
aggcctggcttggtggctcatgtctgtaatctcagcattttgggaggctgagatgggaagatgacttgaggccaggagttcaagaccagcttgggcaacacagaccccatctctacaaaaattagccaggtatggtgggtatgtcctgtagttctaggtacttggaagtccaagatggcaggatggcataagctcaggaattcaaggttacagttacctatgattgcacaactctactccaggctgggcaacagagtgagactctgtctccaaaaaatcccaaatattagactgggcatggtggctcacagctataatgtcaacaccttgggagtctgagatggaagaattgcttgaggcttgcctgggcaacatagggagaacctatctgtaagaggtaaaaaaagattaactgggcacagtggcacatgcctgtagtcccagctgttctgtagtctcagtctcccaaagtgctgggattacaggtgtgagccactgagactggccctagttagggtttttatgtaagaaatttgaaatctcgtatttgtattagcagctaatgtaacttctagtttttaccttagatctggtctatttttatatagaagtaacctgggtagcattatg

SEQ ID NO: 20 - DNA, 605 bp, Homo sapiens
agcccaggttgggaagcccagtcagccctgtctgtcagctcatggagacagacacattgcattactggaacccagagcatgttaaaacacccaggctgaagttggccataattttcagcctcacatccagttgaccgtagttctagagacaaaggactctgtctatatataaacatttacaatgatgtttatatgaagatccacctgaagtgagcatttgtcatatgggtacagtgtcagcgatagtacatcacggtctgggctggcatgttctcacttcctcagatgaacagaacataccaatgcaaaacctatatttgatatgatttctgatacagaaaaagaggtagttcttatatgggaagaaaaaagggaaatcactcaggctttagtctctaaataatattgtaaaataccaacaacaaattactaaaaataaaaacagacttgcagacagtaagacagtctgattatttcaactaatacccaaatcaaattaggcaattattcacacacatacacaaagttattacaagcacagattgatgtatgaagaaaaaaataaaacttgagggttccctaactgggggattatgtaaatatat

SEQ ID NO: 21 - DNA, 515 bp, Homo sapiens
acaaaaaaaattaggacccttgacaattctattagtgcctgacaattttattgggggttaatattccagcattttaaattgcctctttattctgaactcagactcacataaactttagaaagatcatagaaacttttgattgaatggaggtaaaagagtttcagacaaaaagtgctggaggctgtgatctgatcaaaaatgtataaaatgttgattctcagtattttatagaaagaagaattcaagggctcatctaatccagttccttattttactgatgaagaaatgtaggttccaaggtcatataaatattggtggcagataaaggaagaatccagggttaaatcacagcactccttccacagcatcacacactgctttctacttttaagactatttgttgagttactgaggtaaaagtttgtgattttttgctttgttttcttttactaatttgcaaacatttctttgctgagtatgtttttacttaatgatgaatgtttacagggctctgt

SEQ ID NO: 22 - DNA, 177 bp, Homo sapiens
gtgcctgttagactcaaagtggagatgtcaagtagggtaatctgatctaccacctagcacgagataaaaatgtgggagccatcggcatggagagagcatttaaatgcaggagagtggacagaatgccctaaggagcccgtggagagagaagacaggcagtgtgaaggaggtgtgtgc

SEQ ID NO: 23 - DNA, 182 bp, Homo sapiens
gacagcagcttttctgatttacagagttcttcagatttacaaatggacaatgacatcacaatgaatactggtatgaacggggagtctctgcagtcgccagacaaatcatactcagccccttcccccgtagagcaacaagtggttcttttagagttgactggcagcatttcctgtcgggggag

SEQ ID NO: 24 - DNA, 622 bp, Homo sapiens
tcctatggaggatagtcctatggaccagacgaagcccctgccccaaggagtgcccgggtgtaaccgcaagttaaggagccctggggaggtgacacaggcaccctcattccttttgttcagtaggagtctctgaggcctccccagcaccatgccgcgtgggtgaggccgaggacacagagaaatatcaggcaaggctcctgcccccttagggtggccctgacaacggatcataacctcccagggagctgatggggtgtgacaggcacaccataggctggaggcacaggtggagggcagggaagaggaccggcaaatctatagaatcctaaagggagccaagagaagccacatgcaaatctccctccctccaaacaattctcccttagagggcatccgcgctcccctggggtggcagtcagcgagaagtttccgtgtaggttctccccaggcttaaacagtttaagagttttatttcaagaaaactctggggagggcgaactgcaagagggctgccaggattagccgagggattccgaatgaagacggagtatttccgaacatacacacctctcccaagagcgtttccggagggttccgaaaatacccgagcgggcctcggcgc

SEQ ID NO: 25 - DNA, 646 bp, Homo sapiens
atttatcaatatatacacatacacacacagacacgtttctttgtaagtcattttaggctattagatatgtctaaagtttagaaatgacattaatccagatcaacaagtaaacatcaaatcccataccttttttcctgtattttccttgaatcctttaaccacttaaacatttcctctagaacatctctgtcaaaggacccaccagtgcattattttctattagtaccaaaaaaagatatatctcagcataactctttaataacttgctctttagaatatatagcctttccaatattgaaaagtgtatgctgtcctgacgtcaaaaacaggctttccactgcactgattctcagtctttggcacaataaacagagattgagtgatataagaatcaaggtctgaaaaattagacagtcaaatgttttccaatgtggatatgtttcccttcatcagtacattttctcttaagtttggcagaaatggaataaagcaaaagcctcctctagatactttgtagatgaacattctataattaaaattaaactgtttagggtatcaaatggtggaaattttatatttatcttttagaggaaacatttcttaattcactgctactctgtataacatctatcttttaggggcatga

SEQ ID NO: 26 - DNA, 562 bp, Homo sapiens
ccctatcaacacttaactttgctcaaagagccaagctgattaaaaacaaggcagtagtaaatgaagacacccaaggaaatgtgagccagctccaagctgaagtgaagaggctcaaagaacaactggcggagcttgcttcaggacagacaccaccagaaagcttcctgaccagagacaaaaagaagactaactatatggagtatttccaggaagcaatgttattctttaagaaatctgaacaggaaaagaagtctctgatagaaaaagttacccaattagaagacctcaccctcaaaaaggaaaaatttattcaatctaataaaatgattgtgaaattccgagaggatcaaataatacgcttggaaaagctccacaaggaatcccggggaggttttctgcctgaggagcaggatcgtttgctctcagaattaaggaatgagattcaaactctgcgagaacaaatagagcaccaccccagagttgcaaagtatgctatggaaaatcattccctcagggaggagaatagaagactgagattattagagcctgtgaaaagagctca

SEQ ID NO: 27 - DNA, 464 bp, Homo sapiens
gtcggtcggcgctcacgagaccatggagaagtaaactcttcacccatcaggttggtggtcactggctgtctgaccgtgggtgaggtgacagggctgcttttgtctcctttatggtgttctcaccgcagctccgaggggttggagtatactcagaggctacagtgatcagaagacataggtcgtttttttttcatcagggaggagagagaatgtcttttcgaggcggaggtcgtggaggctttaatcgaggtggtggaggtggcggcttcaaccgaggtggcagcagcaaccacttccgaggtggaggcggcggtggaggcggcggcaatttcagaggcggcggcaggggaggatttggacgagggggtggccgcggaggctttaacaaaggccaagaccaaggacctccagaacgtgtagtctgtatgcagtcttcaatatttagcttatttgaaggagtaggt

SEQ ID NO: 28 - DNA, 542 bp, Homo sapiens
cacagttggtgctattttcacttgtccactagaagtcattaagacacggttgcagtcttcaagattagctctccggacagtctactatcctcaggttcatctggggaccattagtggagctggaatggtgagaccaacatccgtgacacctggactctttcaggttctgaagtcgatcttggagaaagagggaccaaagtcactttttagaggcttgggtccaaatttggttggagttgcaccatcaagggctgtatactttgcatgttactccaaagccaaagagcaatttaatggcattttcgtgcctaacagcaatattgtgcatattttctcagctggctctgcagcttttatcacaaattccttaatgaatcctatatggatggttaaaacccgaatgcagctagaacagaaagtgaggggctctaagcagatgaatacactccagtgtgctcgttacgtttaccagaccgaaggcattcgtggcttctatagaggattaactgcctcgtatgctggaatttccgaaactataatct

SEQ ID NO: 29 - DNA, 641 bp, Homo sapiens
aagcaatctattttcacttgctattaacagcaaacgtacaactttatctcttatttgacttcattatttggctttcaaattaacaacatgaaaactatacagaaattagtctgtgccctataagacagagatttagataatttgttcaaaacatgagatgatattcagatattctctcaaaggcaggactccaacaccgcaggtggaaaaccaacaaaaggaagaaaacagaaaggtgggggagataaggagtagccaggaaaaagaaaatagtgataaaggaagagccaaaaaggaggaaagggaagatgaaagaccgacttcaagaactaaagcagagaacaaaggaaattgaactctctagagacagtcatgtatcaactacagaaacagaggaacaaggggtgtttctacagcaagctgttatttatgaaagagagcctgtagctgagagacacctacatgaaatccaaaaactacaggaaagtattaacaatttggcagataatgttcaaaaatttgggcagcaacagaaaagtctggtggcttcaatgagaaggtttagtctacttaagagagagtctaccattacaaaggagataaaaattcaggcagaatacatcaacagaagtttgaatgat

SEQ ID NO: 30 - DNA, 602 bp, Homo sapiens
gtatagataactttttaattcagtaggaggagaaagttcattcttggcctgttggctttgattattatgggtactttaaagtcagtatttatcaagaaagggaacttgaccaccattggcacatgtgacatttaagctcttcagccttttcctttttagttgtaggtgtttacatttcatttctaagccaactctgtatttatgagagaagtttaagccttacatcatttgatactaaagggttatttgtggtaaatgaaaaatgaccccaaaattacagaggaatatgccagtttaagaaatggctacttaaagttgcttctctctttccttcttactcatgaaattaattggtcttcttcaagtttctttagattccattaaatgattaaatcactattaagagccattcatcaacgtgatttgtgtgttagccaatgaatctgtctcagcttttgaccaaatgggttttagacaaatgcaaagatctgcctctagtccatatggctctttttgagtgctagtattttgcatttcacataatgtagttattttgagcttttaaagagagcatttagacaaagaagcaaagagaggaaggg

SEQ ID NO: 31 - DNA, 669 bp, Homo sapiens
ggcacttgagataagcctcataggaggagagaagcttctccctgtgtggaaggaggcagcacacaggccacagagaggcgcagaagggacaactgaggccaagagaggcggaaggtccccagacgggttttctaaaatatctttctctgaatagcatttttacttaaatttgatatgcaaatgcagataattggtattcatgtaaatatttactgcttaaaacagaaagttacttgtaataggccaggcacagtggctcacgcctgtaatcccagcactttgggaggctgaggcaggcagatcacgaggtcaaaagatcgagaccatcctggccaacatggtgaaaccttgtctctactaaaaatacaacaattagctgcctcaggaggctgaggcaggagaatcacttgaaccagggaggcagaggttgcagtgagccgagatcgcaccactgcactccagcctggtgacagagcaagactccatctcgaaaaaagagaaagttacttataatagaaagcctgttcaaatgtggcaagtgcaacgtattcttttggaggctctaaacccaagcctgcaggtccctgatacgtcttctttgccatctagtggtagccattagaactgcatgtgtgggcccggcgccgtggctcacgcctgtaattcccg

SEQ ID NO: 32 - DNA, 575 bp, Homo sapiens
agttctctctccagaaaactacaactccatgagaaacaaaacttctggcctctgaaatctatgacattcttcagtcctccaatatggcagatggtgatagttttaatgagatgaattcacgtcgaaggaaagctcaattttttctgggaactacaaacaaacgtgccaaaacagtggtttaccaaggttatgaaagctcagcaagttgtgaaaagtgaaagtggagaagagatgttggtcccattccaagatactcctgtggaagttgaacagaacacagagctacctgactacctgcctgaggatgagagtcccacaaaggaacaggacaaagcggtgtcccgggtcggctcacacccagaaggtggagctagctggcttagcacagctgcaaactttttatccagatcattttattggtgacttcacttttgggctcaaggactgtgtgaaccaacaaggggccagttttccattgttgtggtgaactgtcaagtgcaatttgcaataagttatcatgaaaagtttttagattacacgatcgcatatgctgcatttcacattttattggacat

SEQ ID NO: 33 - DNA, 654 bp, Homo sapiens
aaactagaagtggacattggtgctgattgtaaagggctctgagaaataggcagaggcagctagccttttccctagaggcttccaagagcctttgaagaccttacaccactggtgtgatctgatcacttatgtgttttgctaaggtagctctggtgtcaatattgggaataaatttgggacgagaagaattgtactaatgaggttattgtggttgagactaagttaaaaagtaggttccatgtaaagatacttccgtgctgattgaaaggaaggaatagatacgagagaaaatgacattagaacaagtaggactgtgctactgaatggatataaggtgtgaggaaagggggaaattaaagtgaattagactatgtataaaccaggggcccagaggataatcatgaaacagaggaagacttagtgtgtgtgctggtagaaggtagtggaggtacaatgaatttagttttagacctcttttaggttggtagaaatgggacatatacactattttgacttacaggcagttgcagttagtcaaggagatggatgaaaatgtaggaattatctgtgtaattgtgctaattgcacatgtgggaaggatgagatttattaagagaatatactgccagtagagtatagaatctcgaggaatgc

SEQ ID NO: 34 - DNA, 625 bp, Homo sapiens
cgggcgcccctcccccagcctcgctgccgccttgcagtttgatctcagactgctgtgctagcaatcagcgagactccgtgggcgtaggaccctccgagccaggtgtgggatataatctcgtggtgcgccgttttttaagcccgtcggaaaagcgcagtattcgggtggggtgacctgattttccaggtgccctcagtcacccctttctttgactcggaaagggaactccctgaccccttgcgcttcccaagtgaggcaatgcctcgccctgcttcggctcgcacacggtgtgcgcacccactgacctgcgcccactgtctggcactccctagtgagatgaactgggtacctcagatggaaatgcagaaatcacccgtcttctgcgtcgctcacgctgggagctgtagaccggagctgttcctattcggccatcttggctcctcctgcttctttccttgatatgatgttcaaaccaggaaaatgtgcaaatatcaaggttacctgggtctgctggtcacttctagtttttggactcttgaagatggaaactgttcttagaagaggcctgaagagaaacatgactgactagatccaatcctctggcattacatcaatgcagaaagag

SEQ ID NO: 35 - DNA, 659 bp, Homo sapiens
tgactttggtgcattttgtgaccaagtgtcattgcctgtattttaggtcaggttcaaagtaagggaaaagatatattagggattttatattcaagaaaaataccacactgaatttttaaaaatgcaatgtaattttttaaatgtctgctccaatttccacagtttggcttgcaggcagtttgagctaattggacctcatgaaaggcaaaaactctgcaaagtggtggagtcgccaaacctggactgttttattggttgaatggctagcttctttctttaggcaaagcataggatagtattcaagagtacatttttaataataaactggagataattaagtactggcatcaggcatatttcctcagatatcactgggtttgtagccatttcatccagagcatctctggatgacatctctggttggatccctggttgacatcatttttatccagagcagtctgtttcacattctgctgccaaactctgacaattgtttgaagactaggattaggagaagagagagagacataaacactcagttgtcctgccttgactttgacagatactaagatctaacatagtctaccaaatgaagagtgacagttaaagacagcttctgttattacctgaagtatcaaatatttagtgatacctttttt

SEQ ID NO: 36 - DNA, 607 bp, Homo sapiens
agctgggattggagattccacccaaacttgctggtcactgggaggtggctttgtacaagtcagtgccaacgcgcttgctgtcacgggcctggggtcgcctcaatcaggtggagctgccacactggctgcgcaggcccgtctacagcctgtacatctggacgtttggggtgaacatgaaagaggccgctgtggaggacctgcatcactaccgcaacctcagcgagttcttccggcgcaagctgaagccgcaggcccggcctgtctgtggcctgcacagcgtgattagcccatcggatggaaggatcctcaactttgggcaggtgaagaactgtgaggtggagcaggtaaagggggtcacctactccctggagtcgttcctgggcccgcgtatgtgcacagaggacctgcccttcccaccagccgcgtcgtgtgactccttcaagaaccagctggtcacccgggaagggaatgagctctatcactgtgtcatctacctggcccctggggactaccactgcttccactcccccaccgactggactgtgtcccaccggcgccacttcccaggctccctgatgtcagtgaaccctggcatggctcgctggat

SEQ ID NO: 37 - DNA, 645 bp, Homo sapiens
atatggaaaattggaacctggatgagaccttttcgttgaattctgaagagtaatgatgtgaaaattgatacagggcaagagatgattcttttgtttttcttctacttcatgtccagaagagtaagagggaaaatggacatatgtttcatatccaagggtattcaaactgtagttagttggtacctctgaaaaatgagaatggtgagcgcacgggttggttgttctagcatgaatacaattctggaaactgttatgcaatttcccttttttaacccacattactttaggggtgcattaagtcgccaaactatactagttctttgtattcctagacttgctgatatttacctctctcttgtctcttcagagtaaatggttcccttctttccttcctactttccttcattctctcttccttccctccttcctacttcttttcttccttcctcttcctctcttaaaactatcttagatgtagaatcctggtgtagggttttattttatttttattttttgacccaataaaatgttatatgaaagaatgaaaatattaatttaagagactctgggagtctgaataaagtagctttatattaactacaggataatattagccttattacccccacaagattttttaaaact

SEQ ID NO: 38 - DNA, 614 bp, Homo sapiens
agcgcgccatggagcatgtgacagatggctcctgggagtcggtgcctgtgccgctacacccgcaggtgctgggcgcgctgcgggagctgggcttcccgtacatgacgccggtgcagtccgcaaccatccctctgttcatgcgaaacaaagatgtcgctgcagaagcggtcacaggtagtggcaaaacactcgctggggtcatccccatcctggaaattcttctgagaagagaagagaagttaaaaaagagtcaggttggagccataatcatcacccccactcgagagctggccattcaaatagacgagccagattctttggatcggaggcaggaatcctggagaagatgttgagaggtttaagcaacaaggtgggaacatcattgtggccactccaggccgcttggaggacatgttccggaggaaggccgaaggcttggatctggccagctgtgtgcgatccctggatgtcctggtgttggatgaggcagacagacttctggacatggggtttgaggcaagcatcaacaccattctggagtttttgccaaagcagaggagaacaggccttttctctgccactcagacgcaggaagtggagaacctggtgagagc

SEQ ID NO: 39 - DNA, 557 bp, Homo sapiens
  misc_feature 495: n = A,T,C or G
tactacgccggccgatggcgaggagcccgccccggaggctgaggctctggccgcagcccgggagcggagcagccgcttcttgagcggcctggagctggtgaagcagggtgccgaggcgcgcgtgttccgtggccgcttccagggccgcgcggcggtgatcaagcaccgcttccccaagggctaccggcacccggcgctggaggcgcggcttggcagacggcggacggtgcaggaggcccgggcgctcctccgctgtcgccgcgctggaatatctgccccagttgtcttttttgtggactatgcttccaactgcttatatatggaagaaattgaaggctcagtgactgttcgagattatattcagtccactatggagactgaaaaaactccccagggtctctccaacttagccaagacaattgggcaggttttggctcgaatgcacgatgaagacctcattcatggtgatctcaccacctccaacatgctcctganaccccccctggaacagctgaacattgtgctcatagactttgggctgagtttcatttcagcac

SEQ ID NO: 40 - DNA, 613 bp, Homo sapiens
gtagtggtagtcgctggcccgagttagaggccagctgagaagtcttcgtgcttcagatttgtttacctacaaaatgcttcggtatccatatttttgtagaatgtataaagaatgcctttcatgttggttggaatctggcatacctaatttaggtgtctggccaaacagaatacatactacagcagaaaaatatagagaatatgaagcccgggagcaaacagatcaaactcaagcccaggagttacacagatctcaagatagagattttgaaactatggctaaattacatattccagtaatggtggatgaagttgttcattgtttgtcaccacaaaaaggacagatttttctagatatgacatttggttcgggagggcacacaaaagccattctgcagaaggagtcagatattgttctctatgccttggacagagacccaacagcttatgcattagctgaacatctttcagagttgtatcctaaacaaatccgagctatgctgggccagttcagccaggcagaagccttattaatgaaagctggagtgcagccaggaacttttgatggagttcttatggatcttgggtgttcctccatgcaacttgatactcct

SEQ ID NO: 41 - DNA, 625 bp, Homo sapiens
  misc_feature 136: n = A,T,C or G
agtctcgagagcagttctctccacaagtgctaaaaattacttgtatgaattatttaatatcattgcaaataagatgttattttaactttttttaagtttctgcaaatatgtttattatgactttttatttttatantgattggaaatacatatactaaaattccacgttaccagtttcttaaccacagaaacctgaaaaattgccatagttgatttgttacttctaccttggtgcatttacaaaatagtcatatttttattatgaagttaaatattcatttgtttatagctacttcagaaggctcagattatttttttctttaatagcacagagtcctctcaaggtaagcactgtgcagttagtataaaccattattccccatgtgtacatgattcacagtttgtattgtgttccaagtgaaccatagccctttcagaaatcaagacttatattcattttacttctttgagtactcttgaattttagaaagtccattatgatcctaaggtagcaacaacatagcctattaccgtctatgatggtttacagatctattattccacgttagttcatcactatcaactaccatgatagagttaagctaaaccattttcccaacatatg

SEQ ID NO: 42 - DNA, 657 bp, Homo sapiens
agcctcataggaggagagaagcttctccctgtgtggaaggaggcagcacacaggccacagagaggcgcagaagggacaactgaggccaagagaggcggaaggtccccagacgggttttctaaaatatctttctctgaatagcatttttacttaaatttgatatgcaaatgcagataattggtattcatgtaaatatttactgcttaaaacagaaagttacttgtaataggccaggcacagtggctcacgcctgtaatcccagcactttgggaggctgaggcaggcagatcacgaggtcaaaagatcgagaccatcctggccaacatggtgaaaccttgtctctactaaaaatacaacaattagctgcctcaggaggctgaggcaggagaatcacttgaaccagggaggcagaggttgcagtgagccgagatcgcaccactgcactccagcctggtgacagagcaagactccatctcgaaaaaagagaaagttacttataatagaaagcctgttcaaatgtggcaagtgcaacgtattcttttggaggctctaaacccaagcctgcaggtccctgatacgtcttctttgccatctagtggtagccattagaactgcatgtgtgggcccggcgccgtggctcacgcctgtaattcccgc

SEQ ID NO: 43 - DNA, 608 bp, Homo sapiens
  misc_feature 510: n = A,T,C or G
cgcggcgcattcaggttctcctggaccgtagtggtagtcgctggcccgagttagaggccagctgagaagtcttcgtgcttcagatttgtttacctacaaaatgcttcggtatccatatttttgtagaatgtataaagaatgcctttcatgttggttggaatctggcatacctaatttaggtgtctggccaaaaagaatacatactacagcagaaaaatatagagaatatgaagcccgggagcaaacagatcaaactcaagcccaggagttacacagatctcaagatagagattttgaaactatggctaaattacatattccagtaatggtggatgaagttgttcattgtttgtcaccacaaaaaggacagatttttctagatatgacatttggttcgggagggcacacaaaagccattctgcagaaggagtcagatattgttctctatgccttggacagagacccaacagcttatgcattagctgaacatctttcagagttgtatcctanacaaatccgagctatgctgggccagttcagccaggcagaagccttattaatgaaagctggagtgcagccaggaacttttgatggagttcttatggatc

SEQ ID NO: 44 - DNA, 636 bp, Homo sapiens
tgggtttaccacctttctctaccccctactcacatcctggttatccaagagaacattatctcttttcttccaactgccttttcttcacctgtaatataaggaggctgaattctgatgtccatgccagcattcttatcctgtgagctgagcatcaggttttaagattttactcgttctctcatgcctgatacgggctgtgcacatgtagactattgactgacccagagaaaaaaccctgagggtcaggaagtgttacccaatgtggctcacttcgtaacaactcacaaggccaggccagcggagcccagaaagcaggcgctgatgccgagagtgatttgctcttctcactctactgctgctgcctggcctgtcggcctagagcggacagaactgtgtgctttgagccatccaggtccagttctctaaagacattgtgtggagatcagaggaagggagagactggtccctgcacttgtgggactagcctctcatacattaggatatctttcaaaaacacaaatataaaaggtactaaagcagctgcatgctggggagatagagcagatgaacaaacatgaatgggtaccatgcaggagagacgtcctttgcgtgggatgtggaagggacagaagctac

SEQ ID NO: 45 - DNA, 587 bp, Homo sapiens
ttgacatgattatttatttagttttaaatctttttattataaaaacatacaggaagtgacacaaaacaaatgtatagcttattgaatgattatgattgtaaggtgaataacctttgtgtccaccacctggtgaagaaatagtactttgccagataccccaggaggctctcccaagtgcccctccagccgcagccctcttcttctccccctccttgccccaacaagtaatcctgacttttacagaaatgactttcttggttttttgatggcagtttagtcttgtctgcttttttttgtttatttttttatctacttcagtgtccatttgcagtcccgtcggcctcactgttttccctgccgtttatctgttgaagagcctgggctgtttgtcccatggcttcccacagtgtagattttgctgaccacgtggtcatggtgtagttcagcatggtcctctatgtttcctgcacattggcagctgggtccagaggcttgatgagcctcaaatttgatccctttggcaggagaacaggcggttaggagctttcctcaggaaagtaccatgttgacggcagctgatgctcagt

SEQ ID NO: 46 - DNA, 634 bp, Homo sapiens
tctctttttgtgtgtctactgtgatttaagtatttttaatcatcagccaagcattgttagtagtataaatatgattaataaaaatgtgcatggctttcctgaaggagattttttaattgcctttgagaataaactcataaggtctaccaagaaaataaatgttatgatgtttcagttggcttctaggaaataattaaattagtgatattaaattaaacaaatgcttaatttaattaatagtcaacaacttagccacgtgtggtggtgtgcctgtagtcccagctactaggcagggtaaggtaggaggagcccttgtgccaggagtttgaggctgtagtacactattattgagcttatgaataaactctgcacttcagcctgggcaataaagcaagacccagtctctagaaaaaaaaaatgattaggtaaagaaaagaaatcaaattttcacaatgggagaatgtggttttactatctgctaggccccttccatcaattcttattaaattctcaaaataatcctttgaaaagggagtataattacattttacagtgacctgaaccttacccaaacaagtgggagagccaggagccaaactatcaggctccaaagctttttttagtgcatcacaat

SEQ ID NO: 47 - DNA, 502 bp, Homo sapiens
caggtgctagcggccccttcgccctgcagtgaagagtaagtgaagaatttgagggtcatcagccattgtgaactcatcaaaatattcccactctggccactgcccaaaggggctcttatctgaggaatactgctgacttcgtgtacctagttttacagagccatctttctgaagcataaattagattacattattctacagcttaaatccctccatgaacttcccatcacccaagagtggactttatttccagccttgcaatgtacatacatccatctctgtcccacgccctctgcagggctttttggttccagaacgtgccatgtgcttttctcctttggagctctttgaataggatgcccttcctcccttgtctgcctgtagatagaaacatcctgtgcattggtgagttggccctgaccaccattttcttagcatgctgaattacttctgttcccctctgtgtttgcacagctttgtttgtgcacagtagacttttggc

SEQ ID NO: 48 - DNA, 541 bp, Homo sapiens
agaaccttaagggggaaggaaagacatgaactgaccccagcttacaagaccctgggcagctgtgaagtgggagtgatgcagacacgcccagctaaagagcaggtatgctggaaagcgggaagaaacctggcctgtcgtttgctctgaggtggaaggtggggcctgggcacaagcagttgagggaaggagactgtgcccctcctggctcccaagtcttcaaggagaagattctcccgggaaatctgacctcagaagacacctccttggggcctctctgctgtcacagccatgccaccttagagctttgtaaagcctgcaaagggctctttaaaaacttcaagccaggcgcagtggctcacacctgtaatcccagcactttgggaggctgaggcaggcggacacttgagcccaggggttcacagctgcagtgagctgcggtcatgccactgcactccagcctgggtgacagagtaagaccctgtctcacagaaataagtctaacttgaattgaaatgctgtagcaggctgagcgcagtggctc

SEQ ID NO: 49 - DNA, 572 bp, Homo sapiens
ttttttaacctatcaacagtgaatacttttgagtagtaattgttttgtgcctaatgctaagtgtatttattagcatttcggtgttgatctagaaaatttttacttttaatcctgtagttttagaagtatgttattcctttatctgtttctttatatcagtttttcccataattgggtaaactcctattttataaaatacgaagtacatttctggttttttctacataggttactagacattttttcaatttgaaaaaacattttgaattaagaaactttttttttaaagtaaatacgaaatgtggttcttgagtatgcattgatcctgatttaccatgtacattgtcaatggtttggaccattttctttgctaacagttacatcatgtcatgtgatatgtgcagtgtgatgtgtagttctaaaaataaggcaaggtaaaaatgctcatcccttgggaatttaaaaaatgtattataaatgtggaataactaccttcagtcatgaaattctgaattggatttccactaggtttatgcaacaaagtgtgccgttccttcgacctttagcatatt

SEQ ID NO: 50 - DNA, 555 bp, Homo sapiens
gcattagagggaatacctaatgtagatgatgggttgatgggtgcggcaaaccaccatggcacatgtatacctatgtaacaaacctgcccattctgcacaagtatgccagaacttaaagtataaaaaaaaatgaaatggatggaagcagagtacctggagagggctttgtccatcctgtggttgaggactccctggccatgacacccttttgtgctttaaagccaatgaatgacattatcttggcctcttgtctcacaaggatggaaccataaatgagtcctttcccacaccatgacacacatagaaaataataatatttgtgcagcctacatcatttgtgaagttgaggaggtttgtgggctttgctttttgatttatttgttaataattattttttataagacacattaaggaagactgattttgtataaaaatgtccaataccatattcttgaaatatatttttaacaatttatggaggtatactggatataaaataaactgcgtgtatttaaactgacaaatgtgtcagtgaaaccaaaaaaatgtcctctt

SEQ ID NO: 51 - DNA, 616 bp, Homo sapiens
ccccgtgtccccaatgcctcactcctggcttctagtgcagccctttgtagactcacctcgcaagaaggaagatctgcctggagacctgatcccagtccagctttttgaccataggtcatctttgtccccttgctcctttgcatcatgtcataaaatttgaggatatcagctgattattttttcttccaagaatgaaaatcaagcagaattgattcctacacgaaaaaaaagcacacgaatgccaaacctttcctttggtggactggacactaaccagatgagagtaaatttcttatccgtggacgtatgtaagctactgctgctgtgtgctctccacagccatatttattgtattaaacaatcagcactaaaccttcaaaaattgcccagtgttcctagttaaatgttcagaggggagaaatagatatattttaaataatgttttgctaatgaaaagagtaaatatttttgtttaaatcagcaaaaactttccattattttatatttccgtctactatacctaaaacaaaagattgccgttatacctgggttccgctgatgcagtcagccagcacctcctcacatgcacacatgattagacataggtgcactcggt

SEQ ID NO: 52 - DNA, 557 bp, Homo sapiens
acacgtagcaacggggctggttcagggtctgaacagagtttgggggttgtttgggattagtgaagctactgcctttgccgccagcgcagcctcagagtttgattatttgcaatgtcaggctttgaaaacttaaacacggatttctaccagacaagttacagcatcgatgatcagtcacagcagtcctatgattatggaggaagtggaggaccctatagcaaacagtatgctggctatgacgcagccacaacagccatacaccgggcagatttaccagccaactcaggcatatactccagcttcacctcagcctttctatggaaacaactttgaggatgagccacctttattagaagagttaggtatcaattttgaccacatctggcaaaaaacactaacagtattacatccgttaaaagtagcagatggcagcatcatgaatgaaactgatttggcaggtccaatggtttttttgccttgcttttggagccacattgctactggctggcaaaatccagtttggctatgtatacgggatcagtgcaattggatgtcta

SEQ ID NO: 53 - DNA, 647 bp, Homo sapiens
ctaaggcagcttcaattaagactagggcattgttccaactaagggcagattttattctttaccttcctagctataaccttaggtatcctgaggatctaacaatgaaaatttttaaattatgaggaaaaacactaatgaatgtattcactattttgcattcaactatcctacatgaacatgaaaaaaagggaaatatatgtggcttatgtatataatggtatcattttaaatatcataaaactgggtttcttttcccttctctaaaaatagacctcaatagaaacctagtattaagtaacctagaatcaggaggtattccattactgctgattaagaagtgggaataggcaagtaaaatattaagtttcttttcaaactgcaaactatcttctaaaagatcctttctatatttgaagcataattttcactctgctctgtttaaacaatatttatcagtttaagttgtatttatttttagcagttcaattaaacaagaatcattactttggaaagcatattaattataaattttttttttcttgacagaatcactcacaaaaaggagacacggtatacatttttaaaattcagaattatgataaatttagtaaagttccaggacacaaaatcaacatacaaaaatcagt

SEQ ID NO: 54 - DNA, 669 bp, Homo sapiens
  misc_feature 583: n = A,T,C or G
gtactccagcctgggcaacaagagcaaaactccgtctcaaaaaaatacaaataaaaataaatagtaatgtggctaatgttgtctgtcactaatgtctacttgtttttcctccttatggtgtaatatacaatacatattaaatatatgtcgttcttttctacctcagtgggaaaggatgacgataggtgatttatttgtgttgtagttaccgtaattacagaatatacttgatctcatcatagcagtctagaaatctttccgtgaagttgtccctgatctgttaatgaacttcatgtgagatacgcctttttgctgtggatttatcagagggctgtgatcttcacaaacgaagtggtagtattttaagtaaaatttttaaaggtgcttttgggtctttaagtccactattggagaatatcttgtaatctttttaataatgatgtgttactaaaagagctactctaaactgtaatggctaaaggaatttcaaagactttattgtctgtcctcagacttcctggtctcttaacacatttatttggttaaatatgaatgtaatacaggttgagcatccctaatccanaatctgaaatgttgcaaaatccaaaactttttgagtgctaacatgatgccacaggtggaaaattccacacctgaactcatgggata

SEQ ID NO: 55 - DNA, 701 bp, Homo sapiens
ggtgcaatctcagctcactgcaacctttgcctcctgggttcaagccattctcctgcctcaacctcctgagtagctgggattacaggcatgcaccaccacacctagcttatttttgtattttagtagagatggggtttcaccgtgttggccaggctggtcttgagctcctgacctcaagtgatctgcctgccttggcctcccaaagttctgggattacaggcgtgtgccaccacacctggcctaatgtagtgttttgagatccatccacattgtagcatgtatcagtacttcattcctttttatggctgtatcatatcccattgtattgatagagcacattttgtttatgcactcatcagtgagtggacatgtgggttgtttctactttttggctagccagcttcctttttgtattccagacataccaggctaccttttagcctttgtcctcttttcaagtagccactgttggtgggatgggaaccctttgccatcttcattgtctgtcctggtctgcctggcagttccttcttcttttgagttttagctttctcctttatctatcagtctcttaacgagtttggtaggaactaggtcacaggacctttaataaatactccctggtaaattatgaaaggttgaatttctgaccctgcaaaatgaaagaccagagctttaatagtgagtgcactaagttggac

SEQ ID NO: 56 - DNA, 683 bp, Homo sapiens
gcgcccctcccccagcctcgctgccgccttgcagtttgatctcagactgctgtgctagcaatcagcgagactccgtgggcgtaggaccctccgagccaggaaaatgtgcaaatatcaaggttacctgggtctgctggtcacttctagtttttggactcttgaagatggaaactgttcttagaagaggcctgaagagaaacatgactgactagtccacagggacctctggaatgagaagaactgagacagagaggctggagtaaaggagcagcagacctccagacacatgatgatagttacccttgctgatttcacccctttctccggtcttacttcatccttgtagatggagcccctaagatacaacacttcatcttcttgttgggaaaaagctgagtgttgggaaaaaaagctgaggcagggcttgcatgtctgacataatgtccagggctcagtgcataaaacccctcgtggcctctggaatgagtctagacttgctggctccttgcttctagcttaaactggaagaacatgctccctattatctcaagtagcagaatatgttccatatgcttcaaaggaaatgctaaactatcacagctgtagatcatgtgcttgcccttttgacccacacattctcaccacctgtttctttgtttgaccaccaataaatagtctgggct

SEQ ID NO: 57 - DNA, 673 bp, Homo sapiens
  misc_feature 504: n = A,T,C or G
cggcaggccaatgcctcgggccatgctgcctggggccccccaacagaccatacgactgagacagcccaagggcactacatggtggtggacacaagcccagacgcactaccccggggccagacggcctccctgacctccaaggagcacaggcccctggcccagcctgcttgtctgaccttctggtaccacgggagcctccgcagcccaggcaccctgcgggtctacctggaggagcgcgggaggcaccaggtgctcagcctcagtgcccacggcgggcttgcctggcgcctgggcagcatggacgtgcaggccgagcgagcctggagggtggtgtttgaggcagtggccgcaggcgtggcacactcctacgtggctctggatgatctgctcctccaggacgggccctgccctcagccaggttcctgtgattttgagtctggcctgtgtggctggagccacctggccgggcccggcctgggcggatacagctgggactggggcggnggagccaccccctctcgttacccccagccccctgtggaccacaccctgggcacagaggcagatcgtgtttgaagccactctgggcggccagccagccctggggcccattgccctggatgacgtggagtatctggctgggcagcattgccagcagcctgcccccagcccg

SEQ ID NO: 58 - DNA, 620 bp, Homo sapiens
ccagctacaagagcgccaacttcctgcagcacctgcttcaccgacacaagttctcctacgacacctttgtggactacagtattgacgaggaggccgccttccaggctgctctggccctgtctctctctgagaactgaagggaagcgcagccacccgcctgcgtctggggtcagggatgtccccgctcctgtgtcgcacctggcacctgctcgggagcgcacctcaccggactgagctcacaggaggagcctgcacccgcgcagaaggggagccggggccgagcctccgggcctgaatacgggccagccgccgaggccgccagagcagggccgcctggtcccaccggcgtcgctgggttcttcggtgcttctggccgagcaggcggcctacttgggcagggctggacgctgggacctggagctgccgccgtctcttcaaagccatgataccccctcgtgggaagaagggaccgacgcgcgagtcgcgctccgcagtcgagccgggaggaacccaggctgctgccctgcccagcccgaccctgccccggccccgcttccaccttgcgcatttggtactggcttttgtgatacttaggaaccctggcatcttttctatattat

SEQ ID NO: 59 - DNA, 638 bp, Homo sapiens
tgaaccggtctcttcctcggaaaggcagggccgaggggcctgcggggcagccatggaggcgacgcggaggcggcagcacctgggagcgacgggcggcccaggcgcgcagctgggcgcctccttcctgcaggccaggcatggctctgtgagcgctgatgaggctgcccgcacggctcccttccacctcgacctctggttctacttcacactgcagaactgggttctggactttgggcgtcccattgccatgctggtattccctctcgagtggtttccactcaacaagcccagtgttggggactacttccacatggcctacaacgtcatcacgccctttctcttgctcaagctcatcgagcggtccccccgcaccctgccacgctccatcacgtacgtgagcatcatcatcttcatcatgggtgccagcatccacctggtgggtgactctgtcaaccaccgcctgctcttcagtggctaccagcaccacctgtctgtccgtgagaaccccatcatcaagaatctcaagccggagacgctgatcgactcctttgagctgctctactattatgatgagtacctgggtcactgcatgtggtacatccccttcttcctcatcctcttcatgtacttcagcggct

SEQ ID NO: 60 - DNA, 576 bp, Homo sapiens
  misc_feature 482: n = A,T,C or G
ccatccaggtggttcgggaggagctcaagccagatcagaaacagagagatgtatccttgaaggagagccagggaaggtgtctaatcttcaatacttgcatagctacctgacttacatcaagctatcaacggcaatcaagcgtaatgagaacatggccaaaggtctgcagagggctctgctgcagcagcagccagaggatgacagcaagcgctcaccccggccccaggacctgatccgactctatgacatcatcttacagaatctggtggaattgctccagcttcctggtttagaggaagacaaagccttccagaaagagataggcctcaagactctggtgttcaaagcttacaggtgttttttcattgctcagtcctatgtgctggtgaagaagtggagcgaagcccttgtcctgtatgacagagtcctgaaatatgcaaatgaagtaaattctgatgctggcgccttcaagaacagcctanaggacctgcctgatgtgcaagagctcatcactcaagtgcggtcagagaagtgctccctgcaggccgcagccatccttgatgcaaacgacgctca

SEQ ID NO: 61 - DNA, 584 bp, Homo sapiens
tgatgtacagttctcctcaagcagtgaactctacctacatttccaggagcacagctgtgatgaacagtacttgtgtcagttctgtgaacatgaaactaatgatccagaagacttgcatagccatgtggtaaatgagcatgcatgtaaattaatagagttaagtgataagtataacaatggtgaacatggacagtatagcctcttaagcaaaattacctttgacaaatgtaaaaacttctttgtatgtcaagtatgtggttttcggagtagacttcacacaaatgttaacaggcatgttgctattgaacatacaaaaatttttcctcatgtttgtgatgactgtgggaaaggcttttcaagtatgctagaatattgcaagcatttaaattcacatttatctgaagggatttatttatgtcaatattgtgaatattcaacaggacaaattgaagatcttaaaattcatctagatttcaagcattcagctgacttgcctcataaatgtagtgactgcttgatgaggtttggaaatgaaagggaattaataagtcaccttccagtccatgagacaacttgattattct

SEQ ID NO: 62 - DNA, 573 bp, Homo sapiens
gccctgtttgggtgatcactcataaatccgactcgtgctcagatttggacctgtgtaactgcttgcccatgggtcatctagggtgcaatcacatcacacccctttttatttgaaacagggtcttcttgctctgtcacccaggctgaagtgcagcggtgcaatctcagctcaccgcaacttccacccctcccccaggctcaagcaatccttccacctcagcctcccaagtagctaggaccacaggtgtgcaccaccatgccctgctattttttttatttagtagagatgaggtttcgccatgttgcccaggtgggtttcgaactcctgagctcaaacaatgcactcacctcggcctcccaaagtgctgggattacaggtgtgagccaccgcacccagcctacacttttttgaggacatgtatgtccctaagaatctgcataccatggcagacacggtggctattgcctgtgatcccggcactttgggaagccaaagtgggaggattgcttgaggccgggagttcgagaccagcctgggcaacatagtgagaccctatttctattaaaagtcaaa

SEQ ID NO: 63 - DNA, 633 bp, Homo sapiens
acggctcaactaggcagttgtagtggaccaggaagcaagacccttctttgctctgggcctctgtaaaataggacatccctctgtcctgattcatgcctcttgccacagcataattcctcgtagcacccacttttactttcagagctgccctggtttttggatgacaaaatatacgaataccttcagtaccccagagattgcttatgagaattaaatcaaataactcatctcacttctgctgattcacggggtacctcaggcaagttgctttttccatctcagcttcagttcgcccatctggaaaatggcaataataccaagcatctggcagcctgaggatgaaataaaaatcacagaaccttagagagttcagatcaggcaatcctgaggttcagatcccaattcggcctcttgatggctgtgtggcttgggcaaattgctcaacctctctgtgctttattttattcatttagaaaatgcagtgtgaagctgggcactgtggctcatgcctgtaatcccagcactttgggaggccaaggcgggcggattgcctgagctcaggagttcacaaccagcatgggcaacacggtgaaaccccgtctctactaaaatacaaaaaaattagctgggcat

SEQ ID NO: 64 - DNA, 496 bp, Homo sapiens
gcttccgcgcgccccggaccagccccccttcccgagttcgtggcccggccggtgggcgtctgctccatgatgcgcctgccggtgcagacctcccccgaggggctggacgctgccttcatcggggtgcccctggatactgggacctccaaccggcctggggcgagattcggacctcgccgcatccgggaagaatcagtgatgcttgggacagtcaatcctagcacgggggccctccccttccagtccctcatggttgcagacctaggcgatgtgaatgtcaatctttacaaccttcaggacagctgccggcgaattcaagaggcctatgagaaaattgtagcagctggctgtattcctctgaccttgggtggagatcacacaatcacatatcccatattgcaagcgatggcaaaaaagcatggcccagtggggctgctgcacgtggatgcgcacacggacacgaccgacaaggccctaggagagaagctctaccacg

SEQ ID NO: 65 - DNA, 591 bp, Homo sapiens
tgcttcacctcttcgccggcgggtgtggaggcacagttggtgctattttcacttgtccactagaagtcattaagacacggttgcagtcttcaagattagctctccggacagtctactatcctcaggttcatctggggaccattagtggagctggaatggtgagaccaacatccgtgacacctggactctttcaggttctgaagtcgatcttggagaaagagggaccaaagtcactttttagaggcttgggtccaaatttggttggagttgcaccatcaagggctgtatactttgcatgttactccaaagccaaagagcaatttaatggcattttcgtgcctaacagcaatattgtgcatattttctcagctggctctgcagcttttatcacaaattccttaatgaatcctatatggatggttaaaacccgaatgcagctagaacagaaagtgaggggctctaagcagatgaatacactccagtgtgctcgttacgtttaccagaccgaaggcattcgtggcttctatagaggattaactgcctcgtatgctggaatttccgaaactataatctgctttgctatttatgaaa

SEQ ID NO: 66 - DNA, 493 bp, Homo sapiens
cgtcccaacgcagtggcttatgcctgtaattccagcactttgggaggccgaggcaggcagatcacctgtggttgggagttcgagaccagcctgaccaacatggagaaaccctgtctctactacaaatacaaaattagctgggcgtggtggtgcatgcctgtaatcccagctactcagaaggctgaggcaggagaatcactttagcccgggaggcggaggttgtggtgagctgagattttgccactgaactccagcctgggcaaaaagagcaaaactccttctcaaaaaaacaaacaaacaaacaaacaaaaaaaaacacacacacacacaatccaaaaaccagtaagggtcatgtcctgggaggctaactcagccgactgttaggtcaccatgcttatagccaagaaatgtgggatgctgctgggccctgagcggtcagataaactactttctctgataattagaaggctacaggaaatgttttgttttgttt

SEQ ID NO: 67 - DNA, 420 bp, Homo sapiens
ggggctggttcagggtctgaaacagagtttgggggttgtttgggattagtgaagctactgcctttgccgccagcgcagcctcagagtttgattatttgcaatgtcaggctttgaaaacttaaacacggatttctaccagacaagttacagcatcgatgatcagtcacagcagtcctatgagcagccacaacagccatacaccgggcagatttaccagccaactcaggcatatactccagcttcacctcagcctttctatggaaacaactttgaggatgagccacctttattagaagagttaggtatcaattttgaccacatctggcaaaaaacactaacagtattacatccgttaaaagtagcagatggcagcatcatgaatgaaactgatttggcaggtccaatggttttttgccttgc

SEQ ID NO: 68 - DNA, 499 bp, Homo sapiens
cggcacgagttcagggtctgaaacagagtttgggggttgtttgggattagtgaagctactgcctttgccgccagcgcagcctcagagtttgattatttgcaatgtcaggctttgaaaacttaaacacggatttctaccagacaagttacagcatcgatgatcagtcacagcagtcctatggcagccacaacagccatacaccgggcagatttaccagccaactcaggcatatactccagcttcacctcagcctttctatggaaacaactttgaggatgagccacctttattagaagagttaggtatcaattttgaccacatctggcaaaaaacactaacagtattacatccgttaaaagtagcagatggcagcatcatgaatgaaactgatttggcaggtccaatggttttttgccttgcttttggagccacattgctactggctggcaaaatccagtttggctatgtatacgggatcagtgcaattggatgtctagga

SEQ ID NO: 69 - DNA, 614 bp, Homo sapiens
ggcacgagggcggccagagctactacgccggccgatggcgaggagcccgccccggaggctgaggctctggccgcagcccgggagcggagcagccgcttcttgagcggcctggagctggtgaagcagggtgccgaggcgcgcgtgttccgtggccgcttccagggccgcgcggcggtgatcaagcaccgcttccccaagggctaccggcacccggcgctggaggcgcggcttggcagacggcggacggtgcaggaggcccgggcgctcctccgctgtcgccgcgctggaatatctgccccagttgtcttttttgtggactatgcttccaactgcttatatatggaagaaattgaaggctcagtgactgttcgagattatattcagtccactatggagactgaaaaaactccccagggtctctccaacttagccaagacaattgggcaggttttggctcgaatgcacgatgaagacctcattcatggtgatctcaccacctccaacatgctcctgaaaccccccctggaacagctgaacattgtgctcatagactttgggctgagtttcatttcagcacttccagaggataagggagtagacctctatgtcctgga

SEQ ID NO: 70 - DNA, 481 bp, Homo sapiens
ggccttctgaagcagagggaagcctatcagagtaagctcaggtgggcctggtcagcctcgccgagctctcatttccactctgcccacagccacagagggaatgggttgcctggagaggtagcgagtgctgcatcagtgcaggtattctcgcacagattcgacaactgcgtatcagcctgtaggtgagggaatagttaggcttgatcatccagaaagttccttttgaccctaaaagtctgattcttgtgattctagcctttggcaaaccacagataaccagtctctcctcctatagtatagggttcttattacgattattgaccttgtgatgacaagggtcacaaatccaggaggctgtgaagcccctgaaattattacttttttcttccttttttttttttttttgggttttttaaaacctaaatctggaaaagaacccccttaaatttttttcccaatttgggggggttgccttttggcc

SEQ ID NO: 71 - DNA, 619 bp, Homo sapiens
cggccgcgctccgaacggcgcctcccgccccaccatgggcaacagcgcgagccgcagcgacttcgagtgggtctacaccgaccagccgcacacgcagcggcgcaaggagatactggccaagtacccggccatcaaggccctgatgcggccagacccgcgcctcaagtgggcggtgctggtgctggtgctggtgcagatgctgacctgctggctggtgcgcgggctggcctggcgctggctgctgttctgggcctacgcctttggtggctgcgtgaaccactcgctgacgctggccatccacgacatctcgcacaacgcggccttcggcacgggccgtgcggcacgcaaccgctggctggccgtgttcgccaacctgcccgtgggtgtgccctacgccgcctccttcaagaagtaccacgtggaccaccaccgctacctgggcggcgacgggctggacgtggacgtgcccacgcgtctggagggctggttcttctgcacgcccgcccgcaagctgctctggctggtgctgcagcccttcttctactcactacggccgctctgcgtccaccccaaggccgtgacccgcatggaggtgctcaacacgctggtgcagctggcg

SEQ ID NO: 72 - DNA, 456 bp, Homo sapiens
gcactcacttcagactgggtgacagagcaagactgtctctcaaaaaaaaaaataaataaaaataaaataaaaatggctaatttttgtatttttagtaaagacgtgttggtcaggctggtcttgaactcctgacctcatgatctacccgccttggcctcccaaagtgctgggattacaggtgtgagccactgtgcccggccctatagattatcttatatttggtccttttcaggtttgaggatgcaaaaaatacatgtatacatgtaaatggttaaaaaaacattttgtttctttttctattagcactttttaagagcactggaaaactatgaaaagcttctgtaatgtagtaataaccgtatgtggagcatctgttttttatttgggttttcttgtggtggcatttttccttgaacacttatactgttcttctaccatttttttcctaccccagta

SEQ ID NO: 73 - DNA, 534 bp, Homo sapiens
atgattccagccagaatgtcttgagcctgtttaatggatatgtttacagtggcgtggaaactttggggaaggagctctttatgtactttggaccaaaagctttacggattcatttcggaatgaaaggcttcatcatgattaatccacttgagtataaatataaaaatggagcttctcctgttttggaagtgcagctcaccaaagatttgatttgtttctttgactcatcagtagaactcagaaactcaatggaaagccaacagagaataagaatgatgaaagaattagatgtatgttcacctgaatttagtttcttgagagcagaaagtgaagttaaaaaacagaaaggccggatgctaggtgatgtgctaatggatcagaacgtattgcctggagtagggaacatcatcaaaaatgaagctctctttgacagtggtctccacccagctgttaaagtttgtcaattaacagatgaacagatccatcacctcatgaaaatgatacgtgatttcagcattctcttttacaggtgcc

SEQ ID NO: 74 - DNA, 585 bp, Homo sapiens
gaaataactgttcataagataagccctcagcacagagcgagaaaaagaagactccccacaattcaaagttcagcaacaagtaatagttcagaggaagcagaaagtgaaggagggtatattacagctaatactgacacagaagaacagagttttccagtccctaaggcatttaacacacgtgtagaggaattaaatttagatgtccttcttcagaaggtagatcatttacgtatgagtgagtctggcaagtcggagagttttgaactacttcgtgaccacaaagaaaagtttagagatgaaatagagtttatgtggcgatttgctcgtgcttatggagacatgtatgaactatctacaaacacacaagaaaagaaacattatgctaatattggaaaaactttaagtgaaagagctattaatagagcacccatgaatggacattgtcatctgtggtatgcagttttgtgtggctatgtatctgagtttgagggtttacaaaacaaaatcaactatgggcacctcttcaaggaacatctagatatagcaatcaaacttttaccagaggaaccctttctatattacctc

SEQ ID NO: 75 - DNA, 630 bp, Homo sapiens
gagaccctgtcaatcagcataaaattctcagtttctaagattttttaatataaaaagcaagtagtaacagatcatctgttatttatgagttgtgatcaatagacccctaaatatctacttatttagtctactgtatcaaatatcatcatcaatgttgcaaaaccaacattagggtattgaataacatcactatcaattaacattttaattggaattttgaattattaggcttttcatttaagtcatctacaaattgattgacaattgaactttatcatttgcttagttcactgctaaatcaaactgtttaatacttttttctaatagtaaaaacatactgaagattgagaagcactggtttagaaaaaatatgtaaatatataaaatgtaatagcctggaaatcaatcagaaaattggaactgattccatttgtaagaacagaaacataaaataagttttaaacttataaaacttttattttaaaattactacaaacctcaatgtaggttataaaagaagacttcaataaatggaaaaacacaccatacttcctgggatgaaaagactcaatgcggtgccttgcaggcatttgtatacatagaggaaactgttttcaaagctgagctgca

SEQ ID NO: 76 - DNA, 596 bp, Homo sapiens
gaccctgggttttgtgtttttactctgtggatgttgtggtcacgctggatcatgttgtgtggaggcttgggagcatgtgttggaggaacagttgagattttaattttatttttggtggcttttttggtacatccaaccctttcaggttaattaaatgccaggtagagctagcccacaagtggattttgttttgaaaatgtgcctgttttccaggagccctttgtggcagcctggtctggttgcccagatatcattttggcttcttggtgccttagtgcctgggatgaattggcctgcctgctgcagtctcttctcctcagccctgatatccgccaactgggtggctttgatgcctctgctgagggctctggtttcctgccagtctgggaggcgtgggatctcatgcgtgggaaaggtaatcaagcaataaaactaagcctgggcgtgagaggtggattaaagtgggcaaggaagaagcaggggagagggagggagccagctgtccagagtggccggaagaggcagaatgtgggctccatcctggctgggacctgtcagcccttgtgagaacttttagggcggtagtattatagttt

SEQ ID NO: 77 - DNA, 654 bp, Homo sapiens
catggcgctggccaccgcctcgcctgtgggaggaaagcaggtgtgagggcccatcaggaggccatgccaacctctccccacagggctcacgagtcccgccccctccactcatttcccattcattttactccttattccttctacatttttaaacttcgaatttcagtgtaaagtgcagggaactgcctgcatcataagcttgatggactttcacaaaaggaacacacctgttttatggtacccaggccaggagacaggacattgctaatcccctgtagggtccctgggcccctcccagtctctaaccacaccacgctaaccactatcctgacttctaacatggactggttgtgcctggtttgtgtatgtggtaagatggaattctacagtatgtactcatttgcacctggcttctgtcacttcatactatgtgagagtcatccaggtggctgtgtggggagtagtctggtctgtctcatcgctgtatggtatttgttgtgtgactatgccgcaatctattcatcgtttctgttcttttagagacagggtcttgctctgtcacccaggctggagtgcagtggtgcagtcatggctcactacagcctcgacctcctaggctcaagtgatcctaggcatgcgctagcatgcctggct

SEQ ID NO: 78 - DNA, 677 bp, Homo sapiens
caagtgctacctcctggagcttctcttggaaatgggctcacaccagaggcagcaagagaccttggccttctccctgggattgcggtcgcagcttcactcattgatgcccatgcaggaggactaggagtgattggggcagatgtgagagggcacggcctcatctgtgaggggcagccagtgacgtcacggctggctgtcatctgtggaacgtcttcttgtcacatggggatcagcaaagacccgatttttgtaccaggcgtctgggggccttatttctcagccatggtacctgggttctggctgaatgaaggtggtcagagcgttactggaaaattgatagaccacatggtacaaggccatgctgcttttccagaactacaagtaaaggccacagccagatgccagagtatatatgcatatttgaacagtcacctggatctgattaagaaggctcagcctgtgggtttccttactgttgatttacatgtttggccagatttccatggcaaccggtctcccttagcagatctgacactaaagggcatggtcaccggattgaaactgtctcaggaccttgatgatcttgccattctctacctggccacagttcaagccattgctttggggactcgcttcattatagaagccatggaggcagcagggcactcaatcagtac

SEQ ID NO: 79 - DNA, 627 bp, Homo sapiens
gctgagttttgtgggtggggcttgttgactgttgccttttctttgggggaatgccatatatgtgttactttaagtctttttaggtagtctggttcccagagaagactcctggctgctaggtaaaggctggcagccagcgggaagagactttgcaggttgcctaccttcacgtaaaactccccttttagtactttctgctgtgtattagagtcctagaaactcttttcttcagttaagagaatagggttaaccacttttctctttggataaggaggcagcatttgatgcttctttggagaggatctagacctttaatagcttctcagagagactttcaacccgtccttcttcctgccctccttccacctcaattcaaagctacctggggcagccagttatttgggggatgtggagagggaatttgtggtataaaatagcttggttcttaacttgttttttactgatgacttattaagtgttttggagtgtttgcaaagtcttgtccatctgctttccagcttaccaaatttgttgctggttttgttttgctctcaatacttttattttgccttttaaaaaaattctcaggctgggcgcggtagctcacgcctgtaattctagcagttt

SEQ ID NO: 80 - DNA, 698 bp, Homo sapiens
gtgttttaactgctttttgtacttaatatcttaaacatgcttggaattgattggacagaataaaaccaagataaatatacaaaattaaatgattcagggataatgtgggttatgccttgcgtgcctgtctgaggagtttggacttgattctctagaccaaggattggcacactgtaacttgtgggccaaatccagccttctgcctgtttttataaataaagttttattggaacacagccacatcaatttgtttgcatattgcgtgtgactgttttggtgctataatagcagagtaggggataggcttgcagggcttaaaaaatctgagcttttacacaaaaagtttgccaaccctgatataagtagtgggaagccatgaaagggttttgatcagggaggtggtatcttcagatttgtgtgtcagaaagcttactccagcagctgtgtggaggatggatcggagaatacaatgaacagggggatggcagagggaatgggagggaagggaacagcagaaagacattttggacatagaatctactataagcctgggtatggggtatgggagggagaggagccaaagacagttttgtaaaaaaactattaaacccatataacctcccccaaaattcagaataataacacacccgaccacaccgctaacaatcaatactaaacccccataaataggagaaggc

SEQ ID NO: 81 - DNA, 635 bp, Homo sapiens
ccatctctactaaaaatacaaaaattagttgggcgtgatggcgcatgcctgtaatcccagctacttgggaggctgaggcaggagaattgcttgaacctgagaggcagagattgcagtgagccaagatcgagccactgcactccagcctgggtgacagagcaagactccatctcaaaaaaaaagaaagaaagaaagaaagagtttttctggctaggtgtggtggcttatgcctgtagtctcagctacttgggaggctgaggtgggaggattgcttgagctgggggagtttgaggctgcagtgagctatcacaccactgcactccagcatgggtgacagagcaagaccctgtctcgggggagaaaaaaaaatgcaaatgctttcctgacagaactaagagagtttggaactagggttctataaagtcagccctggtgtgggacttctgttattacagagagtacagaaagtgtcctaaaaggacagctgggtggctgggcatggtggctcacatctgtaatcccagcacttcgggagcagaggtaggcggatcacctgaggtcaggagttcgagaccagactggccaacatggtgaaaccctatctctactaaaaatacaaaaattagctgggcata

SEQ ID NO: 82 - DNA, 545 bp, Homo sapiens
tgggaagaaaggtctgtttatgaaaatgatgtattagaacaacttaaacaagctctgtatggtgataagaagcctaggaagcgaacttatgaacagataaaggtggatgaaaatgaaaactgttcctctctgggatctccaagtgaaccaccacagactctagatctcgttagagcattacaagatctggaaaatgcagcctcaggtgatgcagcagttcatcagaggatagcttctttacctgttgaagtccaagaagtatctctattagataaaataacagataaagaatctggagaaaggctttccaaaatggtagaggatgcgtgtatgttgctggcagattacaatggcagattggcggcagaaatagatgatagaaagcaactcactcgaatgttagcagattttcttcgttgtcaaaaggaagcccttgcagagaaagagcataaattggaagtgcgtaacctttttcttctttagtgcttatttatttaattctctttttgttaggaattttaaaatattttaatctatgtgcacat

SEQ ID NO: 83 - DNA, 568 bp, Homo sapiens
cattaaacttgtacactgagttactaaacaacagactccatggtgagtttgagaactcccctctgtccctttctccatttccttcttttaattgtctgtgtgaaggctttggatcgtgcctcagtcattggcctacactttaccttttcctgaggcgtagatgattgaagcaagagtagagatccagaaaggagagtagttttccagttttgtggacatgtgattagttaagggacacataggaatgactgctttgccttaaactcagccatttagggattaatcttcaaccccaaattttatcattttattattttacagctgatgtatacacatttaatgcattgattgaagcaacagtatgtgcgataaatgagaaatttgaggaaaaatggagtaaaatactggtaaggaggaatcctcagtttattttttaatagggcttaaatactctttaccagaaatacatgggctggccagagatcacctgaggccaggagttcgagaccagcctggccaacatggtgaaacccgtctctactaaaagtacaaacaattagctgggcgt

SEQ ID NO: 84 - DNA, 562 bp, Homo sapiens
tccagttgtgctgagacagagcaatgggtttccttcttttacatccttgtgcattgctctattgttatggatgataaatttctaaaagtaaaatcactgggacaaaggatacacacacacacacacacacacacacacacacacacttttttgtgacaggatctcactctgtcacccaggctggagtgcagtggcgcaatcacagtttactgcagccttggcctcccaggttcaagcgatcctcccacctcagactcccaagtagctgggaccacagcgcacaccaccatgcctggataattatttttctcagtttttgtagagacacggtctccctatgttgcccaggctggtctcaaattcctgggctcaagcaattctcctgccccagcctcccaaagtgctgggactataggaatgagccaccgcacccagcctgggtatgtattttataaatattgtgctaacttcaaccaagtttttgattagagctgaacagcacacaattaaaataagatcacttttgaatacttgaaggatgacagatgtctagttcattagt

SEQ ID NO: 85 - DNA, 590 bp, Homo sapiens
caaggaaaggcactttcaggcccggctggttccagagcctcaattgatgcccatccatcccgtcgctcagactctccctctcctcttcttgctctggggctggctgacattgtggctgactcacggggccgctgctgccatgagtgcactggtcccacctccatcagcattgagtgacatgatctgaacccctgtgcttggtgccgggggctcaataaaggttcagccactgggtgtcagcagcccagagcaggaagcaagatcaagtggtggatgcggaacagaacatgcaagctagggccaggcgcggtgggtcatgcctggaatcccaacacttcgggagagaggctgaggtgggcagattgcttgagatcaagagtttgagaccagcctggccaacatggagaaaccccatctctactaaaaatataaaaattagctgggcttggtggcacatgcctataatctgaggctgaggcaggagaatctcttgaacccagtaggcgcaggttgcagtgagccaaggtgccactgcactccagcctgggtgggagagcaagactgtctcaaaaaaaaaaaaaaaaaaaaaa

SEQ ID NO: 86 - DNA, 469 bp, Homo sapiens
cccagagtgctgggattacaggtcttgctcttctttaagttgtgccagatatgatatgactgcatagtgttttcgtaagaataccattgggaaaatgagaagttttactgggctagttcttccatgatttgaggatgatattcagattataagataccctttgtctttcttacagtaatgaagtataagctccatatctgttccagagactttaacttgacttgcttcattcacaaagaacagagttcaagaagcagtgcatcctgtgagaagtgtgaagtgtttgtacatcactttaaatatattacttaatatattctaagttgctgtgtggagcagtatactgttgttttaaaaatgcaagattcagacaaattttaatattatctcattaaaataatttaaataatggtataaaatatctatatcattaaaataattttccatagtgtttagaaaccatgaaaaa

SEQ ID NO: 87 - DNA, 571 bp, Homo sapiens
aatggatctgctaaatattcaacaggtatatgtggacttttcttttagaatgagcagtgttgttaagagttagtgtcagacaaaactgtgtttgccattcctgaccctttctccctcttacctagccatgtgacattttgcaggtttaattcttctgagctaatttcagcacttataaaatggagtaataatagtgtatactatgtcagtgaagtgccagcagataacagaaaatacacttacctggaatttgaagataatttaatgaagggactatttacagagatgtagatggagtttagggaacaagtaagggatgatgaagaatttgtctaggggattagcagcagtagaaaggcagcattgccacctggagccctccagctggtgcatctcattggctaaagttaacagccagagaggggtagggaacacagcaggtcagagagggggagataaaggactgggagagagttgtatgccaaacaggaaccagctagttacctcttaaggttgttgtgaaacaatgagtagaatgtgacgcaatacaggttcagtaggtaaaggtagc

SEQ ID NO: 88 - DNA, 678 bp, Homo sapiens
gctttacaaattaagctgaaggccgggcgcagtggctcatgcctgtaatcccagcattttggggggccgaggctggtggatcacttgaggtcaggagttcgagaccagcctggtcaacatggtgaaacttcatctctaccaataaataaataaagtagctgggtgtgctggtgtgcctgtagtcccagctacttgggaggctgagaaagaaggatcgcttgagcccaggaggcggaggttgcagtgagctgagatcgcgccactgcactccagcctgggtgacagtgagtggtaacagaatgacagagcaaggatgactttagatgaggtccttggagtagaccttgtggcagaggtcacagagatgtggattgtgagtaggaaagagaggtgagaaagtctgggggccaggcattccacccaccagaggcagccccaaagcccagaagagtagcaggtcttcgaggaggcctgtgcggtgagcagatccaccataggacagaggcacagggtaggggctgatcagttagggccttggatccttgggaagaaatctgaattttattctagatctgatgggaagtgcttggagggttttgagcacaggcatgccatgatcatatttttattttcttatttatatttattttgaaaaagagtcttgctctgtctcaggct

SEQ ID NO: 89 - DNA, 547 bp, Homo sapiens
tggggaacaatttgtaatcctttttagttcatatgtcacaatcacagaattgagactagctagtttaaatccctgcatcttgcacatggtgaggaaaggtgaggacatttagatgacctttgcctgtcaccacacagctgtatggtagcagagctgggcgtgaaacctgcattcctggcctctccttttgtggtgcttacagtgctgtgttaggtccagttttacctcttaaatctgtattattacttttttttcgagaccagatcttactctgtcgcccaggctggagtgcagtggcgtgatctcggcttgctgcaatctctgcaattctcatgcctcagcctcccaagtagctgggactacaggcatggtagtgggtgcctgtagtctcagctactcgagatgctgaggcaggagaatcacttgaagctgggaggtggaggttgcagtgagccaaaatctcgccattacactccagcctgggggacaagagcaagactccatctcaaaaaaaaaaaaaaaaagtttttggttttaattttggaaa

SEQ ID NO: 90 - DNA, 625 bp, Homo sapiens
taatcccagtgctttgggaggccaagcaggaggatcatttgatcccaggaattccagaccagcctggaccttgtgtctacaaataattattattgttattattattattatcctggcatgatggctcatgcctgtagtctcagctgctcgggaggctgagtcaggaggatcccttgagcctgggagttcaaggctgcagtgagctatgatcacatcactgcactccagtctgggctacagaatgagaccctgtctaaagaaaataaaataaaaatctcaggagcaagtgagagtggagagagcagaggcccaggatagagccctgaggagcccttgcatggggcaggagaggcaggatgggccactgacccatgacaggcccagaggtcagggttagaatctaggcctccctccaggcggccagcaggtggaagggacttagggcctgtaggtcagggggctgggcttccttgcctcttcctcaggcatgagtcatggggacctatgggaccttggccattcccagtggggtgggtgtgtgtgagcgtgtatagtgtgcatatgtggcccagggcatggggccagtatcagcgcctgagggacagtctgtgcgaggctgcttagc

SEQ ID NO: 91 - DNA, 658 bp, Homo sapiens
cctttctcctgctggatgcccgctcctttgcagagtcccggcatgcacactgacactgacatgcctcttcttgtttgatgatgatcacaggaacactgaggccaatctgctggacagagctccctgcgagagaggcaagagagactgctcttcaagtagctgcaggggcaggagcatgagggacagggatacatggactaggtgagagcagagtgccatgggaaccatgggaaggatggttgccacacttcgggcttcgttctgctttaaattggaccacatgccctctgaggtaaaagagggacactccccagcccgagacaaagtcccgtttccttagaaagtcacacacacgatctagatgcaccctgtatttccagcttcatttccagtcattctccattgcaccctccctgtggaggcctacttttcctgacacgttctttatacccctgggcctgtgggctcttccttacgactaaaatccctggacacctctcttctggagaactgacactcatctttcaagacctagctcactcccccactctctgtaggcctatgcagaggactagcttggatgaagccggtacccagcctcccggcacacatgcacagtgctgctgttttccttccacacctctctccttgcggtaca

SEQ ID NO: 92 - DNA, 653 bp, Homo sapiens
caggtctggatgcaggcaggagacacacgcgtccacactagcatgcgtgtgtacacacatctacatgtgcttatcccccgcgttcatgttaaaaaccatgggatcataccggtgtttcagattcacatccaccccagcagggtttctcgcctcccccattgcttataaccttagcaggtgttgagaaccctggcgctcactgtccacagtgagtttgcttattcgttgaaacctagcgtgcctgtagagtgtggagagttgccggcccgcacccctgcgagacacagactttctgaccgcagccctcatgtgtgtggctcttcttgtccttggccttacagtgcagtcggatcgctgctttccagagttgcctgggggtaggtccctcctcttctgtgctctgcggcgcagtgagcggcctttgcctcaggcctcccgcggcttccttaagcctctggcctgcccggtccctggcgccaggtctgttttccctgctcccttctctctgatcctgctttggtctgagccgtgcctctgggccccagcattgctgggccgcattgtcgttttatttctcttgtgtcgttgcgtctagtgtaagacattcagtggatcattgtggatggtcattagtggtccagagtggaaagtga

SEQ ID NO: 93 - DNA, 667 bp, Homo sapiens
tgaaccaggggagtactggtgaataggaaacaaagagtaggtgcatgtctgagagacatttcgggtcagcctgacatgacttaatgacagataaaaaccatgtttttttaaaaaccagaaatgtattatttatacagcaacctgccacactgaattactgggaaatgattagttttcatctgtatacaaacctaacaatataacactggaaatgactatcaggatactgtggttgatatggctcttgacttaacactgttccaaaccaccaagcatcatcaataatagagcggaatctgtcacctaggagagaaatgatcaagtctgaggcatttctctgctaacattcattaacatttttttaatctacaaaataccatatgatacagataaaaaagaagccaaaagcacaatacaaaaacaggcaagcagcgctcctaaacaaaccaagaaaaatatggcataaaaaatttaacttttagattaaatgcatttctagatgtattttacaactctaacacttcaaccagtgaaataaactgcactagatctgtgtttaacatatattacaatagaaacatgaactgctgcagtaaccatatctcttccttcttacccttcccaccatttacaaaacaaaaccaatgaaacaataaaagtcacctat

SEQ ID NO: 94 - DNA, 684 bp, Homo sapiens
aatattaacgagctcattaatcatattaatgagcagagcttccttagatatatctgtttataatgaatgatacacatatagctctgatgccatagggggagagtaagaatgaacaaagaaataaaataatttttaaaaaatgatacaggccacgtgtagtggttcatgcctgtaatcccataactttgggaggctgaggtgggaggattgcttaaagtcaagagttcaacaaaaattttaaaaattagctgggcatcgtggtgcatacctgtggtcccagctacttgggaggctgaggcaggaggattgcttgagccctggagttcgagcctgcagtgagctgtgatcacaccactgcactccagcctgggcaacagagtgagaccctgtctctaaaaaagaaaataaataattaaaaacatatatgataggccgggcacggtggctcacacctgtaatcccagcactctggaaggccgaggcaggtgcatcacctgaggtcaggagctgaagaccagcctggctaacatggtgaaaccccatctctactaagaatacaaaaattagccaggcgtggtggtgcacgcctgtggtcccagttgcttgagaggctgaggcaggagaatcgtttgaacctgggaggtggaggttgcagtgagccgagatcgtgccactgcactgcag

SEQ ID NO: 95 - DNA, 619 bp, Homo sapiens
ggctttccttttcatttaaagaaaaatccaaactcctttcttttgtgttgagatggagtcttgctccatcacctaggctggagtgcagtcacgcaatctccactcactacaacctccacctcctgggtccaagtgattcttgtgcctcagcctcccaagtagctgagactacatgtgtgaaccactacgcccagctaatttttgtatttttagtagaggcggggttttgtcattttgcccaggctggtctggaattcctggcctcaagtgatccacccactttggcctcccaaagttctgggattgcaggcatgagccaccacacccagcccaaactccttctaagacttataatgtctcccattatctatctgctaatctatccttccaacttcatgtattgctgttctctaccaagctcactttgctgaacatagcaagctccaatctcttcctgaaagtttctacctctacctggaagctcttcctcaccttcacctggcaagctccataccttcctttagtaatcagctaaatatcctataggtctaatccttgctattctgtcttactctttctcagcatttaaaacaattatttatctatatgtataattggt

SEQ ID NO: 96 - DNA, 549 bp, Homo sapiens
gaatcataagtcatgcacagttgtggcttccagggaagaattggcctgggggggccttggtggcaccagaactacattcttcccagagcactggcctgtcgtgtaacttgttattacacgcatgggctgatgaagagcattttgcacgtgagtgaggctgagaaattaaagtctgtgccactggcccttatctactttgggactcccggggatttcaacttctcatttaatggatgaaaaataatggaagtttaagaattttttactgttcacttcttctatcttcttaccaagccaatcatgaccatttattttgctgaaatggtgcgtctaggtgctgatttctctctttaaaatcagagtcttcagtctgtgcaattaaagcacagtaacattttgaaaatacctttaacagagagttccattcctcattatagaacattccatcatggcctagagatttcaaggcaggtaaccagttcaccccaaaaaatcttcaaaaggaaacaaattttcattgtgtttatttcgaaactacagtactcttta

SEQ ID NO: 97 - DNA, 664 bp, Homo sapiens
ctttctttctacctggaatagtacttaggttgtccctcctggatgttcccttagcactcttggttgtactcctattatgaaacttaatagctggtttatttgtctctccaccctaggctgaggtcttggatgggaggaactggaatttttttaaaaaaaacttctgattttttatttcattgaattaatgtttgttgaattatagaactgcttaaacataggattaatcattgaaaactgggtaggagatgccaaccacattgcttagcaactgctagttcatgtggacatggaatctgttttgctgaccactgtgcatttagtgctggtgcaatgagctatacacagtaggtgctcagtaaatacttggtaaatgattgagtgcacattcctgtaccagcctctgccttttccactgcttccctgaaacccatgggttaaatgaacccaaaatcccttaacgtttcctgacagccttatctttccactaatcttatgcgcaagaaatgccaaatacttagagatgcattctttcaccataaataaatgtaataataaagaaatacagtagcaaagaaatgtggaaataatttatctccaagttaaataaataaagttcattgcagaatgttttggctcattcacacttctgtttttctttctt

SEQ ID NO: 98 - DNA, 582 bp, Homo sapiens
cagctcctcccctactttttgtctgctcaggctactttctgaagggatcctaaagtgcaacttatcaacatattagctggcctgttatactatctaacttcagcaattatcacctcatgactcgttgtttcatctgtagcatctgcttccgttccaccagattatttgaataaaataccagagatcataccattttatctgagccccatgggtcagttttgtagggaatgccttgaaatatggacgtgtgcctgaacagcaagcccattgtttggtcttctaatgggccacagacttttcccacaaagcactgacagatgaatcattgaaattccaaaattcgatagaacacggccagagtgattttaatatagaaaacttctgtggtttgggtagaatggattggcgcagaaatatacaacagaatgtttcttaatttttaatattttgggctagtagtctaatttgcagattctgaatcatacaatatcgcccttctacacatacacacacacacaccccccacaaaaacatttgtttccctagacaactttcatttaatgctttctagaaaggggaatt

SEQ ID NO: 99 - DNA, 496 bp, Homo sapiens
cttgaggagggttctttcaccagtgtgagcatagctgactttgggattcttttgttgtgatctgtggatcaatcctgtccctgagctctcctgattttgttataacagcagagtccacttagattttaaccatttgatcagcagagccttgtttttggcctgttgtgctgcatgatttacagtgtgcatctggatttgtaattatgcctcacatagtttatattttgattcacttcaggcttttctgctttctcctctttacctgcctctagggccatatggagtggaagtttgcatgttgttgtaaaagcattttgaaatgttcatcagactttcatggtttccttacttcccttttaggttttgcattttaaattaggttatagaattgtgaatttaccaaactatattgtggattttattcaaacagtttctgtgggtatgaaatactggtcatgtgtatgtatcaatattttatatggaatcattatatttc

SEQ ID NO: 100 - DNA, 662 bp, Homo sapiens
aggccgaggctgagccagagcctgaactcgcatgagaaggggacaccccacacccctcaagcttgggaagcctggtgccgatggccccaccctcaccagcctgggcagcagcaagaactatttattaaaaacttaagatgggccaggtgcggtggctcacacctgtaatcccagcattttgggaggccaaggtgggtggatcacttgaggccaggagttcaagaccagcctggccaacatgatgagacctccgtctctactaaaatacataaattagccgggtgtggtggcaggcgcctgaaatcccagctactcaagaggctgaggcaggagaatcgcttgaacctgggaggcaaaggttgcagtgaactgagattgcgccaccgcactccagcctgggcgacagagcgagactccatctttaaaaaaaaacaagacgggccggcacggtggctcacgcctgtaatcccagcactgagaggccgatcacttgaggtcaggagttcaagaccagcctggccaacatggtgaaaccccatctctactaaaaaatacaaaaattagccaggcatggtggcacacacctgtaatcgtagctgaggcaggagaatcgcctgaacccaggaggcggagcttgcagtgagccgagatcgtgccactgc

SEQ ID NO: 101 - DNA, 642 bp, Homo sapiens
caatttatatcaccaaattaaactctagcaatgaatttattcaggatgttttaatattcattgaggcactatttcaaaatgtacatctgcttgcttaattacaatatttctgaatttgtaacacttgtcactattacatttagtcttaaaaaaactttagcaactgatgctgaattattaatttcaacattatgaacttttcaacttctaagtattgaggaagaaatactaagctaatttgactaattaatctagttgattatagtatatttatccaagcagagttaatctggcagaccaaaaagtttaaggagcctctggtaaaactataaatgaagccgactagcaattcagtgactaaacaagttattcgattgaaaattaacactttaggccgggcgcggtggctcaccgcctgtagatcacgaggtcaggagatcgagaccatcctggctaaaacggtgaaaccccgtctctactaaaaatacaaaaaattagccgggcgtagtggcgggcgcctgtagtcccagctacttgggaggctgaggcaggagaatggcgtgaacccgggaggcggagcttgcagtgagccgagatcccgccactgcactccagcctgggcgacagagcgagactccgtct

SEQ ID NO: 102 - DNA, 671 bp, Homo sapiens
ggacctgcgtgctgccgagagaggaagcgaagggcaccatctttgtattttgtgtcatgacttctcaagagaagacagaagagtatccttttgcagatatatttgatgaagatgaaactgaaaggaattttttgttgtccaaacctgtttgctttgttgtatttgggaaaccaggtgttgggaaaacaacattagcccgttacataacacaggcatggaaatgtattcgtgttgaagctttgccaattttagaagaacagattgctgctgaaaccgaatcaggagttatgttgcaatcaatgttgatcagcggtcaaagcattccagatgaacttgtcataaagctaatgttggagaagctcaactccccagaagtctgtcactttggttatattatcactgaaataccatcactttcacaggatgccatgactaccttacagcaaatagaattaattaaaaacttaaacctgaaacctgatgttataatcaatataaagtgtcctgactatgatttgtgccagagaatttctgggcaaagacagcacaataatacgggatacatatacagtagagaccagtgggatcctgaagtcattgagaatcataggaaaaagaagaaagaagcccaaaaggacggaaaaggagaagaggaagagaggaagaagagc

SEQ ID NO: 103 - DNA, 518 bp, Homo sapiens
ttcttgacctatgagaaataaatgttgtttaagccacccagtatagttttctgttacagcaggcttcactgactgagacagttgtaaattctgattaagtttacagtcattggacttgaaataatcgtgctgcttccccatcacttcagctcttctgatctgtaggtggtgcatacaacatgatttcccattgcttttaaaagggaattctgatcttagaaaactacccttcatgtttagtgataagtaattgcaaaataagaactatttggtgattaaacagcatgtgttctatagcttctactttcatcataatatcatttgctggttgggcttagttgcagttacgacatctggttcttatgaaacgtgtaaattcattcaacaaatatttatagaatgccagttctatggcctgcattttctaaatatgtgggaatggaagtctttgggaagctgataaagtacataacacattattggaacatttcaccattaggtaaaaccatgtgtttttt

SEQ ID NO: 104 - DNA, 674 bp, Homo sapiens
gcgggggccctcgccgggaccctcctgtgggcccagggggacaaaagtggctctcaatccagcacatgcacattgaagcaagttaaaggatttaatatgaagcacagaagcagatagtgccaaatagcaagcagtagttgttacacatttggtgagcagggcagcatttccttctcccactgctgctgagatggcagaaattagtcgaattcagtacgaaatggaatatactgaaggcattagtcagcgaatgagggtcccagaaaagttaaaagtagcaccgccaaacgctgacctggaacaaggattccaagaaggagttccaaatgctagtgtgataatgcaagttccggagaggattgttgtagcaggaaataatgaagatgtttcattttcaagaccagcagatcttgaccttattcagtcaactccctttaaacccctggcactgaaaacaccacctcgtgtacttacgctgagtgaaagaccactagattttctggatttagaaagacctcctacaacccctcaaaatgaagaaatccgagcagttggcagactaaaaagagagcggtctatgagtgaaaatgctgttcgccaaaatggacagctggtcagaaatgattctctgtatggcatttcaaatatagatacaaccattgaaggaacgtcag

SEQ ID NO: 105 - DNA, 463 bp, Homo sapiens
cgaattcggcacgagccgcgcccggcctggcctgttcctttataggtaactaaccctattgactgcatcttgctggatgggaggtgattttggggtgtgtgggtgtttatttgcacaaaatggtggagggagctctgacaagggtgaggcatgacctgtgcaaacacaggagggaatgaagaggctcctgcctcgatggacagagcttgggaagggcttgggggcctatgactagttcctggtaaaggaggaagggcaaaaatcctaatgcaggactgttcttaatgaattcaaggactgaaaggagaccaggttggtacaagactaagaggaggagaggtgtatgagaagatactggagcgcaaagcaggtcccatatcactcaagaacttacagggcatagcaaggcattaagattctattctaaggtcagtgagaagccattgtatattttgagtatggg

SEQ ID NO: 106 - DNA, 508 bp, Homo sapiens
  misc_feature 290, 291: n = A,T,C or G
acagaagcagatagtgccaaatagcaagcagtagttgttacacatttggtgagcagggcagcatttccttctcccactgctgctgagatggcagaaattagtcgaattcagtacgaaatggaatatactgaaggcattagtcagcgaatgagggtcccagaaaagttaaaagtagcaccgccaaacgctgacctggaacaaggattccaagaaggagttccaaatgctagtgtgataatgcaagttccggagaggattgttgtagcaggaaataatgaagatgtttcatnntttcaagaaaacagcagatcttgaccttattcagtcaactccctttaaacccctggcactgaaaacaccacctcgtgtacttacgctgagtgaaagaccactagattttctggatttagaaagacctcctacaacccctcaaaatgaagaaatccgagcagttggcagactaaaaagagagcggtctatgagtgaaaatgctgttcgccaaaatgga

SEQ ID NO: 107 - DNA, 526 bp, Homo sapiens
ctatgtaatcaggccagaatagtctctatttgatagacagacgttaaagaatttgaactcaaatcatgggctttgttaaaactaacactgtagtttactaactcctagctcaggactctagggattacactatataatcatatcatgatagtaaagactgcccaacatgtcatataaacagggaatgaaagctgagtgtagtggctcatgcctataatcccagcactttgggaggccaaggcaggcggatcacatgaggccaggagctaaagaccagcctggccaacgtggcgaaatcctgtctctattgaaaatacaaaaattagccaagcgtggtggcacacgcctgtaatcctaactatttgggtggctgaggcttgagaattgcttgaacccaggaggcggaggttgcagtgggccaagattgtgccactgcactccagcctgggtgacagagcaagacctagtctcaaaaaaaaaaaaaaaaaaaaaaccgggcccttaaaaattttgggggggctttttc

SEQ ID NO: 108 - DNA, 682 bp, Homo sapiens
ggcgcgggaccttaggacccgcgggctccagggctactgtccgtccgccactgcgcgccagcaggtcctggtctccgctctccaacagctgaaaggccggcgcagtgaacacagaaacgaaaaccaagaaatgccttattccacaaacaaagagttgatacttggcatcatggtgggcactgctggaatcagcttgctgctcttgtggtaccacaaggtccgtaaaccagggatagcaatgaagttacctgaatttctttctctgggtaatacatttaattcaataactttgcaagatgaaatacatgatgaccaaggaacaacagtaatctttcaagaaaggcaacttcagatactggagaagttaaacgaattactgacaaatatggaagaactcaaagaggaaatcagatttcttaaagaagctattccaaagctggaggaatatatacaagatgaacttggagggaaaataactgttcataagataagccctcagcacagagcgagaaaaagaagactccccacaattcaaagttcagcaacaagtaatagttcagaggaagcagaaagtgaaggagggtatattacagctaatactgacacagaagaacagagttttccagtccctaaggcatttaacacacgtgtagaggaattaaatttagatgtccttcttcag

SEQ ID NO: 109 - DNA, 563 bp, Homo sapiens
ctggaggccaccggccagagccgaccccaggagtgagagagacaggggcgtgcgtgagttccggcggcctgcaccgggcaaaccccgtaccttcccagcatcggctcagcaacccacgtgcatccaggccggtcaatgtcattgagtcacctccgcgccttggccaccctggagtcccgagaatccgaagttccagacaaatgcccaaactacattcctgcatgttcgaaagcgtaaattgcaaagcacaaatccagttgtagattgtggccgggagcagtagctcacgcctataatcccagcactttgggaggccaaggcggacagatcacgaggtcagcacttcgagaccagcgtggccaacatggtgaagccccatctctactaaaaatacaaacattagccaggcatggtggtaggcccctgtaatcccagctactcggtaggctgaggcaggagaatcacttgaacccgggaggcagaggtttcagtgagctgagactgcaccattgcactccagcctgggcgacagaccaagactccatctcaaaaaaaaaaaaaaa

SEQ ID NO: 110 - DNA, 599 bp, Homo sapiens
acccgtcctgcagacgtggctcccccagggtcactgtgcactcgccctgaggtccacgtgagacacagaagcagtgggggtgggggacgggctctgcatggccgaccctggtgtggatggcgctgctgcaccagcctctcgccggtggcctcgttccccaggtccaccgcctctgctctccctccagctcctgggtggcgattgccccgaggcttaagtccaggcctgccatggttgtgggctgcctgggtgagcctgggcgtggatggaacccggtggagaaagtgggtttcctgggcaggcgccatggttcatgcctgtaatccagcactttgggaggctgaggcggggggatcacgaggtcaggagatcgagaccatcctggctaacacggtgaaaccccatctctactaaaaatacaaaaaattagtcgggcgtggtggcgggcgcctgtagtcccagctactcggggggctgaggcagcagaatggcgtgaacccgggaggcggagcttgcagtgagaggagatcgcgccaccgcactccagcctgggcgacagagcgagactccgcctcaaaaaaaaaaaaaaaaaaaaaaaa

SEQ ID NO: 111 - DNA, 481 bp, Homo sapiens
  misc_feature 397: n = A,T,C or G
gtttttaacctgggcatatgttctaacacatttactctccactattcgtactctggtagccatgttaaccccatcagagattccttctcaagccatgtctcagagctgagaggcatcccagcaagttttgcagctcacagttttttccgtaaattacttattctataaaattggagtaggccataaactttggagggccctagaccaattttttggattatttttcgtcttctatcattccgctgatcttagatattctctgcattaaatattaaatatcacttctaggctgaaaaatccaaattctgcaatagaagatcacaatgtgaactctgcatctccatgttaaagtctaatggacattcacacttagcatgtctcaaagaaatctcatgtnaaccatggccatcctgttctaccttaactttctgagtctatggaatgataatttcacatctcataaacttgactgatgtaagtg

SEQ ID NO: 112 - DNA, 621 bp, Homo sapiens
cccgctggtggcttctccaagactggagaagcggctgggaggcctggccccacagcggggcagcaggatctctgtgctgtcagccagcccagtgtctgatgtcagctatatgtttggaagcagccagtccctcctgcactccagcaactccagccatcagtcatcttccagatccttggaaagtccagccaactcttcctccagcctccacagccttggctcagtgtccctgtgtacaagacccagtgacttccaggctcccagaaaccccaccctaaccatgggccaacccagaacaccccactctccaccactggccaaagaacatgccagcagctgccccccatccatcaccaactccatggtggacatacccattgtgctgatcaacggctgcccagaaccagggtcttctccaccccagcggaccccaggacaccagaactccgttcaacctggagctgcttctcccagcaacccctgtccagccaccaggagcaacagccagaccctgtcagatgccccctttaccacatgccaagatccgcaaggccgcccgggaactgctgacgcttgatgagaaggacccacggcgtctgttcgaaggcaacgccctgctgc

SEQ ID NO: 113 - DNA, 634 bp, Homo sapiens
cttatgcccacaatcccagcattttgggaggccaagatgggaggatcacttgagcccagaagtttgagaccagcctaggctacagagtaaggccccatctctacaaaaaaaccttaaaaattagccaggtgtggtggcacgcactgtggtcccagctgtaccagaggctgaggcaggaggattgcttgagtccaggagttccagaccagcctggacaacatggtaagaactcatctgtacaaaaaataaaagccaggcatggtggcacacgcctatagtcccagctacttgggacggtgaggtaggaagatctcgagcccaggacgagactgcagtgcacaattatcgtgcttgtgactagccactgcactccagcctgggcaacataaccaaaccccatctcttaaaaaaggtggggaggggtggttaggaagcaagcaatgttgaggttctaacagattggtaccatgaacatgtaatggtaccaatccatatctttgtgctattttctctagaagcacctagctccctgggtacaagagcagggacgacattattgtttagatcctgagtcaggatttgtagacagataaagtatactaagaaggaagcaaggggatgaaagtgctggtga

SEQ ID NO: 114 - DNA, 630 bp, Homo sapiens
cccgcctcgggcaccgggaaactgaggctcgggcggcctgagacgccgtcaaggtcatgtaggtggtgggggcttgcatcttcgcctcccgactccatccagttcgtgtttgctgtgaagacggtaccgggtcaggggtggtgagagcgggcgggcaggtggacaggaaccccgtgcccttccctgtctgctgaacggaatgcgtggacctccgggggagcccagagtgcctcccttcacaccagtgagacgcaatttggggtcagcactcagggcaccggtggcctccagagggccggtcgatcttcgctttaactccagggtggtttccttgacgttgtcggcagtagataagaaggcctcttctgagctggtgaatctttaacctacctgaatctttaacctgcctgcggaacgacctgctcgcagactctaggccgcagaggccggccccagcgctctctcggagcacagcctgggtggttacggcgtgtgagattggggctggacagccgtgcgcacctagagtgttaaataaccattccgacggcacctcctggcactccctttcagtccaggcagccagttgctgctttgcaggaattgagcagaaatgcactcggaatcgcg

SEQ ID NO: 115 - DNA, 541 bp, Homo sapiens
cctctttttctacagttactcccaaagtttcaaacagtgagccagatcaggcaactaacagaaaatggatgtcatcactcttccctactgccaaccaactgcttttctgagggattaggcacaggccccattttcctgaacttcacatcaggaagttcaattaatctctctccccaccacaccccacttccacacattttctttcaaaattttgtgcaattacacattcccttttgtacatttaaggaaaatgagtgtcatcaaattctaatatcctaagcagtatctaaaagagaccatgaaaccatattatttttcaacttttatggttttatagttttattgtttactagtattgcaatataatttatcttttattgcaaatgcatttcaaacactgctaaaataggttttttgaggttataataaaagtgcattccaatttccaagtaaccaatttatgaagaaacttaatatcaattttttaaattcagggatttcctatgtcataaggactacagtgactaccttcatagcaatt

SEQ ID NO: 116 - DNA, 632 bp, Homo sapiens
gcctcatcttctctgggaccagggcagggggcaccagcgccctctgcccccctcagagggtctctcccctcgacccccaaattcccccagcatctcaatcccttgcatggggagcaaggcctcgagcccccatggtttgggctccccgctggtggcttctccaagactggagaagcggctgggaggcctggccccacagcggggcagcaggatctctgtgctgtcagccagcccagtgtctgatgtcagctatatgtttggaagcagccagtccctcctgcactccagcaactccagccatcagtcatcttccagatccttggaaagtccagccaactcttcctccagcctccacagccttggctcagtgtccctgtgtacaagacccagtgacttccaggctcccagaaaccccaccctaaccatgggccaacccagaacaccccactctccaccactggccaaagaacatgccagcagctgccccccatccatcaccaactccatggtggacatacccattgtgctgatcaacggctgcccagaaccagggtcttctccaccccagcggaccccaggacaccagaactccgttcaacctggagctgcttctcccagcaacccctgtccag

SEQ ID NO: 117 - DNA, 619 bp, Homo sapiens
gtatctttgaaaaatcatcacaaaaccgtgacatgtttatgtctaagcagctctggacagaggttactctctggctcactggataggaaggtgaaagtatacagcacaacttcctacaaagtagtccacagttttgattatgcagcttcaattttgagtcttgcccttgcacatgaagatgagacaatagttgtaggaatgaccaatggaatactgagtgttaaacatcggaaatctgaagcaaagaaggaatcacttcccagaagaagaaggcctgcatatcgaacctttattaaaggaaaaaattacatgaagcaacgggatgacattttgattaacaggccagcaaagaagcacctagaattgtatgacagggatctgaaacattttcggatctctaaggcactcgatagagttcttgatcccacttgtacaataaagacacccgagattacggtgtccatcataaaggagttaaatcgaagaggcgtccttgcaaatgcgcttgcaggtcgggatgagaaggaaatcagtcatgttcttaattttttgataaggaatctttctcagccaagatttgcccctgttttaatcaatgctgctgaaataattattgata

SEQ ID NO: 118 - DNA, 625 bp, Homo sapiens
gaattcggcacgagccgcttctatgattcgtggaagtcggtgctgaggggccaggtttgcatcgtgctggtcaccgaactcatgacctcgggcacgctcaagacgtacctgaggcggttccgggagatgaagccgcgggtccttcagcgctggagccgccaaatcctgcggggacttcatttcctacactcccgggttcctcccatcttccccatcacttctcccccatgtcatcccagcccctccccattctcccccatttcttcccaggtctcctcaaatccctctccacaccccaccagctctccacttccattctcctccagcacacccgagtttccggtcccactctctcagtgtccctggagttctctccccacgacttctccacctacgttctctcccacttgttctcaggtcactcttagttcccctttctttcctccgtgcccctccacttcttccttcccctccaccacagcagcccccaacccctgagccatcccagcccagtgtggatgaactactcctacagcagcctgtgtttgagcagcgaggagtcagaaagcagtggggaagatgaggagttctgggctgagctgcagagtcttcggcagaagcactt

SEQ ID NO: 119 - DNA, 637 bp, Homo sapiens
aggcctctctgcagcccctaaggaccttcagaaagtcagggctctgaggaataattttcaaaaaccattgttggccaggcatggtggctcacacctgtgatcccagcgctttgggaggccaacacagaaggattgcatcaggccaggagttcaagaccagcctgggaaacataaaaggaccttgtccctacaaaaaaatgtcttaaaattagccaggtgtggtgacacacacctgtagtcccggctactccggaagctgaggcagaaggatgacttgagcctaggaggttgaggctgcagtgagctatgattgtgccattgtctgcgtgacagggcaaaactctatctctaaaaaaataaggtttaaaaataaaaaatgaaaaaaaaccattgttgcccattgtgctcccagtctccactcccaccctagaggctgggtctccgcgacaggcagccttgagggcagcccctggaatagcccctgggcagtggcactggccaccacaggaacagactgagtctgtgtctctctcagacctcaaagcagatgagaagagttcgtgcactctgcctgagggtaccaactcctcgccccaagaaattgaccccaccaaggagaatcagctgtacttcacct

SEQ ID NO: 120 - DNA, 631 bp, Homo sapiens
ttttcttcaaaatctgtttcttttgggtgtggggagaaggaatattttctattctccctatcctagattttgcttatttagaaatatacagcactggaggccgggtgcggtggctcacgcctgtaatcccagcactttgggaggccgaggtgggtggatcatgacatcaggagatcgagaccatcctggctaacacggtgaaaccccatctctactgaaaatacagaaacttagccgggtgtggtggtgggctcctgtagtcccagctactcgggaggctgaggcaggagaatggtgtgaacccgggaggcggagcttgcagtgagccgagattgtgccactgcactccagcctgggcgacagagtgagactccgtctcaaaaaataataatatacagcactggagagtatttacacataatcctaacagacatatgccagtagggcaaagccacattgataaacatgagtatccggtcccttccaagcactgccattaatgcaacatctgctctagccaggctttaacattgcacacattagctattcttgtccctgcctgcatgctattgtacatgattctgtgtctacttggatttattatcacctatcaaaaccttgcctgtcctct

SEQ ID NO: 121 - DNA, 627 bp, Homo sapiens
agccactgcgctgcagcctgggtaacacagcaagaccctctctctttaaaataataacttaaaatatattaacttttgaggaaaattttacattgaaccagaggagcaactgtgtggtagctgaggttggagatttgaggaaacggtgttattttatatgattatttttgttatatacattttatctgatattatataccagcaagcaattatattaatagctgaaaatttacatattttataaacatgaacattagccattaaaagtgtcacaacagttccagtgtatatgcatacatattaaataataatatatttaagaagtgtaattgcataactcaaatggaaaaaaaatctctatgtacctattacaccaatattttgtttcatgtaaatatgaggtatattaatattaggaaatgatgctttccaatattggtaatactatacaaagtaagattaaaatgccagtgatcctgtggactgagatgtgctttatatctcttgaatgcaaaattaaatgaatccacacatatatgatcaaattattttcagtgggaaaaaaatcttttcaataaatgggctggaacaactggataatccctatgtgaaaaacaggatataacc

SEQ ID NO: 122 - DNA, 600 bp, Homo sapiens
cgccgtgcatatcacgcccttcccccacgttccccctaccccaggacctccttgggaggtacacggaggcccgaggtcagaaagcacttctggtccaagctgaggcaaggccgccccccatcccccaccccctgcctgcctcgccactcaacaccctggcgttccgaacaccctccatggccaaagtgaccactccctgtctgctgaagtgttttcatccccatgctcacatggacacccagccaccagcgtggtctcaggcacatgccagggctcaccacactgacctcatcgcgtctgggggctgcctgggctgtcggcaccacccgtgggggtggagaggaaatggacactgcccatgggtctccaaaagtggccgtgagcatctgcctccccgggtgccaaacccacgttccctggagccagctctgtgcctgcagctgggcgtggctgacaagagggaacggatcctttactaacatagagggaaagccagtgttgggcatcttcatactccagagagagggacattcaatattacgtagcccctgggatgccaggtgaaccatactcccagggatcccaagtccagcaggaatt

SEQ ID NO: 123 - DNA, 607 bp, Homo sapiens
ccagccgggtgctgatgcgagtcggtggcagcgaggacattttctgactccctggggcctgacacggctgcactttccatcccgtcgcggggccggccgctactccggccccaggatgcagaatgtgattaatactgtgaagggaaaggcactggaagtggctgagtacctgaccccggtcctcaaggaatcaaagtttaaggaaacaggtgtaattaccccagaagagtttgtggcagctggagatcacctagtccaccactgtccaacatggcaatgggctacaggggaagaattgaaagtgaaggcatacctaccaacaggcaaacaatttttggtaaccaaaaatgtgccgtgctataagcggtgcaaacagatggaatattcagatgaattggaagctatcattgaagaagatgatggtgatggcggatgggtagatacatatcacaacacaggtattacaggaataacggaagccgttaaagagatcacactggaaaataaggacaatataaggcttcaagattgctcagcactatgtgaagaggaagaagatgaagatgaaggagaagctgcagatatggaagaatatgaagagagtgga

SEQ ID NO: 124 - DNA, 610 bp, Homo sapiens
tctcctgggagcaggtcctgaccccagaggtggtggtcccatgggccctggatctggacctaacctgagagccggtgttctgttaacctctgggaatggtcctcccaatcctaggccagttggcctgggcccaggaccaaaccccaatctgagatcaggctttttagggacaaaccctgcccccaggtcaggtgtgtttccaggcccaggccttgggcccaacccaagaccaagtggcctgggcccaggccctaatctagatgccagagcaggtggcctcttgggcacaggatctggtcttaacttaagaatggctggacctcaaggcctcgatcttgcccccattctaagagcagcaggtcttttaggagcaaattcagcttctttctcacaggcttctggaaacatgggcacaagcccatcctccatggcaagagtacctggccccatgggcccaaactcgggtcctagctctcggggaattggccttccagggccaaatccatctcccatgtcaagggctcctggccccataggccctaattcagctcatttctcaaggccagttggccccatgggggtaaatgccaatccctttcccaggggagca

SEQ ID NO: 125 - DNA, 628 bp, Homo sapiens
gcctcatcttctctgggaaccagggcagggggcaccagcgccctctgcccccctcagagggtctctcccctcgacccccaaattcccccagcatctcaatcccttgcatggggagcaaggcctcgagcccccatggtttgggctccccgctggtggcttctccaagactggagaagcggctgggaggcctggccccacagcggggcagcaggatctctgtgctgtcagccagcccagtgtctgatgtcagctatatgtttggaagcagccagtccctcctgcactccagcaactccagccatcagtcatcttccagatccttggaaagtccagccaactcttcctccagcctccacagccttggctcagtgtccctgtgtacaagacccagtgacttccaggctcccagaaaccccaccctaaccatgggccaacccagaacaccccactctccaccactggccaaagaacatgccagcagctgccccccatccatcaccaactccatggtggacatacccattgtgctgatcaacggctgcccagaaccagggtcttctccaccccagcggaccccaggacaccagaactccgttcaacctggagctgcttctcccagcaacccctg

SEQ ID NO: 126 - DNA, 593 bp, Homo sapiens
agccgcatgtacttactgggtaatcagtcaattagtgtgtactaagtagatcagttaattgattttctgcttcatccagttatttgaataggtggtaattgtaaggtgataagttaacaattttaacttaactgataacaactctagaatagaatgtggtaatgagtataaaataatagatattctccagtaatatttttttgaaagatcactttatgaacatggaaaattcttccactaatcaagaaaaatagctgtcaaagcatagctgcaggtcaaatacaggttacaaaggtgttctataggttaacccatgacttccttgtcttttgagtacaatgaaattattgtaactaaatgaaactttcatcccctgttatgcatgaatcatttcctttctataacagacataccagtatacacttctcatctgttaaaaaacatacccaacttctaaatgttgtttgccactgttactgagattacaaatgatatctatgcatttttgagttgtttttttaaaaaggcatataatctgaaacttagtccccttggtaatttgacctgagaaaatttatctcactgatagactt

SEQ ID NO: 127 - DNA, 415 bp, Homo sapiens
tcgaattccgttgctgtcgatccggctggtctggtttcagcttctttgagccttacttgaagccatgttgctataggtgaagcctaaggttttaggaagttctactggaaagaggggtggttgtttaacaaggcatttcaaaaggaatggcagtcattctggagtgcaatcattacagaaggatttggcctctaagggcctctggaattctttggaagaaggcattggctgtgtagctgacactctactcactgtggacatgagtgggtttttggtgacatgagggacgagggcagggacaagtgctgccctgaatgttcctgcctggccggcaagaaaggcttcttggacatttgccttttagacaatggaatgtgttttgctcttgcagaggatggtcttggagactgggatg

SEQ ID NO: 128 - DNA, 509 bp, Homo sapiens
gtgatggcttgccacataattcttgtcataattgagtgtcctctctttcccttccatgtcctgtatcttctcctttcttactagcttttactccctgggattcttaaggctttgtggtgtaattataataatgctttgtatttgtaccggatttttcagcttttaaaagacagttttatgtttcttatttgagcctcagtaactgtcaggacaggtattatctctctaatgtttacaaataatgaaactaatgctcttgtagtgacagaagtggaactgcaataagtgttctaattcttaatctggtatttattctcctatcttgtgctaccttccttcaggtatttgtgaacacagtaataacaaggatttgtcaaatatggtataagggtcagtcagtggtttacaaaccctaatatcttctttttttcaaacaccatatttagtagctgtgtgtcctattgactgaagatctaaaaacttctgtctggaagttttgtatgtgatgg

SEQ ID NO: 129 - DNA, 313 bp, Homo sapiens
cttctgcacccaccattatatggcagcctgcacatttttcctcagtttaaatggagccttttcagagaagtcttttctgattaatctatcaaaatacaactctctgtctctctctctctttctgtcactctatcttggtttcttactatcacagtatttttgtaaactgtgttaagaattttaaattgtatcttaagagcattgggaaagccagtgaaaggttttcagcaggtacgtcttatgatggcattacatttttgaaagatcattctggctgctgtgtgagaaatggactgtggattgtgaaggtgag

SEQ ID NO: 130 - DNA, 524 bp, Homo sapiens
cgtgtgctgtcgaaacatgctaattgattttcaccacattaggagctgcctcttaaaaaaccgaagcagttggtccaaaatccataagaaaatctttgactaccactggtagacttcagcaccttggaatgttttcaataaccacagtgagactagtaagaatacttataatatctcttctgagatcagctctgctgtgcttattcttaaaaatatggggccgggcgtggtggctcatgcctgtaatcccagcactttgggagaccgaggtgggtaggttttctgaggtcaggagtttgaaaccaccctggcccacatggtgaaaccctgtctctactaaaactacaaaaattagtcgggtgtggtggtgggcacctgtaatcctagctactcgggaggccgaggcatgagaatcgcttgaacccaggaggcagaggttgctgcgagctgagatcgcaccgttgtactctagcctaggtgacagagggagactctgcctcaaaaaaaaaaaaaaaaattttttt

SEQ ID NO: 131 - DNA, 653 bp, Homo sapiens
aaaaaagtcccaagaggtgcccaggattcaccctggcaccaccaaatctcaatctctagagggaaagccttctaagaaagttatttctcaaaagattttgaaacccagtgtcatgaagaacaaaagtgccttgtgctccatattctgtttcctccctgtgaacagaacatgctgggcaggtgggagtccagtcatggtcggatgtagtctctatgcacagaggcagacttaccaaaatgcaatcagtgcaacatatatgtaggtatatattttgagacagggtctggctttgccgcccaggctggagttcagtggcatgatgttatttctgctcactgcaacctccacctcctggcttgagccatcctcccacctcagcctcctaagttgctaggactacaggcgtgcgccaccacgcacagctaatttttgtatttttagtagagacagggtttcactatattggtcaagctggtctcaaactcctgacctcagatgatccacctgcctcagcctcccaaagtgttgggattacaggtgtgagccactgagcccagtctttgtatgtcttttgaatgttgcacaaatgaaagtatctgctatccggaaaaaaatcattccagtcacggtgtctcatgcctgtaatcccagca

SEQ ID NO: 132 - DNA, 465 bp, Homo sapiens
tcgattcgatgccgttgctgtcgatttttctcctttctggtcttcctttttggtgtagcatctgtaggaaatgcatttcttcatagctaagtgtacctccttgtgaaatatcttcagagtctactggtgcacataagcaattgctggcagcagcttgagggtctccatctcacatttatcatatgccttattgcatgaggctttgcaagaggaggtctagagctacaatatctcatggatatgaatgtcaattcaaatcccagtggcagtttatgagggggaaagcctagaagagaagaaacctagaggaatcaagcaggaggggagagtaataaaagactagagcagcaggtttttcttaactcaaactagaattaaatctctgtgtgtgtgtgcatgtgaatgtgcccgtatgtgcatgcatgcacgtgtgtaaatggatgtgtgtgtgtgtgcatgtgtgtg

SEQ ID NO: 133 - DNA, 589 bp, Homo sapiens
tcgcggccgctgctttagaacccccatgaagggggacagttaattgtctttccttgagttttcagtcaattcatgacactgtgcaaataggagaaataattatagttttgccaagtggcagaatatgtttgatttaatcttttatgacttataactgtacttagttgtgaagagtccattaatgttaattttgttatgccatgcatttgagagttatgcatagatttccttgtattttctccatattctatgtaaaatagctgtaactgggaacaatcattttttccttatttttgaagccaaaacaaaatatttcaaagtaaataatttcagctgtgtgagctgcaagtaggccaaagaaaacaagacagtttgttcttaaagttaaactaatggggaaaaaaaacaggacagggaggtatctcaagttcatttgagccatttttaaaattttggtagctggtttctgtttttcttctttttaaaatagtaacaacttaggattttgtgtgccaccagcttccattccatttcataaaagcttaatctagcaagaattggtgagccctagtagaagttagaaagaaat

SEQ ID NO: 134 - DNA, 616 bp, Homo sapiens
gtttcaccatgttggccaggttggtctcaaactcctgatctcaggcgatccactcgcctaggcctcccaaagtgctgggattacaggcgtgagcctaccgtgcccagccttatttcataatttttgatcgtaattccacccacatgttctattcatgtgaaatttactaaggtgagaccaagtggagataaaaactatctaaacgaaaaacttaggtctctctttcagacttttttttggttttatggtggtaaatacaacccacttggcctttcccctgagactactggttcttttgtcactggagtcccagagatcagggtttgaactagcccaccacttactggtcatgtaactttgggcaattcagtgctttgggaggccgaggcaggcggatcatgaggtcaggagattgagaccttcctgactaacatggtgaaaccccgtctctactaaaaatacaaaaaattagccaggcgtggtggcgggcgcctgtggtcccagctactcgggaggctgaggcaggagaatggcgtgaacccgggaggcggagcttgcagtgagctgagatggcaccactgcactccagcctgggcgacagagtgagactctgtct

SEQ ID NO: 135 - DNA, 262 bp, Homo sapiens
gtctggggatgatataagagtgaatgagtaaatatatgtttggaattattaccaggtcaacattaggaaatctgttgagtcaccctctacattaatagattaaaggagaaatatgtgtgatcacttcaacaagtgccaaaaagcatttgataaaattcaacacccattcctaccttcctaatgggcagtggaggtggggagctaaacatagaagagctaaaaactccatctcaaaaaaaatatatatgtgtgtgtgtgtgtg

SEQ ID NO: 136 - DNA, 705 bp, Homo sapiens
acttttctctagcatcgtaggaggaagaaaacaaacacatcagatattttcagcactaaaagagatggttttccccacatatatgtaaaagaaatttgcaagactactgggtatcagaatggcaaagcaacttaaccttccagaaaatacagatgattggacaaaagaggatgtaaatcagtggttagaaagtcataagattgaccaaaaacacagggaaattttgactgaacaagacgtgaatggagcagtcttgaagtggttaaaaaaagaacatcttgttgatatgggcatcacacatggaccagctattcaaatagaagaactattcaaagaattgcggaaaacagccattgaagattcgattcagacatctaagatgggaaagcccagtaaaaatgctcctaaagaccaaactgtgtctcaaaaggaacgtagagaaacttcaaagcaaaaacaaaagggtaaagagaacccagatatggctaatccgtctgcaatgagtacaactgctaaaggttctaagtcactaaaagttgagctcatagaagataaaatagattatacaaaggaaaggcaaccatccatagacctgacatgtgtatcatatccatttgatgaattcagtaatccatatcgttacaagttggattttagtctacagcctgaaacaggaccaggcaatctcattgatccgatacatga

SEQ ID NO: 137 - DNA, 610 bp, Homo sapiens
ctttcctatatgaactgtaacactaggtagccaaatagtaaatgagggaaaatatctctgtataaacatattccaattcatagatgaaaaaagaattaacatatcactgtgttgcagcctctaatgaatgaatacatataggtatttcgcatgaatagttgctaatatcattaaaaagaaagacagccagacattatatacctcttgatggaagcacacaacactacctatagtcatgccaaacggattaaacccaaatcttaattcgctccttgttttcagaaaaacagaagacaagaacaagttgaaatatgcaattgaacatgcaatttgcaaaattcagattgggaaaactcttggatttttcaacagataaactataacaaaaataaattacagatgaaaacacaaaagacataaaaaaatgtacgaaggggcaagaccacactttaatgcctaaggatgcacatgaacacataaagatgcatctcagtgataaagaatgaagaatgcaaggaaataattactgtaaaagccagaataatggttacttatggtgggaggaaaagagaattgcaattggtatgggatatttggaggggtttggctc

SEQ ID NO: 138 - DNA, 623 bp, Homo sapiens
tccaggtttcagttcaggactaactggatgattagatgactaacttatatctgccccaataacctccatagaattgattttgaaaaagcctccaccagcttcatttaggaagaggaatagacagcagtagtcaaagtagaataagggatttcaaagaaaggtcatttacagaatgtctctattttttaagccctcttcctgaacaaattttctaaatcccaaactggagaacagcttcagaagggcaaagatctttacttactcctacttgccctacagtgcctcactcaaagcaaaacacttgtcaggtactcaataaatatctgttgaataagctgccatgaactcacctttgggaataggtcatgattacagggtttttagattgagaatactctgaaatcaacgctaccagctctggaattccttcttccttggttctctccccttcattcttcccaaaattccaaccagtttcctcaacctaatttatgccaaatacccgaagtgttggacttcaagaccccaaatatctcttttgaagaatgtcccagaagaacgtataggaggaaagaatggataagaattgacctgtctggtaaatcacttatgtacttataaat

SEQ ID NO: 139 - DNA, 572 bp, Homo sapiens
atccctggcagtcaagagactcttgagaaaaagcatctaagcaagtccttgaatgatgtggcatttcaataaaagagatggagaggaggcatttgagataggaggactagtaggagatggagaaacttggagcatattcagggaaaagcatcaagtccaactgagttagaactggtctatatacaggcatcaaaactggagaacattcagtgccaaatgatacagtcttgaatgccaactaggaattgtgaatgcattaaccaataggtgtcattaaaggtacttgaacaggggagtgttgtggctgtgcttcaggaccaggctcttgtgagtagcttggggggagatcgggaggagaggcagggcagaaactagaggccagaaagccagttaagctactacaacccaccaaggaaaaagaggggcagaaaaggcctgaaatggatgataacaatgaaatgggaaaggaatagatgcaaagggaagaactgacagaatctgatgtctcagtgaaggaacagctaaagctgacactgcgatttccagagcagtggtacccatggaggaaactc

SEQ ID NO: 140 - DNA, 166 bp, Homo sapiens
ttgaagaggatcaacagtattgctacatagaaaatctaaagcatctatatgacatatatatgacagcatcaaaaaaaggtaaaagacaaatttcaaatttgacaatatatgcaactatatccataagatcagtatctttggtagtcttatgtaactcccacaaatc

SEQ ID NO: 141 - DNA, 587 bp, Homo sapiens
caccccttctttcaaactgcttttgaaaaacccctaacctatgagctttggacaagatgattggagtatgaactctgtctcccctgtgacatggttgggctcgtgtctattaaactctttctctactgtgatgctgtagtccttcatgcagcagacaggaagaaccccttggacagttataaagatattaaatgaaaaaaagttcccttatcatccccgataccacacctgactgacatagtaataacagtattgacagtagtgttagatagataataagtgtttatactaatcctcacaacaactctcctgatacatggatattattgacactttatagatgaaaatgaaaattcagaaaggttaagtgtattacaaaaatttagatggctgacaagttacaaaaaagggtgaaattcaaatgtatttactccaaatttaagcttctgaacattccatcagagttgccttgcgtgtacaccactggattcaaaatacccaattagattcatgatgagtatgaagtgctcttattattttggttattttttattttgtaaatatcatgcagtgattttctttctctg

SEQ ID NO: 142 - DNA, 464 bp, Homo sapiens
tttaatattcttattgaagtattattagatagaattttattagaatgcaatggatctcaattcaatcagaaacaccatctctactaaaaacacaaaatatcattatgtttaaaactttatctctgtagttaaatgtaacattatcaccaaacagaacctgaatttgttttctggaagctatttcatcactaaacgagtaatgtaaaatgttaattgcagcctgccccatgttttctgcccctattaccaagggcaatcacctacttcacttctttgaaaagccaaaaatctcaatatagtgaagatagctgtgggtaaactgagcttaacttttaatccacacttacttcttctggtatagaaagccattaaataggagacaatgaggggaccaatgtctcaacttacagattccctggagaccagtcccaacggtctagcgttagcttatgtctgcagggctg

SEQ ID NO: 143 - DNA, 458 bp, Homo sapiens
atctcaaaaaaataataataataacaattttgtacttttccttaaacagactttccaaattgtgtaagattcaggctccacaaaagctgaatcttttgtgattctgcttttgtgaaaggagaataagaaaattagtaaaacttcacatttattatcaatgtaaagtcccatagatgaatcactgattgtctgaagtgtatttgagacttcagggagctcagggatgaaactgatgatttgttgtctaaagtactcatcatgtcttttgaaatggctgctcttccagagggctgcaaggtaagcaatgtgtgaatagacagttagcaagcatgaggagagatgttggtgctggagatggaacctgggcaccatcagcacagtcatggtatttcaaacaatggagagagaagtgcagtaagacaggacctgaaaatagaccttcacatttacccatcagt

SEQ ID NO: 144 - DNA, 516 bp, Homo sapiens
ccagacttaccacttggtttcagtgtgtgtgcttacattttttgtaatgatgatgatgcatcaaatgtttaattaaatagatagaactcaacttttaatctagaattagcttaaattccagattttaattcatagattctaatcaggtagaatctatggtgtgaaaccattgaaataatttttggaaatccatgaagtctcaaatttgagaaataatgctataaattaaaatttgttgtcataaaattaaagcacaattaaatattactctggatgtaattgtatagccttaacataaatgttactcactaaacagaccctcaccatgtgtttttttctaccccaactacatgctttggattaagccattatttatatatctgaagttttccacctaccacttctacctttctaaattctatttattgttcatgtcttccctctaatgttatattctctataaaaccttccatgatcacataagtgggagttacctagttctacgatctttgtctt

SEQ ID NO: 145 - DNA, 545 bp, Homo sapiens
tgaggtccttcttgctgtgtcatccagagagtatgagaaagccagaaaggaaggaagccaaatttatcttttatcagtaaccaactcccaagataactaacccactcctgcaataacaacattaatccattcatgagagcagagccctcgtgacctaattacctcttaaaggttccacctctcaacaccattgcattgggatttaagttttcaacgcatgaacactttaagattcttaaagtggtttcttgagatagaatgtactgctatggcttgaatgtgtctctcacattcaagccatagcagttgtgcacatatactataaggcaacaggaatcatccataaacagggggtatgagtaagagtaaggtaactataaatagaaaacatatgtactgtgtacaaatagaaggtaagcttttaaaatggcattggcaggagcactgaagcagagatttcaggggacaagttatcataatggtgggggaacagcattcctgctgctgagtgggcttagaccagcctcctctgactttttaaaaaa

SEQ ID NO: 146 - DNA, 544 bp, Homo sapiens
aaagggcaaacaagctctctggcttttcaaaataagggcacaatccattcaccagagctccaccctcataacttaatcacctcccaaaggcctcacctcttactattactacattaggtattgtttcaacatcagttttaggaggacacaaacattcagaccatagcacaatcctacaaggtagatggtattatcctccttttacaaatgaagatactggtgcttgtagaggtcgagtaattttctcaagactgtagaacaaataaatataaagtcaagattcaaaccaaggtctgctgataatacactctctgtggttcctggtacttatttaaacaatactgaatgaggttcttcattaaggtccttacaaagatagtagaaaaaaaatacctgaaaaagaaatagaatggctgggcctggtggctcatgcctgtaatcccagcactttgggaggctgaggtgggcagatcacttgaggtcaggagtttgagaccagcctggccaacatggtggaactccatctctactaaaaatacaaaaa

SEQ ID NO: 147 - DNA, 394 bp, Homo sapiens
  misc_feature 335: n = A,T,C or G
atgtaaataatattatataatttgggatcgtcagtttgaacagtaggttccataatatctcctaatttctttcccttctatatctcccagttcatgtgtacagaagattttaactttacattatctgtaacaaaactttgtcaagcctttattatgtttcacattaactatcatataattaaattatttacaaggtagtatttaataaagtcattttatgttacacacaaataagagaacattgaaagatcaacaaaagctttacagaagagatggaactggtgtggaggaatgggtagaatttggataggctgaggtgcatgttagaagataangaaatgtgtgtgtgtgtgtgtgtgtgtgtgtgtgtgtgtgtgtgtgtgtgtatgtatgt

SEQ ID NO: 148 - DNA, 498 bp, Homo sapiens
aaggatacaaataggaaaacattccatgctcatggataggaagaatcagtattgtgaaaatggccctactgccaaagtaataatatgtagattcaatgctattcccatcaagctacccaatgactttcttcacagaatatgaatttcttaatttataagtaagcaactggaattttgatgtttcaaaacactactatgaattctttgaggcagatctttccttttctttttttcctccctgtttgcccccaggtaagcaaacagtaggtgcttgttaaatttgacataagaattgtgtagtcttagtccattccagctgctataacaaaatagcatactctgggtggcttataaataaataaggggaagtccaagatcaaggaaggtgccagtatacttggtgtctggtgaggacccactttctggtcatagatggcgccttctagcttatgtgctcacattgtggaagatgcaaggaagcactaatcccattcatga

SEQ ID NO: 149 - DNA, 523 bp, Homo sapiens
gccaagtaggcaaccctgaaggagacttgggaggtggaagtgggcagtgaaaagcttcgagacgacattagctcttgtaagcacagtagcagaggtgacatttcaatttttagtcctgagcacctgtggcaggaggcagtagctgtggagttcccctaggagaatcccacgttctggctgaacatttctccagaatggctgcatcattcctgataaagtagaatgcaaacttacttccatgctcccccagaaattctgtaattgccagataccctgaaatcaatcttgttctgttcaaactactgtttaggatggattccattgtttgcaactcatagactaacctcatagggtttgggggaagattaggcatattagaatatgaatatatgtaacttgcatatactgtgcacatggtgagccacattattatttttattagtgcatcacctgttgtaataaaatcaagcatgctgcaatttcttaagaattttctttgagagactgaggtgagcagatcacg

SEQ ID NO: 150 - DNA, 503 bp, Homo sapiens
ccatgtacaagtcaaggagaaatattataaaaatattgacagtgctctgaggatgggggttttcacaaagctcaaaacaggtcaaacttcttcactggctgccagctcttcacagctaccaccctggtactaggggttgggtacgtgggaatagttccaagttaaagcaccatagaccccactgttcttatgaagctcggcagttatatttgagtgaatgcttttcagtgtgttctgtgcctttggttaattttcatagttttaaaatggttggtttctattggtgttttgccagtatttttgttgcttttgtgggaagaggattcactgaggtcctcaccctgacattctgaaagtgttgtccctaaccttgtttttgaaatatatttatgttggttagacttttaggttgacaagtttgtttcctttcaagctgttgctccttaaaacattggaaggaaacaaataaacaatacagtcttttggcttgcattgcttggatg

SEQ ID NO: 151 - DNA, 507 bp, Homo sapiens
actgaacgggttcaaatagcctggtatttccaggatcttataaaaactttgcagtaaccaggaatgcagataagttgaggaagactcagccggaactcttagccattgctctcaacccttactgattcatgaagggaatccctcatttctgagtataattgaggacatgatcagctgaaggagcagaaggaagggaaaaatgaactactaaatgctgaatgtgtgcttacgtaccagtcatttccttggtgccagccagcagtgtgtctattgagcaaagcatggtagattttcaaagaaatcagctggataaattccagtttaaaatggcatctggctagctattgctgcccgtgacacagcctctcttgatttccaattaacctctctaatgaagacacagaaacagtgcagccctgccatcgtaaaagtggagacgctctttccctctccctctctttgcattggctcagagacatagcatctgcagcaattaaaaaattggat

SEQ ID NO: 152 - DNA, 271 bp, Homo sapiens
agttggttggtcttggacactgggcctcctgtgtgcctagccttgggtttatggctgaaggtggacttgccctcaccccactgtcctttctcccactccaaggagggtgaacttcataaaccacaatgtccaggtgcccagggaccacaccttctggagttctggaagtccctcttttagatatgatcactgagaggctggtgctggtgaagggggagatggcaggcacaaaagcaagggagaacctggcttttgtggaaaatatgcgagt

SEQ ID NO: 153 - DNA, 520 bp, Homo sapiens
ctggtcttgaactcctgacttcaggtgatccacccgtcttggcctcccaaagtgctgggattacaggcgtgagcccaccgcgcctggcttcggaattgcatcttaatctctgtggcggctgctattttgttttctaagttcatgagcacaggtggctgcctctatctttctcctccacttaagcaggaacaattcaggaggcagactccacccaatgctgcaaatcggccctattatcattgaccctgacagaatttcaggagtgtcaggccactccatactgcaaacagtacaggttgcttataatcgccaggaggaaagaaaatatccagcttcttcctggtgcaatcatggccataggaggaaggaatcataggaaacagagcaaaggaacaaagttcaaaacctgactttccacttggaagttctctcactaatcttaaaatcaaatataaagcttaaattgtaaatttagcggcatttccctctcagtaccctttccatattcccacaggtaagc

SEQ ID NO: 154 - DNA, 244 bp, Homo sapiens
aaattgatgtctgacaaagatcttcttacgtgtagtaaatgaattctgctctccaaatatgaagtgaaactgcatcaattcaagaaatgcctacaatcccttcagcatggtggttccactgaaaggcccttaagaataacggatattttactcacatgttttgagattagtagaaccgtcgtggctttatgtgtctatttagttactacattcagaaaactgagggtataaaacaaactttaac

SEQ ID NO: 155 - DNA, 624 bp, Homo sapiens
gatttttaaaattactctccattcttaattctcccttttcatgcctaacacccaaagattagtccaatgcatgtgctgttacatttagtgagtgtgagacaggggtcaccttcaggtagctgcgtacaagggggaggggcaaccacatgggaagaagatcaggaaggggtcttttgggtcttgtttccacaaagcaaacagattcatctcagaagttataaagtggaaacctctggattaaaattatcctgataattttagaaaataggaattctctcatcaaccaaattatctcatgtggcctttcacttctggaataggacttcatctcattactaaggactactgacttataaaataaattcgtttttggtactaacactatcaaatgtggttttttgagttcacagtcctcagctaattagaaatgaggccagtgccaagtaaacagaaagcagcaggaagaaatggtaaaagtgggaaaataatcctatagaaacagaaaatgtctaagagcctagcatctgtggtcagttaattcatcatcatttggtgtgctgttcttactatatcggctcatgaaataatcactgctgctgaaaacaatgataccaagtcagcaag

SEQ ID NO: 156 - DNA, 670 bp, Homo sapiens
ctttccatttaatatttctgaaccttggtcaaccatgggtaactgtaaccatggatagtaaaactgtggataggggtgactagtgtaatgtagtttacattagggcttactcttggtatattgtacattctgtggattctgacaaatgcagaatgacatatatccacaacatatttttaagaaaaaagatatgctaaagtcttggccctgccatttgtcactcatccaatagagacacaatcacattcatagaattcatattcagtctctgctatgtaaactgaaagaagaaatgaaagaaatgcacttttcctgtctatttcctatttctattaatcaagatagctgttgataattttccctacaaatatatggttatagccacagtctgagagctgccttgctatactgggtagagctaatgtcaacaataccaaaggagccaacgggtgcttgaaagaggaaagactgaatacaacaaaagattcaagaactaatcttcaaacatatataagaatcatactacattatgacaaaacaaagtaaactcaatccaccattgtgtttcactgaatctgatactatagactgtaagtgtatggcagacacatctgatagcaataacttcagcataccctgagaatgaccctgcatggtagatgcacctgat

SEQ ID NO: 157 - DNA, 400 bp, Homo sapiens
cttttattagattatgtctggaatatggagagattgttctgaactctctgtgtttagtctctctgctaaacaggtctctacaatctgtaccatcaatctgcctttctcttcttcagcctgtatttggaatagtatttccttgcctcctgctgttaaaatctgtttttcttcaacatacagttcaaaggaaatttcactcatggtacccagcacatcagaatttcaatcctatttctgttattcatgtgatttaatatatagtcttgtaataactattttaacttctcagatatttttatatgcacttactgattattagtcacatttcaggtaagattgctacataaaactataagcacttaatatatatttaacaatgaatgaatgaatgaatgactca

SEQ ID NO: 158 - DNA, 317 bp, Homo sapiens
ggttctggagcagctttggcacctgaaggctttggaaccaagggcagaggaccccctgtgctcagtgcaaaaatgagacaaacaaaatcagtctacagaggaatagttccataaatgagaactgacatatagatggagaaattgtgctaagcagtttcttgtgcacaaatttgcggagaaaagggaaacttggaaaaacttcgtaataactaaccattagactgggtcatgagacgtcctctgaaactcccaacagttctccaatacctttccatacacttaaattaattgccaacatctagcagtgacccatacat

SEQ ID NO: 159 - DNA, 457 bp, Homo sapiens
  misc_feature 148: n = A,T,C or G
aaagatgaatagaggaaagcaggtagttctggaggtggccattaggaacacaatacttatatgaactaagagttgcggcctagccttaaaaacgaagacagtagcagtaacaaacggctgacctctacttccctttatttctctattntacatagcccagtaggggaataagctgaatttggctcttgctcattccatcagtacccaatttttaaggtttattatcagacagggacataacattcaaacttagaggacatcttcatggctattacaatgcacctgacggtggcaaagaggtattattaaacatgactataaggaaataggtttctcaaccctgaaacttaacataataagccaacatttttttactcaaaggttttacgtaaatatacctggtccatcagagattaagctgagtagaatttcattgattctaaaaaaaaagaaaagc

SEQ ID NO: 160 - DNA, 560 bp, Homo sapiens
  misc_feature 365: n = A,T,C or G
cttaacatttaaattacgagggggaaaccctcacttcagtagtaattttctcaaagaaaagaatagggaatggattacaactaaatttaatttctttttaaattttcatcttgtctaattgcaggcatttttctgggttctttgtattcatatattttcacacatattttctgtagattttattcatctttaatttgagatgcttctcactattagagctcttgaaaaattgtggtatattttacatagaaaattatctcgagacatctatctgatctcaagtaataaagacatggtatagaaaataaaaggaaaatggttttccagatacccataaaaatatttttgacaaaatggcaacattnttcagttggctccactttcaagctttatttatttttttttcagtattaatgttttctctgttttgtcattttctgactggtttttaatgcaaaagttattataagcagcattctctcttcatatttctccaaaggacagtgtcagatccttgattaattttacaaaggtcatttggaaaaaccattaaaaacatg

SEQ ID NO: 161 - DNA, 593 bp, Homo sapiens
ccaggcatttttctgtatatttatttctaatttctgtttctttcttatgaattgtctggttaagtcctttctcattatctcaaggtgttttagtatgagatttaagaatattagatatataagcccttgagctatcatattagttagaagtagttccccttttttggtcttttcatttttattactatatgtacaaaagtttaacatcctatggagtaccttgttcatggataggaagagtgaatattttaaggacagctctactctccaattggtttatagatgcaatgcaattctaatcaaagtctaaaaaggttctatgtaaaaccttacaggtttactctaaaatttatatggaagaggaaaaggctaaaagcatccaaaatacacttaacgaaaaagagcaaaacagggaggtttgtctcccagaaattaagatttattggaccgggcgcagtggctcagggccgggtgcggtggctcacacctgtaatcccagcactttgggaggccaaggtgggcggatcacctgaggtcaggagctcaagaccagcctgaccaacatggagaaactccatctctactaaaaacac

SEQ ID NO: 162 - DNA, 577 bp, Homo sapiens
cgcagctcacctgcaaagtccaaaggttgagatgatcaagagggcaggtgaactaacctaccatgttctagaggcacaaaattaaagggagacttatttcttgtctgcaaagtcccgaaaaccttgtctctaccccatcagagaagtgtagcatcatgccggacggaataaaaggagtacctaagaagggaaaagagagtgactctatgtagtaaggtccaatagaaaagtagattttgaggcctggcaccaaaacaatcacttagtctactgtaaacaaaaagtatttcatgcttctaaggaatcacctgacagttaaagacctaacttcatttatagtattttcttgatgccctgaatctttctaaaaatcccctgactcaaaaaatgtatacagactattttcacctattcatcctgagagctcagaaattacagagcctcagagttcccatgacctacctgtggtaagtactggacctaaaacaatgtgcatttagagttcacaactcaaattcaaatataagttcactgcataataaccaaacacgggataataatctaagtgtcagtcgat

SEQ ID NO: 163 - DNA, 384 bp, Homo sapiens
gctttgactacccaaaacctcagttcttttccatcacaggtaaatatttgtggtttagttttgtcttgatcaaacaacaacaacaccaccaccaacaccaaaaaccgaagaatatagttgggaattcttcattcaagatagcggaagaaggaaggagctcatatcctttggatgtctcttggcacatcatgacaaattcatcctggaggtttatctcttaagaggaccttttaaatacatatacttgaataggtcctgcatgatagcaaattctgtgtaaaaacagggagtgttgcatcaatcaatgtcttttcctgtactccatgtaaggaaaaaactttcttgaaaatcctacataactccataacctctgcagatttctta

SEQ ID NO: 164 - DNA, 631 bp, Homo sapiens
atttaaattttcttatacttgacatgtggctcttgtcaattttataacttggccaacatcatacagttgtagtgatgaagctgagacttaaatccaggattttaaatctaaaactaatatttctaaccatatcagtgtttgtttttattcaattggcaacactttaatgtttcttttctttttatcagggcaaaatttgatccctataaggataaaatatattcttaataagttgaaaggttgtatattttaaaatttttggttgccgggtacagtggctcatgcctgtaatcccaacactttgggaggccaagatgggaggatcacctgaggtcaggagttcgagaccagcctgaccgacatggtgaaaccccctccctactaaagatacaaaattagccaggcatggtggcacatgcctgtaatcccagctactcgagaggctgaggcagaagaattgcttgaccctattttattttgatagtgaatttatccatgtttattttaattatgaaatatgcaaccagcccaaatgcccatcaattaattagtggataaataaattgtggtatatgtataccatggaatactattcagccataaaaaggaatgaaataatggcattcacagc

SEQ ID NO: 165 - DNA, 462 bp, Homo sapiens
atccttcctgagtctgggactatatgatgtaaacgcatttcttaaagtggagtttgaggacacctagggtagacgtagtgttgtggatctacaaatttcctttacaatgtaaaattgtgtgctttcatttttgagatatctaaaatatgattgtaaggattgtctggatcgtctacatgaccagcttctaaccaaatattaccaaccaatgttggtgtccctatgtgctgttgtgtttattattgcaactgtcccaagtcaaagggtaacaaacaaagagtagcggcaaacctaataagtttgccaaaatttcacaccagatgacatcatgtgcaccatggaatgaagatttttaagtagataaaagtggtagcaaaactggaccagcacagtagcaaaaaagccaaataaaaagactccaggcagggtgcagtggctcacacctgtaatcccagccccatg

SEQ ID NO: 166 - DNA, 315 bp, Homo sapiens
taagtgtttataaaaggatccccttgtgtcagggagatccttcaggccatttcaaccattactgtattttatttaatttgcttaattgatatattcttagaaaattgtgtcagtgaatttttttaaataaaatccaatttttaaaaaccagtagacccaattttttaagaaaaaaatccttgtcctatttacttttgataatattttactattcggggtatggtatctgtaaaataaaaacataattataatgtgttacttggaaggattgcatgttcaagataactgaagctgaaaatgttaagttgaaaactt

SEQ ID NO: 167 - DNA, 345 bp, Homo sapiens
caaactcccatataattgcaatttcattccattctcttttcagatatgcaatgagcagcaggttacagatagaaaacttgggcccaagctgtgagctctaggacttgatgcacgagttttccctctaggaggaattttcagttttgggtttcccttaaagaatttcacatagggccgggtgcagtggctcatgcctgtaatcccagcactttgggaggctgaggcgggcggatcacgaggtcaggagatggagaccatcctggccaacatggtgaaatcccgtctctactaaaagtataaaaagtagcttggcatggtggcatgtgcctgtaatcccagctactc

SEQ ID NO: 168 - DNA, 274 bp, Homo sapiens
gtacaaaaacaatacaaaacaataccaaaaaacaaaaaacaaaaaacaagcctcagtgactgtgggaaagtggcaggaattatctagaattggggtctcagaagaagagagttgggaaaaggcctaaaaactatatttaaagaaataatgggccgggcgcggtggctcacgcctgtaacgccaacacttgggaagccgaagcaggtggatcacctgaggtcaggagcctgaccgacatggagaaaccctatctctactaaaaaaatacaaaatt

SEQ ID NO: 169 - DNA, 498 bp, Homo sapiens
tctggttacattattttgtttgaattatacaattacataattttctgtaaccaaaatggtaattttgatggattttttaaatgccaaaatccaatcatcaaggccaaagaaatgcatgattactctgatttcttatgcaccattcagtcaagacttaactcagaggcagttgattcagtgcttacatctagacaaagctttaatgagtgcagacccagcctaacagtatttcatctaatttctttgatggcttaagccaataagcactgaggtagcttttctcagaaggaaacagattttattttccaggggctaattaatatgcaccacctaagtccccaaaggatcacacaggtgcctgtatcatgccatatgtcatgtgctatattcctgcaagctcaagagattaatatacaatcattattatgaattattatgttgcattgaagttaatgtcggtcttttgttctaattaaagtacaaacgtggcatctgaat

SEQ ID NO: 170 - DNA, 465 bp, Homo sapiens
tctatacgatttcttaagaaggcaaaattgtagagacaaaaagcacatcagtggttccccaaggtttggggttgaatgggaattaacagcaaatgagcaaaaggaaactttttggattgataaaagtattctaaaactagattgtggtgatgactgcacaattttataagtttactaaaattcattaactgtataattaaaatggatgacatttaaggtatgtaaaattctacctaaataaagatgtttaaaaaaaataccctgatctatgaacaaagccacaaaagaaatgtcaactaattctaaaatgagatatcatacaggtgacagtcactgttcatcatgcaatcaatcaatcaataaactacagccaaaaactgggaacaacccaaaaatttgtctgcagtagaatgaataaataatcatattatcagacaaggtaatactgtacacaatgaatataaa

SEQ ID NO: 171 - DNA, 150 bp, Homo sapiens
agcttgcaaataatggcctcactagtgagccatggaattaattagtgggtagtgaccaatattaaaaattttacttcacagtacatctcgcatagaaatgggttatttatttatttatttatatattttttgagacagagtctcactctg

SEQ ID NO: 172 - DNA, 281 bp, Homo sapiens
agaattgcttgaacccaagagacggaggttgcagtgagccgagatcgtgccactctactccagcctgggcaacagagtgcagagtgagactccgtttcaaaaaaaaaagtttatgacaacaaaacgttataacgtgattttggattagatgaggaaaacacactacggaggacatttctggggcaagtgtcattaccgaagttgtatgatccacgccatcattgcctgtcaattggataaacagtgtgatactgatgttgcctgattttgatcactgttct

SEQ ID NO: 173 - DNA, 369 bp, Homo sapiens
ttcttttttttaaatatagctgtctatccccaagcaatatataatattgttttacagtttttaactctgcataaatagtgtgataaaatatgtgttctgaaacacacttttgttttgctcattgtacttgtgaaattcatttgatatgtgtagctctggttcattctttatcagtgacataatatttcactgtttggtctacattatcaaatggtggcctactcagaaaagaatgtggttaaaaaaaacccctaagttggacaatattctgattattatgattaatttcagatttattaaactaaagtttattttgaatcaactagcaatgaaaaaataaatattcatatttaatatgaccataaatca

SEQ ID NO: 174 - DNA, 279 bp, Homo sapiens
gtacgacgatgtgaatatacttaatgccactaaattgtacacttaaaaacagttaaaatggtggattttatgttacaaatatttttccataatataaaaaatctttattaactgcatctatccttcactgtcctttatatttttgttaaggcataatagcatttttataatgctttagtaatcatttcatatcatctggttgtgaatctttatctttaaatatagcatttatttatcataataaaattggaactagatccaaaacaaaacatcaagctc

SEQ ID NO: 175 - DNA, 347 bp, Homo sapiens
tgcagcacttacttacccacttcttgttttgttggtgagaagtcctgctcccatgggccatgacttcctagcactccggtctgcctcactcatgtgttgaatatgacttggtggccaggaagtccctgcaaagacaggtagggagcctggggtaagaagacataagtgttcacagggagaaggcatgccaaggggggttgagtggggtgccagcacccctacaatactcattgcaaatctgttgttatatatattttgatgtgtgaggaagtggggggtcctggagaagctaagtaactctcccagggtcacagggataatgagtgcaggagctgggattcgaacat

SEQ ID NO: 176 - DNA, 334 bp, Homo sapiens
ctcataagggcattctgaagattagatgaatttatacgtaggtagtaattaaaacagtttttagtacacagaaaagtacttagtaatttttagctgttattattactagaagttcattcttttgttcattaattcatgaggcacaggtgcctttctcggtgtttggcatacataaaacaccataataaatgagagtccatattcttatgcagagtgagaagaaagcaagcagtaaacataataaatacatgaattatatcatatgtgcaagatgctaaggtcaatgggagcaacttaagttaaagggtatctggagtgcgatgagcagctagca

SEQ ID NO: 177 - DNA, 401 bp, Homo sapiens
acgatcattattgctacattcgtgttgtgagtgaagtataaataagcttaaaaactagcaatgccagtgttacagcttttttacgatttatctagcaagttttccagtctttatcagaaaccacctcccaatccccctcaaaacaaacaaacaaataaacaaacaacaacaacaacagcaaaaaactagcaatgccagctgttccatgaagtctgaagtatggttttcctgggtaaatgttaaggaatgctggctctcattgtttgggatggatgttcacatgggctttttagaaatcagctgactgcgtcattatatggatatacagctatcttaatatctataaactatgtttggaaaataaataagttctttagtacttatcagaaaacagataacta

SEQ ID NO: 178 - DNA, 349 bp, Homo sapiens
gtgaagagaattcgagttttagttattccgaaacttgtcaggagtgttggccgactgaagtcaaaaaagggtactgaagatgcactgttaaaaaaccaaagacgggcgcaaagattgcttgaagaaatccatgccatgaaggaattgaaacctgacatagtaactaaatctgctcttggtgatgatatcaactttgaaaaaatcttcaaaaagccagattctactgcaactgaaagagcaattgccagactagcagtacatcctcttctgaagaaaaagatagatgtgctaaaagctgctgtacaagcctttaaagaagcaagacaaaatgttgctgaagttgagtcat

SEQ ID NO: 179 - DNA, 513 bp, Homo sapiens
tgtaggggaagctcgacatgaattatgtagttcatttaaaatgcacatcaaagagagaccactttgtttaacataagtgaactctcccttcaattagatacaacagttactgaactattaatatgtatacaagaaaattaatgcggttggattcttaaggaaagcattacagtatattaaaggtgtaaattcaaagagactcatagttattgaatacactaaaatagttaatattttaggttaaaatgtaaacttatcacctaatttaataatgatgttatactaaacacacacatacaagtatattaagattaaattaaaagaatttgctgcttgccccaacaaatatttgcttctggaagctaagactatgaaacaactatttacttacataaatcaagtgaattcttcaagatttctttcaagacattgttctgtgcctcccaatccaagctaggatgtgataaactaaactccacccatagataaacttcaccctacaagtttaatccc

SEQ ID NO: 180 - DNA, 422 bp, Homo sapiens
acttctccctcagcccaatcccactgtcatcccctgctgtccacagatgctgatctcaaggacacacccagtaaacattctcagcactacgctgtctcaggttctgcttcctggagaacccaaattgtgtcatcaggaatcaatttggcattatcccttgggtatttaatcgatacccagtacaaaaaaaggacacaatgcttctgtcatttttttaactcattgatgaaccacagcagttttctcaaggcaagatagacaggggcaagactagcatctaagaggataaactctggcaggagggtttctgtaaagagacctaaaacccctcatagttcaggcaaataaacagtcaccataaggagccaagaatagaaatatatctaataagctatattcgccagggatgacaagtatggggc

SEQ ID NO: 181 - DNA, 438 bp, Homo sapiens
ttttctctatattgtacgtcttcatatcatcacaccattgctcattcattttgatggcagtgaaataatttccctaaattgaaaatatatataccacttgacttactgtgaatgaataaaatgagactgatttaaatgatttatttcatatatctgggttttccattaaatgcaagactacatatatgcttgtgacctcacatggccctgctttgaaatgacacaagctctgtaataaatattgagggtgacagaatccatctcctcatctcattgagaaatcttttaaagaactagaacatgacaaacattattctgaatttcagctctgactcttactagcttctaaccttaaagaagttaggaaatgtacctgaaatctctattagcaaataaaattttaaaataccccgttaaagattcttgaaggatgaaaat

SEQ ID NO: 182 - DNA, 467 bp, Homo sapiens
gtatatattcaagcaactaagactcactctgacagttgtttactacatcagagtaattccattcatagggataaggatcctactgcatagaaaaactttaaccaaaggccaggcacggaggctcacgcctgtaatcccagcactttgggaggctgaggcaggtagatcacctggtcaggagttcgagaccagcctgaccaatatgatgaaaccctgtctctactaaaaatacaaaaattagccagacgtggtggcatgcgcctgtaatcccagctacgtgggaggctgagacaagagaatcacttgaacctggaaggtggaggttacagtgagccaagatggtgccattgcactccagcctgggctacaagaacaaaactctgtctcaaaaaacaaacaaaaactttaactaaacatcatgtctctcaaaacaatgctgcaatactgactcagagaagttttaatgc

SEQ ID NO: 183 - DNA, 301 bp, Homo sapiens
tgtgctgcatctgtgtggcggtccccagccctggatccttgaagaagaccatatgcttctctgcaccacagcagcctaactagggcacgttcggctttcaatcatcttaaatacgtcctctgtagcccatcactgccctatgtttatgtttatctattattagatacatatttatttggaaacattttatattgaacaatagatgataaaacatagtacaatatttcagatatatttttccaaagtcttatcaattgtcaacactttgcttgggttcattctctctctctctctctcttct

SEQ ID NO: 184 - DNA, 444 bp, Homo sapiens
atcatgaattctttggagagaacctttgatgcagcaactagagtcatgcagatgaggtcccaaacaggagtgactagccttttgttccccccaaaccaacctcatacagttttgccaaaaagatgactattcagttactttctctgccttccaaggcatcacagagtggttctgcagaatcagttctgaattccagagctgttaaggccaatagggcttccttcctgcctttttgcctctttgaaacttgttcggccgggtgtggtggcgatgcttgtaatcccagcactttgggaggccgaggtggatggaccacttgagctcaggagttcaagaccagcctgggcaacatggcaaaactggctgggcacggtggctcacacctgtaatcccagcactttgggaggctcaggcaggtggatcacttgaggtaaggaattcaag

SEQ ID NO: 185 - DNA, 388 bp, Homo sapiens
ctactatttgaagatttccaaaggcctagaaatgttagataattttaaaatgttcaatgtggcatttattttcaaaaaataagaatgtatcagaaaattgcagtacacttagagtcatttttatatctataaaccttctgaagttgtgcacttaattattttgtatttatcagcagaacaaaagagcagcatttcattccctttgtggttcctgccatcaaatgtcgaactgatagaattaaaaaaacttttgataatttctgcccctgaataacgctaaatttaaatagactatctttcatttaataaccattcagatagtatttgtttgaagtcagttgaatttaaaggcttattattttgtactgaaagtctaagcatgcatttt

SEQ ID NO: 186 - DNA, 453 bp, Homo sapiens
accattctgtttttcactttcagtttagtattcaataaactacataagatattgaaaactttgttataaaataggctttgtgttaacataggctttacccatctgtatgttagtgtaagtgttctgagcatgtataagttaggctaagctaagctatgatgttcaattcattaggtatattttatacatttcaacttacaatattttcagccagcaacatgtttattggaacatagccccattgtaaattaagaagtatctgtataggtacataaagtgaattcagaaatcatgggaatgttagttttgtatgtgtgttagtgtgtgcatgcacaatgcatgtgtgggtttaaaagaaaattgagggttctaagataaatataacaaggatttataagacttaacagtgagaaaaaataattacaaaatttccaattttaaaaaaattgggct

SEQ ID NO: 187 - DNA, 442 bp, Homo sapiens
tttccaggtcagatttccccagtacctatattagattcaggtcttgttttaattatagaaagttttcttggattatagttctaagtattaggctgttcagttattttgattgatttctttaagaaactcttttacttcttgattatattttcactttcctagttgcttttcttgttttcttcattgccttttcacttgattatattcttcctggagcaacttgtaatttagttttcatttctgataggattttgtctcttccttctttcctaagttttatcaactctcatttcactttttcctgatttttttgggggtgatcaatatctattattactattttttaagtttctcatttgagatgtgtttttcatagcccaaatgcttatttgaggaaattcccttgagtatggagtgtgacgttacatttttcttaagtttt

SEQ ID NO: 188 - DNA, 491 bp, Homo sapiens
cacagatagtctttggatggctttaatccaagcccatttcaatatgcctctttttattgtccacacttctttctactaccactaacttaaataattcatataatcagctagaagagttttcaatgaaaactcatctttgaacacaagaaataaggactgagaagtggtgaacaacttgcaactgaggtattctgaaaatagtcctaacataatgtcccccaggtgtagccatatatggtaatttggtaaatcaacaatgaagtcttatgcaacagtgagaatctaagtatcaagcactagatgaggtactgggcaagagaaatacaaaagggaacactgctttaccccatccccaaggagatctcagggacagaaatgtcagcatctacctcaatacaatgacagctgagtgactatctcaagtgagaactgaagaacgtatcacaggagagctgatcttggagaaggaagaggagttggcttattaaaaa

SEQ ID NO: 189 - DNA, 364 bp, Homo sapiens
tctgaaggataatagttaactgttgtgggagactgagaggagaatattttaggaagaaagaacagcataagcaaaagtttcatggcaggagggagaaattagctatggccagagtatagagaataagggaagtatgatttgtgaggaggctgtagaagaattaaggtcaggagcacacaggatgatgtaggcccagtgaagtgcgttggtctttattttgaaatcagtaggaagtgtcctggttttcaaaggcactctgcatgagagattaggttggagtaggagcttacagtgtagtccaggagagaacaatggcccctggcatgaggcaatagacatggtgagaggtgaatggattatttga

SEQ ID NO: 190 - DNA, 394 bp, Homo sapiens
tgacatctcacatccaagttttaatttgctgatggatgaggtgcatgagccagagataactgaacgggttcaaatagcctggtatttccaggatcttataaaaactttgcagtaaccaggaatgcagataagttgaggaagactcagccggaactcttagccattgctctcaacccttactgattcatgaagggaatccctcatttctgagtataattgaggacatgatcagctgaaggagcagaaggaagggaaaaatgaactactaaatgctgaatgtgtgcttacgtaccagtcatttccttggtgccagccagcagtgtgtctattgagcaaagcatggtagattttcaaagaaatcagctggataaattccagtttaaaatggcatctg

SEQ ID NO: 191 - DNA, 425 bp, Homo sapiens
atgtgtcaccatctaaacatatgcatgtgttcaatcaggaggcacacctcagctatgtgtctggaggttttattggacaaatattgacctaattgaaacattgggcatgtgaccgaattcaatctccagctccgctcttctctctggagaaatttgaggtgataccacctggctcacacatggtctttctggtaagaccaggcttcatcctgagggatctcataagcataaatgtatgtgcagtggaaaatagcaccataaataacaaagacactcctatcacttagaagattttatgcatttcctacctggaaacctgggaaaaaacagccaattttcttaatatatgatattagcagaagttagctaaatatatgagagaaggctctgaaaagcaagtacacaaaaaataatgttgagatgtg

SEQ ID NO: 192 - DNA, 451 bp, Homo sapiens
cagcctcccaagtagctgggactacaggcgcccgccactacgcccggctaattttttgtatttttagtagagacggggtttcaccgttttagccgggatggtctcgatctcctgacctcgcccaaagtgctgggattacaggcgtgagccaccgcgcccggccgatatcaaattttttaaatacaggaaaatgcaactcagtttcccttcagagagtctatcgttacacaaatttttatcttcatcatcaagcaaatacaaacataaatttacaggcacactcctgtatacccacagaatgcaccattttaatatttcacaataaaatgcctcagttttactacccaagctgtagagaatgttcatctctcttaacacattttttcagctaatgattttataaagtaaaatttttacatttatttatttcaatcccaaaacataatacaat

SEQ ID NO: 193 - DNA, 461 bp, Homo sapiens
atgtgagtgtgtgtgtgtgtatagcatcaagtatagccacaaggtagtagccttagtcactaaattgtttgctattgctggctgtattcatcacgggagtccatgttgactcagatatgtaggacagcaagaattcccacgtcttctgagctcaccttacagagctaagagatatggcagccttaatgaaaggggggagcctttactcacataaaccctgtgaattctactgtaaattttcctacatccaaatggaatgtattttggatgttgaggattgttgagggggcggggtctgtttttaaacaagtgagaaattgatatatatttacacgctatcatattgtacagaaactggccattgatcagtagaaatctcaccaaatacagagaaagtcttgattcaaaacttaaaatagcagggagaccaatgtttaaaacatgttgagttaaaaaagaaa

SEQ ID NO: 194 - DNA, 456 bp, Homo sapiens
gtggcaggagctaatgaggggaggtgaggaatccacactgcagacagatactcactttggaaaagactgaggacacatgaaggccatcaaacagggaaactagaaactatatttcttgagggcaagggggcactgaactcagaagtctaagaggctttggcgcagcctatttacatgatttcagagattaccttatcttgttgacctttctatctttcatccttttccccactttggtccactatctctctatcatcaccatgaccactagtgctaccacctcttaattcatggtttacttcccttttgcctcaccccctactcttttctgccaggcctcttgtataacccctcccaacacctttgggggtatctctgaatcactttcttggtgctcgaatttattgccatccttcttcagtgaaattatgagacggcataaaatgaggacaggga

SEQ ID NO: 195 - DNA, 515 bp, Homo sapiens
  misc_feature 93: n = A,T,C or G
agtcaaactcccatcatcggggagtgagttactcagaggagatgctggctttagaatgtccactcctgtgagacccagagaagcactgacttntgtgaaagaaaaagctcagtgatgctgagagtcaattggtgtaacttgatgagccgaaatcccccgcaatggggaaaacagagtcctagaaagatgagagggaaggtgagtcagccagcctagtggggctgttattcctaagctgggttgtatgtcagaatcactcacagcattcttaaaaacacaggcctagcctgtgagactctgaggcagctgttggatttgggccaggacacagtggatctacttttaaaaagctcctggttgggctgggagtggtggctcatgcctgtaatcccaggactttgggaggtggaggtgggtggatcatctgaggtcacgagtttgagaccagcctggcctaaatggtgaaaccccatctctattataaatacaaaaactagctggacgtggtggtgggt

SEQ ID NO: 196 - DNA, 384 bp, Homo sapiens
ttatctctttctgttggctctcgaaagcctagagcaaaatgtgtggcccatctgtacagaatcttattgcttgcatttttagaagtaacctcaaggttcattttaactttcttatatcatttttcccattgtactcatttccttacctacttaaaaaaatgaaaagcaacttgtttttctcttcccaaatataaaatatatttgctatatgaaatgtgttaaatacatataagagaaaagaagaaagtgaaatgatctgtccttttcactgaccacatttagttcttgatagtttggcattttccaatgcatacatatacattttaaaaagtggcttattcggccaggcgtggtggctcatgcctataatcccagcactttggg

SEQ ID NO: 197 - DNA, 355 bp, Homo sapiens
tcttcttggctccttttaccatctgaaatgacgtgtgaacagggtgcagtggcacatgactataatcccagcacttggggaggccaaggtgggagggttgtttgaggccagaagtttaagaccagcccaggtaacatagcaaggcctccatctctacaaaacaaacaaaattgatcgcgccactgcacttcagctctagcctggatgacagagtgagattctgtgccccaccccccacaaaaaaatagaataagaagtgatccccagagccctaaaatcctgaccgtcccagcgggacaaggctgaaaggtgttcagtggattctgagggacaaagaggtgggctgggctgggct

SEQ ID NO: 198 - DNA, 388 bp, Homo sapiens
tgtgctcctaattgtttgctctctcctctgtgtcagatactttcttatgagcaccaacatgagacacaaagatccactttgtgttcacatccagaggttcattcagatggccttcttaactggtggcaaaaaatagacttaaaaaaaatagaatttcaggcagacatccctgtgcaaaatattaatattcttgttcctaccagattcctgaccgggcagagccaagagatctcccaccgctcaagcatccaggtatcctgtttatgaccagttgtgctgcttgtagcactgcctaccaagagtattttcaccaagccatgctcctctaggactctcctgagtaaaattttagtgtggtaatagtccaccattggctcataacaacaaa

SEQ ID NO: 199 - DNA, 426 bp, Homo sapiens
ctgggagctgggctttgtttttcttgatcatccactttacctgtatcagcttctgaacacactgtttgatatattagtttcaggacacctagggaccgcagtgctggactagaaaggaacacttgagcaccactggtcattatcaatggaaaaagattgtatcctgagagaatagtggtcagtaactaaacgtgttagaaaacctctgatagctgaactccagactatttttaccatcatttctttgtctgctgtttttctctgtattgcagtgtaaccccagggtcctggcttagaaagttgtacttacaggcatgagccactgcacccagccactactctctttctttggcagtcttttcacttcttctatttctaagtaaaaactacagagcaaacctaaattcatatttaacatgaagcccc

SEQ ID NO: 200 - DNA, 457 bp, Homo sapiens
tggctcacacctgtaatcccagcactttgggaggccaacgtgggcagatcacttgaggtcaggatttcgagactagcctggccaacatggtgaaaccctgtccctactaaaaacacaaaaattagccaggcgtggtggtgcacatctgtaatcccagctacttgggaggctgaggcatgagaattgcttgaacccaggagacagaggttgcagtgagccatgatcccaccaccacactccagcctgggtgacagagtgagactctgtctcaaaagagttattaccaaaacaatagactataaaatctgtagtcttaatttgcatatcatggtagacaggaaaatacctttagcatcttaataaaagatgaatcaaactctctaataaataccctagaaaagacaaacaatacactaaatataagattaaagagtagtttctaatacatcattctaag

SEQ ID NO: 201 - DNA, 415 bp, Homo sapiens
  misc_feature 91, 92: n = A,T,C or G
ttcatctgtttgtttttacttttcaatatagtaactagaaaattttaaattgcgcatgtggttggcattatattcctactagatagcactnntctttaccctctttaaaatgcagccttcagatttttgaaagactgctatcgtttttccctcaaacatttttaaagggtagacttatcaggttcttttcaatgttatttatttaacataatttccttcaccattaaatgtgttctagcttttcagtctctacattgagctgaataccgtaagctgaagattagaattaagatgtaccatgccctgccaggtatcctggctaacacggtgaaacccccgtctctactaaaaatacaaaaaaaaattagctgggcgtggtggcgggctcctgtagtcccagctactcgggaggctg

SEQ ID NO: 202 - DNA, 487 bp, Homo sapiens
gtagccgaaatacaagtctgtgaattggaatgctgttaagaagatatcaacagagtcacaggagtacaaaggatcaggcaaatatttctgacagatgggaagttaaaaaggcttcatgaggaaattgcttctaagcttggcattgaaggaagagattttattttatttttagtatgtatgtatttatatctcattgccttccagaaagattttgaagtaacttataaaaatacatatatcccaataggacagaataattaattcaggcaatctgactaaaaggggaaaattatgtgtatgaaattaataaaccataggtaagactagatgaaagaaatgcaaaccatgggccgggtgcagtggctcacgcctgtaatcccagcactttgggaggccgaggcttgtggatcacaaggtcaggagatcaagaccaccctggctaacacggtgaaacccagtctctactaaaaattaaaaaaaaaaaaaa

SEQ ID NO: 203 - DNA, 383 bp, Homo sapiens
cactattgcagtaagtagttaaaggcttgactgttgctttcattttggcttgttaacttaatcagctaccctgacacctgacagctcagctatctccagctcagttaagaccatgacagatccgtctggtctatgcaagagtcagtagagttggttctgcctgtcatttccatggtctagctttcctgtccacccactgatctgaccctagatgagctctgatgaacaggtctgccatggcccccatcaaacccttctttcctgcccatacctgcctgcagcaggtcggttcactggccaaaaattggtagttccaatttaacccgttcctcttcaatatgacagtgatatgaagagtatttgatcatatttttaaataactt

SEQ ID NO: 204 - DNA, 360 bp, Homo sapiens
agcccccacgcagctcatgcagatggtggtactaactggagaagcagttacagttgtacctagcatgcatttctgttggagctcatttcaagtaaatgacttatactttatgtccacagcaaagaggcccacatttgtggcaatcttggtcagtacagtcaggaaggaagtgtagctgaagatcactgaggaaccagagaaattagtgtatatctggatttaatgatcaatttgcttatgttaaaaatacatttgaatatgatttactgcccttcagttaatgctagttccttgcttgcagcaggaccaatcaaaaggagctaaaccttaaaacccagatggagatgttgaaggattcta

SEQ ID NO: 205 - DNA, 429 bp, Homo sapiens
cgcctatccatggtcctagtattcttaaggataagcagacagtcattttattcttcaaagaaaacagaacaattttaaacagactggttaatcaaaactagacaaagccccaactcctgcagttaggagtagatcaggacttctgtgggaaagagaccaggggaatctggcacagcttagagatattcaacaagcaaaaaatactgggatggaataaagtggcaggatggataaaagaaattgtattggggaaaaaaaactatgttttactttctttgttccctaactatgagctattcctacttcactatatatgtgaatgatggttctaaagagggaatcagatcattcatgtattcaacattcagcaaatatttgagacttcctgtgcccctagccttttggccaattgctattggctatatatat

SEQ ID NO: 206 - DNA, 568 bp, Homo sapiens
ggcccggaggccgcacccgcctccggcggggctctcagtgaaaaatgtactctgacctgaatcctgaattttccttgatggtcaaaagattaagtgagcatgctttaacaaaaaacaataacagaaactgtgtcaaagaaaaggacctgtaatcttcaggaaatcatgagtggaggatctcaagtccacattttttggggtgctccaattgctccactgaaaatcacagtatcagaagacacagcttctttaatgtctgttgctgacccctggaaaaaaattcagcttttatacagtcaacattctttatatctgaaggatgaaaaacagcacaaaaatcttgaaaactataaagtcccagaatctattggttctccagatcttagtggtcatttcttagcaaactgtatgaatagacatgttcatgtgaaagatgactttgtacgttctgtttctgaaacacagaatatagaatcccagaagattcactcctctagactgagtgatataactagctctaatatgcaaatatgtggatttaaaagcacagttccgcatttcaccgaag

SEQ ID NO: 207 - DNA, 689 bp, Homo sapiens
aggctggaactcagatctgagtcgaatcctatgactccttaccttgctcatctatttattaccttgtgaattcctgattttaatcaccggaactaattgctggtattaatcacattttttattatcaggaaatacaagaccatttttgagtcacttgttgaattcagcgggtcttcgtaactccagaaagtaagtatgctcatatgctcatcatcaacttctgggatgtaagtttaataggcacgggtcactgcacaggcttggcagggcatggagacaggctagagaggggccagcacccaagtcctacttcttcccagcaaagtgctggccacacaatgactggctagagagagctgcttaatgcgggggtagccaccctcccacatcacagaaacgtgcctattttacaagaccatggactcaaaggaaaaatacattgaaaatctgactcctgcaggagcaatggccaggactcatcttttatacaccaaagtcggagactcagtttcactgcagagattctaatcctgcttctgcattcttgaccacggcatcacataaaaatagatacatcttttcaagaaaactaatgcttttacatctggtctctatcaaagtaaacaagtattgagaaaacaagttacttttaagcattttgaaatgacaataacttgcattttcccaca

SEQ ID NO: 208 - DNA, 487 bp, Homo sapiens
gggtgatggaatgagaccctgtatcttaaaaaaatgaaataaatacagaatacttatttaaaacatgggccaggtatagtggctcgtgtaatcccagcactttgggaggctgaggtgggcggatcacttgaagttaggagtttgagaccagtctggccaacatggcaaaaccccatctctacaaaaatacaaaaatagaaattaaactggcatggtgatgcgtgcttgagctcccagctcgggaggctgggcacgagaatcgcttgaacccagaaggcagagggtgcagtgagccaagattgcaccactgcactccagcctgggtgacagagtgagacaatacctgaaaaacaaaaaacaaaaacaaaaaaagggaattcgcagaaatctaatgacaatgacagaccctccccatgttttatttctaatgataatcttgtgagggaaacttaacatctcctgggtatccacgtagggaggatgagcc

SEQ ID NO: 209 - DNA, 381 bp, Homo sapiens
cacgtgcatgtgtatgtacgcaggtgcatgtgtgtgtggccatctgtctcatctataaaagacaatcgatatataaaacataaaactagcaaacatctcattttaaaaactagatcccaagaagccatcaaaatgaattaagagtaaaatgcatccctgaataaatccactgtgtgctgaaagtgactgaatccctacaaaagacataataaattgacttgttgcctgaggatatttaagattgaatgtctaccaaatacaataatgttgtttcgcagaattttatgctgagttgttctttacagacataatatgccaaaagacccatactgcttcctaagtttacgcttagacaatatgacaaggttatcagtataaagt

SEQ ID NO: 210 - DNA, 199 bp, Homo sapiens
aattatcaacggcataactttcagccaagggacaaccatatttatcttgctgtatagttctttctgattttttttttgcgtatttctcctttttcctgtattttagatatatgtaggtaagtttcttttcaattataactttgatcttctagtctagaaagtgaccactcttcctcccccttttccttgctcctcactg

SEQ ID NO: 211 - DNA, 569 bp, Homo sapiens
tttcatgttaggagaagttaaatgaaaacaaaattaagcttttgaatccatgacatttcattatgttaactctgcttcttttaaaatcttattggtcccatgactctcaatgaaaacaacttcatataacaaaatcaaactgtaatatatttcctcagttgaccgaaatgatttagtaatagatgatttggctattgtaatagtgtatatcctggaagtttctcagaataccttcttagtttcaacttttgttgacagatctttctgaaagatccatgtacagtgttttaaaatctcctcaggatagacattctgagtaaggattcttatgtggtgtagataaattgtatcttctacatatacaaagtggctgggctcagaaattccttttctttgtttttgagacagggtcttgctctatcgcataggctggagtgcagttgggtaatcactgctcgctgcagcctctaccctcctggcacaatccatctgcccaccttagcctccagagtagctgggactagaggtgcctgcctccatgcccagctgatttttaaaaattttttgca

SEQ ID NO: 212 - DNA, 651 bp, Homo sapiens
cctgtgtgttacctgattgtaacaaccctatgcccatttcatagactgggaaacgaggtactgagaagtgaaatagctcaaagtgatttcactggaaagagacacagcatgggaacctagttgtgacgcactggagcgccaggtcttaatcactgagcaagattgctgtccaaaaaataaaaccagttccactttgcagggaacccagggtttaaactagtaattcttagatattttagggaggagacgtgtataaaagtgtgtatttggggacagggctggtgaacaatcataaaacagaacaggcatgcatctgtccacaagaacagacttcacgagtctacagatgctgttcccagggaaatacacatcacatgtaatattgcatacattttcagaggatttaaaggtacacttggaatgggccaagcacagtggctcgtgcctgtaatcctaacactttgggaggatcgcttgagcccagaagtttaagaccagcctggccaacatggtgagaccccatctttatttaaaaaataaaaattaaaaaaaagagccgggcatagtagcctgtggtagttccagctaccccacaggctgaaacaggaagatagcttgagcccaggagatagaggtgacaatgagctacag

SEQ ID NO: 213 - DNA, 452 bp, Homo sapiens
ctgtatcgttctgcattgaaatcaataaaaatagggctcaaaataacagttctgaagaatccttgggcacacctctggatgtaagaaccaaacaagagacaactaaggaaattgttaactcctggtaactaccagagcctcaaggaaaaacgtgttttcagctctcctctggggtcaaatgactatagctcactgggccagacaggatccatgatgagattttctcaagaggggaaggtggtaagggcaaattataaagatacaccttctggctgggtgcagtggctcacacctgtaatcccaacactttgggaggccaagggaggcagatcacttgaggtcaggagttcaaaaccagcctggccaacatggtgaaaccccatctctactaaacaatatataaatataaaaattagccaggcatggtggcatacgcctgtgatcccagctac

SEQ ID NO: 214 - DNA, 532 bp, Homo sapiens
aacacatgaggaagtatagcaaagtggttaacagcacaagctttgaaatcagaaaggctaggttcatatctcatctccacgacttacttcctgtgaccttggggaagtcacttatcccttaacctcaatttcctcaactacaaactgatgataataataccctatctcatagggctgttgttgtgattgaatgaaatagtggaaagtgctgagcacagtaccctgtacatagcaagtgttcaataactggggactattactttaactgttacctaattgccttaaagatcagcctttgctaaaaacagaagtccttccacagattgacattcaaaaggccaccaccacaaagaatacgcttaaggctgccaggaaggtactagtgaaagtgtaggccaatgaataaatggcatttgattttctattccagcatctttccattttagcattttctaactcagcagccacatagtgctctctgcctgcctggcttccctcacacattttcaaaccaggattactccaaatgtga

SEQ ID NO: 215 - DNA, 637 bp, Homo sapiens
taagccagtttttccatgggaaatttatccttagactagtttggggccatagtggggcagcctggtatttcataaatggtcaactgcaatattcagatattggttgtcatccttgtaggcagtggctgtggcaactctgattctacaactttggaagaaaactattaactttgaagttaataatttaattataaactttgaagttttaacatcaacttcaaaggctaggaatggcccccaaaagatcccagtttccttgaataatctttatgtttgggaattatacacttatgctaaatgttccaaatacccctctactcttcaacattgataaactcccttctcaaaaagtggccagctctttcaggtcttctgagtgactttcttaatataaagggcaatagcatcgtatcctaaagcttatatgggaggaagctaagtgaatcatggccaatacaagggaagaacgctatcctctgcacataatctcttcagtttatcttttaagacccactttaagttccatcttttccagaaagccttccttaatgacctcaggcataacaacagccaaatagaccatgaaaactcttagaaatggactcagttggccccttattctttactattctattct

SEQ ID NO: 216 - DNA, 619 bp, Homo sapiens
ggtaaccagatactgcctccatgccccctcctctcactctttccaacctgctcttcacttcacttaaatgtagactggattttctcatgactcggtggcaagatcccacattaagtcaggtgctacttggggaagttgcttcgttttcttgtgctctaagatctctcacccacacgcctggttttggggagaaggataaggacggtgtttctaaacatgctgtgtttcctatgcagagaggcaggtgactgtgtatggctcaacttgcagactctaaagccaactactttagagttcagagttcagacaccagctttgcctcttgtccttgtaacatggcacaggttacttcaactctgtaatgcctcagtttcctcatctgtgaaatgggggtaataactgtgtatacctcataagtgtgcttggaataatgcccactaccacgttcaaagtcagctgctggggccaggcatggtgtctgacccctgtaatcccagcactttgggaggccaaggcaggcagatgaccggaggttgggagttcgagaccagcctgaccaacatgacaaaaccccatctctactaaaaatacaaaaattagcagggtatggtgacaagca

SEQ ID NO: 217 - DNA, 162 bp, Homo sapiens
actttggaagcctgggataggaaaaattctaaaaacaggtgtatctgtcttaacaaatttggccaaatatatcaatagaacaaaagttaattttgaatttctcagctttaaaatagttaaataaagaataaataaataaaatagttaaataaataaagacat

SEQ ID NO: 218 - DNA, 605 bp, Homo sapiens
atactcttttgggggttgtgggagagcacttttagttgaatggtgaagatagaaataattaactttgaagatcttaagcaaattacttaatctctatctcattttactcctttaactacaagctggcacatcttttcaacacatatccacacttacccactccaagagaaaatactgagctctgcctggaaaccattctatgcattttggagaccacaacctttattgcagcacaggcactggcagtgaaggaaatgttatgttcctgggatgatcccaggagaaaagtaaaaggtttatggacttcattacagtttccaaatgtttgaatgctttacttttccagagaaactgggcaggcaggaaagagttgcacggactgtgtcttgagtcatgaagctttgccagtgtggaggagtgtaagcctacctcttaccttagctgcagtcattaccttgatttccttagttcttggcttccttgtatgaatttcctcgttgttttcctcttcgctttttataacaccctttgacttctggactcctagctttttaaaatttaaaatggctatcagacttaataatttatgtagatactccaccctc

SEQ ID NO: 219 - DNA, 704 bp, Homo sapiens
aggttgaagacactcctaattttcaacgtctcccttagcttcttaatacagaatattaacaagcatacaagtataagatgttgatccttagaaacctagttccaaaaggtcattattaatcacaattaattcacagaatttatttatcttgggaatgtttctataaaacattttgtgactaaataggtaaagctaatggcagtatttaactgaaaaaagtaaaggggtacattgactttaataaaaacagttgaaagaactattcaaaacataaatgtattactcaaaatgttttatataggggcacaagagttctttgactgaagcagtttttattttaagttgtttggcctgaaaccattcctggcagcaaaaatctttttaaaagtcttcatgtgtagatttaagctatccttggcataaaataattaatatatctatatttcaaagagcagatggcagaaaggactataccgaaatatattttatttctgagcaccagcataaaaacaagagaaaaaaaaagaacagccagaatacagaggtttttagggctattctaagtgatactatactggtggagacatgtcattatatatttgccaaaactcatagaaagtgcaacaccaagagtgaaccctaacataaactactgactttgggtgataatgtatgtcaatgtaagctcactgattgtaacaaat

SEQ ID NO: 220 - DNA, 86 bp, Homo sapiens
gtctgtttttaaacaagtgagaaattgatatatatttacacgctatcatattgtacagaaactggccattgatcagtagaaatctc

SEQ ID NO: 221 - DNA, 97 bp, Homo sapiens
taggaagaattctggaagaactgagaatgtttacctcttctaacagtcttctctcattcacgtttaatttaattagaaatggtctaaattgaacttc

SEQ ID NO: 222 - DNA, 625 bp, Homo sapiens
caggtctcagatcaaaattaagtgaccttttcacataacatactgccaatgtatttttaatgtaattgtcctgattgagtcatatttctaccaaattaccaaacacttttgtaatattagcttaagatacgttctcattccttgcattagagatggtgtcagcttgacttgaactttaatggcctgaaagtgagagcaatggtgtttcaccagagggaaattgaagtttggtcgtaagaagaggtctgagtggctgctgcaaagtcaacatttgttatccacataggacacaagctgttgtgttataaaataccatcagagatagaataagcattttcttacttcaaacttctaaatcagaagcatctaggaacatagctgtaattggtgaagcacagaaataaaaagacatttctaggtgaatcaaaatcagaggaagtcattgtcattgtgtgcatggttgcacaaaagcatcagggagcccagcagagtggtgcattaaagaaataagaaaagcaacgtctgccagcagtcaagacaggtatctgaagcagcagttgaaacagatgtgaagtagaggcaatgccatgaatgtcagttgtgtgttttagtgggtcccattgac

SEQ ID NO: 223 - DNA, 599 bp, Homo sapiens
tctcgaactcctgacctcaggtgatcctcccacctcggcctcccaaagtgctgggattataggcatgagccaccacgcctggccttatttttacttctgtgaaatataagtcactccaaatatctgaagcctttttaaattcaactgaatgatgcagggcctttaaggaataatgagatctacactttgagacaggatgctaggtctggagatacgctctaaaatatgatcacgcactgccacaggtcaagatgggtcttacaggatgagcaccatagagaaaaaagggagggtatcatcccatacaaaggaaagagcatgtgcaaaggcagagaggcaggaaagagcatgggtgtatgagagaacatgtctgaaatacaaggtgcaaaaagggaaatcactgagaaggaggtcaggtacatactgtaagcgagctgaaataccacatttattgtcatgccccatgctgccacctgagaaaaagcctcatttttatctctcatctactccctcaaaaaagcatcaaggacaaggacacgggatggggggatgggaaactattcagagttataaaccgggccatgtaagaaaaagataaa

SEQ ID NO: 224 - DNA, 428 bp, Homo sapiens
cactgcagtccagcctgggcaacagagcaagactcggtcgcgaaaaaaaagatttgaaaaagaaaaaaacaacaatgaatgcttacacttagaaatggtttgtcatcttcgtctaggaatgcctattttccattcattcaatgaacatccagcccaccttgtgccctgtgattggaaggctttaggaataccgagatgaaaagatatgatccctgtcttaaagaatctagtaatctaatgggcacctgaatgaacgtttgtctacagtgttaggttaggaaacagccccaacacatgccatttgccagggggagtcagagcctcacctatttatttggggtgacaatcatacagagtgcaagtgacatatttaccatgctgtatccctgaagtcttttcatctgtcccaacttctctattgccattga

SEQ ID NO: 225 - DNA, 580 bp, Homo sapiens
gttgctctatgaaaaacacacattagcatttttcagaacattaggaaccaaacacagtatcataaaaacatagaaaaaaaggaactaattttatcttctagtcacagatgatgttcagaatcaaaatgacatgtgactaatagtcagatatcaaattagtggagctctgctcttaaccacatattactccatatctgtttctttatggcagcaaaagacaagactccagcagtggttcagctgtataatgggaatatgaatattccagaactttctgtatgccaggtgattgggaacaacagtctcttaatattacctggcttttaaaagtattggcatacatttgaactaaagatttttttaaaaaataaaatctgtccaggtgcagtggctcacgcctgtaatcccagcactttgggaggccgaggtgggaggatcacgaggtcaggagattgagaccatcctagctaacatggtgaaaccccgtctctactaaaaatacaaaaaattagccaggcgtggtggcacgtgcctgtagtcccagctacttgggaggctgaggcaggagaatggcatgaac

SEQ ID NO: 226 - DNA, 557 bp, Homo sapiens
accctgtattcttcagcctgactcatcacttcccttttgttcgtttctagtcttcctctccagcctctccatctgtcgttctctaacttcttcctttatttttccttttctcggtttcattgtgattgttttaaaaaccacgtctatggcaaatatacccacaggtactttttagagggcttaatgacagtgtttatcagcagactctagaaatgtgttcatgacagatcaatgcttatttttgtggttcaaaagaaagttgtaaaaatttttagaaattattagtattttcttgcgggaatagtgaaagttagttgtgtgtgatcattttttaagcatcaaagattggaaagtctgaaattgtgtttcaggtgtgttccaacctactgactttgaattcatcacttattgttactgagggtcatttttcctttctgtaaatatgcacattttcaccaactattcccagggaaatctaggaagtcagatgcaaatagaatatggttgatattcaacaatattcagcctgaagcaatatcaaggtagggtatgtactc

SEQ ID NO: 227 - DNA, 653 bp, Homo sapiens
tactaatccctaggttgagaagtcagaggttctaattgatttgctgtttgctgccttaaggtttgtgttccctagaaatgatgtttcattttgtatgtacttccccccttactgaactgcacccaaaacaaatgttgtaggttttgacatgggaaagctttagctgttcaaacatgcacaccttgctgacattcaaatccacagactgtaccacacatcagtgtttacagagttcttgacaggtctgaaaaaacattaccatatttatcatttccattggtagaacagaataatggcaaatgatatacatgtagtcctccataattaataaaatactttcacatctgtaattattattcacaaagcctaattctcaaagtgtttcattttctttaaaattatattttattacattcttacaaatatagcctgggctctggtttacataaaatgatgttgacagtgtaggaaaaataaacggtgctttgagggaatggaattacaattggctacgcaaagaaaatgaagattgtaatatcttgacatgtgacaacccagaccaaggcagggtggagttggaagtgtactagattgcgagtgcactagattgcgattgcagtacctggattctaattccaagtctaccacctact

SEQ ID NO: 228 - DNA, 180 bp, Homo sapiens
tggactaacgtgatgaagggctggcagtaccgttggttcgtgctggactacaatgcaggactgctctcctactacacgtccaaggacaaaatgatgagaggctctcgcagaggatgtgttagactcagaggagctgtgattggtatagacgatgaggacgacagcaccttcacaataact

SEQ ID NO: 229 - DNA, 559 bp, Homo sapiens
ccatgcatgtcccaccaaatgctgctgagccacggacagagactcacctcgtacagcagacagcccaaggaccagatgtcggacttgaagttgtagccgttctcatggatcctctccggtgacatgtagtagggcgtccccactgcaacacagcaaggggcggggctgcttatgctccatgtagggcaggggcagggcacagaggtgaggttggagggagggcacacgggagctggggagagattgtgcctcggtctctgagcagcccttctccctctctgggcctgggccttcctctgtcagatgagcagttggatcagattagaggttcccatgctagcagggcactaaacacctggggtgccggggacttgaagcagattccctggacccaccgagaccaagaatcaggctgggaggctgggcgccatggctcacgcctgtaatcccaacactctgggaggccaaggtgggtggacaacagggcaaaaccccgcctctactaaaaatgcaaaaattagctgggcatagtggcagacacctataatccaagctactc

SEQ ID NO: 230 - DNA, 536 bp, Homo sapiens
aaagagagaaggttaatatcaacctaagattattcattaagactctaggaggacataaaaaacaaattaggtccaaaataagtagacagaggatataagaacagaaatcaatgaattagaaaagagacaaaaaacagaaatgttggtttcaagaaaaaattaatagaactgaaaagttatttgccaagaatattaaggaaaagagaaaatacaaaataccaatatgaaaaatggcagaggggggaaggtgtggtggctcacacctgcataacgcagcactttgggaggctgaggcgggtgaatcacgtgagaccaagaattcgagaccaggctggtcaacatggtgaaaccctgtctcaactaaaattacaaaaattagctgggcgtggtggtgggcgcctgtactcccagctacttgggaggctgagacaggagaatcacctgaacttgggaggcagaggtacagtgaggtgagatcatgccccactgcactccaggctgggcaacagagtgaggctacatctcaaaaaacaaaa

SEQ ID NO: 231 - DNA, 627 bp, Homo sapiens
gtagcaccattcacaatagcaaagacatggaatcaacctaaatgcccatgaaatgatagactggataaagaaaatgtacatataaaccatggaatactatgcagccttaaaaaggaatgagatcatgtcctttgcagggacatggatagaattggaagccattattctcagcaaagtaatgcagcaacagaaaaccaaacaccacatgttgtcacttatcattgggaggcaaatgatgagaacacatggacacatagacatagaggggaagaacacacacaagggcctgttgtgggggacaggggaagggagagcaccagacagaataactaatggatgctggacttaatacctaggtaatggatgatctgtgcagcaacccaacatggcttacgtttacctatgtaacaaacctgcacatcctgcacatgtatccctgaacttaaaataaaagtcaaaataatttgataaattcattcattgagttccctctctgtctcaaataaatattaatagcaataaaaattaaagctaaaaagacaaattgacaaatttaaaaagcatgttcaatctgcaaaacataaaataaaaattgttttgaaagaaaatagtaattatacaagtggt

SEQ ID NO: 232 - DNA, 617 bp, Homo sapiens
cagtataagcattatggtagtggctagaggtagtctatcaattaatttttagtgctttcaaaaccccgaaaacttagttctttagcaagataatattcattatttctttcagttctgaggtagagtcattattttgttatgggtcagtctatctaatatctgtgttatgctggtagctcagctaaaactgattattctaggatggccacactatgtatctggcatttggcaggttatttgatttagatcttttctaggactgggctatttgttctaggctagaacactttgtttttgtcccatgaagttctctttcccacttatggactaaccccatgctcctccagttggtaacaccaaggatccaaaaagcagcaagagagaaagtcttaatgcacaaagacttttctcaaacagctaattttttcttggacaaaacaaatcataaagccagcccaacatcagtttgagaagctataaccaaagagcctgaatagggagaagggaatacaatactaataatataaaataatatgctgtataatttaatataacatttattctgaagaagctcacagtttggggaaggaaaaagagacataaacatatttttaaaa

SEQ ID NO: 233 - DNA, 581 bp, Homo sapiens
gctaagatcagatggccatgatgtcctcagtaaggctggaggcatttgctgagagtaaagcttgagaaggaagagaacaaataagcgctgaaatacagtagatgtgttcttcatcctaagtctactggtttgcctgcattttatgcactggaggtatgtgttcttgtagcagtcttttcaatgagttcatgtgcaagcatttgataaaatgctcatataagcctggtattttcacctccctgaaccttctatgatattccaacaacctgttaggttctccttttgggtctagcaatctgtgcactttctgatcttgcatgaattcctctacgagtccctttggaatcaactactctgtctttagtatacaccaacaaatgataattaaatacctgaaactacacataaaagttaaatagcaattttactggaaaattcagccctaaatgctctactccttgtgtttctcaaatactccaaacgtgctcccaccttggggcatttgcacttgctatttcctctggatagcctcccagagagaaatacaaggtactccttcatcttctcttccattaagtatt

SEQ ID NO: 234 - DNA, 641 bp, Homo sapiens
caattcactttgatggacctgttagttttggtcctatctctgagtaagacaatgcagtgtcatttttcacagctgtaaacacttggtaatcatgtttagtggattctaaatcagcctgtaacttgattcaactttgctgttaacacaattcctctggattactaaaaattttcctagatctaataattccaccttttgttttctcattaatgagtcattagctagagtcatggctggttataaaatatataggcagttttattggtctattttttgtgtttatggcttttctgaaatgcctgatacaagctgatgcatgggctactttctcattgccacatggtttgcattacatacaattctagagttgctgatgggatgattggctctatggttgccatgatgcttatgtttgcaataaataagaatttctaagctgggcatggtggctcacatctgtaatcccagcactttgggaggccactgggggaggattacttgagatcaggagttcgagaccagactggccaacatagtgaaaccccatctctgctaaaaatacaaaaattagtcaggtgtggtggcacgtgcctgtaatcccagctactcaggaggcagaggtaggagaatcacttgaactg

SEQ ID NO: 235 - DNA, 425 bp, Homo sapiens
ctacagtgtaaagtctcttatgttgctttttgagggcatctccttgggcatgcaaacagtttccctcggatgacagtggttttagcagggcactctttgaatgtctctttccattatttatttgttaaaatgtcttcttttggtatcacaccaacggtcatagagaagtgtgtctaacactgtaaccccaggactaaattcagttgtgtaatctctgttacaaacttgactgatatttttaccatatagagtcaactggtaaccaataaaattactatctgttatattcatcttcttatcacatccatcatctagcccttctgcttttgaaaagctaattttacattgctagttgaaactagagttgaaatattatagaggggaattcataaagacttttgcctatgtaataattcataggcact

SEQ ID NO: 236 - DNA, 507 bp, Homo sapiens
acctcacccagcctgatgcatatttttaaaaagttgcttttggccgggtgtggtggctcacgcctgtaatcccagcactttgggaggccgaggtgggcagatcatgaggtcaggagagcgagaccatcctggctaacacggtaaaaccccgtctctactaaaaatatatttaaaaaaaaattagctgggtgtggtggcgtgtgcctgtagtcccagctgcttgggaggctgaggcaggagaatggcatgaacccaggaggcagagcttgcagtgagccgagatcgtgccactgcactccagcctgggcgacagagcgagactccatctctaaataaataaataaaagttgcttttgtttatcaacagtgtatcaaacagtgtatcagagagaacaccatttgtcagtgtatttggaagtacatgcttcattcttatctgcaggatagcatttcctggtatggatgttaccgaaattaactcttactctgtttataggcatctttctc

SEQ ID NO: 237 - DNA, 484 bp, Homo sapiens
ttcttgttaagtagagatgttgagtttgaaaacaattaggaaagagttaaacggctgaatttacaatggcaaattaaaagtaatattagaaacaagatagtaaggtctagaaataagactctacctaattgtgattacacaagacatcctcagagatcgctcttaagtaataccttgttacctaaagcaaactctctagatccatgattgaagaaagataaaaacaaaacaaactgattcagagcacaagaattagaaggtcattatgtgccttctccaccaatagcaatcaggcatattctttgtatctatgcatcatctatctttttatccatccatccattcattatctacctactaataacttgtctctctgtgtatgtctctatctgtctttatatagtagaatcaattattccaaaaagctaaaggacaatatacaagtagattaaagcagaactgctttctttcaagacagagcctc

SEQ ID NO: 238 - DNA, 340 bp, Homo sapiens
aacactgaatgcatatggctacatgttcttttaagaggtaggaccttccagagggtgtcaagtgaaataagttcatactatggcacctgacatggaacaactggggagcggtggtttggaggtactttatgagtcaggattgcattaagctgcatggaatagagacttgtctgtaaatagggctttgtccttcccaataacaagaagtggatgcagcctggggctggcacagctgctcaagatagtggtcaaagacccagcttctctacctgcctgctgtgcatcctcacgctcctgcatctccaggcatcatgaacacattccaggcaggaagacagaa

SEQ ID NO: 239 - DNA, 581 bp, Homo sapiens
gaaattctctgctgactgctaaactcacatttccaacagtcctgtggatattctgacatatatgttccttggatatcttaaactcaatatatccaaaattgaagtcattagttttacaacttctgaactagaagaccagatagacgctctcatccagatctctcaggacaatactgtttgcttaatatcacccctgcccttacccctgttgctcttctctcagttactgggttcctcagtcttctggttatctaggatagatcctcagcactgctggccatcctcccaccctactcacactaccacaatcaatcgctcaattacattgggttttcactccaaactatcccctgaaatctgtcccctccctttcatttccacttactttgtctaactcagccctttattacttctcactcaaggttccgtgacctatattctttctcctactgacacaaaaattttttcactacaaaaagatcagatcacagtcacacaactgacatcatcacaaaattcagagctgagaaggaccttcacagtttaattattttataaatgaaactgaggcccatgtgact

SEQ ID NO: 240 - DNA, 615 bp, Homo sapiens
ttcatttgcatttccctgatgattagtgatgctgaggttttttttcatagacctgttggccatgcatactttaattcttataaatgaaaaccacatatacaatgtaacccagtgagttaggcagggatatgataaccatgagatcaactaaccctgggaagtggcaggacccgacctatgcaaatgccatgtcttcctgaaaccctgttccagaattgctttcatgtgactctctttctactctttcacactatctctttgtttacatacttcccccaacttacatattcccaaccacaccattttaatctcagtgcatgactgatttacagctttgccactctatgtgagcactgaccccaaaagggacttccaatctgtttagttactagattataatacagaagagaaaaataaacgtaacattgaattcctatacccatattagctttttacaaatcagatcaaccatggcagtgaagactcaccattcatcttttcgttcattaatattataaggaaatctattcctgtgggcagacattaaacatgagagaaattaacacagttgcactaatgcaaacacaatgtcaataatttataatctgggaaaag

SEQ ID NO: 241 - DNA, 655 bp, Homo sapiens
ctctgtactccagtgcagtggtccccaacatttttggaaccaggtacttgtttcttgggagaaaatttttccacagactaggaggaaactcttccacctcagatcgtcaggcattagttagattctcataaggggtgtggaacctacatccctcacatgcacagtttacaatagggtttgcactcctatgagaatctaatgccactgctgatctgacaggaggtggagctcagctggtaatgcttactagtctgttgctcacctcctgttatgtggacccatactggttcacagccaaggagttgggaacccctgctctagtgcaccctctgagtacaggttccctgtgcacaccgctgtggccatggctcctgctggagacaaagtgtgcactccctagaacctgagagatgcctgcatgggactgctgaagacaaccccaccaacacaaatagcaggactgctatgttgtagcctgagccctgaggccagattcttcaaacccaccaccacagaatcccctgttctacctactagagcctaagcccctgcacactacctggggcctgagatcaaacaccatcagtttatcttcaccagtccctccccaccagagcctgagcaaaccttctgaagacctgggaatcactccagc

SEQ ID NO: 242 - DNA, 568 bp, Homo sapiens
gtcttaaaatgagaggtggctttcaggggctaaagagcctctggttgaaagtgtttagttagtcattagtgtttcagatgcattaaaagcacaggctttagggttagtttgcttcattttttaagctgtgaacttggttgtatgactttaacctttcgcagtctagtttcctcatctgtgaaaaaggtgataatagtaatatttatttcacagagcttttatgaagatcaaatgagatagtctctataaaaatgctggccgggtgcagtggctcacgcctataatcccagcactttgggaggctgaggcgggcagatcacctgaggtcaggagtttgagaccagcctggccaaaatggtgaaaccctgtctctactaaaaatacaaaaaaattagctgagtgtggtggtgggcgcctgtaattccagctactcgggaggctgaagcaggagaatcgcttgaacctgggaggtggaggttgcagtgagctgagatcagcgtgggcaacagagaaagactccatctcaaacaacaacaataaactaggcacgttatgtggcatatgtgtg

SEQ ID NO: 243 - DNA, 465 bp, Homo sapiens
cggcctcccaaagtgctgggattacaggcgtgacccaccacacttggcccgaagacttattattatcccatcagcctttctctcatggaatttggcctcaaaaattaagtaaacatttaagtcaaaaggagagtgagaatattgccttctagcctcactgtaccaatgcccttatttactggtgagaaaactgaagttcagagatgtaaagttatatggtctagctcacatagcttctgtgtggtgaagctggggttccaactcaggtctaattccattagagtcttgcgtctttcctgcctactcatatgtaccaagactcagctagtacaggagttgggcaaggtactgagactacaagggggaatgggtggtgagtctactttctgggtatagtcaaattcattttcatacctgatcattcattcatccagtatgtattaagcaactactacgtgcagaccc

SEQ ID NO: 244 - DNA, 576 bp, Homo sapiens
aacactacagtgagccatgtttgtaccactgcaccccagctggggcaacagagtgagaccctgtctcaaaaaaaaaattttatctgtattctgtgtacagttctaatttaaaacaaactgattgacactgttagggaaatttgctctctttaattaaaaatacattaatattttaacacaatacttctgttgaagaggtagatacaagtttaaattttgtaaaatgtatttaattgattttaagtggtaactttttttcaggataattttgcaagtatgtcagaaaactaaataatgtgacaaatttaaacatgttacatttattttatttatgtatttatttatttttggagatggagtttcgctcttgttgcccaggctggagtgcaatggtgcgatctcggctcaccacaacctccgcctcccaggttcaagtgattctcctgcctcagcctctcgagtggctgggattataggcgtgcatcaccatgcccggctaattttgtatttttagtagagatgaggtttctccatgttggtcgggctggtctcgaactcccgacttcaggtgatctg

SEQ ID NO: 245 - DNA, 605 bp, Homo sapiens
ctgtatcctctcaggccagcaccgagtgtcccatttggggctgctcctgagaattttctagagaacacaggttcacacacgtgcccaaaggagcgtagaatttttgtggaaagattcccaggaggctgagtgcggtagcctcatgcctgtaatcccagcactctgggaggccaaggcgggtggatcacctgaggtcaggagttcgagaccagcctggccaagatggtgaaaccccgtgtctacaaaaaatacaaaaattagctgggcgtggtggcaggcgcctctaatcccagctactcgggaggctgaggcaggagaatcccttgaacccaggaggcagaggttgcagtgagccaagatcgtgccattgtactccagcctgggcgacaagaggaaaaactctgtctcaaaaaaaaagatttcccaggaaatccatctcatggttgttttgaggaggagactggctgttccctgaactttctcactcatgaaaacacaaaggtattttacttttaatccatcaactcttggcttttcccaggtcccagggggctctgaggaggcccctccctgcagcccttgcagagccaggggaagcccccagc

SEQ ID NO: 246 - DNA, 573 bp, Homo sapiens
gtctccccgcgtccaagatggcggcagaagcagctggtgggaaatacagaagcacagtcagcaaaagcaaagacccctcggggctgctcatctctgtgatcaggactctgtctactagtgacgatgtcgaagacagggaaaatgaaaagggtcgccttgaagaagcctacgagaagtgtgaccgtgacctggatgaattgattgtacagcactacacagaattgacgacagccattcgcacataccagagcatcacagagcgcatcactaactcccgaaataaaataaagcaggtaaaagagaacctgctttcatgcaagatgctgctgcactgcaaacgggatgagcttcggaaactgtggattgaaggaattgagcataagcatgtcctgaacttgttggatgaaattgagaatatcaagcaagtgcctcaaaagctggaacagtgcatggccagcaagcacctatctcagtgccactggcatgttggtgtcagcagttgagtctttggagggccccctgctccaggtggaaggactgagtgaccttcgactagagcttcacagcaagaag

SEQ ID NO: 247 - DNA, 423 bp, Homo sapiens
aatgaattttcctgtgaaagtaattaaaactaaggcaatgttatttaatgaaatacataaggcattttagtgtttttttactatttacagattaatttgttaataatttgcatagctaaaaaagagagaagtgaataatgatgtcttttgtcttaagcgaaaaattactgaaatacatatgatacttattaaatcactggtagatatcacaattttggaaggagaaacacatacacaaatatacttacctgaagggtattggaaaggaagccacaccaattttaaaatatttagttaaattttaattaaaacaagtttattgttatacattttattccaatatataaactattccattatgtaggtttttctgttttgagcatgtgtaccataaacgctatgccaacggtgactttgaatcct

SEQ ID NO: 248 - DNA, 443 bp, Homo sapiens
attaataaaagttaagataccaaaacactggtgtctaattctttcaactaacaacttgaattattttccattttatttcttcttactagatcgatctgcaattctacacaattgttgggcagctatgaatgacagtaggtttacatgatatattttaaaaactgatttttctgccacgcaaataattgaactttgtctgaagatagtgtgcctgggaaaccagattttttttatttttatttttatttttatttttttgagatggagtcttgctctgtcaccaggctggagtgcagtggtgcaatctcggctcactgcaatctctgcctcctgggtccaggcggttcccttgcctcagcctcccaagtagctgggactacaggtgcgaaccaccacatctggctatttttttgtattttagtagagacagggtttcaccatgt

SEQ ID NO: 249 - DNA, 569 bp, Homo sapiens
atgtattagaatactgatgtattaaagtggagtattccatgttatgtatttgtgttaacccagtgatgttctggagtactgctgtattagagtattccatgtgtgtatttgggctaacccactgatatactggagccagtttgcaccagctcatgatgctcattaaattttcaggaacttacatggcagttggctaaacatactaataaaaattacagtagcttagaattaaattatagcaaaacaatgatactcaaaattcataacttatgttacattatactattacttatgcttttgaggttgtctattttagctgtatgatgaaaaatattatacaatgatatgctactgtgctgttctttccagtgatgtcatatcagtggcttgaaattggctgtggtgggagtatttactccacataaatgggcaaatgctacaaatcaggctgtatcttttcctccatagagccaggtaggcttatatcaccatgagaaatgcttcctagtagtctctgctctttcatcctggggcacccgagaaggatcatatatgaagcagatatgagc

SEQ ID NO: 250 - DNA, 404 bp, Homo sapiens
cggcctcccaaagtgctgggattacaggcgtgacccaccacacttggcccgaagacttattattatcccatcagcctttctctcatggaatttggcctcaaaaattaagtaaacatttaagtcaaaaggagagtgagaatattgccttctagcctcactgtaccaatgcccttatttactggtgagaaaactgaagttcagagatgtaaagttatatggtctagctcacatagcttctgtgtggtgaagctggggttccaactcaggtctaattccattagagtcttgcgtctttcctgcctactcatatgtaccaagactcagctagtacaggagttgggcaaggtactgagactacaagggggaatgggtggtgagtctactttctgggtatagtcaaattc

SEQ ID NO: 251 - DNA, 512 bp, Homo sapiens
ggattatttagctgttggatgtgttctcttactgaatttcatcttttaaaagaaggaaggaatgcatgaagaaatacctgtaaatgaccaagaaaataatttttttaagtttttttgtcataatttgtggggctttttttcccttgacttctgaagctccaaattcaccctcaacagatgtgctgttgaattctgacattaacaaaaccaaaccattttaaaccactcaccagtaaaataaaaactaaatatttgcttagcattcccagcatttctttcattgtgaaaacaatgaaaatatggacaaattaattcttagtggtactctatacaataatttagtgctaggatttatattagaaatggggttttcccaaactaagtctgtggttgactgaatcaaagataagcaagataatacagtatgttataaaaagtaccctataaatgtgaaaagaccataatagtaaaaatatattagaatgatactaacaataataaatagtgctagc

SEQ ID NO: 252 - DNA, 501 bp, Homo sapiens
catgttttcttatgtgatataaacctgtgctacagtttttacaatactgagccattaaaactgaagtctaggaaggaaaattgcaggtttacaactatcaaacttaactagttgataagtttaaactgataaatgaaaatttaggagagattatggcaaattgagtatgctggtgtttttctcctaatgttttttattttcctttatctgctaagtgatctcttcctactctgaattctcaaagtgctttgtgtacttcttaatctccccttttagattgtaaactccttgaaggccaggattctcttctttttttgttttttgagatggagtttccgtccttgttgccctgactggagtgcaatggtctgatctcggctcactgcaacctctgcttcccaggttcaagtgattctcctgcctcaacctccagagtagctgggattacaggcacccaccatcacgcccagctaattttttttgtatttttagtacagacag

SEQ ID NO: 253 - DNA, 488 bp, Homo sapiens
agatttgataacctagagttgctaaatgactgacgggtgggtagtgttgacagcgtgtatacactggacaaagggatgattcacatcctggccaggacacagtgggttggtgtgagattttatcatgatattcagaacaatgcacaatttaaaacttatgagttgtttatttctgcagttttctattgaatatttctagattgcagtcgaccttggggtcactgaaactgtggaaagcaaaaccgtgcataaggcagaactattgtatatggtttttctcttttaatttttgatgaaatgaaatatgttattatatgtctttaagctaggccatctccaggttctgaaatacacacttttcatgccatgttctaatctcttctggatttagatttgtgaatattttgaagttttagcaatattagtgagatctataacttatgctcttagcagatggagagaagaggtggagctgctaaaacttcaga

SEQ ID NO: 254 - DNA, 512 bp, Homo sapiens
gtccagcatagtaaaaaccgcaaggcagaactctcagagctgctcccagccagcttagcccaacttctctcttggagtgtattatttctctcccattaataaatcttttgcctactttactaattggtctcttggccaaattctttcctccgagaaaactaagaactgaggaccgcacacttccttgtaacacacagaccacagactgtttctgagtctgtgttttttctcccagggattgtccttaaccttagcaaaataaacttctaaattgattgagccctgtctcagatacttttcgatttagagtgcaataaatatccactaatttttatctgatttttccttctttgataattttgaagggacaaaacaaggcatcctttgtgtatgtccaaatctagagtcagtaaatcctcacttgatttaatgagatgtccaatatgtctttccagttaaaatggtgtattgaggccggacgaggtggctcacgcctgtaatcccattgggag

SEQ ID NO: 255 - DNA, 499 bp, Homo sapiens
cacagtagttcagtggaactccctattctaaccttgtctctttttccaccatacacacacacacacacacacacacacccacacacacacctcccacccacactgctctttcagcctacccctgtgctaagccagctgggcaactgcagttttagaaagagcagagccaagaggtgcacaaaaacacattagtcaccttataaaccggagctgttgaaacaaacatacttgcagtttcactggaactattcatatttaacactagaataaatagtggtgtgtatactaatctcgagtatttcaaaatggatataagtcagaatatgagtgaaattcgaactgtgacataactttctactcagtgtgtatttagttcaattagatatataattctgatcatacttaaaattgagatggagggtaaattatctcccaatttttagcagcaggtgggaagaaagtgcctataccacattactatattataaagaaaatttta

SEQ ID NO: 256 - DNA, 592 bp, Homo sapiens
tccaaacacagcaccatttagactttaatacacttatccacagtatctcaaacaagcataaaggaaaataagcagtctttgcgatccataactttcctggctgatagacttaaaccaccttaaatggaagacttgggatgcttttctacagttctgagattaaatagaatgcatgtatttaaacaaataaaataaaattgagaattcttgcctaaggcctttcatgaactaacttccatgcattaaatgaactcattcttgtatgcagtcattcatttatcaatattgtattgaggacttgcttgtgctggttagtgtctagaggcaggggatacagcagagatccaggcagacacatttcctcacttatagaaagggagatggaccagaaacaagcaaacaaatacacatggcacttgcagactttctaagtgttatcaagaaataagtgggatggaataagaagaataacctgaaaagggagggaaggggaatagaaggggaagctagaaaagagagagtagccagttaaggcctctgtaagaacatgatgtttcagcatgaaccatgcagagtgacctacacagaggga

SEQ ID NO: 257 - DNA, 536 bp, Homo sapiens
ttgtgtttaatcccctgttatctgcaggacaaaaatcttggttccttaacaagtctgaggagctctccctactccttctcctaacttattctctgccctttgtccctcataaattagcctttagcaatcctataccacttattggtcatccaaggctccaaactgcttcggattgcttcaaacctctgctggtgcgctcagctagtcactcagcctgggatgcctgcctcttcctacctttccatccagaggtattacttcctccatgaagcttttcctaccctgatgccgtctgcacatcaactgcacaactccagccctgccccatgcactcacattgtattaaacttatatgtagatgcatttatccttcacttgactggaagtcgtttgtgagtgggaacaaatctttgtgaatgacaagattggtctcaatgaaaaacagccataatattcattggtcttggtatatatctctatatataacatttactatattgtacagtatagagagcagtttgtccccctgctagtct

SEQ ID NO: 258 - DNA, 626 bp, Homo sapiens
gtatccgtatgatccatatgaaaaacaaaagtaaatcttgaccccttcttcacagcgtaaacaaaaatcaattccagatggactgcaatctgatatgaaagactgttacaatagacttttagaaagaaacactgaacactgtcttcacagggagtgtctggaaaggagctgagggtactttcaaggagctgctgatattcctgattttgatcttactaaacaaattataaaatgatttcaatatatgtacccacgtaagcataaattggtactttaagacataatactgaaaaccttttacaaaaagttttgcagaaagaaagggtcctaatagcaaaggaagttcaggccgggagcagtggctcaagcctgtaatcccagcactttgggaggccaaggcgggtggatcatgaggtcaggagatcaagaccatcctggccaacatggtgaaaccctgtctctactaaaatacaaaaaattagccaggcgtggtagtgggcgcctgtaatcccagctacttgggaggctgaggcaagggaatcgcttgaacctgggaggctgaggttgcagtgagctgagatcgcgccattgcactccagcctggctacagagcaagactccgtctc

SEQ ID NO: 259 - DNA, 409 bp, Homo sapiens
caatgtccacttaactaagaattcccatcaggtatggagatttacatttttgatagttattgagattataagttttatcctctttggattattaatagggtaagttatgttaatgtctttcgtattggcctttctacctttcattcttataataattccttttggggcaattttgtttttgattgtataatgctgaagtggatttgctaacatataatttaggatttttttgtgtgttatttttgttaaggttttaaatctgagttgcggtaacttgctgaaatgattttctatgctctgaaatagactaaatagcatggaaattttcatataaaaccctctgggcctggggcctttttgaaagtagttctttgacaatttctctcacatcttatttgcctattttgag

SEQ ID NO: 260 - DNA, 627 bp, Homo sapiens
ttgtccattcatttggccacactaccatagggatcctaattcttcttgagaattgattcttttgtttttgtttttgttgttgtttatttattttgagaaagggcctcattatgttgcacaggttggcctcgaaatcttgggcttgaggtatcctcctgcctcagtctcctgagtatctgggacaacaggtggatgccattgtgcccagcaaattattttgacttataattcattctggatgacattttatataataggactacagttaatgttggttttattttgcttatcttggttgttattgtgattgactttttaaaactttttgttcatgtttctttagcatttctaatgtttttcagcatggtaactaaatacttttatataatataaatgctaaggttacatggtaggcattgttcatgggcaccatgctatacacctataaattaaaatcagtacaatcatatccaaatgaatacaattatatcaggtgacagagttgttaatagctcagaagataaacggtttcaccattgctcagtagataaatttcttctttccaaaatgtgatttaaatatcaatacttccccagcactttgggaggccgaggcaggcggatcacg

SEQ ID NO: 261 - DNA, 556 bp, Homo sapiens
cttaacacacatccacataaatgaatgtgcataaggcatgggggggtagaatgggaaaagaaaggaagtggaggtccacagcacatcctgaggctatagttcaagatgaaaggagacatatattaagtttgtctcaaaagttatatcttgagattgaggagaaaggagaaagaagataaaaagttttaaaacatggtttgaagccaagctagctgtcctgttacaaaatgacaaaaggacacataagatacaatgaatactcctttttattcaataaaaggaagagacaaaataaatctccagaaagccaccctcaagaaacacagatttcttaagtactcgacaaacaatttaaacaactttcttaaagatgttcaataaactaaaggagaacacagatggacaagtcaacaaaatcagcaaaatgaggcaggaacacaattagaatattaaccaataggaactataaagcaaagaaccaaacaacttttagagctgaaaaatacaatacctaaattgaaaaattcagtagaggggttcatctatggtcttcacc

SEQ ID NO: 262 - DNA, 581 bp, Homo sapiens
tcataatcaaagagtagcaactaaaatgaaaatagtggtattctgatgaaaaacataccaaaaaactaaacatatcaaaaaataaattagagagctttacatttaattagtttagcagtttgataataatattagctaactctacaacactaggtgccatatattatttcattgaatgctcatgtgaggcatgtaggtactattatccttatttttaaaatgaggcaactacaacacttgtccaaaggccactcatctaatatgaagtgaaaatgggattcaaattcaagcattctcaatccagcatctgcacctcaaccacaatgctgtgctgcctctctaaataatttactcagaaattaagattaattccctttcattccattttttaaatctgtggcaaaatcctacttcatttccatttttttgctaaaagccaggaatccattggataaatgaaatctttaaataagatgaaaacaagtgctgtaacttaaaatatagtataacctgactccttttgtgtatatgacaaaatatataccagtgacatggctaaaacattattccaaatagaatta

SEQ ID NO: 263 - DNA, 529 bp, Homo sapiens
tacagaagtgcaaatgagaggtgatggtagcttacaggagctgtggagacagacagaagtggatggctgggatatgtctttttaaaaatgaggctgggcgtggtggctcacgcctgtaatcccagcactttgagaggccgaggtgggcgaatcacctgaggtcacgagttcgagaccagcctgaccaacatggagaaaccctgtctctactaaaaatacaaaattagccgggcatggtggtgcatgcctgtaatcccagctacttgggaggctgaggcaggagaactgcttgaatccgggaggcagaggttgcagtgagccgagatggcgccactgcactccagcctgggtgacagagcgagactccatctcagacacacacacagaggctgggcgcagtggctcatgtctataatcccagcactttgggaggccggggcaggcggatcacgagatcatgagttcgagacaagactagccaacatggtgaaaccctgtctctactaaaaacacaaaaattagctgggca

SEQ ID NO: 264 - DNA, 463 bp, Homo sapiens
ccttcttttcacaagatgtgactaattactttaaattgctctggtttattaagtgaaatccaaagtcacttctgtgctcacctgacatttagttaatgagcacagtgctacctccaggagattaatggaactttgataaagaagtagtttaattggtgaaatagcatatttggatttcactggagaaagggtgaaataatccatatatttgaatccaatttaatgtaattacattgtaattttggttattgccaaaagatggtttgtcatttgaactgagaactagaggttaactaatatatgcaattgaaatctatcagggccgggcgcggtggctcacgcctgtaatcccagcactttgggaggccgaggcaggcggatcacgaggtcaggagatcgagaccatcctggctaacacggtgaaaccccgtctctactaaaaatacaaaaaaaattagctggg

SEQ ID NO: 265 - DNA, 606 bp, Homo sapiens
gatactaatgaggagtgatccagtttgctccacagactcccttgaaatgtccaccatttagatcctcagatcccaaaataggtagggtaaagaacaggacaggtatcccaagtgcctttcctcagccatagcagccatgttagtatcattttcctactccatggcagtgactggaaatggtttattctctgaaaagtttgaaaccaagaggcctcaagttaaaggatactaaatgcagaaggtggcatgggagagatgggacactaaaagggaatataaatgaacctttaaaatctgaattaaaggacctcagctcttagtataccagagaccaggtgtgtttactattcaggagctcagagaaacaaattcagtggctccaaaggagagactttaaggttctaaaatctgtgggtatcctaaagaaaagcctggcttatagtctgatcacttcaagctcagcagtcaacaaaccctgtcaatgtacataataagatcccccctaccccagtaaactttcttaaacctcagccttaaatggaaattgacagacaaggattatcagacatctgagaagagcatcctccatgaaattataaaaataaa

SEQ ID NO: 266 - DNA, 190 bp, Homo sapiens
aaataaaaagtaaaaaataaagctcatgaagtatctcagatacttagaaaaaaaaggcaaagatatagacaaatagaagggaaatcataagaaaagtaggacaccgatttagcagttccaatattgaaaaatagaggttcttaaagtcaaaacacagaaaacaggagaatgaaaacaatgaaagacatca

SEQ ID NO: 267 - DNA, 554 bp, Homo sapiens
tccaccctcatggcccagttacctcccaaaggccccgtctccacataccatcacagtggggattaggatttcaacatatggattttgggtaggacacaacattcagtctgtagcaccactgaatccacactcaatggtttgcagtgctaggggtttactcagtaaagtccacatcattactggattccataagaggggacctgatagaggttactggaaacagcacagagtctgagttatgtcattattgacataactttgggcatgtaatttaaccttttcagctctttgttttcctatccaagtaacagctgctctaaatatctcactgaacacagttgcaagggtcaaataagataaactgaaaatgtcaagaagggtcaggcatggtggctcacccctgaaatcccagcactttgggaggctgaggcaggcagatcacctgaggtcagaagttcgagaccagcctggccaacatggtaaaaccccgtctctactaaaaatacaaaaaatagttgggcgtgggtggtgcacacctgtaatcccagctactc

SEQ ID NO: 268 - DNA, 487 bp, Homo sapiens
gtggaagtacaccggagaaaatataggaaagacaatggttaaataagcaattgccaagagttttctataactgaagacaagttcaattgaaaacagacactgactcatgaacagaataaattaattcaaatttatgaaatgaaatcattctgaatctggaaaacactaaaagtaaagaaacttttaaaagtcccaatggaaaaaaaaagacgtaacactgaaaaaagctttgtagatacgtgttgaatgaactgttgaaagcaaagtggtggaaatttgtaccagaaaaacattgaaaccaaaagtggcataccaaagtcagtatcagacagataacttcgaactattataactcattctttgagttcttagatagaattaaatgtcatttctaaaaggtctgttttgttctttctcaaactcaccttttcaaaaatcatatgatattaactcattttgggcattatccttgcatttatcatctttg

SEQ ID NO: 269 - DNA, 511 bp, Homo sapiens
cagacatggaatcagttcaggtgacatgccttttctcctaatcctaactctaatcacctagctactctcccatgttacaaatggaaccaaggcgcacagaaggaaacaacttagccaagatgcttccacttctgaattggtcacagttgaacatgtgtgcatggaaagtataagaatagctgtatgtttatttgctcattcactgtctctggagaggggtttactttttcagcagtgaagggtcatggttaaggcctgcctggtaatggaagcctgcttatgttcaaaccttgattctttcctaagtgaaatgttcattctttcggttactagtgtgatcaatggctaataatctgaagtttatttcctcatctgtaaaatgagaataatattaggacggtaggacccaggacactaggtttttgtgatggataaatgtgttaaggtcgggcatggtggctcacgcctgtaatcccagtactttgggaggccaaggcagatggatcacctg

SEQ ID NO: 270 - DNA, 492 bp, Homo sapiens
ttatgcttaaactactttgagtggattccaagtacttgcaacaaaaacaacaacaaaaaacatagattgaaatagtaacaaggggactataatctaaatcttctatataagaggggatggaaggaggtaataataattctagcgcttattccttataccctgtagagggttctacagtttgtaatgtattttagcttacacaatcttatttgagtcttacaacaacctctgaacacaagtaaggctggcatcattatctgtatttcacagatgaggaagctgagtttcagagacaatacaaattatgctgaattgaaaaaaaatggaggccgggcgaggtggctcactcctgtaatcccagcactttggaaggctgaggcaggtggatcaacctgaggtcggagttcgagaccagcctgaccaacatggagaaaccccatctctactaaaaatacaaaattagctgggcatgggtggtacatgcctgaaatc

SEQ ID NO: 271 - DNA, 469 bp, Homo sapiens
tggaaaagatgcaatgttttcttagagaaaacacttggcatctaggtgaggggaatacatagaagagtaatacttagggagccaagaacagatgtgaaaaaatgagacaggaacctttcgattctttcaggcttgaggcaaagtaccatctgtcaagcacctctcttggctctcccaaaagaatatgcctccagctctccagattgtcctggcaattaaacttgctcccagatctgtcacatttatcatcgtaaagttccgaaaacagacttccatgggcactctgattttctatgatatctgttatttcatgactggccaatagcctgatggtgacttacccaatccacccagagtttctcctaatgaagttaatgctgtagcagccagaaccaatcccaccctaatcccttcttccagactctagaacctataagaagagatggaaggcacctgtgtctcagataac

SEQ ID NO: 272 - DNA, 482 bp, Homo sapiens
atggccttcatctcccccaaatcattccttcgttccatctgtcttacagatgagttaagacagtcatgtattccttttgagctgtgagaagtggtactgagaagctggactcatttttcatttaaaagtttctaataattcggtgtctacctctgggtcctcagcatcaatctggtttaggtggatgtctcctgtcgtgagccactggaaaacaacatcctaaattaaaaaaaaaaagtatataattaggacagttggttatttgaaaaagctgaaggtcaggactagagaattaaatcaagaagaatgataaaggaaaaaagattaaaccagtgattcagaaaagggtagccagccttgtcttgatgcaatcatatgagaactcaaaggttttcttcaccctaatgcaccttttatttttgagacagagtctcgctccgtcgccctggttagagtgcggtggcgcaatcttggctcactgc

SEQ ID NO: 273 - DNA, 541 bp, Homo sapiens
tggttaaaaaaataggacattctttcatttttatatcaggcttaatggaatgcttatggaactgtgtgtttttaaacagacatgactcaaaaatacaccaaaagatatgcaagttatagtgtcataccaccaatgggactatacacattctgaagaggaaatagcccatgctgtgtctaagtattcccctactgaaatgagagagaaacacctataagtgagcatttgtgatcttattaccacctcagaaatcaacatcaactgaccctcaaaaggagtggtttaagcaaagaacttttagagaagagcaatgtactctgcactgaccagaaggaaggtgttttttcagaattccctgttttttatactatgggtagagtatctcttttccaaaatgctggggacacaaaatgttttggatttcgtacttttctgaattttggaatatctacgttataattactagttgagcattcctaatcccataatctaaaatctgaaatacttcaataagcatttcctttgaatatcatgtcaacat

SEQ ID NO: 274 - DNA, 583 bp, Homo sapiens
gaaggggggataccccgaatttaaataaaatcgagttgtattacagttagggatctctcagttcccctccttccctgttggagcattcacttctctgagtgccgtttttttccaagtgtcaagtggcagtaatcatttctcctcctaaggacagtgtggaggctaaaaacaagttatgtgaaggtttcagctcaggctctcagtcctaaaaaataagacttattatgagagggtatagacgaggtggtctagaacacaggttttgaggtaagagttgggttaaaatcctggctctgctgtccaccagctctgccacctagggcacgttatttagcctctctgagcctacctcatggggtttgtaaagattaagcagtgggccaggcacggtggctcatgcctgtaatcccagcactttgggaggccaaggcgggtggatcacgaggtcaggagttcgcaattagcctgaccaacatggtgaaaccccatctctactaaaaatacaaaaattagccaggcatggtggtacacgcctgaagtcccagctactcaggaggctgaggcaggagaattgcttgaaccc

SEQ ID NO: 275 - DNA, 550 bp, Homo sapiens
gccaagatcatgccactgcactcctgcctgggtgacagagcgagactccatctcaaaacaaaaacagaaaattattttttaaaatttgtcttgaggcttataatctacaatagctaaacaattatgagatatgcatataattgcagtcaataacaatcatgttttagaaaagtaatgatacaggaaaatgcatatgatacacctttaagtgaaaaaagcaggaaacccccaattttataaaagcaaaaaatatatatgcacacatgtaaaagagttgaggaaaatgcatcaaagcatcaagggtgtctacctctggcctgatggtatcacaaatgatgctttttttcctttattataattatttcccaattttctacaataatcattcaaggccagtcatggtggatcatgcctgttaacccagcagtttggtaggtcgaggcaggagggtcccttgaggccaggagtttgagatcagtctggacagggtagtgaaaccccatctccacaaacaaacaaaattaggtgggcatggtggtgcgtacccata

SEQ ID NO: 276 - DNA, 480 bp, Homo sapiens
tgttttaattctagggtataactttaatatttacatatttatatttattccaaagatcattttattgttatttgtctaactagtacagtggatcttttgatcattaatttttagttttcctttcttcctaccataagtaattaggattaaaaatgtactttactgttataagtagagaaagctagaagcaagttcaattggattttttaaatttagccaaaagctgcttccttatatatgtttggcctaaagatttctccatacatagtgaactgtaactcaacctaatgtataaaaagactgtaacctactgttgtgtcagtcacagagtttcaggcaatcaaaggtggccaactgttctaactgccaagctgtaaccaatccagctgtttctgcacctcacttccattttctgtgcatcactttcctttttctgtccataaatcaaccctgcagcagggttgcagcctctctgaacct

SEQ ID NO: 277 - DNA, 525 bp, Homo sapiens
atacatgttttttacatcatatgtcaacattcattataagaatattgctctatgcattgccgtagactcaaagaatttagtcaaatgatcaaagagcccgtaacagaagtataatattgtagctcaggaaaaatatggagataccatatgaagaggtaaaagaagttggcagttctcagtaaagagaaaggaagactgcactaggaaagacacaaagctgtgtttgaaccttcacttctttctagcccatggagatgagcatagctgcagagctattcaaaatctagcgtctgtcaattcccttcctccatttacacctcttcctgcagaagtatgtttgtggtttttacccgtcacgggactgtttactttggagaaacgtcttctgtggactttgtatggggtttgtagttgcaggtgcatcttttgttctctcctcaccctgtttgaacttatatgaactgtcacactccccacctcgcctttttgaaaagtctagtcaagatagtccctttaaaaaataat

SEQ ID NO: 278 - DNA, 621 bp, Homo sapiens
tccttctttaacccaagaatgctttagtagtgagttttttttagcttccagcaaatgaacagaagggaggatgttattcttttgtgctttaattattttaattattacattatgatcaaagaactatgatctctatgatgtagattctttgaaagtatggcatttttgtggcttaatacaggattgttgcaaatatatatatgtatatatgctacatatatatgcatatattctatacatgctatatatatgtgtctataaataaactacagtttattgggtagtttacatcttcacttttttcatgctttatcaaactctgagaggagcatatagcattttctgattacaactgctgatgtatttatttctcccttcagtcctgttagtagctactttatgtatttgaagctatgttgatatgtttattattatatcttcttgacatattgttcctcttacaaaaatataatatcccaatattctgcttgtccactttgatgttttaaacttctcttttgtctgatattaatactaaatatttctataacctttctaactcaggaatagaaaaccaaacatcgtatgttctcactgatatgtgagagctaagctatgaag

SEQ ID NO: 279 - DNA, 605 bp, Homo sapiens
aatggtttttatatgtttaaacgactaaaaaaaatttcaatagaaaattattatttagtgacatatgaaaattatatgaaatcaaaatttcagtgtccataccacactacttcattttatatattgcctagggctactttcaagctacaagggcagtgttaagcaggtgtgacataaactatatagccggcacagtctaacagggtgtccaagcgagataatacagtcacaggttcttaggttctgtttctggttgggccagtaaagtctcttcctcaaccctctgtttcgcttattactagagacagactaaaaaccatggcttcaggctgctgaaagcctaaaacaaaacaaaacagacaacaacaaaatacggtgggttggataagcttagtctaaaatattgactcttgtctatttacaaggaaaaaaaagactgttgacctcagctctaaagactggctagcatgctccaggggaataaccttcccgggtagacaaaagttcctttacagcattctgtagctttgatctggggtataaaatgccagatctcattaaatgctgtaattaaagggagatgacagtaatttaactttaaaaca

SEQ ID NO: 280 - DNA, 592 bp, Homo sapiens
agtcacctcctgtgtgacctccttcccagtttctcccgtcgttagttacatactctgtgatgatcctgaacatctctttcataccacaatgatagaatttgtcatggtctggcttatttggtgctccctctgctctgttcaaccccaaatagaaggtgatgtttttggaagtggaggaggcatgtctcattcatctcagtctccctagtgcctagtttggtgcttcatgcctagtaaacacgaatatgggtttattaaaggtggacgtgggtgccaactctggctgcattccttaccagctatatgaccttgagcacattccttaacctttcgagcttcagtatttgcatctatgaaatggtgatcatgaaacctactcataaggttgatatgagatatgtaaaaacgccatgcacactgcagggcacagaggaagtgtgtgataaatatcttttaagggatagaataaatgagtaagctgacctggtgtaaaagcagatggtaataataaactactacctatagagtctgtaccaggcactatttagggtaaattatgtacgttacctccccatccttcaaatgccaccta

SEQ ID NO: 281 - DNA, 570 bp, Homo sapiens
tggaaatgataaccattttcttagtaaaactctcaatgacagtttaatgctgttagaaacaaaatattttattctctcataacagagaacaaattatatttagtttattggtaagaatgcttttgatctgctatacacatttatgaagatattagctttttattcagatatggattttaaaacatcttttggcatattcctgcctttgtgctccttgaacttgtgaactcagctaacttatctctctagcatacttttttaggctcttttgtaaacatttcagttttggcatgggaataagacaaaaatccaactgtaatctcagagatgtaatgctctgtggaaaaagaaacaaagcattatggcaaggaaagctttgggattctggttatttctgtatatccacaaaaagcatacaatttcaaatttcaatggccaaattatcatctgtctgtgattttattctgatcatcatgatcctcaacttatcagtataaagactgaactgggaattatacaacaggataactaatggggaaatagtcattgatgggaagttctgaccatatg

SEQ ID NO: 282 - DNA, 559 bp, Homo sapiens
tacagaggacttgatttttagaaaaacttaaaaattattaaatagataagatcatattcagagctaaatttaaccagaatctaacattgtttcccagatgaagagtttcacaaagccgactaactagtccagctgactccctaggctgctgggtagcagagtggggacatgtctgtgtgctgagacttggtgtgtccctgtcttgaagcccagggcctggccctgcactgccaggttacccagatgcagttatagaagaaaagccaaaacaacttgcagaaaataagtctgccgaaaagataaataatagtattccaatacatgaacagacttgtgacatctcttctctggggacagaacaagaggatacaggtttatatcccagcaagaggaattctgccgagaccagttcggtcagggagaccctaacccagcggcggtagaggaattaaagatacacacacagaaatatagaggtgtgaagggggaaatcaggggtctcacagccttcagaactgagaaccctgaacagagatttacccacgtatttattaacagc

SEQ ID NO: 283 - DNA, 515 bp, Homo sapiens
atatactactccaaacgattgcttttctcattccccttctgacatttccatgatatattttatatctacaccagttaagtagacttggatgtctgttcaatctacttttcaaatagtttttacattgttcccctaggttaacttatatttactagaaaaactgtatggaaaatatcatacaatatgtgtattccattctacaaagcctcagaaaagaactgtgttgtacctgatccagcctcaatttagagaaaacatatattttattttactgtttattgtaggtaatttttatttcaaatgggatttaagtaagaaaagttcaagctgcacaactggaaatatcttaaaggcttttaaaatgtttctttgaattagaaacctctttcttcacaattttcacatattcccatcttgtcctttttaaagcaattacacaaacaaatctcatttggccagatatctccctctggatactaatcaaattattcctttccttttaatctcaacatctt

SEQ ID NO: 284 - DNA, 506 bp, Homo sapiens
tatatatgtgtgcatgtatatgtatattttataatacacttactaggttctttttatttctatattcattgctttgcttaatctacaagtcattttttctatataaaagtgtcattatacctgacataaccgtatgtatacagttatgtgtgtgtgtatatatatatatatgttttgtcacctctttctcaacttccattcactgtgaatatatttaaatcacactttcctcgccatcaaggtatacacaccactcttttcgggacactgtcaatttctatgttgccagtttcaatgatcattgtcaattcttacactactgatctttcagcaactttttgatagaactgattgctccctttatcttaaaatcttttctttaagtgactccaaagacccttcttttggatccttcacattactggccaatcattctctgcctttattgctaaatcatcccccactttcttacctttaaatattggattgccctctggatcatttat

SEQ ID NO: 285 - DNA, 355 bp, Homo sapiens
aatattcacaaggattcattaaacatttcccagtgcggctgaacaaaacagtgttcaaacccccaagccattaacaaaaaaggaagaagaaatattacagggacgatatgcgcaagctaaaaatgccacaagcaagaaatcacttttattttattttttttcaactcaacttcatctccctcatctcactgatgtttagaagggccccagtgtgctgagtctttgtgaagacttggaataggacagccctgattaccattactatgattgtatttttctacttcatatacacaggaagttgtttcaccacagcaataatatttatttatttgtttttcagaaagagtctcactct

SEQ ID NO: 286 - DNA, 569 bp, Homo sapiens
tgtgctcactcctgccatccatcaggcctttggggcacgtgggcctggcagaatgagtgacctgtgaaactgaatttgtccacaggcctaccctgagcagtgagttattaaacatcagtgaagagcaaggaagggtatgttagtccattttgtgtttctataaaggaatactgaagctgggtaatttatatagaaaagaggtttatttggctcacagttgtgcaagctatacatgaagtatgctcagcttctgatgaggatctcaggaagcttataatcacagcagaggctgggcactgtggctcatgcctgtaataccagcactttgggaggccgaggtgggtggataacctgaggtcaggagtttgagaccagcctgggcaatatggtgaaactccaactgtaataaaattacaaaaattctcctggcatggtggtgggtgcctgtaatcccagctactcgggaggctgaggcacgagaatcacttgaacccgggaggtggaggttgcagtgagccgagatcacaccattgctcttcagcctgggcgacagagtgagactctgtctc

SEQ ID NO: 287 - DNA, 612 bp, Homo sapiens
tggtcttttggtttttgttgtgttcatttcacagcagatcagtgagcgtgtccttactgcctggccccagttcaagtcctggtgttagtgcttcggctttgaagtcagatgacctggggtcaagcctgtgccttgccactgggtggctgtgtggccttgggcaagctatttgctaaactttctgtttctgcatctatacaaagtgaataagactgaaaccttcccttcgtaaggctgttgaaggccaggcgtggtcactcacgcctataatcccagcactttaggggaccgaggtgggaggatcgcttgaggccaggagtttgaattcagcctggcaaacatagcaagaccccatttctacaaagaaattaaaaattagctgagtgtggtggcatgtgcctgtagtcccagctactcgggaggctgaagtgggaggatctcttatgcccagtagtttggggcaatagtgaaccatgatccactgcactccagcctgcatgacacagtgagatcctgtctccaaagcaaggaaaaaaggctcttctagaggactaaatgaggtaaaggaaacgtgtaactggggtataatgggcatgcagccctgggaagctc

SEQ ID NO: 288 - DNA, 447 bp, Homo sapiens
gtgtgatgtcggcttactgcaacctccccctcccaggttcaagctattctcatgcctcagcccctgagtagctgggaccacaggggtgcaccaccacacctggctaatttttgtatatttggtagagtcagggttttgccacgttggccatgctggttccaaactcctggccttaagtgatcctcccacctcggcctcccaaaatgctgggattacaggcgtgagccactgtgctcagaggcaaataatttatttacaagtgtggtacatgctacaaaggaaaatttctgaatactatctggaagggtgtggagggtggcagggtgggtggtcagggaaggtcttgccaaagaaggggctcctgagtggaggaagggatggtgaggagcttgctaaagaggaacattcctttccaatggaaaggtatgttcaaaagccctgagacag

SEQ ID NO: 289 - DNA, 523 bp, Homo sapiens
tacagtttctctctattttctgaagcactagattagctcccccagtttttttagcagtcacattattctcccatacatgtctatttttggtgtcttctatgtagaaaatatgttaacttgcttttcagagataacatcctgagacagttaaagaagcagataatttcataatcaaaatctttactctctgatatagctgaaacaacattgctttgagttgtattctggccccaaataatatttctaggagaaaaacacaagagtcttgggtcatcaaagacagaagagcttacatgtaaaactcctacagttttgctacttaaagataacctaaaccctatccaaccatgtttttatgaaggaggtccttaacctgaaggtttaaataaccgaatgaataatcatctaagtgttagattcttaaaaggtattttattgatgaattatatatataataccttttactatttatagtttatattcaatacctcttttaaaaagaaatgcatgagccggatcacga

SEQ ID NO: 290 - DNA, 600 bp, Homo sapiens
tgtcttcttccactactcagaaataaacatcatgttttgctctgtgtccttccagacgtttctgtcatataaacacactatgattagatttgaggttttgtaaaatggcatgacaatcataatccgtctgtaatcttctctattcatttaatgtgagcacctttcctcaccagcgcagataacaaatgccttacattctgtttttaacaactacttaagtttctgtagaatagagaaactaccatttttataactactgtcctctagatagatgtttagaatgcatacaactttttgctattattaacaatgctgcaactatggccgggcgcggtggctcatgcctgtaatcccagcactttgggaggctgaggcgggcagatcacgaggtcaggagatcgagaccatcctggctaacacggtgaaaccctgtctctactaaaaatacaaaaaattagcccgggcgtggtggcagataccctgtagtcccagctactcgggaggctgaggcaggagaatggcgtgaacccaggaggcggagcttgcagtgagcggagattgagccactgcactccagcttgggcaacagagcaagactct

SEQ ID NO: 291 - DNA, 594 bp, Homo sapiens
gagttgccaacctaccttcagaactaaattgttttcttgtgctaaggacactgagcactaaactgtataaaggcctttgtctttaaaaagactgtagcttctgaagttaggaaatgcagacactttctaagtagttttcagatatgtaaagcagaacagcttccttaacaaaacattgccatttaacataccagtaatttatcaacctttgttccttacagaactataaaaaactattctaaaattcatactgaaccaaagaagagcccaaatagccaaaacaattctaagcaaacacaacaaagctgcaggcatcacactaccctacttaaaactatactatagggctaccaaaaaccaaaacagcatggtactggtacaaaaatagacacatagaccaattgcagaatagagagcccagaaataaagccctacacctacaaccatctgatctttgataaagtcaacaatacataatggggaaagggctccctattcaataaatggtgctgggataactggctatccaaatgcaaaagaatgaaagtgaaccactacctttcacctcaaattaactcacgattaattaacgac

SEQ ID NO: 292 - DNA, 521 bp, Homo sapiens
agtaccacagtcttttaaattaccataatgagaatgtgcttattaccatggggatgggaccaagccattcataaggaatccactgccattacccaaacacctcccactaggccctatctccaacattaagggtcacatgttaacatgagacttggaggggcaacatatccaaagcatatcagaattgtatttcccagttccttccagaggcatgggcttctcacacctagagagcatggaagcagtaaaagaaaagctattccatgtccctcactcttcagtggtaggagcttttgcctacaaggcccttccagcatcaaaggcagaggcagtgtaggaagcaaagcatggcccaagtccctcttggggcttttattattctggcctctttttagaggaaaaaaaatgattttttgtgctgcagacaccatgtccaattaggtttgtatactcatttaaaacatcaaaatttaggccaggctctgtggcttacacctgtaatcccagctctttgggagact

SEQ ID NO: 293 - DNA, 475 bp, Homo sapiens
aagtactgaagatacatctccctgtgaagtgaaatggaatatttgatggctgatatttttaatagcacaatgtaaaggaaagagcttctataagcaggtaggcactttttttttcactaatcctagctctgctgttaccttgttgtaacataattttaaaaaatattatgaagtatcataaatatttaataaccttaaacatgttaataagtgtaatgcttattacaaacaagaggccttattgttattatttattggtagaattaatagactccaggcatgaaataaaaccaaaattatagtcttcctctaaacctcaaatggtaataaaccaagcccttaaagtaattgtttgaggattatgaaccatttatatttctaacatatatactgcttatttaaactgagcccttgctaaagccatatggatttttaaattttttttaagtaaaaataagatgagcagatcatgaag

SEQ ID NO: 294 - DNA, 532 bp, Homo sapiens
agaaatacatatattgcattacaataaaagtgtttgtatttacaatgtattttgaacaactatatgcccaggctgcaagtttcccaaagaaagatgtaatcgttggtttttttgtttccaaggataaccaggtatagatgtggtagaagctgtgttgtctaagtggcccgtagcctaaaaggtttgaagatactgctctaaacaagcagaacattaatttatttgtcggccctttgagttttcttactaatcctcttctggcctgaccatgtgcccctcccaagtttcgcacattcccaggtatctagtgtgttcagttgtctccctgcgctactcagcagctacctttttcagcattggccctagcttgcttctgtgcccaggaacaggaacagaagttttcttctcaggggtcccctgtctctcttagaccaagtccacaggcttttactacattaggccttggagtacatttcctgtagaatcaaagggccaacttacaaatgaatgtttggaacacaacccattcata

SEQ ID NO: 295 - DNA, 601 bp, Homo sapiens
attacctatccaatttcaacgtctttcaagtccgctttccccggacaactctgaaatgaaaaggaaatgggtttgatttccatttgctgagcatatttgttttaagatgtttaaccatttaagcctttgtgcatgaacagaagtacatgggcattaacaggcgtgttcactacgcaaacatggtgtgggacaacagagtccatgggtaattatgaagcagaagggacacacttcagtcctgatactttgcaaagcagagcaggtacactgtcacctacgaggggtgagctcacaccccaagtcaggggaattagaaataggaggttttggccaggcgcggtggctcacacctgtaatcccagcactttgggaggccgaggtcggtggatcaccctaggtcaggagttcgagaccagcccgaccaatatggtgaaaccctatctctactaaaaatacaaaaattatcttgggtgtgatgccgggcacctgtagtcccagcttctcaggaggctgagacaggaaaattgcttgaacccaggaggcagaggttgcaatgagctgagattatgccactgccctctagcctgggcacgagagtgag

SEQ ID NO: 296 - DNA, 567 bp, Homo sapiens
tatttagaagaattaaaatgtaaataatgaaattttaaaaaactactgcaagaaaatctataaatctatatctatagattaaggatatagagactcttcttaacaaagaatggaaaaccagaatccataaatatagatatatttgaagatataaaaagaaaatacatttaagtggaaaagacaccataaacagtcaatagataggcaacacactggggaaaaattattaaaatacgaaggacagaatattactatttttaatacacaaagaacactttaaaatgacaatctggaagtaagtaacggaaacactgacaaagactatgaagaggcaggctgggcgcggtggctcacgcctgtaatcccagcactttgggaggctgaggcgggtggatcacgaggtcaggagatccagaccatcctggctaacacggtgaaaccccgtctctactaaaaatacaaaacattagctgggcatggtggcaggcgcctgtagtcccagctacttgtgaagctgaggcatgagaatgacacgaaccaggggggcagagcttgcagtgagccgag

SEQ ID NO: 297 - DNA, 573 bp, Homo sapiens
actacctttaaatatcttatgcaatcgtataaccatttcttacttatggaaaaggaaaatacaagatgacaagatatggtcattgtactcactatttttgctattgattctttagataaaattgctattaagtacttgtttccatcatcttatctggcttagtcatttgtgttaaaagggagttcagatgcccatccaatcagtttttcatgatgaaattctgtttgttattccatagttatttttccatcagtggctgtgtttgcaaacgtgggcctggcttctgaaaatggttcaagcttcctaataaatcttctgtggtaatttttacaaactttctcttaaaggtcctgctttttcctctctaaacacttgtctcattctcctgctttttatttaaccatttggctgtattatctaaagtgactacaaaacagctaatatccttactttctacccttgaacagacagaacatacatacggagtgttgagctgtaccatcatctttacgaataatagcatcttataattcctggcataatatggggaaaatatatgctaaagtaagtcat

SEQ ID NO: 298 - DNA, 600 bp, Homo sapiens
ttgtgaggtaagttgtattactaccccttatttaaatatgggaaaaccgagtactagggagaataagtaaatgacccaaggacacatggctctaagacggctcagctaggattcaagcccagatgacctgggtttaaagtctacccacttaaacactataccatgttgtttggatgaagaaaaatagcatctaatgattgaagctactgtcagcaatgattattgtgtcattgtcattaaaattcttacatgccccagtctgaattcttttttgatccaggtaatttcttttactctctgagactctagtttttgcccaattgtttgcacatttgacatgcaagttttctaacaattctctgtttatcatttgaaaaggaatgatatgacatgttccctctgatgtgcataggttcatttatggagtgtccttctacttggaagaaacatcctttttctgccacactctttagaggtgtgatcaaatggttgacctttctagtaaaatcattcctcagagatactttctgactttccaaaaatcaactaaatatctcaaggtaagacagagtctctgagaaggagagaaattatctaaaa

SEQ ID NO: 299 - DNA, 575 bp, Homo sapiens
acaacatgcaagaacagatgaatatgtaagcagagagatataaacttgatgaaagcatcagaaaaatgtactagaaatcaaattcactgtaattgaaataaagaatgccttggaggagtttaaccagtaaactggacacagcccaggaaaaaaatcagtgagcctcaagatttatcaataaaaacatcccaaactgaaatggagagaataaaagagtgagggaagaactcacagaactgcaaacatgaacttacaaatatattattcttggagaattaaacataactctaccagtaattgtcagattaagcatgcagaaaatcagtaaagacatagttgaactgaatagcaccattaataaagtaggtctcattgacatttatagaatataccaactaggttataaaacagacattaataaatttaaaaaaaaggaaagcatacgaaatatgctcttagactacagtggaatttattgaaaattaataacaaattatagctgtaaaaacccccaaaatatttggagattagaagtcttaagagaaatttttaaaattttgaatttaatgaaaata

SEQ ID NO: 300 - DNA, 520 bp, Homo sapiens
atccaagactgccattgggttgtcacacatcatgtcagctggagatgccaaaaatttactggacacaaaattgcccacttcagaactaaaaatatatgccaaggatataataattaacatcctagaaacaattgtgaaggaatttggaaaggtaaagcaaaccaaagctttaccatctgatcaaatcatagcagcaggtaaaatagttaatacagttttgcaagaattatatgttaccaataactgcaatttggcttacccgatgaaatcctcacatctcagactttcacaggggaatataggcacaggatcccttcctaaacaacaagcatgtttttacttggagaatgtttcttcacagctagagcacatttttcctagagaaggtatatttaaaaaattgtttgacaagtggcaaacagaatcaaatgacaaggaaaatgaaaaatgtaagctattgatgatagctgaaaatgttttgactgaaatttcaataaaagcaaaagaattagaatattct

SEQ ID NO: 301 - DNA, 75 bp, Homo sapiens
aacaaacaaataaacaaaacaaaacaacaacaacaaaataggaacagaccctgtactgattcaactaatacattt

SEQ ID NO: 302 - DNA, 486 bp, Homo sapiens
ctattgaaaacattaacacttattcaagtaaaataattcaacaaaattgccaggacttgtattaggcatggagacacaaaaataagtagagacatggtgttttgcccttaagaaattagtaagaataagaagtgacaacatttttgaagtaggagacagaagaactataaaatttaggaataaagactgtaacagcttagtgatctatgcttttagtgcagggttgtttaaaagtagatgaaggtgcttctcctttctactatagcattctatgtataggacagattattgatgaccctatttccctgtctttgctattagattgcttagcaccctcatactagtatcagtgctggtatgtaacaggtatttggtaaaacaaacagtaaatgtttactgttctttgcatactgaacgagtattcttattggtatctaggtgcagttgagttatagatttcatcctgagaagcttagttattatcat

SEQ ID NO: 303 - DNA, 440 bp, Homo sapiens
ttcactcttgttggccaggctggagtatggtggcgcgatctaggctcactgcagcctccgcctcctgggttcaagcgattctcctgcctcagcctcccgagtagctgggattacaggcatctgccaccacgctgggctgtttttttgttgttgttgttgttgttgttgttgttgttttgtatttttagtagagatggagtttcaccatgttggccagggtggtctcaaactcctggcctcaggtaatccacctacctcggcctcccaaagagttgagattacaggtgtgagtcactgcacttggctgaaattagggctatttatcaaacataaatatatctgtctatattaagctatttgagttttatttttaagcttttcaatacatgtagttttccctttatttgaatggtcttataacctacaatgaggtctaactg

SEQ ID NO: 304 - DNA, 567 bp, Homo sapiens
tagtattacttccaagaataaatgtgcatatttatagggaaaaatcaaaacataatttttcattctgattctaaagctttcacaagaaagacatttatcatatccagttccattaaaatattcacttcttttaatccacttcaatggtgaaaagaaaaagtaaattacatttttcacatttccaaacaccatccatttccatgacacacacaggtatctccttgccaagaaaagtcagtggttgtctgttttggaagggaagtaagaaagtggcattttttatttcctgaagaaaaaaaaattaaataggtcaaatacataaaacttccatgaaaagagccacacttcatttcagccattaaagaaaaatgtgtttaaattccccaaaggaaccctatgctctacactgggaaaggcttattcactgctgactttcaagaaccagacatgacttatcacaccgtgtaaccaaggcactgaatggaactgaaaccccaaggagtcttcttatctttctgctttctagataccaggaaaaaaaagaagcagttgagattattcactctt

SEQ ID NO: 305 - DNA, 374 bp, Homo sapiens
catggtttttggcctggaatacctcctgtgagatatgcacttcccagttctctacattccccacggttcattctacatttttattgggaacctatggtgtgccagctctgttccaggtgctgggataaagcagtgaacaagagggatgtagttcctgccctcacgcatgcctttggccctaccccgtccacttgtcacgttgacttactgtcttggcccctgaaggcatttgcatcttcccttaagtcagagtgaggaggcccaggcagctggtctgaggagagcgccacagcttcacctggaacacctgaggtctgcttaaagacctggaccatttcagaagggaaccagcttccagctggcagaagtgactg

SEQ ID NO: 306 - DNA, 541 bp, Homo sapiens
aaggggacatcaatgaagctggaaaccatcattctcagcaaactaacacaagaacagaaaaccaaacactgcatgttctcataactgggagctgaacaatgagaacacatggacacagggaggggaacatcacacaccagggcctgttagggggtagtgggttaggggagggatagcattaggagaaatacctaatgtagatgatgggtggatgggtacagcaaaccatcatggcacatgtacacctatgtaacaaacccgcacgttctgtacatgtaccccagaacttaaagtataataaaaaaagattatatgggaaaagatgcttagaacagtatatacacatagcacacacccacggatgttagttattattatataccagcaataaccaagtgttattatataccagcaataaccaagtgttattatataccagcaataaccaagtgttattatatatcagcaataacaaactgttattatatactagcaataaccaattgcaaccaaaatgtaattaaaaatccaggctgggcgt

SEQ ID NO: 307 - DNA, 477 bp, Homo sapiens
gttgagactgcaatgagccgagatcatgccattccactctaacccgggtgacagaatgagaacttgtctcaaaaaaataaaaaaataaaaaaaaaatgtatcaaccaaagtcatggagaaccaaaccaagttttgtctacaaccatgattcttacagtttttggtttcaggactctttgcattttgaaaaataactgaacacccagaagcttttgtttatatgaattttatctatcagtatttactatattagaaattcaagtgaggaaaaatttaaatatgtatcaattcatttaacagaacatgagtaaactcattacatgtaaacataaatgtatataccaaaggaagtctacctgatgaactaatcttataatgcaatcaaaacaaaacagctgaccaaaaaacaggctggggcggtggctcatgcctgtaatcccagcactttgggaggccagggcaggcagatcacctgag

SEQ ID NO: 308 - DNA, 520 bp, Homo sapiens
atggaagtactaggcgataaatgtgctctgagcggattaatgggatttaggaatagcccagcgaactgggaaagggctgagcagctggtgatgagtgaatcacagggaccaggagggtcatggcccagagatagcgagtgccaggactctcgccgtgaggatccctgagggggaaattactgtgttccctcattttcgaaaagagatactttttccttaaaagatgaagggagttaggtattagatgtagacagagatctgactggctaccttttctaaaagaaatcatagtcattcactgaatcaaagccatcacctaagaggagttaaaaagaatcaccagcattttgaaacatgggcattagaaatgccagtttgcctaaaatgtagtgctttaataagtgtggaaggtgaaacagatcacaagcagttcacagtgtaatgttaaaggcattgctaacattagggcatattataggctgtaactttggaagcaggactttgactctggagggagatg

SEQ ID NO: 309 - DNA, 595 bp, Homo sapiens
agttttcatattccttagtgttatcacactggtgcacttactgttttaccattttcccttccgatttcatttttctgttagcatttactactatctaacatatattttactcatttgtctgtgttccccatcagaatataacttcatgaggggagggattttctattacacttagtgaaaagtaaatccctcaagtaggaacactacaagtatgcacagttttttttttacagtaagtttgcttaatggctagtaaactatctcagccagtacctgagtgactattctgacttgtatcatttaacaagaaaaaaggcctggcgcgctgtctcacgcctgtattcctagcactttgggaggccgagacgggtggatcacttgaggtcaggagttccagaccagcctggccaacatggtgaaaccttgtctctactaaaagtacaacaattagctgggcgtggtggcacatacctatagtcctagttacttgggaggctgaggcaggagaatcgcttgaacctgggaggtggaggttgcaatgagccgagactgcgccagtgcactacagtctgggtgacagagtaagactccatct

SEQ ID NO: 310 - DNA, 555 bp, Homo sapiens
tacaatagatctgtgctagaaagtcagaccaaacatgagaccaattaagatgaagcatgactttaaacatataatggatgataaatctaaaaacccattttcacaggaaacagtttgatgcagggctggaatggagtcattgtgtccagttttatgtcttggatccatagggggaaagttacgtaatcatattaacctaaatgctagttatttattttacttttcttatttattttacttttctgaatcagcacacaaagcatgaaaagcttaattgtatttacagaaaatataaaaataaaaccatttaaacaagctagagttgacagaatttggacaataggtgggaaaaggccatgtaaagttatcagcggggtcttcgctcataccagcctgaacgcacccgatcttgtcggatacagctgtcagaggctatgggacttaggagtggtacgcagatgtcatttccccgtgatagctcccgaaatagagctgagaagacaggtacagagttataaaggtgacctctaaatgaagtttgctacaggagatgag

SEQ ID NO: 311 - DNA, 574 bp, Homo sapiens
tagtatacatttagtatacatttatttctctctgctcgtttttgctaaggacataatacaatagaaaatagtaagaaggttacgaaagatggagctataaagttgggtggtctagggactttaggactcaggaacaaacaccacagatgatgacccctccacccatcgtgtcagtgggaggagtggcatcaaatgacccaggacagcattgccctcaccctctggtgtggtggcagtagagactgcagggactgtagtcttacaattacagcccaatgatggcaagttgaatccattctcaccccaagtaggaattggagacagaatctaagaaagtagggagctagagaaaatcacctgaataggggccgggcacagtgcctcatacctgtaatcccaacactttgggaggctgagatgggcagatcaccggaggtcaggagttcgagaccagcctggccaacatggagaaaccccatctctaataaaaatataaaaattagccgggcatggtggcatgtgcctgtaatcctagctactcgggaggctgaggcaagagaatcgcttgaaatgc

SEQ ID NO: 312 - DNA, 528 bp, Homo sapiens
tcctaccaaaatacctctctgtggatcaatgatttatataaagatgttcattgaaacattgtttataataataaaataatggaaacaacctaaatgcccatgaagagtacactggttaaataaatgtggcacatcatgtatgtagcaacattgaaaggagtctcatatttaacacacagaatggttcatagcaggtaatgggcttacaatagatataaatgaatgaataagccgttaaaagtaacttacgatatggttggttctgttcatccattcgttcattcattcagccagtattctgtggggaaataatggtgagacaacagatccaggcacttcccttaccaaacatatagcctattagaaaagatagtcattaatgccgggcatgctggctgaagcctgtaattccagcactttgggaggtcaaggtgggcagatcacttgagatcaggagttcgagaccagcctggccaacatgatgaaaccctgtctctaaaaatacaaaaattagccgggcatgatgat

SEQ ID NO: 313 - DNA, 440 bp, Homo sapiens
ccttggccgtgaaagaacaaccatagaaattaactatggatgaagatcttcaagcccacaatttctttgaagccaaatgcaaggtatgattattggcctactgctatcttggctttcttgaccctacttttttttttttcctttcattccccccttctactttgggcttttacagtacctgattaaaaattgtgcttttggggattcgcctgcaaaaaaaaaggctgcaggaaagctcattaccccagcaaacgctctatccctgaacgaattatacaatgaaaagctgcttctgaggcccaccaaaaaaacccaggcctttgtggaaatggccacccctgcagtgcaataaaggctttttatttgttaaaaaggaattttgtactaaaaacatttctctttgtttgttctcgtaaaaaaaggaccctcctgaaggctgc

SEQ ID NO: 314 - DNA, 408 bp, Homo sapiens
acttatacttgatttgtaaataccatatttttttaaatcagaagatcatacttcccccactcctttttctcgccgtctttttcctctggatgtattttgctggaaacatacactgtattctaaaccctttctactcctagtgtccaaagtatggctgggcatgggcggctttggtatctatcaggggtttattagaaatgcagaccctcaagctccacccttcgtctgctgaaccagactttgcattttaacaagaatcccaggggattccttttgcaccttaggtgtgaggagcactgatctaatgcaatttaattgtcaggtttgaatcatcatttgttacataacccagtggcagagagaagaataaatactgaaaacaggccgggcatggtggctcagatcacg

SEQ ID NO: 315 - DNA, 141 bp, Homo sapiens
agtgctgggattacaggcgtgggccaccgcacccggcccttgggtggctactttcatagaaaggcagctatgctatattgatatggaacagaggcttatttattaaataaattcactttagcaataataaactcattacat

SEQ ID NO: 316 - DNA, 433 bp, Homo sapiens
gatatagagcttacgatccctaccctcaagaatagtctagtgcgggaggataataggttatcttatgtgtaccatttagtgtgatgataggatctattacttcaaagtatatattatagactaaaagtttttatatgaactgtgtattgtatgatagtgtggggttcattgtcttagatgtgattgtgagattatggctatataggagaatgtcattagaaaatgcatgctgaagtgtacgaatgcctacaacttactttgagatggcgtgatcaaaagtctcactctattgtccaggctggagtttactgatgcagacttggctcactgcaacctctgcctcccaggctcaagcaattctcctgcctcagcctacacagtagctgggattacagtcaagtgccaccgtctctactaaaaatacaaaaattag

SEQ ID NO: 317 - DNA, 624 bp, Homo sapiens
cacagcccccacattccagacacacaaaacgatttactcttccccaaatccggcaggttccatgcctccaaactttgcttatgccggtccttcttcctgaaatatcctttcctccttgtctagctagtgaaacccatctaggcctagttcaaatgctgcatcctctaaaaggcctcctgaaccactcctctgcctgtctgcctgtccctcctcccatagcatcaccccatactgaggaataaatcattgtcacttctgtactctcatagaaacttaaatgtcattatactacatatagctctagattacaaatgtctagaggtcatctgtttccccaaacatctggtaaataactatttgtggcatgcaagttgtttataatgttttagtacacaggatcactttcagtgcagcctcatcttctgcctttaactattcccaccccaggttctgatctcctgaagagacctaggttttctaattaagtctttatctgggatcacattaatttgcccagacaccatggccagagcagcccaagccactccttcctgataattaggagcggggtggtactggagctgagactggattccagcttcaaccctcctggacccactggac

SEQ ID NO: 318 - DNA, 468 bp, Homo sapiens
tccattatataacacacacacacacacacacacacacacacaggcagtgtgatgaagaataccaaatagaaagacacaaaatcaattctggtaagtaaaagtgcacatttcttttgagattcttttctttttgagattagaagaggtgaatgcggggagggataagacattttctacttaagaacgaagaagtactaaacatgggggatttatttaacaagaaaagtcacatgattgagattagacatctctttctcaaggtgctcctgagagataatggctctcatacctatcattcagtgaaggcattggttttgtctggtaacataaaaatgaatctgaggacagacgttaactccttcatctctatctagccatgatgattttaagaataactctagaatatatgtgttcttttacattattggcatttctaaattttttaagtagtagagtctgtacgagtca

SEQ ID NO: 319 - DNA, 211 bp, Homo sapiens
agtccttattccctaaaacatcactgataccattaaagccactaacagagactgaactcagaataaaggaaatcatagagaaactagatcagcagatcccacccagacctttcacccatgtgaacaccaccaccagtgccacacacagcacagccaccatcctcaaccctcgagatacatactgcaggggagaccagctggacatcctact

SEQ ID NO: 320 - DNA, 611 bp, Homo sapiens
agataaatccatcaatgcttgttactgactatatccttttctcaagctctgccttaatagctgagcaaaagttagctcctctcttcgagagcttgccctactggggagcggtaaccaacagaagaccatcgcgccatcacggcagcttcctgctctgcctctgtctggtgcggtgtcagcaccttgtagatgccccagggattatttgcttcataaatgaatggactgtattcaactacctgaagttttaggtttacatatagtatcgtttgcattatctgggattatttgaatttcaaaacaaatacaagaacaaaagttgaagatagccagccagtttaaaatggaataatgttttaaactttccagctcttaaggataaagtagcttgggccgggcacggtggctcacacctgtaatcccagcactttgggaggccgaggtgggcggatcacgaggatttgtgagatcaggagatcgagaccatcctggctaacatggtgaaaccccatctctactaaaaatacaaaaaattagccgggcgtggtggcgggcgcctgtagtcccagctactcaggaggctgaggcaggagaatggcgtgaacccggga

SEQ ID NO: 321 - DNA, 517 bp, Homo sapiens
acttatacttgatttgtaaataccatatttttttaaatcagaagatcatacttcccccactcctttttctcgccgtctttttcctctggatgtattttgctggaaacatacactgtattctaaaccctttctactcctagtgtccaaagtatggctgggcatgggcggctttggtatctatcaggggtttattagaaatgcagaccctcaagctccacccttcgtctgctgaaccagactttgcattttaacaagaatcccaggggattccttttgcaccttaggtgtgaggagcactgatctaatgcaatttaattgtcaggtttgaatcatcatttgttacataacccagtggcagagagaagaataaatactgaaaacaggccgggcatggtggctcagatcacgaggtcaggagatcgagaccatcctggctaacacggtgaaaccccgtctctactaaaaatacaaaaattagccgggcgtggtggcgggcgcctgtagtcccagctactcg

SEQ ID NO: 322 - DNA, 578 bp, Homo sapiens
ttactaaattaaggattattatagcagatacaattctatatcaacatgtccctagagaaacagtggaagtaactatagcagaaaattttaaagcactgtaaattatactgtgccagttatgaagaatttattttcaattgtataatacataaatgatttaacaaaatatatcatttaattgttttaatttttgttatccctaaattattataaaaaatcttccaatcttaataatagaattttgtctttttaaattcaaaatcctattttaagcaatttggaaatctgtaaaagaagcattcactaaatatgctctatgctttctacttgtaaatgcattgcttgtaaaatattgctcattttagttgctgatctctagtgactcacacttgtccttctttgtaggagttcctatgtagtccagatttactgagtgcgaaaagggagcagctacattctgttctcatcaacaagctaacttagtataggtggctaatgttcagactatagcatttcagagtgagggaagatcttcagagaagaggccagctggaaccatttgttgcttatcacacatc

SEQ ID NO: 323 - DNA, 480 bp, Homo sapiens
aactgctacacaccagattaacatcagctctgtgctcatttgaccttctccactccaggcacataactgtggctgcaaccattacataaaatgtgtatctatcctaataaacaaatgaaagtaatattaattcacacacccctcatttattatgccaaataatggctgagattgatgtctgtggagtcacagtggacgtagtaagcagcttcaattcagagaaccaaaaatcttaggctgctgacatgttcaggaaaataaaattagttctatcttcctgtagtagaaggatgtgagcacaggatatgaggcccagagtagcaaaagctgagtccaacatgacatgcaggagttgcatgggaaatctcccatgccgtaagaaggatttgaaatttattctatgtggagccacagatgtaacagaaactgattggtggtggacagattgatctggtaatagtgtggagaatgatttgggtg

SEQ ID NO: 324 - DNA, 636 bp, Homo sapiens
gaattatttgcatctcatcactggaagtcccattgaacagcactactctggtttttgcccttgcttcacatagcgtggtgcagaaaatagcaattctgaatcacttattagaactggagtcttagatctcacccagaccaactgaatcggaatctgcgttatatataacaagattgccagggcactcagtgcatgttaggatttgagaagcgccgctgcatagtacacatccaccatgtttagtaacccagtccttcagtgatggacacctaggttcccttcactttgagcgtgccacttatgtatctatacaagactcctcttgaccattcacacaggagtgggaccaaggggcctaaaggcctattcttaatcaatttcaccgaatactggcaagtttttgtctaacaaagaagggttcgaccaggtgcggtggctcacgcctgtaatcccagcactttgggaggccaaggcgggcagatcatgaggtcaggagaccgagaccatcctggctaacacggtgaaaccccgtctctactaaaaatacaaaaaattagccgggtgtggtggtgggtgcctgtagtcccagctactcaggaggctgaggcaggagaattgcttgaacccgggaggctg

SEQ ID NO: 325 - DNA, 576 bp, Homo sapiens
gtttcttcaaggaaaaacattttatgagtaatgtattatttataccaataaataaatgaaaaatggaataaatacatgtccctgagcccattttctcaaatgtaatttatgtctgcattcaatttgcatggccattatagttcagcaaaaaggggagcataattttcatcaataagttttcatcttcttgtttttttatttgaacaatgaagagtgccatgcattaataaaattaattgtattgaccaatcaaaagatgggaaatgttgatgattgatgaaatgttaataatttcttgtagtaaaatagatgttatattgtgagaatttggtaagcatagccggaatttttttctttttttatttttacaagacgagattttattctgtttcctagactagtgtgtagtggcacgatcatagctcctgcagcctcaaattcaagccatcctcctgcttcagtctcccaaagctctggaattacaggcatgttccaccactccaagcatcaaattttttttaatcacatttctctatcctgcactgccacattttctctctccttaagagcctactt

SEQ ID NO: 326 - DNA, 603 bp, Homo sapiens
atagtctgtcacttaccattgtttctgcaagccaagggcattttttatgattttacagttacctaatttatagtttataatataggaaagttcatttattctctaactatatgagccttaaatatcttggagatttttcctatgatttgccccagaaattaaaagcaattcagggggaatgaagaatgaaatagagaaataaaggaagtctgaaaattcagaaaataaaagtatagtttgggcaaagcaactctaacaatattatcatgagctatctatctttttcaataacaataataactcatggtaaagctctatttttttctcataaggctactttgaaatgcaaacacaagcggaaatagtattagaaataagcagtaatggattgtacctattttactaaatgctaatgacaaatatgctcacaacgggcagatgtgtgccttaaaaaagtggtcattttctaagattattaaagtttctgaaagccatccttaggctttcataggctataactgcattaaatattaaattttaagatttttcttgactatggaaaaatcgtggccgggcgcagtggctcacgcttgtaatcccagc

SEQ ID NO: 327 - DNA, 632 bp, Homo sapiens
ctactttttttaccttagtaatgatccagttttcccagggcacagctacatttcctacagttgaatacataaaccttaagtcaacttgtgaatattggtgttagtactcatttcttccaaataatccctaagaatgtccaccattccattagtgtcatgattccaaaatacatgtgagcctggtaattgaagtcatcagtgtggcttcagtgtgcaaagccaattcctgattttttaaaaacagagatgatgtacagaaggcataaagagtaatcttttgaagaggtccttcacatcctttctaagttgtattcctaggtattttattctctttgtagccattgtgaatgggagttcattcatgatttggctctctctctataattggtggataggaatgcttgtgatttttgcacattgattttgtatactcagactttgctgaagttgcttatcagcttaaggagatttgaggctgagacgatggggttttctaaatatacaatcatgtcatctgcaaacagagacaatttatcttcctctctttctatttgaataccgtttattttataaaccactgctcaaggaaataagagaggaggcaaacaaatggaaaaacattccatgctcat

SEQ ID NO: 328 - DNA, 564 bp, Homo sapiens
ggatgagttcatgtcctttgcggggacatggataaaggtggaaaccatcattctcagcaaactaacacagaacagaaaaccaaacgccacatattctcactcataagtgggagttgaacaatgagaacacatggacacagggaagggaacatcacacaccggggcctgttggggctggggaactaggggagggatagcattaggagaaatacctaacatagataacaggttgatgggtgcagcaaaccaccatggcacatgtatacctatgtaaaagacctgcacgttctggacatgtatccctgaacttaaagtataataaaaaaaaagatatttttagaccatacgttctgggaacttagcattatacttaagagataacctgtacaattagaacattggtatagtacaaggtaatatccaataaaatcccgactgaatatattctagcgatgaattgtctagcaagaggatgacttgttacacatgctcggaaggaaacacttggattattggcaatggctctatgatgaaatcccattccaaataatcttagtatacctg

SEQ ID NO: 329 - DNA, 270 bp, Homo sapiens
gcatataggaaaataatgtccacatggtaggagacaagatctcaacaaagactgcaactcctagccttttacatatgagtcctatgtgaataaaagaattgaggccgggcacagtggctcacacctgtaatcccagcactttgggaggctgagacaggcagatcacgaggtcctgagtttgagagcagcttggcaacatagtgaaaccccgtctctactaaaaattagctgggcatggtggcgggcgcctgtaatcccaggtacttggga

SEQ ID NO: 330 - DNA, 618 bp, Homo sapiens
gtatccgtatgatccatatgaaaaacaaaagtaaatcttgaccccttcttcacagcgtaaacaaaaatcaattccagatggactgcaatctgatatgaaagactgttacaatagacttttagaaagaaacactgaacactgtcttcacagggagtgtctggaaaggagctgagggtactttcaaggagctgctgatattcctgattttgatcttactaaacaaattataaaatgatttcaatatatgtacccacgtaagcataaattggtactttaagacataatactgaaaaccttttacaaaaagttttgcagaaagaaagggtcctaatagcaaaggaagttcaggccgggagcagtggctcaagcctgtaatcccagcactttgggaggccaaggcgggtggatcatgaggtcaggagatcaagaccatcctggccaacatggtgaaaccctgtctctactaaaatacaaaaaattagccaggcgtggtagtgggcgcctgtaatcccagctacttgggaggctgaggcaagggaatcgcttgaacctgggaggctgaggttgcagtgagctgagatcgcgccattgcactccagcctggctacagagcaagac

SEQ ID NO: 331 - DNA, 107 bp, Homo sapiens
ttaataaaatttttcttcaagtatagctggagaaatatttatgctgtaagtcaagataaaactataatgcacttaatagttttgatctttggaaaatattttgaagc

SEQ ID NO: 332 - DNA, 456 bp, Homo sapiens
gtatattgtcactactttttcttcttttgagaagtgatttggcaagtaatttcaagatcgattttaaaaaaatcatgtttgtaacccaaacattagcttctggagatttatcttaagtaaataaaaagaataaaagttgcattcaagaattaaaaaaaagagacattacaaaaagaggaaaaacctcatttaaaatctccagcctttcagaaaaatccaaattctacttaaatggtagtccccattagttaatattaggcatataacagaattggtacatggtattaaatgctaattaaagaccaaattcaaaaaggaggggaaatgtatatcggaatggaaattagatagtcattgttctttggtacagtagtttcaattaagtgctgaaaccaaaggatattatttaaggtagagtaatggcaattgctttgttttagattccctgtctcctct

SEQ ID NO: 333 - DNA, 560 bp, Homo sapiens
agaacagacaagaagagataatcttcaataaatgaacaaaactgatagggcacattaaaagttaaaactttgctttattaaatgacaacattgataaggtaaaaatgcaagctacaatgtgggaaaatatacctgcagtacatacatttaacaaagcatgtgtatccataacatataaattattaatgtatacattaataatgagaaaaaaaattcttataaaaaatacatttataatgagaaaatacttattttgtgaataataaaaagactgtcaactcactaaaaacatgagaaaaagactaagtaggcaaatcacaaaatagtaaatctgaatagccaataaatatttttaaaaaggcattcatcataattagaaatgatggtgccaggagtggtggctcacgcctgtaatcccagcactttgagaggccgaggtgggtggatcacttgaagtcaggagttcgagaccagcctggccaaagtcgtgaaaccccatctctactaaaaatacaaaaattacccaggcgtggtggcacacgcctgtagtcctagctaca

SEQ ID NO: 334 - DNA, 614 bp, Homo sapiens
ggttgaaagtaaggatttaatgtttatttttccaaatggatagacacttgtcaacaatcctttattacacaacccatcttttgcccactgtttggaaatgcatgcttaagtttgtatataaattagtttgtttcttgacttattattttgtttcactaattaatctatttctaagtgtattcatttttgattgctgctgtaacaaattgtcaatagctaagacaacactgggcccggtggctcacacctgtattcccagcactttgggaggctgagacgggcagatcgcttgaggtcaggagtttgaaaccagcctggccaacatggcgaaaccctgtctctactaaaaatacaaaaattagccggtgtagtggcgtgcacctgatatcccagctactcgggaagctgagacaggagaaccgcttgaacacggtagacagagattgcagtgagccgaggtcaccccactgccctccagcttggacgacaaaagtgagactccatctcaaaaaatatttatatagctaagacaatttttgaaaaagaagaataaggtgggaggaattgctctaccatatttcaatacttcttatatagctacaggaatcaagact

SEQ ID NO: 335 - DNA, 622 bp, Homo sapiens
gaacttcagttaaattcagagagaagctagtaattatttctaagactcaaatgtatagaacagatctctgatattaaggataagaccctcaaaggtgacccaaaatgggtaattgtgggattattttaggaggaatcatcatatattcttactgctataaatacagtcaaatgtcagataaatatactccactgaaatgttttctaggaatgatgttggaaccaatgttggtaattttgaaagtcatggagaggatttcagatgatagaagtcgggcaaatatcccaggtttaacaaataagcaaatgctgagttccaaagctgctgtatcaatgagcctcatattgatcctgagcacaatttcagaaaggtccattaaatgggtctttggagagcacttaggataaaaggctggcagcagagattcactaagaacaatggtgccaagcttgcctctttgacattgttatctgactgataaaggtagtctatagcggtacacaatacagatatttccagggtaaagctgttgagctgctgtaattttccttgcctcttcactatcttctcctatagttgactcccaaggaaaagatagttgacttttaatctagaaatatat

SEQ ID NO: 336 - DNA, 561 bp, Homo sapiens
ctggctgggccctccacctgcccctcctggaccagcctgtcaccccttcttaaggggtctgcaaggccctttgtgactgatggctccacttcctttcttcccaacactaaccacccccaccccgccacgcagcagtttaccttcctgcttcctaactcctcctataaaccacatgctctcctacccctgggcctttgcacatgcttttccctatacctacagagcccttcacacatgcctcccctgagccttgactgctcgctcctccaaggacttggctgaggcacaacttgggcaggaagcattccaggccccctggctgcagagggcactgcctctgtcctcggagtcccttggactcttctatcccaccaccaacccccctgttgtaactcctgctactgcagtgtagatgcagcttaaatgcatctaaataactcacatctaataacttagcaacatcccccaagcaaggaaaaaccacctctattcatctccgaggaccttctccttgcccctgcccttcccactggaggtcaggctccgcatataaggaggctg

SEQ ID NO: 337 - DNA, 514 bp, Homo sapiens
aagacttcctctaaagtggaactagcccaacctcggtgtacccacctcgaagtctcttttatatgttgagtttctaattattgatgctagtaccataaaatgaggatacaattatcatggcagccatgagtgaaatttttgtagaacaggatttattaatcatctgttttactgttcaaaaatctattagctaggactttctgccatgtgtataagcctgatttgtggaataagagaagtttggaagagtcactatataggaatcttccttttaagagggcatatgtttctaatacagggattttagctgtattattttggtctatatcgtaagtgtgctttttgtttaagaaacagagaaaaatgcttccaaagcaacagaattggaaaataaaaaccttggaccagttacaacagcagagaataaggatcagagcaaattggcatgtgtacatggtatcaaagggaccagtatttcttcagaagtaaacctaactgaaaggtaaaagagtga

SEQ ID NO: 338 - DNA, 604 bp, Homo sapiens
tcctaacctcaggtgatccacccacctcggcctcccaaagtgctgggattataggcatgagccaccacgcccagccaaaaggcatacttcctaactactacatttggtatgtaatagaaaatgaaaacgcacagacacacacaatctcacacagaaacataagggaatcagttaaaatactcagacagtcactctgtacagatcacatagctcacagagcacaataccacagtcctggaatgtttgtcactaatccaagacaagacaaagaacatcacactaccaacagaagtcagcctcttatttcacactgattatggagaagtacaggagtgtcaattacaatgaagaaagtcaacagaaacagatgagacaggacgtcctcaagcaaatgtctttttcatcatagcagcctaacagccttatgcatccaagaatggttaaactactttgcccaaacaataattaagcagccaaccatgctaacccttcactaaaataaattatctatctagtatcagtcactgatacccctactcaggcaacatgttttatccatttcacaaagattccctgtggactaataataaagagagaacctcat

SEQ ID NO: 339 - DNA, 532 bp, Homo sapiens
gataaatgcttacatgtgcctcagagaatagatgtttttattcccgggaagaaagataaactttttcaaaaaacataaagattaagtaggatgcagtttccagctttggattctgacattcaggacatggggagggtgatgagcttctcctggaggactgaatttaggacacaatcaagttcatgatggaagcccttatgaggtagagagggagtgcatctcagctctttcgattaattaaatgattgtttgaattagagaaggtgtgggtattttgtgttgtttgggtgagtacattggaatggttttctagcattcctttgagattttccacagtataagttaaggtaaaagaacatttttacttgtttcagaaagcatactgaggaagctttaatgttactattaagtaggtagggaaatgaccaatattataaacgcagatttccagcctctccttttaatgctttcagaatgattccacaagaaccttgaaaatgttgagtatttatatttattttatgccctttta

SEQ ID NO: 340 - DNA, 543 bp, Homo sapiens
agaaaggtataaattacagggaaatccagattacatcaatgaggctttcactgttgttgaaaaacttctcatagaggaaacaaaaaagacccaaataaaaatcacaaaggctctttttggctgtcacacagatgcgtacaaggatttatattcctgcacaatgaaagcattcacttacaaacttgcaataaaagtgccgatcaaaacaaatcctaaaaaacacttttagttttgtttatcacagttgatcaaaggctggctggagtccatggaagtttcacagaaataaattacatcaaatgaattttcccaatgaattctagcattgggcactatgtagtatctattacttctgaccttgatgaccatttcagggaaatactgtctttaactgagctttataattcaacattatccatttaacttaattcttcaggatcatttgaattaatgttagccagtttgtcctaatatctgtaagtaacatttcatgatatgccaagtaacatattgtttagcaaaactagtacagtttgtggactt

SEQ ID NO: 341 - DNA, 547 bp, Homo sapiens
gtatcactgaaaggagtgatgagcagctaaaatctggtttatcataggtatttcatgcaacaaaatgacaagtatcaactcattttgcaacattgggtaaaacattgcccttctataaagggacaatgttttacatggggcaatgttttacattttcatggtttccaaatgtaaagaaaatatgtaaagatctatagaattgatcagaaatcatagccagtgttccataaaagtatatatgccatgtacaaatagcagtatagtaatggattatatgtatgatatgagaatgttaattaatcataatcaaccctagggcagtcccctccttcttgacagcaacaaaataaatttgaacacagagtgtcaaagaaggcattctaagaaggctaatgacctgaaattatcttctttcttttatatgaaaatcacttatacaatctgcctctgccaagtcaaatgacaatttgagcttaggcaaatgaagtcttgagttctggggaagtaagagctggtattgtattctctacaattgatattctctact

SEQ ID NO: 342 - DNA, 278 bp, Homo sapiens
cttctcccatcactcttctctaaaactgaatggggaaaggagggactggagtgtgctaccctcaaacccataccttctgattctaaacccagtgaactggcataaaccagacaggagactcactgccaagtcacttctttggagaaagaatatgggcttcactcttgctttcccttatattagctgcgttgcctggagtgtttaacctctcaaagcctcattttcctcacatgcaaaatgcagggcttttttttttttccattggctcttttattttc

SEQ ID NO: 343 - DNA, 529 bp, Homo sapiens
atataccgaagtgttcatgaaataaagcgtagaagttagtgcacgaatttgttctgggcgtttgttttagtattccagcattttgtttctattgctaactgatgagaaatgctttaaacacataaacatgttctgatgtgtatgtgtgagacttgcgtttcccaacgttgcataaaataagcacaaataagtgtaaaatagtgtaaaataactgcaaatagctttatcttacacagaaagacaggtgaacagctcgtctttaatcttaagcataacatttgttttggtaatcttataaagattgcttcttgcacatttttaaagaaaaaatgtgaaattaaacagattattaacgctatactagtcaatataccatatagtaacttcttgaaggacccttagcacagaactaagaaatgcaaaatcgttcttatttccgtcaagataaattttgacagaaatgtagcatttgaatctactcaaattgtatttccaagtccagtgaacggtagcaatgcacagttttatt

SEQ ID NO: 344 - DNA, 547 bp, Homo sapiens
actgaccaaagggacaagtccccaggccagctctctacccttctttgttcagagctagagccagagatcaatatgggcttccccagtccctgccccttctaccttacccaaaactaaaaggaagaatcaacactgtgtgtctctctgagaagtctccctcaggagataaaagacccaaagggctgacccctaagctaacagcttacatttaaggaagaaaaacaatctgcctgcacttttcttagaatttagggaaaaaatgagaatttaaaattcaatttcatgtatcagagttctccagaatacagccaagtggaaagaacttagtcccaaatgaaaaagttgagcagaaattcttctctcactcgttttgccggcttggaggtcagactggaggtgtcctgaactagaaccagagcataggttctgacccaagaaggacactgtctacttcccaggcatccctccttggctgggaggagaggggaggatgagtccattggaagctgagaattgtggaagctggggatgggagttttgagatgga

SEQ ID NO: 345 - DNA, 603 bp, Homo sapiens
tacatataaaatgcctcacaaatcttgggttaagaacttctcctctaaaaagagtaggaagtcgaaattgaaaacaggagcctatttactcaatcatttggcttgaagttgaggcaaatgccttatatataggattgtcgctgaggtctccatcttcccaagcaaaggtgccctctgcactcttcttgccaaccaaaccaaaccaaaccaaacaaaaacaaaaaactcaagaaacaagcacaagcactccaattcttgtgcccacatcacagtacattcaaccttaacaccttagaggtttacttatccttatccttaaatgttttctttcttgtaggccactaaggttgggtatgcttctagtaatgggaatacatggggctgagcctctacttgcctgcctcagagcacatattggaaatttcctagtaccaaaatctgatccctagtttaggaagaagtcaagagaccatgttggaagataaaaataaacgtatataaaccagaacaagattggaggggagaggaggcaactgggagacagaacaacttgtgaagagacaaatacattacagaaattcataaagtgtgaaagtaatacat

SEQ ID NO: 346 - DNA, 625 bp, Homo sapiens
taattctttgttcttccccaaggaagggtgaggcaaaaactgacgctatttctactatcccaggaaaagagatggccaacctgccttttaggaaagaattaattgacatgcttatcctaagtcagttctatctccatctccttgctaaagacagctggtacaactggtagttaaggcagaggccatgagtgtttgcgaagggctgttgtgatttcttttgggcgggaatgcctccttaatgtggtaggaaagaatgacaaatgagccagctttggggtacatttagaattgctggcatcttgcttttgtaaatgtcaaattgaaacacatcaaaaatttcatatcaactctgttgatcaaattcttcctaaagctgggtgcagtggctcacgcctgtaatcccagcactttgagaggccaaggcgggtgaattgattgagtccaggagttcgaggccagcctgggcaacatgaagagagcctgtctctacaaaaaatacaaaaattagcttgggcacggtggcacgaacctatagtcccagctacttgggaggctgaggtgggagaattccttgagcccgggaggtcaaggctgcagtgaaccacgatcacaccactgtactcca

SEQ ID NO: 347 - DNA, 360 bp, Homo sapiens
  misc_feature 161: n = A,T,C or G
ctggctcctgggaggtggaggctgcagtgagccgagatcgcaccatgcagccgttccaggaaagtgtctaccaagcccgccttctatgctaatgattcccccaaaatccattctaattctgggaagacacaaaaatatctttgtgtcctgctcttcctcanagagagaagagaaaatagccactcagcaaccaacagccaatgtttagaaaagaggagagctggctccctacatagctggtgaagtcacacccactttctaaacaattccacatcagtgctggatggttcctccacccatgcatgaaactagaagaaacagagttctaacccctgaatgttcctcattaactcacacaat

SEQ ID NO: 348 - DNA, 629 bp, Homo sapiens
gggggagtttcctgcgagctcggcttcctcaacatggctgcgcccttgtcagtggaggtggagttcgggtgagtcacagagctggggcgccgtggggatggattgaagtcgtcgggcccagaattcctttccttctgccgtggggcctgacacggccgaatcactgggtgtcccagtgcccgctgtgagctacgctacccgcctaggagagtctgagaggccagtctctcttggcagtgaggccgtctgtccggaaatagaggcgcacattgggagggaaatgctctctgtgtaccactcggtgccctgtgctccgccggagtcggaggtcgtgactgttagcaggcagcctctctctcctcttttccattcctatctcggaccaatcccatctgtttggcatctgagctcctagaacctagaaggaccaccctccacccgctgatttcattctttgggcagcagtttctttttacactgttattaaggtcttgtttctcgtgggatgtagtggccagggcgggacttttttctttttctttcctaagacttggggatggtaaacagacctgagcctccttcaggacagtcagtaaacttgctgattgccttctgcagaactggagtca

SEQ ID NO: 349 - DNA, 320 bp, Homo sapiens
gcataagcaaaagtttcatggcaggagggagaaattagctatggccagagtatagagaataagggaagtatgatttgtgaggaggctgtagaagaattaaggtcaggagcacacaggatgatgtaggcccagtgaagtgcgttggtctttattttgaaatcagtaggaagtgtcctggttttcaaaggcactctgcatgagagattaggttggagtaggagcttacagtgtagtccaggagattatttgatttagggaataaacctgacgggtcctattactaagtgagagagtgaaagatgtccagagtaactcctgag

SEQ ID NO: 350 - DNA, 572 bp, Homo sapiens
ctccatttacagttaagtaaactgaggccctggaaaatgaggcactttagttttaaaagctgctaaagtctattgctacatcatgcaggtaagtctttttacttatatttgtcatatcactcttaacctttcacaaagctttaaaattaaaataataatgaatatacctagtacttttatgactatgttaacaattcatacctgttcttcctaatattctacctaggtgatgtaatttaaagttaaacagatacagataaactttgctgaccctaaaattcccttcctattgttagatatgagttctaaattttctcttcaaagaatcaatatgtcagtatgtttaattctttgccttctacttttaaacttaacttcctcataaagcaacctttttcaattacctactccaccctgactcattccaattacctgctctgtcataaccatttttcccgccaaaccactcaccccgtcactctctttaaattagccaatcggaattagtttagcccatgcggtctaaccctagccaataggggaacaacacagcagcacgtgcgtcagggata

SEQ ID NO: 351 - DNA, 549 bp, Homo sapiens
gctcatcctccagagtagctgggattacaggtgcccaccaccatgtccagctaatttttgtatttttagtagagatagaattacactgtgttggccaggcttgtctcgaactttagacttcaagagatctgcctgccttggcctcccaaagtgctgggattacaggcatgagtcactgagcctggccagcctctgtgttttctagtgaaatttgaggattggaatttgcttcatgtttaattaagaaaactcttataatcccattgaaaacataagattatcataatgttgggtaaaggctgataatatagccagataaagaaataaaagggtgaaacagtaatgaggaaatgagccccttggtcttaaattttggaacgtattgagtaattgtttaaagagaaccagattggctgggcgcagtggctcatgcctgtaatccaagcactttgggagaccaaggtgggtggatcacctgaggtcaggagtttgaaatgagtctggccaacatggtgaaacccccgtctctactaaaaatacaaaaattag

SEQ ID NO: 352 - DNA, 552 bp, Homo sapiens
ccctccctctcccagtagattagttcatcatatgctcatttcttcaaacctaggcattgaaataaccttctgttctctctccttttaatcctttcttcctggtatccattctgcagttttcaatggcacctcaaccaccaggaatgttaagaactgatctacagtacttcccttaacacagacctaattatgtcacttcctccaaccccaaagatgtagtctaatgggggagacaggcatatagatacataaaaatgtgtgtgtacatatatgagtacatattcacatgggcacatgtaaagtattaatactaagggaggataaatcagaagccaattcattttgcctgccataagccaaagaaagtttcacatagctgatgatagctaggtgaaataatgcctagaaaacaaatttaaaggccgggcgcggtggctcacgcctgtaatcccagcactttgggaggccgaggcgggtggatcatgaggtcaggagatcgagaccatcctggctaacaaggtgaaaccccgtctctactaaaaatacaaaaaa

SEQ ID NO: 353 - DNA, 532 bp, Homo sapiens
tctgatctgagaactgatctgttgtctacacacaaagccaatttcaaaagagtttcagagtaagcacgtcagagccaagcacaagggtcaagtattaggtgtaaaaaagaattatgaatatttttatagctttgtacatttgctcctaaatgtacacttccagataatttgaaacgatgatgttggcactgctcttaatcaagtttcatgtccagaaagccattttgaactccccagaagggcaggacgtcctgccactgtggttgcagggccacccacaaccttgtccatttctccaacaccataacagcctcaaggatagagttttccacatattattcacccaacacctgctacagtccctggaacataagtggaaatcaatacttgcacactgaataatgcagataagggagactggtaaataataaaaagcagattttgagtctaaaggaatgcattgctcacagtcaagtagcaagaggtaaaggaagctgccattaaacatttctcttctgctatgagacctcat

SEQ ID NO: 354 - DNA, 436 bp, Homo sapiens
ggccatactctcaaatacatgtaaacttcctttaattaaagggagaattgtatcctctgtgcccattgcccatatttgattgtgttgctatgtatgggacctaggttccatccgagggaaatagttatatgaaatctaaaaataatttgtgcaagatgagaacccgtatggtccacaggagacctgagaatggtcaagttcattgtttcagagctctggttagcaaatatccatttcccttaagaaaagtgctagggaaattcttcttgaatctgctgtgttttctattttcaaagagtaactacatttgatcaaagaaattggcatctgtgcctagcctcctgtctatagccatcagtatcacagcttgattcttttattttgaagagaagtagactgtaatcatagtgcttattgtaggttgaaattcatatca

SEQ ID NO: 355 - DNA, 484 bp, Homo sapiens
gcatgacagtgattgagacaaattcaccccctctggtgggcgacttagagctcctattttcatgggggtagagcaatggctcatacactcagactggactacatcctccaaaagactgcatttccaaagaatcctaaccctggcccagattctgttcttgaggacctctcattggagaaaagtggtgggaaaagagagtcttgaaatgggctagaaatagctcaaaacatctgaagccaaagcaatcctttcaatagagattactgagggccaggcagggtatatgatccttgaaataaaaaacgacaataaaactacagtacctaggagttggtctccttttcataatcaccatacactggcaactaaagaatgttaatgaaaaaattatccgtaaaacaaaaacaacaaaaaactttcattggtgcaagtctaaataatcgtggttactctgttcagtttcaataatacatatatgtaagct

SEQ ID NO: 356 - DNA, 635 bp, Homo sapiens
ctaggacactatatgaacttttaaatattccttacaaatcagttcgttcttcttcttttgcagagcagaaagatatcgagggtaaattaagacaattacaagaacttacaaaatatcagggtttcacatctattgaaaagccacataaatgtagaatattttctgggtatattggaagggaaatgaaaccaaatcttcttctttgttacagttatttttattacttcttgtcatttagtagttttgtgtatttttgcacaatgtaaggtaattcaaaaatagaatatgaaatgaaagtatatactttccatacaagtctatgtaaaatttctatatattaaagcactgagaaattattaaaacatgtttgcatttaacctgtacttaatattcaactctgtaactgaaagttaagttagtaaaaattttattttcacatataaagcataattgtaaatttttcctcccatgtttctccttttatgatatgtttttcaaaatgagtacttgaggaataaagatatagaccacataggcatttctctctgcttagaagagacacatttaggaaatgagaaagaaatgaaccaaataaggagttttcacaagtgctctgaataaagcataggatgctt

SEQ ID NO: 357 - DNA, 601 bp, Homo sapiens
tcatcaaactaaacacttaagatcagtgtgttttattatatgttaattagccctcaacttaaaaaaaaagccacacttgttatgggagtccctaaaatctggaagcatagacatatgtatgtcatcaaagatatcttcaatctgatgttataatgtctacaagtcccacacttgacgatgccctagattgagttacattattggagactgaatgtatataatattgtcagtctacagcatgagttcaatctatttcaacaatagggattacctgggccagacagacccaggtgaacagcccctagtacaatgccagtatgacaatgtacataggttttgcactatggttggggggaaattctggtgtttttaaaaactggattggaagagaaagacctaagctgtgttactcatccactcggctcccttgagcaagtttatttccccttcctgggcattagatatccagatgtaagaggagtaaggtgaacaagatgatagctacatcttaaactttatgactctatgttgaatatctccagaaaaactccgggtgactttcattataaatcatataagtgagacatcctataaatgaaca

SEQ ID NO: 358 - DNA, 546 bp, Homo sapiens
ctgaacgtacatatgaaaaacaattagaaaagaaatggaatgcttcatgaatttgcatgtcatccttgtgcaggggccatgctcattttctctgtattgttccaagtttatcatatatgttgctgaagcaagcatgccagttatctattggtaaaaagttttggaataagttttctagtaatggcagtggtctaacctatgattaatttattttttaaatactaagacccattgcgccccatttagtgataagaaacatgacggtatctcctcagatactttgtttttaaagagcaggctaaagagattattgtattctgttttttctgtaaattgcgacatggtgcattcaaattagaactggaggcaggtatggttactcacacctgtcatccctgcactttggaaggccaaggtgggaggatcccttgagcctaggggttcgagaccagccaggacagtgtaacaagatcccatctacaggcgggacacggtagctcacgcctgtaatcccagcacttttggaggctgaagcaggcagatcac

SEQ ID NO: 359 - DNA, 399 bp, Homo sapiens
aagttacttctaataatgttttgataaacactcttataaatactgtatatcttttcaaacttgtgtgaatttttgagggtaaaagaccaattcattggcatactgcttattttataattcgggtaacacagtgttatcaacatttacatattctgctatttaattccccaaatattcactcagcagtgaaagcgcagcgttagatgttatggggatttcaaggtggggcaatgcatcctccttacctacaagaggtcactctctgatagggggattaggcatgcacattgactatagtatctttagttttatttatattcccctttgtttcaaacaggatttgggattttttacaaagatgcatatgatatgacaagataaagtatatttagtataaag

SEQ ID NO: 360 - DNA, 611 bp, Homo sapiens
gattttacacagccacaagagccagttaagaactcacaggtacttttccagccacccagataggagagatcattaaaacagtgcattctgtgctacctgacacctattgggacattcgtcatgtcctcaaatacaatgcttcaaaaaacgctgctgatcttgatctctttttcagtagtaacctggatgatttttataatttctcagaacttcacaaagctttggtctgctctaaacttatccatctctgtccattactggaacaactccgcaaagtccttattccctaaaacatcactgataccattaaagccactaacagagactgaactcagaataaaggaaatcatagagaaactagatcagcagatcccacccagacctttcacccatgtgaacaccaccaccagtgccacacacagcacagccaccatcctcaaccctcgagatacatactgcaggggagaccagctggacatcctactggaggtgagggaccacttgggacagaggaagcaatatggtggggatttcctgagggccaggatgtcctccccagcactgacggcaggtgcttcaggaaaggtgatggacttcaacaatggcaccta

SEQ ID NO: 361 - DNA, 457 bp, Homo sapiens
cgtcccccaggctggagtgcagcggcgcgatctcggctcactgcaagctccgcctcccaggttcatgccattctcctgcctcagcctccctagtagctgggactacaggcgcccgccagacgcctggctaattttttgtatttttagtagagatggggtttcaccgtgttagcgaggatggtctcgatctcctgacctcgtgatccgcccaccttggcctcccaaagtgctgggattacaggcgtgagccactgtgcccggccaatcctgacaatcttaaatgtggacttaattcttcaggtggtctgttgcgttctatgatcttgttgctttctagttaccattttttatatttattttcatttgcttctcttctctttctgctggtttggaaattagatgttttacttctggtctaaggttaagaaggacatctatttaaagtccaaagttggcc

SEQ ID NO: 362 - DNA, 600 bp, Homo sapiens
attactggacttgtcaattatacagtcaataccaatcaatgaaaattaatcacttaagataccatggcataaataaaaattctctttttacaaataattatcacaattttaagattattcttccatatgtggaaataaatcctgcagatactgaaataatttggaatattaaagaaactaagatttgctagattaaaattaaggggtaagaaggatgattattactattattaaaagtacattaaattatatgtaaatatactctaacacaacatcccaacactcaaccatgatccctaacatacagaactgactcagtgctttctgagtaaatactagagtatccagtaaataataaaaccttacaataatattctgaaataagtattaggttaaatgagatgctacttttatcttgaacttattttgattcatttgaataaattcttatagaaaaaaacatttgggaactgtttctagaaaactacagagtgaaaatattcagtatttaaagacaagcctactgtttaaaatttttcctggtattatttttattataataactgcaaactattgttctatgtcatgtcaataagcact

SEQ ID NO: 363 - DNA, 520 bp, Homo sapiens
gtctcctggttggacatcatctggatgttgttcctcaactgagtaggttgtttcaatctctcctgacaccatcttcttggttcctgctttcattcttatttagtctatgatcctgataccggtctcctggtcccatccctcgggttgttctaacaaactagaagcgagaatttcaaatatgtgcaagtaagtctgcaggacatcttcccaccaagtaaaaactagtgtccatctgacttctccattgtttcttgataacaatatctccctcgactatcttttgccattcaatataccattataaatcactgttaatccagaaatcaagtcagacatgaaagatgtgtcattttaaaaagaagcaaatgcatgttatataaaagcgatttggtaaactctaagacatacgtgttccagttgattttaagaaaggcacactagccgggcgcggtggctcacgcctgtcatcccagcactttgggaggccgaggcaggcggatcacgaggtcaggagatcgag

SEQ ID NO: 364 - DNA, 613 bp, Homo sapiens
atgtgttgcctgcattatgccactttcactcataaactcagtatggtgctagctgatctacagagagaggaaggaatatacatatctctgctaagggaggagctcatacaccctacaatctaaattgattaagagcctggtaatttatatattgcaacattgaaaaagtcagttgcttctgcctccaaccaaagcagtagagaaatagctacaaagcatcaaccttgacatcaaagaagactaacacacttgctgtgggaagtctgtgaaatttgagggcacagacaagactaagggtattgcccttccaaccaaccacagcagttcagatttcctcaatgtagctgctgtttggttgagagaaaacaaagaggatagtaagtgaggcattggagctatcagcattcaaagccttttctacttaaaaatctttcccagttgggcacggtggctcatgcctgtaatcccagtactttgggaggccgaggtgggtggatcacgaggtcaggagattgagaccaccctggctaacatggtgaaaccccgtctctactaaaaatacaaaaaattagctgggcatggtggcgggtgcctgtagtctcagctactcggg

SEQ ID NO: 365 - DNA, 578 bp, Homo sapiens
gattacaggcgtgagccaccgcgccaggccaaaaatggtgacttgtatctcctttccttctggttcttttctggttctgccacttaaccctgagggaccgtgagcacgttacttagcctctctgcgccttggtttcctcccttaggaaacggggataatggtacctgtcttgtaggctgttgtgaaagttaaaagaggcctaaaggcaaatgctccattactgctaccaccaccgtcatctctcatgtctagtgactgcgcgtccgagtgcagcaacgggattcccttgcgccctccaggggcagctctccagaattgcaggctgccaagcacaactcaggcgtccctgaaggctgaaagtgaccaccgccctgccctgaaataaaaaaaattaatccagctggtttaagtcagaaaagaattgcttgaccacagcagccacatgctgtgctctcccctgggggcttctcaagtggacggctccttcggaagccttcaaactgccatggcactgccacctcctgagacccctggctacttatttattcaatactgaacacccgttctatgccagactc

SEQ ID NO: 366 - DNA, 649 bp, Homo sapiens
caagatcctgtttctaaaagcaacaacaagaacaacaacaaatacctagaaagtgttagctaaaaatgttaacatggatggtgggctgaatggtattaaagtaaaattttgggcaatactgagcaaaaggcagggggccaagagtaaaagatgaactgggcagcccaaagagacatttaaggaagaaagggcctccatcctgggaagaggtgtcacagttgagcttcacggcccaagtcaatggctattacgtcctatatcatgagtgtactcaatcactagataaaaatgtcagaaaacccaagatggaacagctcaaaggacaaaatgcacctcaaaatattacaataagtatattatatatttttacatatttttactcaaaatatccagaactgtctagacattcatccttttctttcctagccttttaaataatatcaaagaaagactgtctcttctttcttttctcacttcttacctgtcttttgttcttcagatttacagggtgagaagaaagtgggagaagtaaaaacaattcagacaagaatcaaactggcctctaattagtcttaaggtaaaactggtaaaccaaataaagtatgtttagagatctgaaatccaacaccaaaacactataacacatgct

SEQ ID NO: 367 - DNA, 108 bp, Homo sapiens
tagtagagttcaccctgttttatggattccagtttcccttttacaccctaacagtatgagtatctgcgaccaagtgcagagggggagctttagaatacttttgctact

SEQ ID NO: 368 - DNA, 342 bp, Homo sapiens
attcttcatatcattcaattttaattccttaattagctcatgctatttacttcataattgtttgctccccactccagacataaaacacatcagagtaggatctttatcttgctcatcactctatcccagagtgctcgataaatatttgttgattgaagtaccatcttctgattcagtcacagagaggtaggccatgagggaaataaggaaaaaagtagaaacaagaaataaagaaaaatcagaaacaatttaagaccctattgtgtgcaaaagggaagtggaaagaagagacaagaaaatacataaaggggttaaaagagaggaaaataattagatagtatt

SEQ ID NO: 369 - DNA, 292 bp, Homo sapiens
ctggatcaactttggatctgtttctgtcattcgatgttttgtctttttgtttgggtatatctcttgttatgccaaaatttgattaaatatctgacaactataaaaggcttcagatgatatcagttatctctgtccagagaggtcttaccgtgcctgctaatgtggtgatagaggaaggggagggaatagagagagagagagagagagagagagaatgtgagtgactgagagagagagagagagagagagagagagagagagtgtgtgtgtgtgtgtgtgtgtgtgtgtgtgg

SEQ ID NO: 370 - DNA, 653 bp, Homo sapiens
tacataaatatgaaggataagaagaggccctgcaaaggtgataatacaattctcttttcaatgataagatatttctaagcatgcatctgctaatcatattgatgtgcatttagtgttcttttacctacccctgtcaaagtggctaaagtaatccttcataaggagataattttttcttgtaggtgatttttttccacataatactctaacatttccaattcaatttttctcgaaaaagtttacatgatatgcatatacagttactaaaactttggctgcataaataatttaaatggactttacttcaaagataatatttacttttaaagttgtaaacctttgaatcatcaattaattagaattatcttatatctttctttatgaataaagttttttgtccctacatatttatgatttggaaattttcacctggaaaatttcattttcatttggatgccttgtctttagtataaaattcaatatttcaatttcaatataatttttttattgatttttacctgaaattatgataaaataagaaaaatgaaaaatagagataaactttaaatacaatgttatttgtgcttaataataaaatcaagaaagtaaaatatctaaaataataactatttaaataaacaaagtatcatata

SEQ ID NO: 371 - DNA, 527 bp, Homo sapiens
aggcagtcacaaaaaaactaacactgtgatttcacttatatgaggcatccaaaattcatagaatttgcaagatgaaaaaggggtggagatttattacaatgtgtgtgcaattaatttgcagacctttttaatcttgcaaaaccaaagccctgttctctttctagattgacacatttagagaaggtaagcttaggtcaggacagcacaactattggcagagaaagcccagttctcatgagcccacttctggcttgtcaatcatggcctgtccttgccctctaggaaacttggacctctcttctgggacccctcttcttgggcccctttcctttttattgttaattatgtgctttgatgcacgaagtgtcccggccccatcactctgcaaggtcactgcatctgaacagatccaggtggaaaaccttgcctgcaagtccctccttgcagctcaggcatggggctcctggtctgcgtggggccccattctctgcttctcggtgttccccagttctgggactctcatgatg

SEQ ID NO: 372 - DNA, 321 bp, Homo sapiens
tgtccagcccttccccttctgttgtaagagtgcggtaccaggaagatactcttgaccagatttcagattctttccaacccatttttagactcaagctttctttctttctctctctctctctctttccttccttctttctttcttttcctttccttttttgacagtctcgctctgtcacccaagctggagtgcggtggcatgatctcggctcactgcaacctccgcctcctgggttcaagtgattctcctgcctcagtctcccgagttgctgagattacaggcatgcaccaccacgcctggctaatttttgtatttttagta

SEQ ID NO: 373 - DNA, 559 bp, Homo sapiens
gggcgctggtgcgcgcactcgtgtgctgcctgctgactgcctggcactgccgctccggcctcgggctgcccgtggcgcccgcaggcggcaggaatcctcctccggcgataggacagttttggcatgtgactgacttacacttagaccctacttaccacatcacagatgaccacacagaagtgtgtgcttcatctaaaggtgcaaatgcctccaaccctggcccttttggagatgttctgtgtgattctccatatcaacttattttgtcagcatttgattttattaaaaattctggacaagaagcatctttcatgatatggacaggggatagcccacctcatgttcctgtacctgaactctcaacagacactgttataaatgtgatcactaatatgacaaccaccatccagagtctctttccaaatctccaggttttccctgcgctgggtaatcatgactattggccacaggatcaactgcctgtagtcaccagtaaagtgtacaatgcagtagcaaacctctggaaaccttggctagatgaagaagctattagtacttt

SEQ ID NO: 374 - DNA, 184 bp, Homo sapiens
gggaggttcagcaaggtgtctagtccagctcccatggagggtggggaagaagaagaagaacttctaggtcctaaactagaagaggaagaagaagaggaagtagttgaaaaaaaaaaaaaaaaaaaaaaaaaaagggggggcgtttttttcggtaaccccaaattgaaaaaaacccttggggggt

SEQ ID NO: 375 - DNA, 611 bp, Homo sapiens
actgaatgtagaagaccaacagaaatttaatggcacactaccactaccctttcctatatcattattcccctgggggtcatactgctattaaatcatctatttggtgtatgaattttggatcctaacattgatggagctgtctgaatctcctttgtatttacttgaatcagtgttgcctatctgttgtgcagccaatccaggatcagctccaggtaagccacttccaaaagctgcttggtataaatgatgatgatgaaaattatttattaaagtccagctttcttatcatctagaattttgttctgtagggaggtaaatctattttctcttgaagatacagagctaatttatttgactgaagcacttcatgacagcaatcatggaacacaaaaagaagctatcaatgtgcacacagaagcaagaacacaggccgtgcacacaggacaagcacagcaactgactcaaaagatgagcccttcccccagcagtcagtgggattcttctggtcttcctggaaaggataaagaacttatgagcactgtcactctaaaagggacagaatctaacgcaccttcatacaggccatctgaagcaaaaataatttggataaa

SEQ ID NO: 376 - DNA, 376 bp, Homo sapiens
atccttcttccagctttgcactttgtgcctaagcataaaacaaacttagaattaacagttatcttacttaaatgaaagtaactgtttggaaaacacacagataccaggaggcttccaggccctgagggtccctgcctttggatactctcttagagaaaaggtatccaggtgctttggaagccaattaggcaagtccaaatcctggctctgccccttctaagcaaagtgaatacagcagttattaccccactacgggtctcagtgtctcagctgcttcatgtgtaaaagagattcagtttttttcatatggatggaatgggctaatacatgtgaaacacaatagcgcctcgcacatggagaggcctacagaggatct

SEQ ID NO: 377 - DNA, 519 bp, Homo sapiens
tcttgaactctgaactgaacatgaggactcgagaggacttgtgagctatcttccttgggatatatatgggaacaaaggggtatttggcagccataaaaatgggttgcaacagtgatggaattttcaccaaacgttttccatgtactcctagactgcactgtgagtccctgcagggaggttatccattggatgtcatttctcaggctaaggtagaagagtggctgtgagctcccatgcctggccctccctcttggtgtagagtggggaagccatgtcaacatggcctgtgtgcgcaatccatcaaagcccccaggattggctggggcacagcaggcagggcagctgccttggggaattgcccaatctacagtggaatttatgtgaataatgaataaagtgcacatggaggctagagattgtggatttgactgtcactcagccttacctctccaatacacaattctatttttattgtgttagaggctactcttaaaatggaaacatgcacacagttcatac

SEQ ID NO: 378 - DNA, 613 bp, Homo sapiens
aacttttttataaggttgtggtgagatgcatataaaataattcatgcaaacagtgtctagcactctaaggacctcataaaacattagttatacataaaaataataaatactgtatgctgtgaactattctaactactttctactgactatttcatttcatcttcacaatcagtcagggaggtagatactctcattattattattaatatcactgtattactcatttttacagataaggggactgaggcactgagagtttaaatggcttacctaaagctaaataccttgtaagtggtgaagttgtaattagaatacaggcagcctggctaaaaagtcagaaatattaatcccagcacagatatatggaaagtaagcaacacactccaaaatgaccaatgggtcaaagaagaaatccaaagagaaatcaaaagtatcttgagacaaatgaaaataacaatacaacacaccaaaacttctgggatgcagcaaaagacgttctaagagagaagtttacattgataaatgcctatattaaaaaaaaagatctaaaatgaacaacttaactttatacctcaaggaaataggaaaaaaaaactaagacaaagatagaaaa

SEQ ID NO: 379 - DNA, 559 bp, Homo sapiens
aagaaacctgggaggaatagaagaggagaaaaacaaacaacttaaccccaacttgctggcctcaaacatgccaggccatcttcagctctatctcccaccctttttgtgcctagagggagccttaggcccactcaccaggcatgccacaggccctcttctctttcccattgatgtagccgcagcccttggcctgttcccagaattcagtccagcacccaccttggagacctctgcctttacctcttagggggtctggcacctgatgtcactccagctcaatgttgctttgttagcatcaccaaggagacattcttctccagccagcccctttacaagcatatgcacatgtgcacatgtgcacacacacatgcacgcatgcacgtgcacagacaacagtgatgttcccaccctgctgtcatgatgcccactcctcaggaaccacacacagcaagagctgggatgaatgagcactaacatagtgactgattttacaaacatcatagcatagcatctgattttacttaatccacaaattatagtacaagatggacctcattcc

SEQ ID NO: 380 - DNA, 420 bp, Homo sapiens
ttacttaatgaacaacaaagcaattataaaggcattgagtaaattaaccctcatttcattcgttttctttagtttctcaggcaggatcacaactcattctcaacttcttcagtcccttcaataattctgatgactgacaaaatttgggaatttgtgacctaacgtcattacaatattgctccacccacttttttgtgcatgtttccttttataacaaagtacacgagcaccaagttctaagttcttcatacccccacactcaaaacatcttcatatgaaactatgaataaacaataacttcctatgtgtaacaataaatgtcaaggagccaattttttaaaatctatcattttgtttctatgactccttttcaaaaggacagtacttccggtccagtgcagtggctcacgcctgtaatcc

SEQ ID NO: 381 - DNA, 524 bp, Homo sapiens
ataataaaataacacttgctaatattcaaagtttggtcagattctagtcccagggatttatgtgttttacctcccctcgcatacactatttctatgagggaagcactggtatgactttaactttatatttgaggacactgaggttgaaagagtttatgcaacttttgaaagttctcacttagactaatctaaagctcaggattataatcatgatcccatcgtgattcccttggcttaaattttaaatttaaacaataatacttccatcatcttggtttactcacaaatttcttcttgtgttcaggcttttacttgttcactcactaagtttagcatgattagttattggggcacctctgctcttcacccagcatccattcttgcaggttttcagcagtatccactgctcacgagcaatctaccaggaataattgtcatgtggagagccagaggggcacaaatatgaagaaacacagattctgcccttcgtttctcagagggagacacacgcaaaactcataacg

SEQ ID NO: 382 - DNA, 306 bp, Homo sapiens
atccaaggtgcgcgcgtcggcgtccgaggcggttggtgtcggagaatttgttaagcgggactccaggcaattatttccagtcagagaaggaaaccagtgcctggcattctcaccatctttctacctaccatgatcaagtgcttgtcagttgaagtacaagccaaattgcgttctggtttggccataagctccttgggccaatgtgttgaggaacttgccctcaacagtattgatgctgaagcaaaatgtgtggctgtcagggtgaatatggaaaccttccaagttcaagtgatagacaatggattt

SEQ ID NO: 383 - DNA, 362 bp, Homo sapiens
aatctaacgcatttattctttgacaccttttcatggccaattgagaagtggtacccagaaagacagtaatgcaacttagaaatgtatggaaaattgataatgttgagatcttaattgaggtgaaaataaccaaataacgtgtggagggacattaggaccattttgtagtattgacaaaagatacatgacacatagccttccatccaacaactctgctctaggattctagctcacagaaatacaccagggagcaaaggcataagagtaacattgtttattgaattataactgtagaatcatatgaaatgacataaaaagatatgtattgtaatgtggaaaaagtaaaatgcagaacaatatta

SEQ ID NO: 384 - DNA, 512 bp, Homo sapiens
gatttatcatggcttttctgcaggaatgacacatcatgggatcagtagttgataagggaaaaatcttctttaggagaagaattctacccaataaataagtaaaatgatagaattagaatatcaccatttagcaacctgtaatgaaagtatagatctgagcagttaccatcaatacctgctaaaaaccagcaggtgaaaagttgatgaggaactgcctgataaatcttaatgtcatgaaaaatagaatcacaagttctgtgccttctctgggataccatagaatgtctacaccaccacctatgaagcagtcttgcaaaataaataaataaatgtcatatctcaccaagtctcctctagatctatgaccattttacaggtaatggagagggtggcggaacatattaaaccacatcaaggaggaaaaccaaaactgtacaaccgttttcttaacaaataaaacaaggggagaaattcaaaaacattctatatatttgataattttgagaagtagt

SEQ ID NO: 385 - DNA, 432 bp, Homo sapiens
attgcaagttcatcaaggtctgttcagttggttgcagcatgctcctaacaaaacttaagtcatagatttcattctatggggcaatcttatctgcaatacacaggataggcaaagacatactgcatttctaactccaatcaattaaacctaagtactggattcagtgtatcactgttgctacaaaattactcaagctctatgttctaacaataagatcagaggtatcataaggtatcacagtttctagagactctgagtttagaagaagaaacctactgaaggaggatttatcaatgaaatcatcttggataaaggcctaatgggatcaagaaaaaattgttaagtgaataaaaaattacagtagccacatgcattgaaaaagacaatgaataggttgggcacggtggctcatgcctataatcctagcatttt

SEQ ID NO: 386 - DNA, 484 bp, Homo sapiens
tgcatgctgttgataagtccagataggtttgatgggaagcatgactttataaatattttagctgtcacagctaagtcttgttctacttgcttgagattttcttttgtctgataggtatacatagcgtgcactgtgaccaacacactgttgtaggatcttgagatatttttgtgttcttgtttgagcagttactcctgggaaatgagaagctgagatgaaaatggctggaaaaggccataaaagacacgtgaagattatgacaagtagctttaaagagtttgccaaaatttaacttggatgggaatgttaatgtcctacacacgatattatttatggaagaataatgtcaaactataattttttgatgtcattgttatatttaatcagcatgggaggacatgacttgtgatgaaggttttccctggggaaagaaaaaaaatacttccagcataaatatactgaaatgatgcttaattttggaagt

SEQ ID NO: 387 - DNA, 491 bp, Homo sapiens
ctggctgctttccctggtgacagctcctgtcaaggaagccctcttgatagctctctccttctagagtccagcaactgctcccttcctcacactgtcattactatctgtgtagggaaaaactctctcaaactttgcttttcttctgctttcacaccaccacaacaatcatcaacacagaagacttttgtaacaaagatgtggagattcgtccccacacaccaagcagcagacaccagttgggcatcctccaattcaattccaacactatctacctggagatagggtcagtccccaagactccctttctctcctgcaccaagacaccagtcacaagtctggacttctagaagttctgaccaagtggcttcaagttggggttcccacgacccctgttttgggtttaattaatttgttaaggcagccagaactcagggaaataacttaagttgactggtttattataaaggatattgcaaaggatacagatgaag

SEQ ID NO: 388 - DNA, 356 bp, Homo sapiens
gcacataggagatacttgtatttggtcactatttatatttattcagtatttataaaatgaaagaatgaatgcctacctgtctggctagatcattgatagaaacaaaattttgacttatggatttaatataattttatttattgggtctatatgaatttaatataattttatttattttaaattttatttaaagctgaataaagatatgtctggttttgctcagacacagcttctgctttcattcagctttgcatacatacacctttattaacaaatatttaaatattatcttagaatatatgttttcttttaagaacagtagagctgagattttaattgagtttttaaatgtaatt

SEQ ID NO: 389 - DNA, 427 bp, Homo sapiens
gaaaccacctcccccagcaaagctgtgtgggggcggcatcccaggtcctggggccatggggccaagagtgcagctgggtagggtgctttgagttccccatctcccaagagctccccatctcccaagaagttccccatctcccaagagtccccatgtcccaagaagctccctatctcccaagaaggacccaggagtccctctcctaggaggaagggagcacccacaccagtccagccctggccagcgggacggtggccttcagggctagtgagagctgggccgggggtgggcagggagagctgggccccacccagactaggaggacagctcctgctccccagggcagaccccagcaggggtgaccggcaggagcctcggtactcggaccggctgggggctggaacaccctgaggggctgaggatgcac

SEQ ID NO: 390 - DNA, 441 bp, Homo sapiens
tcctcctttccatcgacatctgcaagcctggtcctgtctgtccccatcggggtctgcgaagcagattccctgacacggggcctcattccttctgcacccattgagcttgtgtgctgcctttgcacccggcctctccgtgagactggagctctgctaggacaggctgtgtcttaggcaaattggaacccaagctccattcccaccatatggctggcactaaagaaatcattcatgggccgggtgcagtggctcatgcctgtaatcccaacactttgggaggctgagacaggtggatcacttgagctcgggagttcgagaccatcctggtcaacatggcaaaaccttgtctctactaaaaatacaaaaattagccgggcatgatggcatgcacctgtagtcacagctactcgggaggctgaggcaggagaatcgtttgaaccc

SEQ ID NO: 391 - DNA, 373 bp, Homo sapiens
gcagatttaaaataaggccaagagctttagaattattttctggcttttccttctttgcattagtttgtttcttagtttgttttttaattgagacaaggtcttgctctgtcatccaggctggagtgcagtggtgtgatcatagctcactgcagcctcaaactcctgggctcaagtgatccttccatgttagcctccttagtagctgggactacaggtgtgcatcaccacacccagctaattttgcatcggttttacagcacggagtttaccatcaacatcacactccttggaaacaattatttatatagctttaagtaaactaaagtattatgggtatgacactcttaaatggtgagtgatatccttgtatttc

SEQ ID NO: 392 - DNA, 593 bp, Homo sapiens
cagaagggtacaactgtaacagctacaatcccttgagcaattcctatatgctgaatgctttaaacacatgaaatagaacggcgtggaatgagggcctgccccctagtttgggttgggtgtgtaccatcattagatctttattgtcatcactatattttattaacaataaaaaataagtggtaaggtgaatttacgaattatacaagcattaaattttggtttataatctaagcaggactttgcaaatcgtgtgttttctcaagttaaaatacaaaagtatgggctaggcatggtggcttatgcctgtaatcccagcactttgggaggccaaggcaggcagattgcttgaggtcaggagttcaagaccagcctggccaacatggtgaaactccgtctctactaaaaatacaaaaattagctaggcattggtggtgcacacctgtaaactcagctactcgagaggctgaggcacgagaatcacttgaacctgggaggcagaggttgcagtgagccgagattgcaccactgcgctccagtgtgggcaacacagcaagattctgtctaaaaaaaaaaaaaaaaaaaaaaaaaaaaag

SEQ ID NO: 393 - DNA, 557 bp, Homo sapiens
gaggggagtgtaacctgctgagtggccttgagtctcggatggcatagagccagctgaaaactaggggattaaagttcttttgtaagtgccttagatgtcttcctctttttttgtatattcataaggtaagattctctacattttaacattttgatatataacatatattcagaaaagtgaacgtaatcctatacatacagatcaatcaaatatcacaaagcaaacacgtgtgaaactgtcactccagctcatgaaacagaacattgttggtctccagaagcccccgtgtggactcccagtaactactccttccctccttcccgaaggtaaccactaacccgccctgttacatccccctttttcttttatacatttcccaagtgagaattcaaacaatatcaaagctaaaacgaaggattgaccgtgtgtgggtatttctcattagtaatttctctctctgttaaatttattatgaaacaaataaaaaataatagtgtacatgataatataagaggcggctactgcccaccaggttgcttaagaagtaaaacataatt

SEQ ID NO: 394 - DNA, 542 bp, Homo sapiens
cggcgcgagaagacagacagaagggggttggaggcggaatactgggttttgctgcgaccggtttattgtacttctgtcctcacccattctggacaatctggcgccatagtccttcttgcgaggccaggcctgattatgcgaagcagagaggcaggaccaaaactgtagcgaatccaggaacctgccactgtgtctccgggtgcggtctctgacactgcaggatatcggcaggagagggatggaagatgcctcagtggagatgactgataaatgtaccagggctgaaagaaaagagatggtaaatataaggaaacttaagaatagtgaagactagtcatatttaacattaatttacgaagagttccagtagaagggaatttgggcaatggaaggaaaagaaaatccaagaaataaaaaaaggaaaatttacctgggcaaaataaatttaaaaatccataaaacaatgtaaatattcacatggaaatgaatcactgagtgccaaacaggacaaatacagagaaaactgatatatttttgaagag

SEQ ID NO: 395 - DNA, 444 bp, Homo sapiens
aactaacctgcccagggtaaccgagttcaagagtggtggaggcaagacgtgaatgcaggtgtgttggtgaaaacacacacttcagggcagtctggcacatctacagccgcatcaggtggagtaagagggctgtgtttataacactctcaaagacagagctggggaaggaggagtcaattgtgctgggtcaagatgtgaaggatggcatcaagggaagcccaaaaggatagagtgagacattgtaggcacaacattgagccacaccctgaaggagaagaaagtttctccaggcacagaaagagtattcctggcagaaggaacaggttgcaaagtagacaggttcagaagaacataaagaaaaagggccttgtgtttgcaaaggtgtgacaaggacttagggtgtaagggagagctgaggagagggacaaaaggcagaggcaggag

SEQ ID NO: 396 - DNA, 474 bp, Homo sapiens
gtcatttgttttgctttgtttgacttttacatttcaagaatataagaaacagaaagccaaattcctgcacacgaagtgctgcttaaactgtacaaggtactattacatatgttcatcctcccctctccaacctaaaaagaactaagaacgcaggacaaataataatttttaaagtagggggcatctttgacagataagtggtggaacattaaaaataaacttggtcagtctacagttgtatccattctctttagacctgggtcagtccaatttagacaagggtcagtgtcattcaagaattttgctgaggtggcccattcctcattttccttttgcaatcaccttgagtctaagtaaacaaaaactatcaaaccatcctagttgctagcaaaacttagttgctaaaattcctcaagggacacttccaaatctggaattggaggggactttagcctggaaaattagtatgctatc

SEQ ID NO: 397 - DNA, 501 bp, Homo sapiens
gaccatggctcacagcttcaccctgctctgctgaattgcccttgtctgatgggaaccactttgctggagatacctggatgaaattgcattctaaaagcttaaagcttgtaacttaccatattttttgaaactctactttattctcagccttataatttatcctctattcaaagctatctacagattcaatgcaatccctatcaaaatcccaatgacactttttttttacaaaaatagaaataattttataattcatatcaaagcacaaaagaccccaaatggtaacatgcatttatggccaagtgttcttcaacaaggctgccaagaatgcaaaatggagaaagaatagtctctttaaaaaatggtgctgggaaaactgttataccacacacaaaaatcaacccaaaatggactaaagactcaaacataaagcttgaaatggaaaaactcccgaaagaaaacatgaggagaaaactctttgacattggtcttggcaatgat

SEQ ID NO: 398 - DNA, 375 bp, Homo sapiens
gacactgctgaaataaagtctgaaaatcatggattgaaagcaatcatacagaactcagaacatttcaaaataaacaaaaaatgtccttagagaaatgaagtctcaaagtaagtgttaaacctcctaaatccactcctggctatgacaaccggggccagaggtgaagctttatgttaatctcaacgaactttttcatggccttcaaaaagtccagaatttaagacctcctgtggtattgttaaatacagaatcatggaccaggtgaaccatgctagaatcttagagccacgatttctagtgcctaacatgggcacagctaaaaaatctcctaacggccggtgcagtggctcatgcctgtaatcccaacactttgag

SEQ ID NO: 399 - DNA, 478 bp, Homo sapiens
agaacccactctcaagaagaactgtgttccttacttgacaattccagcaaaaatcttttgggaactctgattggtcaactaaagccaaatgccaatttcttgaccaatcactatggtgtaggggatggataattctgtcctaggcacatgcccacctctgatgccagcaggtggaatgacctcatccaaactgcatggactaagaacatgaaaggtgagatactgaaaaggaaatttaggtgccgtgacctaaagaagggatgagggatgccaggcaagcaagaacaacagatgtccctaacagagtcctttttctgtgacagcacactacagcaaaacaaattggcacctctttttacaggtcaacctttacaaccatctgctcaaagaaattaatgttcccatcttggctgacttatttggccataacagcaagttcacataacgttcaaacagagcagtagggagtaggtagcat

SEQ ID NO: 400 - DNA, 143 bp, Homo sapiens
ctataaaaggaagaggttgagaagggaaagttagaaaagtgcaggaaagaggagctcataaaagtagtgtttcatgctggaagagaacgtataatacatcagtggttatgcaatggaggtccctctggacaggagctggggag

SEQ ID NO: 401 - DNA, 113 bp, Homo sapiens
tggcggaacatattaaaccacatcaaggaggaaaaccaaaactgtacaaccgttttcttaacaaataaaacaaggggagaaattcaaaaacattctatatatttgataatttt

SEQ ID NO: 402 - DNA, 442 bp, Homo sapiens
cctctagctgttccccaatctgaaatttgtttttcgttttccttcacttaaaaaaacttgttggccgggctcggtggctcacacctgtcatctcagcactttgaaaggccaatgagggaggactgcttgagcccaggagtttgagaccagcctgggcaacatagagagaccctgtctctactaaaagataaaaataaaacaattaatttcctggtaaaggccctatctccaaagaaggtcacatcctgagattctggttaggacttcagtcttggaattttgggtaacacaattcagctggtgacactgacacagcctggggctgcccagttttcccagaaggggcagcaggaatgggtcaaaaacccatcactcatcaagaaaaaccagttcatgtgttgaggaaccgtcttgtctgctgtccttcagaatgagtgcgcag

SEQ ID NO: 403 - DNA, 459 bp, Homo sapiens
ataaggtttcgtattaaattctctttcagacgaaatgaaaaccttcgccggacaacagattgagcctctctttcagttctcatggctcatagtgtttcttaccctgctactttgtggagggcttggtttattgtttgccttcacggtccacccaaatcttggaatagcagtgtcactgagcttcttggctctcttatatatattctttagtaagtctttgctttttatctttttcaaaaatggagaaaacgttaagattcatagataaagaaaaaacattttctttatctgtcttttaaaacctgtatgtgattttcataattgggtgagaaaattgatctttttgctactccgtaaattttcctaaaggaacattgctcacaacttggctgaagtagcttataaactaatgtactacttgttaatcttgaagcaagaacctatattattatacttact

SEQ ID NO: 404 - DNA, 305 bp, Homo sapiens
taacagtctgaagtctggataaaccagaaaacattcactcatccctcctaataagctcgcttccagcactcacataaacttctaagcatataaactgtgttgtgtggttcactgctgcagacctcaacatttttttttgagacagagtcttgctgtgtctcccaggctggggtgcagtagcacaatcttggctcaccccagcctctgcctctcgggttcaagcaattctcacgcctcagcctcccaagtagctaggattacaggcgcacaacaccacacccagctgatttttgtatatttagtaa

SEQ ID NO: 405 - DNA, 501 bp, Homo sapiens
cgatcttggctcactgcaacctctgcctcccaggttcaagcgattctcctgcctcaccctcctgagtagctgggattacaggcatctgccaccacacccagctaatttttgtatttttaatagagacagatttcatcatgttggccaggctggtctccaactcctgacctcaagtgatctgcccatctcagcttcccaaagttcaggaattacaagcatgagctactgcaccgggccaatcacattcattattaatcagcaagagtttatttttcatctgtggttacatggtagacacttcctaaagaaattaagatatgatgcttactataaatgttctaattatatacctggggacacaacttcactgatatgaagcaacaaataatacaagatagaatttcaattaggaggcaaaagatatgattgaggcaaccctcatttgttacagctaatgatctgggctagagaatgtgtaagagtaaagtctagaaaatgtct

SEQ ID NO: 406 - DNA, 505 bp, Homo sapiens
gaaacggtttcaccgtgttagccaggatggtcttgatctcctgacctcgtgatccgcccatctcggcctcccaaagtgctgggattacaggcatgagccactgtgcctggcctgtttttcctctttttgaagacttcgtagacttggaacatacatattaactctgtgattttttaaaagctattattgttcaacttgagtttttgagattcaggcatgctgatacatgtaattaatgtccttaattttcactgctatatgatattccactgaatgcatctgccacattttattcatccattttttggtttttaggcatcttagttgtttatttttccttttttggctttcataaaaaaatgtttctatgaatattttagtttataacatcttttcccagtgacttttggattttcctattcacaacctatttaactgagtttactggtttgaatagagaactttgggaggcaaccaatgtgacttattttagcagacgggatgg

SEQ ID NO: 407 - DNA, 494 bp, Homo sapiens
gtatttccaaaagtaaaagaacagaataagaaaatggagccaataggccaggcacagtggctcacacctgtaatcccaggactttgggaggccaaggtgggcggatcacgaggtcaggagattgagaccatcctggttaacacggtgaaaccccgtctctactaaaaatacaaaaaattagccaggcgtggtggcaggagcctgtagtcccagctactctggaggctgaggtaggaaaatggtgtgaaactgggaggtagagcttgcagtgagccgaggagccgagatggcgccactgcactccagcatgggcgacagcgtgagactccctctcatggagccaatataaaagatatgtttcaagtaaacatccctgatataacatttgaagagttcaccatgtgccaaagaatattggcccaaaacactgagacatatcctacccagtaaagttactaaaccttgatgtaaaaaaaaaggaatacttggaaagc

SEQ ID NO: 408 - DNA, 629 bp, Homo sapiens
aagatttgggtgggaacacagagccaaaccatatcatggggtttcagcatgttgcttaggatggtctcgaactcctgggctcaaaagatctgcccacctcagcctctcagtgctaggattacaggcatgcaccatcactctcagccaagttcatacttttgagttcttgctacttgcccagcactatccaggccctatccacatgtcattccactaatgcaagcccacaccaaatcctgccagctccaccttcaaaacacatccagatatctcccacccccagtgattcctttcctgcattgcccctgcagcctaaccaacctccctgctcttccttttctctcctctacagactattcatccagcagccagaataattcttttaaacatccaagtcatcataatttcacttctgttcaaaatccttcaaaactttccagtcactgaaagcaaaaaggccaaaatatttaaaaggccctaaaaactttatctacaggatccaaccctgactacttttataacttcattttctaccactctccaccacaatggtatcccttgaagtttcttaaacgcttgaagcctatctcagggtcctgagtagtagacctggaatatcgctcccccag

SEQ ID NO: 409 - DNA, 431 bp, Homo sapiens
taaatgcatgtcttcataaactggcccaatcctgtagaatgtacaacaccaagagtgaaccataatgtaaattatggactttgggtgaatatgatgtgtcaatgtaggtccatcaattgtaacaaacgtaccactctagttggggatgttgataatgggagaggctatgcatgttggggacaggaagtatatgggaaatctctgtaccatcctctcaattttactttgtacctaaaactgctctttttttaaaaagtcattaaatatgaaaaaatggaaggtcattcagaatgatgtgcaagtcaaaaagtcccatatagtctctgactagaaactgttgggtccagtaaatgcctacagatggaataccagaatctcactcttctttgtaacatttatatttagtgtgttttgagttcattttatttgag

SEQ ID NO: 410 - DNA, 426 bp, Homo sapiens
ttcctggtgagttaccttgcattcaggtgttctgactcttttttgtagagatggggtctcgctatgctgcgttggctggtttggaactcctggcctcaagggatccaaccattttagtctcccaaagtgctaggattatagacatgtgccatgatgcctggcccaaagacatctttaatctgaattgcacttcattaactattagacacatttatgtttattatgtaatgctttcttcacatccatactgaagaagatccagtaggtattatatctattttatagatgaagaaaaacaaagcttacatgttacagtctttgtagaacatagactgtagtgggggacacaacttttaagtaaatccacacctggataaatatattattgtaaactttcattcgtgtgagggaggtaaagagcaaggt

SEQ ID NO: 411 - DNA, 534 bp, Homo sapiens
acccttatttctgtgtgacagatgatatagctaaggcacaaataatttgtttgcccatgttgatagctggtaagcaatggagctgggctttgaatccagacagggttcaagttcagatgaatttgtaagtacaactttgataaataatctctttgattcttttgatgagggattaaaaaaaaaaactttgtgtctgaaataaactcttcatgactctatggactctttacattaaaaaattatttatttatttattttcagaaattgatgtctcactgtgttgcttaggctcatctcaaactctggcctcaagcaatcctcccaccttggcctctcaaagtactgggatataggggttagccagcacacccagcctgtatgggctcttttagctaatattttattcacatagagtgcgtggatcgtcacatgttgagggattagtcacttgccaagcagatcaggcaggtacttgtttctaatttgtatatattctgccccaatacattcatagcttcctcctcagctttaaaa

SEQ ID NO: 412 - DNA, 569 bp, Homo sapiens
ggaaaataaaaatcttccaggagaggcacagtaacagcagatgcaactcgaaaataaaaatcttccaggagaggcacagtaacagcagatgcaactcatgtccttattccagacttctttgcattttgaagattaaaaagaagaaaactactaaaagctttaagaactatccaccagataattatgatacaagagtataaacacggtcagtttcaatagccatttcctcaagtgcaacttggcagccaaattcttccctccaaggaaatactttatgaatagtagataatgaattgtttagaaaaacagtctctaaggaccccgcgatataagtcagtagtacttaagttctcactctcccgagataagttgactgagaaattccggctttagggaatttccaggctccagagggccaataagaaagatagaaattgatgacatctgtgcaccctgctgtgcagtggaggaataccttaggaaggtaatcgtgaaaggctccctagacttccatttccagcattatgtcagacttcacactctgaaaaccccacctgattgaaacagct

SEQ ID NO: 413 - DNA, 488 bp, Homo sapiens
gaatattaattgtcagaaaacaaaaatgaaatacagaaatagcttgattatttacagcttggctcagcatttgccacatttgcacatggtctgaccagttaacagactatgattggcttaagcttagctactatgattggctaagactaagccacaagttacaaaatatactcttaatttagattgcagtctgtttacacactatgttaggttaaggatgtaagtacagaggcagctttaacaatctaatttaacaatattatctaatttaacaatattatccagtggcatagaaagaataatgtgactttaggtttttactaaataaataaatgtagaaatatcctaatagaggacacagtggccaaagtatactccaaaaacatacaagtcataataagatttaagtgagattttaatgacaggtttttaaaaaattgtcttaagaataaatcattcaaaccatggtaaaatagttgacaatcggg

SEQ ID NO: 414 - DNA, 191 bp, Homo sapiens
gtgtctttgtatgtttgtacttgaaggtctttgtcatggcatgcgcttttgtttcctatggaatgttaatgcagtctgtgaatggaacttctgaggaccgaaaggttccatatgccaacacctatagaattcctgctttaaataatttagttgttatatatctctctggcgaatcctggttgtgtgtgtgt

SEQ ID NO: 415 - DNA, 458 bp, Homo sapiens
ggttccaactgcaatacatgggccattatttgatacgagatgagagaaaagacccagatcccagggtccaggattttattcccgacacatggcagcgagagctccttgatgttgtggataagaatgagtcagcagtgattgttgccccaacgtcctcaggcaaaacctatgcctcctactactgtatggagaaagtgctgaaggagagcgacgacggggtggtcgtgtacgttgcacccacaaaggcccttgttaatcaagtggcagcaactgttcagaatcgttttacgaaaaatctgccaagtggtgaagttctctgtggtgttttcaccagggagtatcgtcatgatgccttaaactgtcaggtacttattacagtgcctgcctgctttgaaattctgctgcttgctcctcatcgccaaaactgggtgaaaaagatcagatatgttatatttgat

SEQ ID NO: 416 - DNA, 516 bp, Homo sapiens
ctcctggctgttattttccagaagattttgaggtgagctctctatatgagttagaaaatatgcttcccaaatcaccatatccttaacaaagggtggtaaaaacctatctgatgataagactttatggagagaggctccctaaagcaccttcacttacttgtaataattctaaagttgggaaaacaattttgtttttttctttacttttcctaaattttttactttttctaaagctgcttccaattatcatttgccccatacattggtataacaggatttaataccagcctcttttagtatttgacaatttttaaaaactttttattaaagtcttcttctccccatatttaaatagtatgtaaagtaaaaagaaattgcaaggtgcattgagcactaattgtcagaccaattattcaatacacacacacataattatgtaaggaaaacataagctatctcagcaaaattaagcatttttaattattaatgtgatgtaccaaagacgggaatgaaaaa

SEQ ID NO: 417 - DNA, 515 bp, Homo sapiens
tcactgcagctctatactcagagcacagctattttcaccaagagcactccgacagagtaccagtgagagcctcagagtgatgctggcatcatttaattggattactgtccattgcttcctgaagagatagtgaagtgttatctttatttatttattctttgagacaggatctcactctgttgcctcagctgggctgcaatagcacgatcatggctcactgcagcttcatcctcacacctcagcttccagagcagctgggactacaggcataagccaccatgtctggcttatatttttttaatttttattttttgtagagacagggtcttgctatgttgcccaggctggtcttgaactcttggactcaagtgattctcctgccctggcctcccaaagtgttgggattacaggtatgagccaccatgtctggtgttactcatttttgttgatataggtagtcactttctatctaaaaggacagaatacatcctggagttgggcttttacaaacacac

SEQ ID NO: 418 - DNA, 359 bp, Homo sapiens
aatctaacgcatttattctttgacaccttttcatggccaattgagaagtggtacccagaaagacagtaatgcaacttagaaatgtatggaaaattgataatgttgagatcttaattgaggtgaaaataaccaaataacgtgtggagggacattaggaccattttgtagtattgacaaaagatacatgacacatagccttccatccaacaactctgctctaggattctagctcacagaaatacaccagggagcaaaggcataagagtaacattgtttattgaattataactgtagaatcatatgaaatgacataaaaagatatgtattgtaatgtggaaaaagtaaaatgcagaacaata

SEQ ID NO: 419 - DNA, 213 bp, Homo sapiens
cgtggcaatctctggttttaaactggcacctggtctagtcaggtttgtttttagattgattactctggtagctgaatgaactatgattttggggaggataagactggaaagagggacactaattttctggaaccttctaaaggataaccaggataattgaggtggagatacaaaataggtgacaaattcgagaagtatatatgaagtaaaata

SEQ ID NO: 420 - DNA, 372 bp, Homo sapiens
taagctagaatttgaatgatgaatagaagctacctggttttagggaagggaaatttgtattccattataaggaattccttattcatttaccaatttatttattcatttattcatcacttttagatgtagagattcagcagtgaataaaaagacaaaaatacattcatttttggagcctactttctagctaagggaagatggacaattaagatagcaatgtactatgtgtactatattttaaaaaacaaggcaaagaatgttggagaattaaaattttaaacaatatgtgcaaaaatcttgagtttgaagtactaggggttgagaaaaggtcactgtcgctggcgcttggagacagaagaggagagtaggaga

SEQ ID NO: 421 - DNA, 345 bp, Homo sapiens
ttgcatcattgatgttaattccaaatgaggctgaatattcatgcggagacaccgacggggttgaccggagctgctcctcccacctcattgaacttgattgccatttctggaaggcttcatctgtcagtgcccctgacccccaggaggagggttgggagggcttcctagaagaagagctgtctaatctgaggcttgcacaaggatctgggagggtttgcaccggctgttgcctctgaacttccctcttgggaggaggttaaaggcaacaaggcacatttcggggatcatcaggagggggatgcccttgagtaaggagttttctgccaggaaagggtacgaagaggc

SEQ ID NO: 422 - DNA, 571 bp, Homo sapiens
tttgaccaggtggggcacctcagttcacccagccggggaatcagcaagtccatctacgcttcccatggtcgttgtgaggaaccagtaatccgtgctgtcacggctcaactaggcagttgtagtggaccaggaagcaagacccttctttgctctgggcctctgtaaaataggacatccctctgtcctgattcatgcctcttgccacagcataattcctcgtagcacccacttttactttcagagctgccctggtttttggatgacaaaatatacgaataccttcagtaccccagagattgcttatgagaattaaatcaaataactcatctcacttctgctgattcacggggtacctcaggcaagttgctttttccatctcagcttcagttcgcccatctggaaaatggcaataataccaagcatctggcagcctgaggatgaaataaaaatcacagaaccttagagagttcagatcaggcaatcctgaggttcagatcccaattcggcctcttgatggctgtgtggcttgggcaaattgctcaacctctctgtgctttattttattcattta

SEQ ID NO: 423 - DNA, 612 bp, Homo sapiens
accttaaaattatctagtcccaggttccacccaattcaaggaccctttgttgaagcagtcatccagtctctggccaacgagggcacgcacagctgatttcataaagaagtctacagaaagtctaggtgtatatcattttttcttacgtgcttcaaatagtaacatatctattccctcaccctatgacaaatctcaatacaatgctgatgtcaatctttagtcttctcctctccaggccaaacaatcctagttttctcatggcagtgtcttgatcattcactaccctaagtctcctctgggtgctttctaatttactcctaatgttctttctaaaatgctcacctaaattctgtataatctggacaacacatggtacagtagaactattttttgcccatgctcttactgctgtatattactcttactgctggatattaccataaaacctaacattgtattaggcttcaattagagttcacatcagagtgttgcttcatatatttaaaagcacagattttatagcaattaattaaatgaacataatttaaaagagttgctgttaactataaacttagaaaagtctatacataaaaatctttatgaagaaattca

SEQ ID NO: 424 - DNA, 160 bp, Homo sapiens
gtttgaggctcaaagctcagggaagaccatcactagctcccagttcaccactaggctcagagaatgaggtacttgttatacctggccaggttaattgctccagaaactgctctgttacaaatgcttacaatatcttactgaagttcaaaagggaggtgga

SEQ ID NO: 425 - DNA, 273 bp, Homo sapiens
gcatttctgtgcagaaaagagaggctaaatgctttgttaaagtttgggagtgaaatgaggggcaagaaggacaatagtgttgtgatttaattgtcagtggttttaataattttaataatctgaagtgctaaagaggctgtcaaataatgcattaaacctcagtagagaacagacacagaatgctgctctataaagatgtgagactcctctaacagggcagaattcttctcctaaggagctgggagggttgaggcagatttttttgtgtttttg

SEQ ID NO: 426 - DNA, 484 bp, Homo sapiens
gcacactttgtcatccagacataaccatcgttatcaaccggtgaacgtcagtcttacagaggttactcttaaaatttgcttcttctctcctctgctttcccaaattggcaaatattaccagaattgattcaattgcttgggccaaaacctgggactcatccacaatctttctctttatctcactccctgcatcagccacttatactgactctgcttggaaatacattggaatcttaccttgactactgtcattatggtccaggttatcatctatttcttgcttagattagccttctgaatattctctccacttccatttttgcctcatcagttgtattctctacacagtagccagagtgttttaaaaaacataatcccctttcccatcaaaattatttcagtgacttcccaccatatttagaattaaaaattcttggccaggtgcagtggctcacacctgtaatcccagtactttgggaagctg

SEQ ID NO: 427 - DNA, 459 bp, Homo sapiens
aaatcttgtccctgccacatgatggtcgtgtgacattagggaagtcccttaacttctttgtgtctctgtatatccttatctgtaaaatggagatgataattgtctctagttctctctagagattaaatgagttcatatatgaaaatgcttagaataaacctgcatataataaatgctatacaaatgttagccactattattgttgctgttgctgttaacttgttttagcaaatgaagcatctctcttacaatgcaaagccggcctctttcccagttcatcctcctacttacctacaaaatgagggatggagatgaacatgaacatgaactctaaggatttttttgttaggcttgcctttctgggttctactctaagccacattcagctcaccccaactctaaggctgcaaagctgattcggcatttagtagaccattttcctgctcatggtccatggag

SEQ ID NO: 428 - DNA, 637 bp, Homo sapiens
tatttacatatcaattgagtggccactctgaatatgaagaaatatgagagaggaagtggctggcactgaatatttcatggccatgagccccacaggaagcgaatgtccccagcccagagttaggtctggccatgtgtgtaagagagaactggcattaatagtccaggagacgaggcaagaataatcccccaagccaggaggggagccactaactggaattgatgagccccctatcatctggacacagcctgctggtgctttttcaagtcagcaaaatatctgcttcctgcctgtaccttctggttcccagaaacttctgcagagaagggagtttgttcaagccatcacacgctgactttccaagtcatgtggatggaacagaagttagtatgcagtggaaaacagcatagtccatcgagaaagggccccatcctttctgagaatttgctggaagatgaatcaggaatcccagcccagccccttctcccttcaaagggactgacaggagtcattcacttaataattattttcccactggatgaggtggctcatgcctgtaatcccagcattttggaaggctgaggcagaggatcctagcattttgggaggcttggagccaggagttcaagcccattct

SEQ ID NO: 429 - DNA, 503 bp, Homo sapiens
atgactctgtatctaattattttataacatcaatatatccatgatatagtatcacataagacactgatacattggctattatatttgtaagccgaacttttaattttaaacagggcttgtactttgattatttatcaaagtatcaaattccacaaataaaatattcttttactttgaaatctctgtcttcactttatggctttttattatgaaactttatcttggtattactgatgtaccttgacttcattatactaaacaacactcatattagtacttcagtactggcaatacagctaagccttaaactgagccaaatatctgttaaagtgaattgctttttatgctgaaatcaatttattgaataaaagtcccttgccacaatggaataaagaatataattccacgtttgaaggaacccctaaaactacaattttcaaatttttaaaaagtataatccagccgggcgtggtggctcacacctgtaatcccagcactttgga

SEQ ID NO: 430 - DNA, 638 bp, Homo sapiens
gcattaaatcagtccctttttgtcaaattacatttttgcatgactgtctacgctttgtcgcatctaagaattaaaatggacagtttttccttgagtctttgcatcttcaatttgaagcctctcatgtcttgcaaaactttgattaaatattttatgcttttctcctattaatctgtctttgttttctttcagacctagccaggaaccctaaaagggttatggaaacttttctttccttacagtttgcacaactacaactaaacctggaacaaattatcctttaatccgttattaggacacaccaatatataggtgctttcctttgcctagacacagaggcagttataacagaggtccttgtgaggccacaatttagcaaaatactatgtcaaacatttatagcttatatgaaaatttcacatccccatattggccacctaaagatgaaaacatataactccctaaatcttaattggccctattctaatgtaaaacataaaaaccatataggaaaaaacagaaattcaaatagaagtaacctatacctttttaaaaaaattatattcaggacatatggatgacaaatggtccactgtgttttagaatgaagtagacaaatttgagaagtcagttaattt

SEQ ID NO: 431 - DNA, 593 bp, Homo sapiens
tgccctgaaggagaaattaatttttattgtaaacagaaatacttaaaaacatagttaaatgtttaaacatcagtttaaagaacagattaaaggaagtgatagttaaaccaaaacattatatagtccagcaaagtaatgtgaaaagagaaaatatcctcccaccattctaagcacattaagagtttttcaaagaatttcgttcactttcatttcaagaaccaaatatgaatgttgccaatatctcacttcacttccttgcagcctaaccacggatagcatcaagaaagcattgcttccagctcatcattctccctcccttagatacattaagacaattttgatacatcaacaaccagagacaatgtaaaataatgtcagagttaaaaatcacaaggctttgggaggccaaggcgggcggatcacgaggtcaggagatcgagaccatcctggctaacaccgtgaaaccccgtctctactaaaaaatatatacaaaaaattagccgggcgtggtggcgggttcctgtagtcccagctactggggaggctgaggcagaagaatggcatgaacccaggagacgaagcttgcagtgagc

SEQ ID NO: 432 - DNA, 619 bp, Homo sapiens
atttacaataagtttacaatttacaataaagctttaaaagaacaacaaaaaattaaatatacctctattgcttgtacgtttttctacttttgatagaaacatggacatattaaatatttcacttttaactctagtataagaaagtcaataatgcaagagtgatgataaagagcaactctcacttggcatcatgatcagggagcaatagggagtgggtgactgcggtgacctaaagcatacaagccttgtctaaagtgaacagctgctctcagccctagctcataagtgccacagagtctacaggcctagacctgctgatccccagcatttgcaagagactcttggtaaccaggattttaaagtaacatttcctggttaagggtagcggccgggcgtggtggctcacacctataatctcagcactttgggaggccgaagtgggcagataacttgaggtcaagagtttgagatcagcctggccaacatggtgaaaccctgtctctactaaaaatacaaaaattagccaggcattggtggtgcacacctgtattcccagctgcttgggaggctgacgcatgagaatcgcttgagccctggaggtggaggttgtggtgagccg

SEQ ID NO: 433 - DNA, 612 bp, Homo sapiens
aagaaagagcattaaactagaaacgaaaaggctgaacaccattcctggtttaggtggacacacaagtggcctcaggcaaatcactggacttcttcgggccttagcttaccttgctgactgcatcttggctaaaactaaatgggaattattctaacaacccttcaagttgatgctattattaacccaattttacaaagtactttctccaaagtcacaaacaagaagtggagccaggtatgcagatctgacctctgggctcggttctcaatccttcgagttaccatctccaagtcccctgtggttctggttgtgaccatctctgcattcattcaaataggaaggggctgggactgccagcatctgcgggcatctaattagtacccaagtgtcacaggagaccctgctaaatggtatgagagagctgcatcctcctcagttgcctagagtaacagtacaaaatcctaaagccttttccatagctatccccaaattacgtctgggtcctgttctgataaggtgtttgggaataaagcagcagcacagtgacctttaacatagacccatttcgggccaggtgcggtggctcacgcctgtaatcccagcactttggga

SEQ ID NO: 434 - DNA, 581 bp, Homo sapiens
atatttgacaaatttgaatgttgttggaatggatctgacaggtaattaagtcaaacctctcaaatatgaattttattaaagaaaagaaacaactatttcattccaggtcctaacttcgtctctagggattccttgaaataaatttagtaattttagatatagcacagcagtactggtagataaaaaattaaagcattgtatttcactagtaaatattttttcttttatgaaccagatcacatttctgacatgctaaccattaaaacggtgaagcttcagcttggttgttattcttccattaaactgtttcagaaacattcaggcggcagataactcatttggattgttagaaacaccaggttttccagatgctacattaacacctcatagaagtggtctttcatatgtatgttatgtatgatgttaaccataatatatatggttaaaattttagtagtagttatcctttgctttttataatttccagttttgccgtagtgtaattcctttttcgtattcatttttagtaaaatgttacccattatttaaagataaaataagtcttactttgagtcttttag

SEQ ID NO: 435 - DNA, 531 bp, Homo sapiens
agtacctttatgtgtatctggtaagaatgctgcctctaccttttcttcctatttgtactatgtgaatgtggtgcatgaatgtgtggaatgtgtggaatgtgtagtattgggatgccagtatctttcagcgtgtttgggtatatgtccactgtgcataatatttgagatgtaaaaccattttgtgcggtatatgtgttattagttgtaagtcggtgaaatgtacatctgaattctgtgtgcatattgttggtactgatgctattttcgtgcatatgtctagtgtatatgttttaaggcaaactttctttgtgtgttgggtgtgtatgtgacacgaatggggacagcatctgtttttctgagcatggattgatgtgtggtgtctgtatgtatcttggaatggaggagggagattgaagaagtctggctgtgagcagcagaaataatttccaaagttgagtgacatgactctaagatgcccagtttctcggcctggggtcagcctgggtgatagctcagtctgtcagaatgaaa

SEQ ID NO: 436 - DNA, 630 bp, Homo sapiens
ttcttcactgcagttttcccaagtgtatcctccttcccagttcccaggccagtcccagcacagcggtgagggtcagaatccccaccttgacccaaatcccttaaaaagggctggccacatccccaggaggccagttctcaggaatacaggcggcagctctgcttgctcttgaccttggagaactcggccatgctgtagaaatctttctacttggccctggccaccttcctctctgctgttcgtgggctcatgggagaggggccatttgtcaggtggattttagtgcacctctggggctgctgtcccagtgcccactgctttttatttgcctccgaaggctggtgctggcaggggcaggagtaggctttgcactccattttttcccaataaagagtccctcgagtcctctttcagctcaactgagagtgggtcgatggagccacttcctaaagaatcctgaggggcacggagcaggggacacagcacctgccaaatatgagagaaggcggtggggcctgcccttgtggctcattcctagaggccccaccccagtcggcccaggaacgcaccctctacccggtgactctgaccctccatccctccttcactgtttcctgcataccacgctat

SEQ ID NO: 437 - DNA, 390 bp, Homo sapiens
agatccattaaatctctagtcatatgcatgaaattattagaggtatatgtatactgaaaaaatgaatttagtgctgaattttcatttgcctttcctatatatagtcctctgtattaatgtcagcaatcagattaaaactgaaaatttgacttcctctgcttcctctaataaaatctcatttttaattccttattagagaattatttcagcaatgaaggataatcatattttaaataaaaaactgtctcttatcagaaagccttattgctttaaatcattcttaaagatgtatttgaatgccttgttcaccagcgagaataggtactacaaggaaattcagaagaccaacaagtgggtcgggcacagtggctcacatctgtaatcccaaca

SEQ ID NO: 438 - DNA, 595 bp, Homo sapiens
ttccagaaatttcctgtaaaacattttttcaaagatctttggaatcctggcatatccacataatgaccgttacttttctttaaagcttattagataactaaatatgtataatcaaaacatgatggctttagcctttttccattatgaaggctggtctattaatcctaaaatggaccaatagctaaagtgtcatagtcatctcccaataaaaaaaacctgtactttaataactgtttaagtaccccaaaatataaatgactaccacatattagcccatgtcccctttaaaatataaataaaaaatgggaaggtaatttctggttcaattttcagaccttaactgtacatactcctttccagtgttagtttgccatcttgtggcctcttaatcctgtgcaattcagtaactgagcaacatgtatgttaagttagcctatgaaactgacaagctttatacactcatcacacacctccacttttaaacttacttcatatggagccatgtaagttactgtacttccaatttcactccagacccaactccagctacaagtgaagcaaatcacctaaaaaaaatattctgagaaaagtgctc

SEQ ID NO: 439 - DNA, 623 bp, Homo sapiens
agttgttcgaatctaaatgtaccatttaagtcatgggtgatccctagaaacccattttcactgggtgcttctcaagactatttgggaaaagaacaggacagtgactcaaaaccagagactgtattcccaagcgccccatgcctcctgtcaaacagaaatgaaaccaaactagccacagccaactgggggggctcttccctgcctcagtttccttgcctgttgaaggcacacacaaacatgtatgtggtgtggaacaaaatgaaataggaagctgtggtgaaaattaaaagagctatgcagatgtaaaatgcagccactgtgagtattcgaggtaaggaattatacctacaaaagacgctcacggccgggcacagtggatctcacctgtaatcccagcactttgggaggccgaggcaggtggatcaccagaggtcaagagttcaagaccagcctgaccaatatagtgaaaccccgtctctactaaaactacaaaaattagctgggcgtggtggtacgtgcctgtaataccagctactcgggaggctaagacaggagaatcacttgaacccaggaggtggaggttgcagtgagcagagatcatgccactatactccagcctgggt

SEQ ID NO: 440 - DNA, 491 bp, Homo sapiens
ccattggttgaacgttaaaagtcgtcccagtaacattacatctcactggaggtgacttatctggaagcctgtgtaatctgcagcacagcagagccaagaactcaacagaagagcagtcaagatggaagttataagatctatatgataatattgacatgcttcatacataggggaatccctgagatcatcacttagaacatattcatcctcattttaaaaataattctagcaagctcagcatattagaaccacccccttagaagatacaaggaatgttatcaacttctgcaaagactatgtttggtggggttgctattagacatacaaatgacagtttgtataggaaagggaagagaaaaacacctaaaatgcaaacttacatcaaacatcacaaaggcctgataacatttagtgtagtgacaaatactcatttttcaggtcattcaacccacattactgagaacctagtcccttcccttgtgaagtttact

SEQ ID NO: 441 - DNA, 604 bp, Homo sapiens
cagaggatatatgggaggagcttgggagatgtgagatttgatcatgctgtgaaattcgagaggaggagatgactgacacacacagtgaggaatcaacgctagataagcatggggggtgggtggggagatgcttttgccgtgcactgtgaggaggcacagtgacatttcaatctaaggagagatgtgaggggtaaagagaggcctgttattagacttcattaaacagggatggtggaggctaagacatctctagaatcaaccgctggcagggagcatttctacttgtagtagaaatgttaagtggaatagttagcttctctctcattgcactccctctctctattaaaaatggagacaggccaggcgtggtagctcatgcctgtaatcccagcactttgggaggctaaggcgggcggaccctgaggtcaggagatcgagactatcctggctaacacggtgaaaccccgtctctactaaaaatacaaaaacaaacaaacaaacaaaaaactagctgggcatggtggtgggcacctgtagtcccagctactcgggaggctgaggcaggagaatggcgtgaacccgggaggcggagcttgcagtgagc

SEQ ID NO: 442 - DNA, 431 bp, Homo sapiens
gcaatgcacaggatgttagagatacaagaatgagtaggatccaaagcctggtctccaagaggccaagagcatcagaagattgtaaggaacacaatgttggagaaagtcaaacccaagcccactaaagacacaatcacattcctagtccccttggtggctgtctttatgggaaagtcagtttaaggcacggaatcttaggccattgggtcgagaggttgggctctggagttgggcaatcctaggttcaaatcctggcccctgtatttatcatttggatctgttcagggaaattctctcatctctttgaatcatggctcctcttctaacagtacctaccttgctgagttgctggggataaaatgagatcatcaaatgtaaagaacttggcacagcacctggcatctcctaagctctcatttaatgctaacacc

SEQ ID NO: 443 - DNA, 598 bp, Homo sapiens
agtggtagtacaaagaatggtaggataacaagaaattagacttttgcaagtctctgatattttacatgaagtggtgcattttaaactaagtagactgtagaaaaacgtgcagtagtccagacacaggggctcacacctgtaatcccagcactttgaaaggccacgacaggtagatttgaggccaggagttcaagatcagcctgtccaacatggcaaaaccccatatctactaaaaatacaaaagttagccgggcatggtggcacttactgtaatcccagctacttgggagactgaggcacaagaattgcttgaacccggcaggcagagcttgcagtgagccaagaacacaccactgcactccagcctgggtgacagagcgagactctgtctcaaaaaaaaaaagaaaaatgtgcagtatatattatagttacaaaagcaacaacttaaaaaataatacaagcaagtacagttcaaaagtcagtagagaagttaatatactaaaattgaacactaagaaaaattcaagcaatgcaaaagaggaaaagaacggaggagcaggaattttaaaagaaatggaacagatacaggccgggcatg

SEQ ID NO: 444 - DNA, 591 bp, Homo sapiens
ttatatatgaaggatttcaaagagatgtcaattttggaaaatgcttctggccatcccaaatgcttggcttatatctactgttttttaacttgttttttttcctcattcattccaactcttattactaaaatactacatcaaaagaaattaagggaatctacaaatatatttgaataagtgattttgccatgtatactgaccagagtcacacttgctcttgctccaaaaacaaatcattgcactgcctgagaggaaaatggattgatggccaagaaagtctgattgttacttctctatacctcatgatttcctttctttttactgcagttctgaaatttggatggccaggtcattcagccctgatcagtcccagagcaaaacttacagtccctaagctcacaagaatgtaatgtgtatcaaaaggtaaatatagacctatgaaatgagatgattgctacagatgctgctaatattaatttcggccattctgtgcatttttttttctgtaaagaagtctattttggggccaggcgtggtggctcacccctgtaatcccagcagtttggcaggccgaggctggcagattacttg

SEQ ID NO: 445 - DNA, 89 bp, Homo sapiens
taatatttctgacttgagtgttattactctagcacactactcaagtgttttttaataaaaaaactactataccatttaaacttatcaac

SEQ ID NO: 446 - DNA, 553 bp, Homo sapiens
ctaccctcaccctacactggccctgccctaccctgaccttgccctggcctggccctgcctttggcctgccctggctctggttctgccctggcgttgcccttgccctggaccctccctggccatgtttttttccatggtccttctctggccttgcccttgccctgtcccctttctggtcctgccatgtttctggccctgccctgtccatgtcctggacctgactctggccctggacctccctgtccctgccctgccatactctggcccattcttgctctacactgaccctgccctgccttggccctgtgctaccctagccctgccctggccttctgctgaccctgatcctgccatggccctggccctgccatgtccctgccctggccctggttctgccctacttctggccctggccttggtcctctcatgtccctggctatgaccctgcccctggtttttctctgtccatgaccttgccctggctctgtcctatccctggccctgtctcagttctgtcctagccctggcctttcacagtactttatgcttagta

SEQ ID NO: 447 - DNA, 591 bp, Homo sapiens
ttctataagatcactgtggcaaattttgcttctatacttcacagttaaaatttgctatctggctactacagacagcagccagtgaatctcactcagctttatcaaactattgcttggcaattcctcatgtaggggattgtatttaaaattttctttgccttatgaactgacaagttgattggccttcaggcctgggatcttgggtcaggccattggtaaagttcagtggctaagaaagaggtcactgattactatttataatttgttttctgataattttagcatgcacatgaactcagaggccatgggttgcagtttataaattaaaacaaatgaataaaaatatgtacaactaattctggccattttcaaagcactaagatatttgttatattcatttaaattagtatgacattatgcttaactttaaggcagaggtggacaataacaaaatatcatcttgtctgtttcttctgaattttcagatgagtatttataaaaataacactgatgaaaaattacaaaagtcataacaaaatattaaagggggactatattcatttaaacccaattagtaattctttattgcta

SEQ ID NO: 448 - DNA, 535 bp, Homo sapiens
aagatatgccagggtataaatcactctggtttcctaccaagaaggcctataaaagctgtaagtctgagaatgtaccagctgcacccagacttgccctaggcacaaatggtggaaactatcttgattggtttcctcacctcctcatcatcttctcttgatacttttaggacctggccgtcctttgttcccctaggcttacgctgccacctctactgacattgctaataccccagatctactaggacatatctctttccctttcaaggtaacaggttgttcatctaataaattaatctccactaatgggaagatattaaggagagtcctgatttctgttaatatttaaaattgactctcagggaaaatgcacgtgtttctgttagacaatcatggtgagtaacttgtggggtggtcatgtcagtccaacgtgtatatttttctgatagttttttttcttaacagcatggcaccacctgatctctgtcattgaggagagtgcatacttgaagtaggacagttagaaatgaactaactc

SEQ ID NO: 449 - DNA, 533 bp, Homo sapiens
  misc_feature 432: n = A,T,C or G
actttccctgaatcattgatactttccatgatggagggtgcagcctgggatagtgctggtggggccaggaagctgatggaagctggctgatgcatgggcttgagctggagcctgccttgatgggtggtggacacccctgaccactggcggtgaggagctctgccatggtgctcatgctaaagtggcatcgactcccttcctgtggcggggctccctgccatgtgccagctctgtgctggccacatgacatgctatctaatttaatcttcccagtggccctgttttacagatgaggaaactgctgatgctcagagaagttaactgtcttgcccaaagtcacagaattagtacctggtagatccaggattttaccctagaccagtcttacttcacaggctgtgccgtttctcctaccctctgtcacctctactnggtgggtgcctgaatgtgcctggctaagcctgggcccctagcattgcctgtctggctccacacccccaccaagctgtgtcttccctctccctgcttggggc

SEQ ID NO: 450 - DNA, 510 bp, Homo sapiens
cagaagggcactctgaaatgcagattctgaaatgagttggtgcagtaagggatgagcaaaccatgttcttatactgcccccttccggcaaacggctggaagagacagcctgcatattttgtgttgaagaaactagttcaatttcatttaaaataaaacttcttttgtaatctctttgccccagccctgctgataggcagctgtaggtaatttctcttgttgcttgaaaatgttgcacaatatgaaaaaaacaataatgttaaagacaagacatctttggtgctctagaagggcaagaagtagggaaaaattactcagctgtatttgtatcaagcaggcacatggaagctgggaaaaaaacagaactccctccttggtttttgagaattgatggtgtgaaatttcctcagatgccaaaatcagctaaagcacaggaagattataaatataaggtaaacagaaggaataccgatcctagctttctttcttagtaagacagaaataaagaaag

SEQ ID NO: 451 - DNA, 168 bp, Homo sapiens
ttttgtgttcaaaatagatgtaactataggccccagggcaatgagggaaataatacaacaaactatcgactaagactgtcaaagtcatttagtccgcatcactgtttttataggacacagaggtgacttggcgacacccagctagttagtttcagagctaggatgaga

SEQ ID NO: 452 - DNA, 456 bp, Homo sapiens
cgaagtgctgtgattacaggcgtgagccacagagcctggcctaatactactcaatttttatcaaacactctggcgctagtagacaatctcctttagggaaagaactgctttcaggaaaatattttaataagttacctgtaataaaagtgagaggcctttaaggaaggaaaaaaagaagatttatgctgcctctttatgggaaaacaagagggatttgtcacttattttttcctactgatggggagtggggctaaggaggaaagagagacaagagccagtgagctggtctgagttggggactgcgggaagtcatggtgggtgagtgataatattttaagcacagggacactcagagtttaatctgaagttccattgctgtgatgtaatccactctcttccttcccacatgtcatcagtgattatgacaatataaacatcagcagaaatcttggggac

SEQ ID NO: 453 - DNA, 561 bp, Homo sapiens
ggatactaagtcttccctgtatggtggttttgaatatctaatgagatcaaatacgatatgataagggcctgtcaaaagccatgcccttacaatttataatgggatctttaaattgacaatttcttctcctcctgcttattagcatacgaaagagaagttatttattttgagtcagtacaatgtatcagacagacattataggtttaagaatcagacaaactggaagatgctttcaagcaagtttattatttcattcatctattcattaaaaaatattgaaaaccatctctgcctcttactagctgagtgagcttaggtaaattactaatgttcttcagctttagtttactcatctataaaattaaaataatagtacctaaatagtaaggtggttgtgaaaatggaataaaacacacagcctgcagcacattatcggtggtaggtatattatgctagatgattattttaataaatgaattagtgagtagccacttagcatgggttttttaaagcttggttttcttgcaatatggattagaataatgatattaaaatattcac

SEQ ID NO: 454 - DNA, 182 bp, Homo sapiens
ccgtcttcaacatcaccatggctatcagcaccattgacattgctgtcatcaccatcaccatcttcaacatcaccatcaccatcatgatctactgggtgcccaggaaggggtgagccgccctctggaggaatctaccttgatgatgaggtttggtatttttacagaacaggagaacataattt

SEQ ID NO: 455 - DNA, 520 bp, Homo sapiens
gattataatcaagtgtaggcttcctgggttttgacatccttttagaacttgggtctggaattccagaaatgttaattgctgcttgtatttgttcttgtttgttttttagccagtatttgccctttctatccagccttatgaataatagcagtaaaatcacagtatcttggtcaggctgtattttttccttttttcttttttaagagacagtcatccaggccagagtgcagtttgatgatagcttgctgaagcttcccactcctgggctcaagttatccttccattttggcctcctgagtagctagaccataggtatgcatcaccacaccctgctaattttttaaatttttttctagagagagggtctcactgtgttgcccaggctggtctcaaactccaggctcaagcaatccttcagcctcggcctcccagagtgttgggattgcaggcgtgagccactgcacttggccaagttatttatttttaatctctcttgcccttctcccaaggcaggcttaag

SEQ ID NO: 456 - DNA, 309 bp, Homo sapiens
tagtttctcctaaactatttctattcaggtgtttacatatgcctctgttctttccttttcttatacctcttattttaaaatgacctctatttcttatttattttatcagatgagcgcatttgactacatcattatagttctgcctaattgtgcctggaaattaacacgttagatacacatattattagattataaattactttcttctttgtgtctcctttatattacatttaggacaatgtggaatattttaaattgtgataaaaataaacattcccaaatctaccatattgaccattttaaaatata

SEQ ID NO: 457 - DNA, 414 bp, Homo sapiens
ttctatttagattcacagatagttaacccccagaagtaatcatagaattattaaatatccactcctctgttcttggtctgatggttttaactgtctcctgtcttcagtaggactgtcactgtcgcaaaatgctgtttttgtggtctttatctattgtactgatttacttcagcatcttaagaaaagcaatctattgagaaaaaagatcttgaagtgcttagtaaacaaaatttctctctctttcctgataacaaaatacaatggcaaatggagcaaatgtttaaaggtataaaataaaatcaccagaagaaaagatgagcaaatatttttacaattttgctttacaagtatgacacaaaatccaaaaatgataatggaaaagttgatacatttgagttcataaaaattggaaat

SEQ ID NO: 458 - DNA, 467 bp, Homo sapiens
cagtatttacaaggaaaaggggaaataaatatagagtaaataaagatagtttccacttaggataatgaggaaataagtaaattcaattgcagattgctatttgtctcctgttcaaattcaactcaaagatgtttttcctcaagacagattctgaaaagcccctggaattatcctaaaaaaactattagatagtttctgtaagttcacacataattcagctgaatataggctgatagctacaccagtttcccaaaaggaaggttgtaaattcataaaatacttccatctgccatgtgtcatttgcaagaagtctggtaaaataaaaaatatggaatggccataattcacatttcttttttttcctcttccttttgccaagataccctcattatcttaggcgaagaggaagagaaaaacccctgaaacataatgaatgtgactcagtagatataatcattaatctcatt

SEQ ID NO: 459 - DNA, 317 bp, Homo sapiens
accacaacaaactcaggtaagttaaatcccacaaatcattattttttcatgcatataggtgagaggtaagcaaagatatatcaaaatgttttgattgagtactatgggacttttccagtgtaaagctaaagtcttcatgatagcttaatgccacaacgaatattattttctaatgttctaatacattgcctccctcttttttggaaaaaatataatacttctacccacacctttatattgacttaaagcgaattattattttgtcttttttgatgtttttcaatatgagaatgatgcctaaagtatacgttaacata

SEQ ID NO: 460 - DNA, 477 bp, Homo sapiens
acaaggcacagccctagatcccttaaaccttgattccatacaacacatttttgtgagctcaaggttggggcaaagaggttggggcacagtgattggggcaaagttacagattaacagaatctcaggacaaagcaattgttcaaggtacaggtcaaaatggaatttattatgtcttccctttctacatagacacagtaacagtctgatccctcttccttttccctacaaaatagaaatgatcattagcaacagaagaaaactaaaatgagtaacttattttttttaaagtaacatactggctaggcatagtggctcttgtctgtaatcccagcattttggcaggtggaggggggcagatcacttgaggtcaggagttcgagatcagcctggtcaacatggtgaaacctcacctctattaaaaatacaaaaaatgggctgggcatggtggctcacgcctattattctagcactttggga

SEQ ID NO: 461 - DNA, 260 bp, Homo sapiens
gagcttttggcaacacaaaccatgctacttctgagtctctgaatgttgggattggaagtgtatggaaaacttgagtaagttcctggctctgccactaaatagatgagtgaacttgaacaacttatttaaactctctgagctcctgtttacttatctgtaaaatgaagatatttagagttaaaaacctaggatatttagacttaaatttagacttaaattggctgctgctttggtttcttgaaagaaatactttggtcctt

SEQ ID NO: 462 - DNA, 216 bp, Homo sapiens
tcttgtaagcatggtcttaatttagaaattagctgtgcattagaaaataaaatatgaaagagagtttgtaccaaagggaactgacttttggtccttttcattctcagggatgaatcagagaggccagacaaatggtcttttctcaaatctggagctgagtagaatttttcagacacagtgaacccttactcatgtgttatttagggatatatcatg

SEQ ID NO: 463 - DNA, 339 bp, Homo sapiens
actggtatgctacttcctccagaaaaacacccttaatatccgttttggcctcttttaaaattcctcttctccatgttcctgtagtactccagtttacctgtgtctgacactgaagacgctgtgctttactgtacatttgggagtctcccctcccactggagactgggctccctaagggcgggtctgtcctgagtatctctgtggtgtcccctctggtgcagtgtctagcattggtcaacagatgttcatggcaccgaactgataaattgatgtgtgtgtacgtgtcacgtgttcctggcaaaggattaagttgctagccaggcacagtgcctcacgcct

SEQ ID NO: 464 - DNA, 338 bp, Homo sapiens
actaaagaattatggtcgcttccagttgtaatattttttgtcgctgaaatatcatttaaaagttacatttcaaaatgtatgtatacaactataatatagccattggaaatatatattttaaatgttcagttattttttacagtaatctgtcatgcctgtgtcattgttgacatgaaattaatgttagaatcaatgcaagataatatggatcaggactgaaacagaaataagaattctaacctcataaaagagaaaatgagaagagtgaaatttcaaattccttcaaatggaaggcatgaaaattctcattagctctgggtactaatatagtgggatag

SEQ ID NO: 465 - DNA, 329 bp, Homo sapiens
ctagcagaaaataattctatttgcctttcagatatggactgaactgagtgtaaagaatatgtaacgcattatattctagccaagtaattagctttttaaaattataagttattaagttggtaaaaatatataccctgcaattcttatcttaaaaagtacagctgggcacagtggctcacgcctgtaatcccagcactttgggaggccgagacgggcagatcacgaggtcaagagattgagaccatattggccaacatggtgaaaccccgtctctactaaaaatacaaaacttagctgggcgtggtggtgtgcacccatagtcccagcta

SEQ ID NO: 466 - DNA, 493 bp, Homo sapiens
ggagagagggacacaaattgattggcagaagctgaatgtttttcctttgctagactttcatccaatattgaacaaattattgcatttagctcaccaggttgccacagtctttcaatacatcagaccagcacagtacttattactttatagcaatagcaatgatataaaaatgaaaaatattgcttgaaaatgtcaaagagatttttcttttggtggtggtggttgggtaattcagaccattcattccattgaaaacaagcatcccaaatttgaataactcttaaaaaattcctcaaaagtagcagagctaataagataacgaggaattattgggttaaaattcagaacatgaaattcctggccaggagcagtggctcacatttgtaatcccagcattttggaaggctgagttgggcagattgcttgagcccaggagttcaagatcagcaggggaaacgtaatgaaaaactcatctctatataaaatacaaaaa

SEQ ID NO: 467 - DNA, 523 bp, Homo sapiens
accaagtaggactctatgtgttatgttatgaagaaagatgttttgctaacgagatccacacatatctttgatgttcaaagtgggaatatagtgtagcaagaagaaaattgttgaaaatatttccaattgtatatgttatgcatatcatctaaacataaacatgatgcattgaaaaaaatactgttggcaaagcaatttagaaattccagaaaataagccaggcatggtagtgtgtgcctgtaatcccagcactttgggaggctgaggcaggcggatcccttgaagtcaggagttccagactagcctggccaacatggtgaaaccctgtctctactgaaaatataaaaattagccaggcgtggtggcatgcacctgtagtcccagctactcaggctgaggcaggagaattgcttgaatctgggaggtggaggttgcagtgagctgagatcgcaccactccactccagcctgggcggcagagtaagtgagactccatctacaaaaaaaaaaaaaaaaaaaaaaaa

SEQ ID NO: 468 - DNA, 482 bp, Homo sapiens
atttgtaactcacagggcagaataacagctctagagctcaatttatctggaggagattcagcacacctgcttctctttttccactggcatggctcttggtgcaaatttgtatttatgtaatagttagaaattaaacatcagcaccaacggaaaaatattcaacgccctttattaaacatcaaacaactttgtcaatgggaaaagctgccccaactgttttagatcttacctctcaacattgttgtcaaagtacctttccactctctggtagtgtctttgagagggtttgtctattggacttaaaactacatacacaaaggtaagataaaggttatttacacagccaatcttaaaagtagaatatcagcactctttaatcttcccatttttttgtagagacacgatctatgttgcccatgctgtctcaaactcctgacctcaagcaatcctcctgcctcggactcccaaagtgctgggattac

SEQ ID NO: 469 - DNA, 381 bp, Homo sapiens
tctattctttttcatgtttccatgttcctttctctttttcttgaaagattagacctagaatctatcataaccaactaatgcatactctatataaatttgttgatcaaataaaatgttagagctatttaaatttatcataacagctttattaaaaaacttttactgggcttagttcaagaaccagctttgctctaacaatcctggggccccatgttatttagttgccacatggcctcacattcaaagaaatacaatctaaaagctaaaagtaattttaacaggaattctgttctttcagcatctctgaaatagcttataagcgatttatttttcaactcacatcaatatttatcaaagtactctttttttttaaataaaaag

SEQ ID NO: 470 - DNA, 429 bp, Homo sapiens
gactcacagggggatctgttgcaagctgaagtttgagaccaggatgctagaccctgaactacttgaggacagaaatcctacttctccctcacctgagtacctagcccagtacctggtcttcaggagatatcaaaagctatttgttgggcggatggtgggtaaatgaatgagtgggtgagaggccattcatctctgtacagctctgttgaatgtatcctcttttgtcttgcacaccattcctgcttccgctgggatgtgcgtgcttcccaggccagtgccaggagctacagtcatgccaggtggcagcagatgagacctactttggaaacctgtgtccgactcagggcagttacctgtgggtgcagtaccagtgccgggaaggtgagtccccaacttgcttgagcatagaaatgtccctctgattttatg

SEQ ID NO: 471 - DNA, 217 bp, Homo sapiens
gttagtattcaatggtaggttccattcattttccttaccttgtttgtagctataaaattgccagagtaaggtagagcttctccttcctattccaactcattttctgtatatcaccccatgttccataaggttatttccaaggagaagggaggcaaagaatataaattaagggcagggcgcagtggctcaggcctgtaatcccagtactttgggaggc

SEQ ID NO: 472 - DNA, 374 bp, Homo sapiens
tatagtgttgaggggcagatggggtatggatagatgttgagaatggcgtgaaggagtccttatgggactctagttcccctgctccctccaagaccactcagacccttggataagtcaccaatagctagaaataacacgagtttacttgaaatgtgtcttccagaggcagagcatgattaattgtcaagattttcctgttcttggcttagactgagttagcaaagaccctgtggatgtagaaatcacattgaaaaaccttcctaaaagtatgccctctttataagaacggcacgatggactctgaggactcaggggaacgggtgcgaggtgggtgagggaaaagagactacgcactgggtacagcatacatgctc

SEQ ID NO: 473 - DNA, 361 bp, Homo sapiens
gacaattgaagcagcatgggaacaattccaaaccctgcatgtgtgacccaagagggaacgtgaaatatacaattcttccaagtatcccgccaggctgcagggaattttagtttttgatgacaagggctttgttgttattatttgtttgttttcttataaaaacagcccataaacacaagctaacttcttctctggcactcagtctgagacagcagtctgttctaaagctggaagaaaaacctgccattgaatttggtgttaagtcatattgctttcctaaggagttttcaggggtaattttggctatactaaaaaatcaccttcaggaagtggctttagcaactaattccttttaagaagc

SEQ ID NO: 474 - DNA, 295 bp, Homo sapiens
tggaaccagcaaagcatgaaaggtttaagacacttcatcagttgggttttcttgccttgaaaaagggggaatagaaaatgatttggtaagcactccctctttcacttcctttggaagggattgggcaaaataagtattatttcctcctcatatacgtagaattagtttttttggttttttgtttgtttgtttttgagacagagtttttgagactctgtcacccaggtgggagtgcaagggcgcgatctctgctcactgcaaactctgcctcccaggttcaagcgattctcctgtc

SEQ ID NO: 475 - DNA, 291 bp, Homo sapiens
cgacagaagggtatctttattaacaattgacttgaatttaaaaaaaattttagaagcagttaattacagagaagtgctgacatttctacttttcataggaaacttggagagaagtcaaaggtgtaaaaaggacaaattttagaaaatgagattcatgaggaaagactgattaagttcactttagttaatgaaatgtggaattatgaaaaattaaatattaaggagaaccctaatgaaattataagaatagaaaataatttactcttggcctggcacagtggctcacaccta

SEQ ID NO: 476 - DNA, 105 bp, Homo sapiens
tattttattctccattcaactcacaaattttctatgcagtcaaattaaacgtgaaagatgggtttctcactagctatgaacactatcaagttgatggttacacta

SEQ ID NO: 477 - DNA, 541 bp, Homo sapiens
aatatacctgctctaggggtagaaggttaggaggaaatgccaatatcatccatcattttgaatctagaggcttcttggcttcagagttgtcaaaatacatctctttttttggtgaatcaatacaatgaagtatgcaggaaaatggcaattacacctattatacagatggcaaaactagaagatataattgtagtttttatagagttatctctttaaccacatttacactgactttcttgttctccccacttccactctccttccacgcataactaagttatgcgtgttggttcttcaggtatatttaaaatatgcaaccacctgtgaactcattcacagataaagtgagcatatcttgcaaaggaaatacacagcgaatctaaaaatgtacatgccattttattttgtatatatgacagcaaaatagaaaagaacttttaaacgtttacttattctgacttcgtaacagcatgtcaaccagccttgtaagtaatgacagtgtttactagtttgtaaagagtgctttattacaaatgtgagc

SEQ ID NO: 478 - DNA, 498 bp, Homo sapiens
taaattgtttatgtatatattatttgcacagactttgcttccattttactgaaatggaagcaagtcatgtgtattttttttaactactatttttttaaactttcattcaatctgataaccatttagccattttattttcactcccagatggtaatctataaaaatttgcttatataatttcttacatatataggggctttattagctttttgaaaatatatttatatgcatctgtttgcatcttacttttattgcttaatgctatttcatgggacttttcaggccaactatgctaactcaatctttttaatgacagtctaatattccatgctgttgatatgccataataaatccaactattcctctatgacattctttttacaatgaggcagttaacatccctgaacatctatcctaatgaattgatgcttttaattgctatggtataggtttacaggattagcattaccaggcctaaccatatgtattttttgaaat

SEQ ID NO: 479 - DNA, 365 bp, Homo sapiens
gttgaaatggacttttaaaacgtgttttccatatcactaaggcacagccctatgttttctttatttaatatttccagcaaatagtaaagtgcctggcacatagtaactgccaagtaaatatgtgtttagtggattaataaaagaatgagtaagattttgaatgttcttgataaagagtattacttcattaagccttccttaaggaatattacatttgcagcagtaaggaggagaagttggaggaaagagaaataatagcctcttaataagcctaaggagttttagatgggtaagaatttaaaaatacccattatgagtctggccttgtcctaaggtattgggatacagagattaaaatacacaca

SEQ ID NO: 480 - DNA, 388 bp, Homo sapiens
agccaccagaagctggaagaggcttgaaggactcttccctagagcctttggagggagcccggccctgcccacaccttgatgtcctccaggtctgtaggagaacacacttgtgtcgttttaagccacccagtttgtggacagttgtttcggcagccacaggaaataaatacactggaccagcctcctcacctttccaaggcgtggcatgggggccgcagcgtggcagggaggaggaagcaggcgagcgtgcagggaggctcttggggcccagcctggcaggtggcaggagcttgggaaaagcttgctgtggtttggctctgaagacagtctcacctctagtaaatttctaagtggggccctgaaatgtgaaaacacaaaactggattct

SEQ ID NO: 481 - DNA, 582 bp, Homo sapiens
caaccccctagctaagatgaaaacataacatgagcaacaaataaacctttgatgttttaaccgctaagattgtggaggttgtccaagcccattcccactgctctagcttactaagtaaagtcaaacatttttgtgtttattacccagcaatttcaatcgatggcatttgcccatttgagtatatgtataaggaagcaggtagaaggatgtttacaagaacattgtggtaatagaaagaagaggaaaaaatggagtatccgtaaactataaaagaataaactctaatatattcatacaacagaatcctgtagagcagagaaaactaatgaaagatagccaaatgcatcaacaaagatgaatctctaagtatattattgaatgtaagaagcaagtcagaatagtacaattcatgttaaatgcaaagtgtgaagagttgatggaaattataagaatccatgcataggttgtaaaaatatacagaaaacctaagaaatgattaatacgaaattcaggattgtgatgttctcttctccactatctctatatagagtagaagacagagaaatgtactcaagaagtaga

SEQ ID NO: 482 - DNA, 578 bp, Homo sapiens
ttgatttcaaaattccaaatatttttgaggacccaccgtaagtctttttcatgggtttttataggaagtacatgtccctggtttaaagatactctggtgaggttctcttgccctgaggaggggctctaagaatgaggcccttgcataggcagtctgggagaagggcaaaagcagaagggattctgtgagtctggaaagttcctcagcaccttcttaactctgagcgtaagtgctagggtgtactggggcatgcctgagctgccagaaggaatatagacacatctacagtcttaattttgacaaacaaaactggtcagtgaactggaagagttaagtattagttaaggggaatctgaaacttccttcccaggtcaaaaatatcttcaccacccaccatatcttttatgcaacacatatgtcctgagtaggcactctgggccaggagggatttctacagtgtactagacacaggcattactttcaatgaccctggtgatcctcagggcaaagaaaactataattaccagaaaggttaatatgttgaactttatatattggaaaaatatggcaccaaatct

SEQ ID NO: 483 - DNA, 570 bp, Homo sapiens
agattggccagaaaatttgtttcttcatggaggaagaaaaatgggcctttaaaaatgtgtttaaacaattattgagactactgtccctttgtgtatcttctgtgactgaaagcggtaaagctgacagcaatgtttccacacaccagtcagggctgcctgtttggctagacagaaaattttcccccatgaggagctccaaagagcctcccagattatgtctgcactgtaaaccaaatagatctaatcgatatttacagaacatttcatccaagagttgcagaatacacattcttttccttgcacatggatcattgtcaaagatagaccatattttactcaaaaaataaaataatatcaagcatcttctctgaccacagtggaataaaattagaaattaataacgataaattttggaaactatacaaatacatggaatctaaacaatgtgctcctgaatgaccagtggctgagcaaaaaaaaaataagaaataaattgaaaattttattgaaataggtgataacagaaacacaacataccataacctaggggacacagcaaaagcagtacta

SEQ ID NO: 484 - DNA, 544 bp, Homo sapiens
atcaaggagaccaggcctgccctaagggttttgctttcttcaaaatgtacagcaagtagaaagcatacactactgcaagggccctgggcacactatttgcacagatgaacaatacctgtggggataatactgatggtttgagcactactttgtacacacctgccattatttatgtggtaacgtccttgacaaaatgatatgttcctatgacacctctcagccagtggagtttctcaggctagcactatgcccaaatccccagaaagacatgacacagattaaaatcccagcagaagaatctccttagggcctaacactgatccaaacattctaggccagtcacctccattggcacagaaatacacagagggaaaaaccttgagtcccctgctgcagagggggcaggctgtgctgtcgggggaggcaggtgatccagggcacacatatggggtgaagggttctagaatcacccaccggaaaagccagaaggggaccccagagacagtgttcctcaaagcctgtctttctacaaatgagaagactg

SEQ ID NO: 485 - DNA, 556 bp, Homo sapiens
ttagacgctcttttgaagaaaaggtgcagaaaagctcttaagaacttaaaggagaagacgcttttcaaatttcgttttctggttcaagatgttttggtgagtctatctgaaaatgctaaggaaaaaagcagaaataaaggccttccaaagagtcttaaacaacccccaggcctcttttagaacaagcaacatgcgtaacatttggcaatgtgcaacactgcaactcataaagcaacccagtctgataaagaaatacaggagtatatttcaaacaatttttctgatggggaagagagatccatctggattgtgggagtttgcaaatcagaagcaagcagccctttcataccccagtggtagagggtctgaggatgaagatgagtgcagacgacataactcacagactagaagttcaaggtttgctgcctgacatcttggaagcagctacaatagtttcctctctggtgctcctgccttcactagtttccccatccaatccgtcatacacacagcatagagtaatatccttgaggcacagtgattaaactatgcactc

SEQ ID NO: 486 - DNA, 387 bp, Homo sapiens
  misc_feature 1: n = A,T,C or G
naagacagtgataggaagtgtgagaaaagctgaggtcctgctgcccatttgattttagggtttttttggtttttattttctcatttatctatttttattttatgccatagcaactaccaatgcctggctaatgtggaaccaccagtacagccttccttttagctgagtactacagaagaaaattctgcaagcacagtcacgtcttacatggccactagcaaacatcaaacaattcagcataatgtaagtacaaacagttttatgagaaatgctaaaatgttaccagcaaccaaaataatggtccaggctttgaacaatgattcaattttaaatccttaaaaacaatgcagcagtctgcaagtaaccacattctcagaagaaaatctc

SEQ ID NO: 487 - DNA, 622 bp, Homo sapiens
acctaatgtcctctgggtttctccatgtggctgcgaatgacaggatttcccaaagctttatggctgaagcatactctgtgtgtatctgtatggcagtttctctatcccttcagctgtggatggacagggctgctgtacgtttggcctgtgccaatggccatgtggaagtggggactctcctggtgaactgaaaatgccacattgacattggtgataaacaaaatgggatgcctttgaggaggctgtacattgccaggaagagatttgtggcatcgttctgctggaacgtggatgtctacagcaacactgctctccactatgctgtcctataatgagagtacattcctggtagaaaaactattttcccatgatacggatattgaagtgctgaacaatgatggaaacacaccacttttagttgctgcagtttgcaaaagacagcaaatgctggaatttttagtgaagaaacaagcaaatgcacatgctgttgataggttgagaggaacagccttcacgcctgctgtacattatggctcgttaggtatagttggcattcttcaacaaaatattactgtctttattcaagatatgtatggacagacagcaaacaattatgctattt

SEQ ID NO: 488 - DNA, 583 bp, Homo sapiens
aaagaatgtactggcctcaatttctgataaggtatggatgaaccttcctcatgccagacaagaaagcaggatagattagcacactatggtaaaatgtatttcttcaaattaataaacctacatgagataattcacattagccaataaggcagaatacagtaaaattatataacaataattatttttctaagaagtgaggaaacagatgaataaaaagtgaatccctcccaggaaaggtaaacagcaactgtggcccaatgtctctgcatctctggaaataaggagctgaagaggctggaaaggtatattgacagaaagctgatataagagaagagatggactaaagataaatttcagctatttctgatttcaatgtgggtcagacctgctaactagtaataattactgctgttctttccttgtaagtctctccttcccttcagatcatactgtttcttgttggtctcaggaatttactatacaatgaaatttcttggatttgagaccaaattctgttaaaaaaataaaaagagactttaaatgatgaaccaagaaagacactaagagggaaaatctatgaata

SEQ ID NO: 489 - DNA, 578 bp, Homo sapiens
tctgagaactacatttacaagagaagatacgtgatatagttaaatgaaacagtgtgtgcaggctgaaagagttctagagcacatggtaagggtgggaaatgatgtgcaaacctcctgacagagataaagaaggcaattgtagcatttgtcctcaaaattcacttacaattcaaatgtttcaggggaatttccttatgttaatgtatctcttgtaatgtggctgaatgtacaaggaaatttggatttcctctacataaatttgataagaacattctatagctaacctgtgtttttgacaagttctataattaagctaattataataatagcttgatggtaatcactacaataatagctaacatttattgagtacttgctgtgtgtcagcactgtgttaaattactttaattgtgctctttcagggaaattaagagacttgcagaatgaaagagccacagcaggataaacaattgccagtctcccttgttggggactggctgactttataaagcaaacaaggcattctgtagtcactccaatgagtgggagattagaatgagaacggcattagaaagcac

SEQ ID NO: 490 - DNA, 136 bp, Homo sapiens
atgtcaatgtgtctgttgtcatggcggaggtggacggcacctgctactgagccgcccgcctgtccccacccctgaataaactccatgctcccacaaaaaaaaaaaaaaaaaaaaaaaaaaaaggggggcctttttt

SEQ ID NO: 491 - DNA, 343 bp, Homo sapiens
aactataaataagtaaaacaaagttatcgacaatgggaattaatgacatcttatgtaagaaagcataatttttgtattctcacttaaaccttttgctatttaaactttgactttcaattcaaatgtcattttgcaattaatagcaatagcaagcagaaacaaacaggaaatataacttttatttttttgaaagggagtcttgctctgtcacccaggctagagtgcagcggcatgatctcagcttactacaacctccacctcctgggttcaagcgattctcctgcctcagcctcccaagtagctgagattaccaggcgtccaccaccacacctggctaattttt

SEQ ID NO: 492 - DNA, 524 bp, Homo sapiens
gtgtgttgtattagtccattttgtattgctagaaaaaggtacctgaggctgagtaatttataaataaaagagatttattttgctcacagtcctgcaggctgtatgagcgtggcaccagcatctgctcagcttctggtgaggcctcaagaagctttcaatcatggtcaaaggcaaatgaggagcagtcatgtcacatgatgagagagggagcaagagggagatgccaggctcttctaaaaaaccagctttcatgtgaattaatacagtgagaactcactcattacagcagagaagacaccaggctgttcatgaaggatctgcccccatgacctaaacacttcccactaggtcccacctccaacactagagatcacatttcaacatgagatttggaggggataaacatccaaaccatatcaggtgtctctcattttaaccaaagttcttaatttcaattacattgtattttacagttagtaccagtgtcaatactttctattttctaactatattactaggcatga

SEQ ID NO: 493 - DNA, 532 bp, Homo sapiens
gggagatggagaggcagcagatggcctcagcctcagagaaactgtgggtatggggggcacagcttgggtaagttgccaagtgaccaggtcctgggagcgctttgcgggtcaggctcgctggctcctaggtggggacgttgctggctgacacggggaccatcgggagacgggctgggcaggtgaagggcagtccggtgcctggaccactgtgagctggcttggcggagacgaggccagggctgtgttcaatggaggctttattatcactcaggtgtaggaaggatcagaccactgccattgacaagatggtttgtcatcctcagtttccaagagaaaggggcatgtcacaccacaccgtgaggccacagggaagcccagggtcagtcagaaggcagagggttcgagggggaactgtgggcctgagacggtaatgtggtttctgcaggaaacttgagttcccagccatgatgggaatgggaggtcagacacacctgattctactccctcacttttgtagtttacacacaactga

SEQ ID NO: 494 - DNA, 562 bp, Homo sapiens
gccgaatacaggtaatctgtgtgggtgaaaataagcttgctgaattgcagggcgagtcttttttcaacgtcccatgctattttcgggatagatataacatatagctttaaaattgatattcatcctaagtccttcaaatacaggtaaataaaatagagcagattatgtgacactaactgtaaatgtcctgagaatggtagaaacctctgttgactataactggttctaaaccaagatggtggaattttattttctcaaatgttttcagcatttaaaatttcccttgtatgtctctcttaaggtcccaatttcctcgaataaataggcaaacaagaactaataatgtattttctttagctacattctccctcctgatgctatgatttttaaaaatctcatgctttctgcaaatattttaaatgataaatttttacacaaggccccaaaatagcagcttatgtgcagatgcataaagagaaggctgtattttgtatgtaaactatgttaatgcaatgaggagaccattttttgtttcttttcacagcattatgacctcctaact

SEQ ID NO: 495 - DNA, 551 bp, Homo sapiens
cctgagttcaaacgattctcccacctcaggctcctgagtagctgggacaacaggcacacaccaccacgcctggctaatttttgtatttttagtagagacagggttccactatgttggccaggctagtctcaaactcctggcctcaggtgatctgcccacctcagcctcccaaagtgctgggattacaggcgtgagccacagcacccagccagtcattttgggttttctttggttattttggatgccttactgggacccactcaaaaaacaaacaaacaacaaaacaaaacaaaatgaaaaacactttcataaatgtctgtctcaaaaccttttctactttctccaaatagaactaatgcatacatattcttaagatttgctcagctatatctccttggttctgacttaatcctcttctgcagaaaatttcatctcacatcaaagcctcttccctccttctgctgtaaagttgttgagagctgtcacagactgtcagctcagcttcagctatgcttaatgagtgcttgtgcagaatgcaccccaggtaaagg

SEQ ID NO: 496 - DNA, 370 bp, Homo sapiens
ctgtggatggagttgagagataccacctcagaataaagagctaagaatcacagctattcaaagatggattagactgctttgggacagtgagttcttatcaccaggaagtattcaagcataggttagcaattgctgggtggatattgtagagaggatttgagatttagtttgcaattcaatcacctatctttaacatcctttccacgccgtagattttatggccttctttcattaaatgaaggctagaagggacattgaaataatttggtactttcctttgcctccagagagaagagaaaaaatatgatttctcctataaaatagcaattgaggtgtgagcctaatagtcttttttttttttttttaaaac

SEQ ID NO: 497 - DNA, 578 bp, Homo sapiens
gataacgtctggtttgattcacttattaaaagtagtccaaaggtccttcttggttgttggttgctccgcagttgctataattacaaggccattaatttggaaaccttttgtttctcatcttgctctgaggtcctcagctaacttacttaaccctgtagcttccttatccttttcctctctctctttcttgtttggtaatgttgtggggagactccatttacaaaaaggacagctaggattagctgaattgatgtaatgcttggaatgctgtaggaaaaacaaaaggtccaagtgggctttgaaattagtaacagattcatttttcttttgtctgcaggtctggtttagtgcaggtgggaaacactttaggaatggctttcaaaagcttatttatggccgggcatggtggctcacgcctgtaatcccagcactttgggaggctgaggtgggcggatcacgaggtcaggagatctagacaattctaggtaacatggtgaaaccccgtatctactaaaaatacaaaaaattagcttgggtgtggtggcaggcgcctgtagtcccagctactcgggaggctg

SEQ ID NO: 498 - DNA, 560 bp, Homo sapiens
aggtacacagtgaaaaattaatggagatgccatctacctccttgtcttacattttcttgctctgacagtcagctcagacccatcatcatgagctccttttataagtcccctggaaaggtaagacagacactccaggagagaatgggcattggaagagaagagacagatcactccaggcattgtcttgcagaaagagtaagaagaaataagggaaagaaagctgctgggaaaggaaaacaggttttccaggagccactggtcattcttggttgatgatttgtgtgtaatggagagttaagccacctaagtgaaggactgcctgaatacatcctacaggcagcaatggcctacttcattaaacgcagcacaatgttcttggactagtgtgtcaaaatagaaaagtaattgctagtcttattatcttaagctgcatatggtatgatgtgaaagtcagtatgtaaaagaaatgtttccttaaaggggtgaacataatttcctggaaaattaacataagtcaaatgaataaattagcagtcagagtagaaacaaatattcttcat

SEQ ID NO: 499 - DNA, 598 bp, Homo sapiens
aatgtgtcttatttttaaaaaaatgtaaaaatacataaatagtagtagtataatgagaaactatatagacacgcaaacttgaaaaatcttctattaatttacgtgattactgtagcataatcccaaattaaactcactttttctggatgactgacttgggtaaaataattcatatatgaacaatgtgggtaaaaagaaaaaagtctccagtttacactataaatagagtgattttatcaaagcaaatattaggaatttatccttggctttttaaaacaaaaagatactaaaatacttgagaatcctaatttgataatactgaataatgccacagtttatcctggcagagtaggacattttaaaaagctataaaattcactatatactcggccgagcatggtggctcacacctgtaatcccagcactttgggagccgaggcaggtgggtcacttgaggtcaggagttcaagaccagcctggccaacatggtgaaaccccatgtctactaaaaaatacaaaagaattagctgggcatggtgatgggtgcctgtaatcccagctactttgggaggctgaggcaggagaattgcttgaaccc

SEQ ID NO: 500 - DNA, 345 bp, Homo sapiens
atagcagtgggtcttgagtattcttatgctacataacatctggaagaaataaatttcctaggatcaaagggctccgtgtgcagcccagagggtcctcagggtgctcctcagagcaaacaaacagttttcttgatgagtcactgcaattttttttttttttgccaaaagcccacatgtattgcaagatctcaaggaaaagaggtggagtaaggagaaagaaaaaaaaatttaattagggcaccagaagtcatttttaaaaattttacccccaaaaaaaaaaaaaaaaaaaaaaaaaaaggggggccctttttttccgaaaccccaaccggaaaaaaacccttgggg

SEQ ID NO: 501 - DNA, 629 bp, Homo sapiens
agccatctgtatgacttagtcaaagaagctagctttggactcagaagtctgatttaagagccacttgggcacagtggctcacacctgtaatcccagccctttgggaggccgaggcagtcagatcacctgaggtcaggagttcaagaccagcctggccaatggggttagtagaaaccccatctctactaaaaatacaaaaattagctgggtgtgatggtgcacacctgtaatcccagctactcaggaggctgagacataagaatcatttgaacccaagaggtggagattgcagtgagctgagattgagccacagcactccatcctgggtgacagagtgagaccctgtctcaataaaaaagaaccactctagactgtgccactcctctctctatgcagggtgggccagtgaggctctgaaatatgggaggtctagccccttctcagggcaggtctggttctggtcctcggggctcccacagaagtaaaagttgagcccctttcaagagtcactgtcagggggttggggacaatggctcacactcagcattttgggaggctgaagtgatggagttgcttgggcttagaagctcgagaccagcctgggcaacatagtgagacccccatctcta

SEQ ID NO: 502 - DNA, 656 bp, Homo sapiens
cggctgcgagagacgacagagggatatgatgcggactgttttcactcttatatcatctggtgacaaaattggaagcttatggaaattactatctatttaatgctgctcattcaaacagtccttaacaataggtaaaaattaacataaggggaggcttgtggttttgtgtattcatttcgatgttaaagaattgccatattaatagcttcacaactgattatatatcctttgtggcaacagctggacaaaataagagatacttaacagtaatattcactataaagtgtttctatatcattttactctagtagtagtttttctcagtttgcttatttctttttaggtatgttgcacaatgcagaaagcacttagtttcactatgtccgtgtgttcatccacatacaatatatgaaatatctgtgacaatgtggacactcaaagtactttcacaagcacttggatgcttgaaggctcccatttgtgccttttaactgaatgaggttttcccacatgcctgtgtggaaaccagaggcaaagtgaaggagaggaaaacaggaggatggaatcatagaaaaggacagtcagaaagtgaaagaacaaaggacaaactcaactagagccagagactgacagactgaaatgcaagcatagtcaga

SEQ ID NO: 503 - DNA, 609 bp, Homo sapiens
gactttccctttatgaagaaaaatattcctttgaggaaaaaaaatcctcttattttgtaaagtagttccaagagacagctggcatattcaagatataacaaccactctagagagcaatgaatacaaacacacacaagaaaatctgtcacttaatggctaatattcgtaaactatcaacagagaaatgaagttcgtaattcagacagaaaacccatttgctcagtgtgttgctgataaaacatgcaacataagcaaattattaaaaacctaactgtagcaggtcgatagagagctctgcttctgtccccataatcccattattcaattaagcaatactacaggtagaacaggggacacaataattatcaccaacaacattgccattcatgcttctaccgcaggccaaacttccttcagatttttgtggaaggtatttgtatgtcataaatacataaaaagtcaagacacagataaattacctctattatcttttccaaggatgatccaaagaaaatgtcaaatctaagctgaaactcttagctgagtctggtaaagatatacttttatgtctttccttattataaatatctggctcatcattttcctcat

SEQ ID NO: 504 - DNA, 571 bp, Homo sapiens
ctgtccttaggatacaacgacatgctatgagggtgacacatcaaagccatcactgcaaccacatggagtctttctggacacagaacattctagatggtggaactagatcatctcagacaatgaggaccagtgaaagggtctggccattggcaagaaatctgctctaatggtctctgggatgatgaagctagcaaaggagctgctgattttttacaattaataaaatccaataagttttcagcgatttggcttaggagccccaaatttaaacttggttaccacgccttactaattattcacattatttgtctccctaaaaattacctcagagaaggcctggaatgctacattggaaggaatgtgtcaaacttattcttgacctattatttgataattcttagagaaacagttgggcacagattcacctcccaatcactggccactatagggtccttcggagggactaactcagcaaaggagcagtggacaactgagtctgctggcctctctgttcctgcccaacttcaggtttctgaagctgtggaaaaaaccatttcactggtcatgaaca

SEQ ID NO: 505 - DNA, 542 bp, Homo sapiens
cgcatactttaatacatcacagaatttggcagaaagaagattttaagcaattgcctggtggcactgccactagcctaggccaaatcagaagctcttccctgaccagcatctcatgaaagtgctatcagtgaggcttcagttgaggtgggccttcaagagttgtcagtggaaggctccagggcctggactttcttgctcccaagaggtaccacaagggtaaatgtacccagatctggaccaacatctccttccagcccaacttctaccttcccttccatcatggaacagtaggtgcagcctggtgcacaagcagatggtggactggaaggtacatcaaggtaatgcatgggagatggagatggccagctgactcgcaactcaccttgagggagcagttattaggtcccattcccaatccttacacagggacctccattcctgtgttgaaatttaaagtttaagggctccttaaacaacagccctgaacctaatccccactaataactgaatggatatttctagtgcttctcacctatccacct

SEQ ID NO: 506 - DNA, 544 bp, Homo sapiens
cacacaaaatggtggatccacaaaaatggtggatcaaaaccatttgatatgaaattattttcctttacataggaagtattgatcataaccacatgtgtaaatgattacatctttgttataaaactttaattacaaatttcctgattgattaaaaattatcacaagctcaaattaagaagacgtcaataaaatgtttatttattcaataaattccccttaaatatttatatgagatgtccttctgacttgtattgtacattaagattttttggcaattgttttgggacaagccaaggagaaatggaatagtactaggggtttaacaaaactgctgtctttgcatttcatctacaaacagagtctatgtaacattcatccctggcaaagaagttaatattccctagaagagaaaaatatttaagtctttaattaatcttaagtagatttttgtatatggcataaggaagggatctagtttcagtcttctgcatatggctagccagttatccaagcaccatttattgaatagggagtcctttcccca

SEQ ID NO: 507 - DNA, 499 bp, Homo sapiens
caggtaagcctacaggctaaggcagaaaagtataaagataagaagaacctagatccatcatgccatagttgatctgttgaattaccactgctgaatctgttctacctccaaacattttgttatataagatgatgaatctcatgttgtataaccctcttgtagttagattttctgttatcctaggccaaaaatatcataaagaatggcacagacatttagagaaatgagttgaggacagaccatgaggtcccagggagagagaaagagataaagagagtaatgtagactttttaattttttatgaggtaagctatacttttttatttttgattactcattaaggaattttcctgtaccctctaaaatgtatccctatttatttgtattagtaaacagttttcaggttcttgtatccaaatgatctctaaaaaagacaacatatattatcacattcaatccccatgacaataactctgtaagttaaacatttctttttgct

SEQ ID NO: 508 - DNA, 576 bp, Homo sapiens
tatccactccacgcacaagtgggctgtgatttttctggaattagaagtctatatagttattgataaatctcttgatttcattttgtctccctgttgcaatgcagcaggaagatttaattttttttatacaacactatttccagcatgaatcaaagtaagtaagaagtaacttatgcattctcagaaataagcctacatctcattttgcttcaggcatttcaaaattttttttcttctctattctcatactttaagaagaaccttaaatctgaagccctaggacttagtaaatattgcaatgagtggagaaggaagtttattttcattatttgatacatatgtcatctcagaatgctgagagaaattacattattgtgttttatatgtgtactgtgaatttttgtcagagttaaagatcaattcattatcaagaacagcaaattactaggccatatattttacgccttctcgctgcctaatggtttatttatttcactgacggctgttttctagacaactggaatatcaatatgagtttttaagatgcccttcttcacaatcatattttactttttt

SEQ ID NO: 509 - DNA, 526 bp, Homo sapiens
gcagtggtgtgatcatagttcactggaacctccaacaactgggcttaagccatcctcccaccttagcctcctcagtagctgggactacaggcatgcattgccacacctagctaacttttgaaatttttgtagagacggggtctcgccgtgtttcccaggctggtctcaaactcctgggctcaagcattccttccacctcagcctcccaagtgctgggattacaggcgtgagccacttggcctggctggtttacattttttaatgcccgtcttcagagtcaaaactgggattgccctggtgttagtttgcattaaaaattgctgatatgagatttatgcagagctgggacttgctgatattgttggactttgtcatctgtacttgaaatatgagaaagggaactgcttaaaatatctgggctccctttccggtagctttagttgtttcccatctttaaaccaaatgctgaaggcataacataaattaatgtattgctaaaggccgagtggataaaatacacaacagc

SEQ ID NO: 510 - DNA, 320 bp, Homo sapiens
aacaatagagcataacaactttttactcagtatttacattgtagtagatattataagtaatctagagttcatttaaagtaacaggaaaatgtagatgtgcataggttataagcaaaactataccattttatacaagggacttgagcacatccgggttttggtatctagagagggtcctggaaccaatcccccataaataccaggctgttttttttcttttttttttttttctaaaaacataatcaaatctaaaaggagcttactcaaaaaaaccgtaagggttttcaggggactcaaaatttttttcaacttaggccagg

SEQ ID NO: 511 - DNA, 583 bp, Homo sapiens
aagtgaaaaagaggaaccagggcagtagctggaaagtactgtcagtgtgataagaagtatttcaactggcagagatatcagcattcttccaagctaatggacttgtggttaaagataccagaataaagacatttttactttattcaccatttttacatcaaccaaaaacaataagaacaataaaactattaactgtgaagatattttgaacatttattttgtttggtgatactctcttggagcacaatcaacttagaaatcaagacgaagaaattagctcaaaatcatacaattacatggaaattgaataacctgctcctgaatggatcctggataaataattaatttaaggcagaaatcaagttatttgaaactaatgagaacaaagatacaacataccagaatttctgggaccacagctaaggtagtgttaagagggaaatttataaaaccaaatgcccacatgaaaaagttagaaagatgtcagtttaacaacctatctaaaagaactagagaactaaataactaaataataactaactaaataactagaagaactagagaactaagagaaaagcaaccc

SEQ ID NO: 512 - DNA, 592 bp, Homo sapiens
atttgggcaaagaccctgatgggtacaattacctcatagctaaaggaatcatcagtgatctttgctaacacttcactactctggccttcttccctcctaaccacctgtaaatcccaatctatttgtagcaccactctgccttttgagtcttttgctggggatctatctatttctgtaatgaatttataaaggatgtgttgacatgatcttaagaaaaactctgttgttgcaagggagaaactaggaagaaaaaaagagtttctttgttcaaaacagatcaaaccagatggttttacaaatgacagtagctaaagagtatatcattgatttcgacatgaataataaagggctttagggactgctcctctcatacatgaggttttggtttccaatatttagcaatctggacacttgccatggtaatgattacttcatgtgggtcacaaaccccacttcaaagtaaagaaacagtataatgaaaaagattttgaagagcagatgatgaaactaagcaaataaaatataaatgtgtatcttattttataacttcgaagatcatgattattctttacaatttcaatgaactgaacac

SEQ ID NO: 513 - DNA, 574 bp, Homo sapiens
tccagacacaggatatatcaaattcctgatttaaagtagttctgaacaagcagtaaaattaacattagttcacactagaggaaacagtgattccttacagagaaaaggtatactttatgtaattaatttcattcttaagacactttaaaagcagaccaaaatctagacaaaactttttctatcagaagataaaaataatagtcctacagttgcttcataatgcaatattttattttggggaaaaggcagagacttcacttagctatgatcataaaaaagcaatataaatagtgattttcgtattcatttttctgaagttattattccaccttacctttatttggaattccataaaactcttctctgaacattgtgtatcctgtctgaaaactagcaaccaaaactacaaacttttaagtcttccactttacacagaaatcaataaactagttttaatattggactgaatttcaaagttctattctctgttcctatttggctgaaaggtatacatatatcaagaaagtttctatcgattttcaactagaagtatcagttttgctgtcagagctct

SEQ ID NO: 514 - DNA, 642 bp, Homo sapiens
cagaatacagtgtaagaaaacatgaccaaagcaaaaatagtaaggactaaagaagggaggaaggggaaatatcaacatggactgaatatgacccaaaagagccttgatggatggtcagacatgtaaaggcaaattggttagggttaaggggtggaggtcagggcacgttctatagggaaacggcagctgatacagaagcctgaaaggaaaagcgggcagagcacctggacaggactcttcaggaacgagcacgcacgtgcgtgaaaaacaacttagtgaggtaccgttcacccaaacattagagaaaccgcgtaaaaatgcttcttggtaagcatgaagaaggcagggctcgccctgtagaagaactcaataaacatttgaactgtctaaagagtaaaagttaatgaataggccaaactcactcctttctttgttttaagagctacaactttagagaataacaaatcacaaacccagtagacaggtcctggcatttcaaatccaaccccatttttcccttaatctttcccctctgagcaaatggtatcgacatgaacaagccatgttgatttgatcaagacactcatccatggttaaaagagtctttactttcaagagatacaaacagaaatatttacatgg

SEQ ID NO: 515 - DNA, 636 bp, Homo sapiens
gaatgctaagattcttgtctcgctttggggaaatatacatattactaaacttaggtattgagagagtaaactgaatttaagtgtggatattactaaatcaagattcaatctctgtaatggaaggtagaaagaagaaggaaaaccaaaaattaaaaacagcttagtaatcataaaacaaaattaattggtaaaaataaaggatagtatttactcacatgcatatatattatgtactgtgcatttaatataacatcatttttaataaataaaagcaatttcataggaatgcttttatactgttgatgggagtgtaaattagtttaaccattgtggaagacagtgtggcaattcctcaaagatctagaaccagaaataccatttgactcagcaatcccattactgggtatatacccaaaggaatacaaatccttctattataaagatacatgcatgtgtatgctcattgaagcactgttgacaataacaaagacatggaatcaacctaaatgcccatcagtgatagactggataaagaaaatgtggtatatatatataccatggaataccatgcagccatataaaagaatgagaatcatgtcgtttgcagggacatggatggaattggaagtcattatc

SEQ ID NO: 516 - DNA, 628 bp, Homo sapiens
ttaaactcatactttctctcctggagaggagtgaatgaagagttaaatggacccctgaagtaataggcttttgaaaatttttcacatgaaagcatgattaaagggaatacatgtgcattttagatgtttcaacagtatcttaatataccctaaaattaacctataatgtacttaaattttatttttcactcttctggtaaagtcacaactcaagtatttatctatgaaacattttaaaaaatttaaacccttatcaaattaattgctggtgatgtaaaatttacctgctaaataatgtttcagcaatgctattttgtgagagctcacgttttttaataagaacttcaagttacataaaactatgaaacataatgttaacaatatagagatgcctatattttgaatgctggacctccttccattatatatgctccagcaataatacaaaatcccctttcctaataggcttgagtccaaaggaactaaacaacaatattctcaaatgcacttcctttgaccacttttcagtttctcagacaaaaatggtgatgatttttcatcttaaatatttttcacccttttagttttctttccttatataatctataattatacctttgaacacact

SEQ ID NO: 517 - DNA, 610 bp, Homo sapiens
atattttgactgggccaattagtagctacgctgcttgatcctgagccagttgctttacctctcagaaccttggttctcttatttaagatgagaagattagtatctacccatgagactgttatgaagatgaatatatgttaggcacctggcccattgccctctgcgcttggtcaacagaagtggctcttgttattgtgaacttcaatatgcatgacctatctgtcagtcacttaacatgacttttttttctcaagtgatttttatcttctataacattctcttctcattcttccaaaaaggagctctatgaaagcaattaggggaaggtaaagggtgacaaggatggagggtaattatgaagaactacagagttcttttcatattttgtacataatatcatttctggaaattatatccacattaaaatatcaaaaaaaggtattttcactgacgaatggaaactgtcctgatgtctctgctagttttaatgcccctagacacattatttaactctcctgatctcagtttctttgtttataagaggagtagcttgaatgccttcatctgtttaacatttactggagaaccaaaaataatcaagaaataagct

SEQ ID NO: 518 - DNA, 640 bp, Homo sapiens
ttatattattgtttaaacatagttttgaaaatatatactaaaaaactgataagcacttcttatgataaactagggtctgtgcttcaaagaacaatatttgtcatttttcagtatattaaaaaaaggtgccttaggctttaaagatgttagaaagaggaatcagacacacatgcacacacacacgagttattgcaacaagatggaaataagagtatatcctatttctcagtctcattctattacagcacatcatttaagcagtttggtaatatgatatcctgagtgtgaaggcaaggtagattcattcctctagatgtttacttctttgattttaaaaactgaaatatttactcctctcatatcaatatcagaaaataccactggccttgaaatcaactttaattcttcagataaatatattgagaaatatctttactatttctgcttcacaaaattccagttcagcaccagtaaagacatataattttataaaccaaggaagacaaagagaatagcagagagcatgacaacagatgggagatgtcagtgaaattatagaagagtaaattagtttagagtgttaactgatttagacgagcagtgaacactgaaatctaagtgttaaaagaaaagccacacc

SEQ ID NO: 519 - DNA, 337 bp, Homo sapiens
agctccaccaggtggcgctgccgggcctcgtgaccacttggaaaaagcagtgtcaccagaacgctgcggagacctgccagcaggggtcacactgaggttgcctcgtggtgtccctgcctctgcaggtgacctatgaaattcctggcaggcccagcacagtggctcacgcctgtaatcccagcactttgggtggccgaggcgggtggatcacctgaggtcaggagttcgagaccagcctggccaacatggtgaaaccccgtctctactaaaaatacaaaacttagctggccatggtggcaggcacctgtaatcccagctactcgggaggctgagacag

SEQ ID NO: 520 - DNA, 483 bp, Homo sapiens
gaagtggacgatcaaagttgccaatgacttaggaagccagcagacacttgcttctttcttttctgggataattttgtttcctttatcctcagtattttcaaagcaaaataatgtaaaagatgtatctagaagctaccttttaatcatgtttctgctagtttctctctccctcctctccctttttctttcagtctccctcctttcaggtttttctatgatagggacttaaatattcacaagctcagaacaaaaattgtgggatttttagccttgatgttttttcagatgcctacatcctcaagatatggctgtttatattacagagctgtagtatcaaaacagcatggtactagtataaaaacagacacattgaccaaataggatagagagcccagaaataaacacacacacacacacacacaccctatagtcaatagacttttgacagaagtggcaaccacacacaatggggaaaggatagtc

SEQ ID NO: 521 - DNA, 98 bp, Homo sapiens
atcttttaattataaattccactctcatttcactatattctactaccttaccatagtgctcactttaactggaccacaagttcagtatagttttcatt

SEQ ID NO: 522 - DNA, 397 bp, Homo sapiens
aacattagctgaggaagcagagaattcagactattttcatctctggacagaattctatgaattccatctacccattattctttatatctcctacttggatcttaatctccactctggcaattccccataagctaaaataataaatgtgtccttaatcatttatttccaattccttaatatttctataatgattttttatgtgccagtcttcaccattctggtatctgcactcccagtttataaaaccatcataaacactaggcaattctgctctttttcaggcaaaaagttaaaaaaaaaagagcatttttatagtttgtgccacatctatagtaactgggactacatcaaacaaagaattcctggccaggcacagtggctcacacttgtaatccct

SEQ ID NO: 523 - DNA, 583 bp, Homo sapiens
ctcagtgattataataagatcttattcttattctaaaatttgtctttgtatttttataagggagtaattgctgtcaatcctactgctttctagattgacagccataaacattgactgtatgtagtatttgttcctcctggaaataggtaataaaagtagcgtagcgaatagacgtgttatcttctgttcacaacgttctactttattcttataaatataatcttagcattcttttttttgttgttgttgttgttgtttgagacagaggctcgccctgtcgcccaggctggagcgcaattgcgcaatctcggctcattgcaacctccacttctcaggttcaagcaattctcttgcctcagcctctcaagtagttgggattacaggcacccaccaccacgcccgactaattttatgtatttttagtagacacagggtttcaccatgttggccaggctgctctcaaactcttgacctgaggtgatccaccttggcctcccaaagtgttgggactacaggcgtgagccactgcacctgacttaatcttagcattcttaatgaagacttacagtacataagccatgat

SEQ ID NO: 524 - DNA, 595 bp, Homo sapiens
ggtgatccactcacctcggcctcccaaagtgctgggattacaggcgcgagccacctcgcccagccaatagtatgatttttgtgaggcatacatggcttgactaaaaaccagtgactgagtcacttatattttatttcattgctgaaatataaacagtttcatatatgagggaataaattcaatcccacctacatttttttctttttcacaattttcggtgcttttaaaaaatattgtcttcttttgaatacatttttagttgattcatctttattgtgaggtatagacacaaaatctcagtctcacagtatacttacatttctaagtttgttgccaagatgtaaaatcagggcttttacataaactagtcagatttcaggtttctgtttaaaacttagaattctagaactaagttaaccaccatcccttcaacaaacgtggcaccaggagcttgtgcaggctgcccccactgagcatggactcaggttttccacagtcctcaccactccctactacctcctactttccgtccacacctctcatttatatcgcccaccggaaactcgaggaattggaattcacagcacctgacttt

SEQ ID NO: 525 - DNA, 440 bp, Homo sapiens
gtgattcttaggccttaccaataatttgaataatttttcagaaagcactgatattttaattaggtctcagaaccctctagcccatataatataatgtagaaaccccaaatgatctccaagtaatttagtgttgacagttatcctgacctgagatgatctggagttggttgagccctcttaaaccctaatgcaatgttctgttctttacaccatgaacagatccttccaagggcgaaactagttattacaaaaataaattagcctcatgaagagatgaatatatagtagaaaaccactgcttataattggcccatctttcatccatgaattttgaaacaggaaaaaaattaaatatatgtagtctctcaacctaggccctcctcaacctagaattttcactctccttagggttagaaagaataatttcgtggtaagagctg

SEQ ID NO: 526 - DNA, 512 bp, Homo sapiens
actgttctaagcactttacattattatctcattttaatatcctcaaaaaccctatgaattaaggtattattattatcctcattttacatatgaggcaactgatgcattgagaggttaagaaacttgcctgtggtcaaaataagcagaagagcaagggtctaaatgcaccccaacactctgtcctcaaagctgtcacattcaactaccactgtaatattgagtcttcaatcaattgttatatatatagctgtatcaggcctgaaagtacttaccacatagtgggtcagcaagggcattacagttctatttctgttaaaacagaacgatgaaggatccaccaccaccactcccatttttaaaatattctaaatattcacacttattaacacaaaaataaggtgactaagaaggataatttctgtatttggagataaatttaaaatatctacattttaagggacataaaagttttaatagtgaactgctctcttgaatttatttgaaggaaccct

SEQ ID NO: 527 - DNA, 503 bp, Homo sapiens
atcacctcaagccagccagttgattagaaatattgacaggtattcagagaataaatttaatttgaattccttacacaagcaagttttcagaaggttcatttgttaatcgatttatctggaaatgagaaagccccttttccatagaagtgtaggtccacacaggctcgtctaatataatctcaaataatagatcattttaatgagaaaggtagtaagcaatgcagtgacatcactagtaatgatgcagttttataatcatacctccgtgaaactcaatataaaacctgtccaaatgtagaatgcaatgaaaagtcaataggcggccaggcacggtggctcacgcctgtaatcccagcactttgggaggccaaggagggcagatcacctgaggtcaggagttcaagaccagcctggccaacatggtgaaaccccgtctctactaaaaatacaaaaattagctgggcatggtggcaggcacctgtaatcccagctactcaggaagc

SEQ ID NO: 528 - DNA, 498 bp, Homo sapiens
tagagtcagctatgtcagatatgtctgtcataattttgcataggtgatttcaagaaaatggatatctttccattccttcacctttttgttctattcaggccctaaatggattgggtgatgcctgctcacattggtgaggtggatcttcattatgcagtctgctgattacaatgcatatcttttccagaaacactgtggcagacacatgagaaatgtgcttgagaagttttgtgggtatcctgcccaagagggctgcctattgggtattgggggaaatgggagatggggattgctgggtcatcagctgcagggataaggggtaaagctggagttggggtagtgtctcccacatcagagaaatggtaaaaaagtgaccccacagagccctccacaaaatgcatacacatattcatgagatggcagacatttcgctttccgtcccaaggagaacatagtcagcaattgtattaaccagggaagcaataatggctatcagag

SEQ ID NO: 529 - DNA, 539 bp, Homo sapiens
actccaaattcctgctccactacctgtcaataaaatggctttttgtgagcttggtccgggaataggattcttaaattaatatgttgtcacagtttaagaaaatgagcacagtgatcttaagacacagagatttattgtttctggcaaagtcaaacctaaagagaagaaacaacaaccactctttttttttgaaaacgtgttaggtgattttctttagctatacaactacacatcaaacaaggatttgagtgtgaggcaatgtgttagaacattgagtaagacacaatcccagttgctgcaggaaatttaaatagtgataaatgtgtaagaaaagtactgtggagactatggaagaagtgatttattttgcttcacagaggagggccttttgcaataagctatagaagtgtccaaaatggctctttcaagaaaaaatgacatctttcctcagttaccaccactccatcctaatgtaacagcattaacaatagcttttttggcaatatgagaaaagttggtaagatagagtaggaagtctt

SEQ ID NO: 530 - DNA, 656 bp, Homo sapiens
cgcgtggacgcagcttgatgggggagaaagagctctgggagcagggcttagagcctcgtctcgcctcctgccaactcggtccggcaaggttccgaacctccctgagcctcagcttcctaatctggcaaacatgacgacaaaagtccttctcttttaaggttggtgcaaaaattaaatggccctttactgtatatttagagcacctggctcacggattagtcacctcgctcctgggctcaacagtgttcactgggtccttacagcatcacactgggatccttaagggcaaagaccaaaattagacctagcttaattcctggtgtgcaagtgctaagtgttatgaaatgagtgagtgacaggatgatccagctatgagaaataggagagagtttgcggtgggatagagactgtaccttctttttgtataagatgtttggcagttggggataacttaccggaagcaagcttaagatgcacacgaaatcctgaccaagaggatgtagaaattagatatatggccaagaatcagagaagcaaataaacagatctcaataaaatgtttagtttcgaggttagaggtgggatatcagggtaaccaggcaaaataactgatacaataaataactacatgacaaatcacttctctcacaacacat

SEQ ID NO: 531 - DNA, 577 bp, Homo sapiens
ggcctcacaaatcttgggttaagaacttctcctctaaaaagagtaggaagtcgaaattgaaaacaggagcctatttactcaatcatttggcttgaagttgaggcaaatgccttatatataggattgtcgctgaggtctccatcttcccaagcaaaggtgccctctgcactcttcttgccaaccaaaccaaaccaaaccaaacaaaaacaaaaaactcaagaaacaagcacaagcactccaattcttgtgcccacatcacagtacattcaaccttaacaccttagaggtttacttatccttatccttaaatgttttctttcttgtaggccactaaggttgggtatgcttctagtaatgggaatacatggggctgagcctctacttgcctgcctcagagcacatatcggaaatttcctagtaccaaaatctgatccctaatttaggaagaagtcaagagaccatgttggaagataaaaataaacgtatataaaccagaacaagatgggaggggagaggatgcaactgggagacagaacaacttgtgaagagacaaatacattacagaaattcataaagt

SEQ ID NO: 532 - DNA, 470 bp, Homo sapiens
ctgttgggccctcatccctctactgattgatggcctcatgtggctctacatgttcacaattataaataaaactatataaaagtggcagagcttagcttccatctaaccagataaggataaaacagttctaattgacaataaaaggaactttaagtgacatctttcccatgtacctgtaacaaagtcaaatggtagatttttctctgattaaatgtgtattcttgtggtcaccattcactacaaccattaatttggcatccattttgtaaagggcactgtatcatactctgtggggggtgatggaaggtggataaaacagcttctgtatttagagaacctattatctgatgaaatactcaaccagctaacatataataaatatggaacccatacacacaacatgcaggtgtctgtatctatctatctatctagataggtaggtaggtaggtaggtaggtatgtaggtaggt

SEQ ID NO: 533 - DNA, 591 bp, Homo sapiens
gtagaatgttggagtcatataatgatggtttatggacggaatatatcaacacaaaattgatgtcacatcaaagtgggtttgttgctaattacttgccattatgagataaaagtacaggcctttgatttaagaaaactcattttgcaaatggatatttaaataaaagtaaatacattcactgttagaaataaaactgaagatttaatgtattaagtgactgtcttcaagcagtcaatcaataatgtttatgatacctacactttcatgattttttttattttctgggacaatctgcaatttgtaatctgctcaacttttcatgatgatatgaaattcagtttaaattcatgaaaagcagtatggtgctggtacaaaagcagacacatataccaatggaacaggataaagtgccaagaaataaagccacacacctacaactacctgatgataaacaaagtcaccaataataagcaatggtgaaaggactccctaaatagggatgggataactggttagccatatgcagaagattggaactggaccctttcctttcaccatattacaaacattaactacagatgaattaaagac

SEQ ID NO: 534 - DNA, 511 bp, Homo sapiens
ggaatcggcgatgtgtgtgtgtgtgtgcacgtgtgtgtgtcctctgatgagatggcttcaatatgttctcacctaatggaatttgcttaaaaatatccactgaggtttttttgtttaacagtttctcaagattatcaattatatttttaggttaaaatataattttataagcataattgtagtcatttttaaagggagagatgcttttaacttgttatgacttttagccagtcctaacatgttaaaatttttctgtggttttgcctgaatactatgaagactacttatttacagaaaaagagagtgaacaagagagagcagtctatactgcctaaaagtgatattttgagtgaactttatttttatctcgaaatctttagtgaaatattagtaactgttggttactaaccagttcatgtattagctatttcaggaaggtgattactttagatttacattgggaattagagaataaaggccttctgtaataaaatcatcaccatcatgaatt

SEQ ID NO: 535 - DNA, 285 bp, Homo sapiens
gatgtgtgtgtgtgtgtgcacgtgtgtgtgtcctctgatgagatggcttcaatatgttctcacctaatggaatttgcttaaaaatatccactgaggtttttttgtttaacagtttctcaagattatcaattatatttttaggttaaaatataattttataagcataattgtagtcatttttaaagggagagatgcttttaacttgttaggacttttagccagtcctaacatgttaaaatttttctgtggttctgcctgaatactatgaagactacttatttacag

SEQ ID NO: 536 - DNA, 541 bp, Homo sapiens
ttgttattctcctattactccaaactatggcaaccctaggggaggatcttttctttcattcccttccccaacccaacaaaatataagcaaacaccaggaatgctctgctccttaatcccatacacttttaaaacagtcctcacattagaaaatgatgtgagaaataaacacagatttttttttttctattgagatggagtctcactctgtcacctaggctggagcgcagtggcacaatctcggctcaccacaacctcaggttcaagcgattctcctgcctcagcttccctattagctgggattacaagcgcccgccaccatgtccggctaatttttgtattttccagtagagacgggtttctgccatgttggccaggctgatctcagaagtctgacctcaggtgatctacttgctttgcctcccaaagtgctgggattaccagcgtgagccactgcgcccagccatatttttgtctcatgttgagatgaatgcaaattaaagtatacttcaagaaacaataccaaaataatgcaaaacata

SEQ ID NO: 537 - DNA, 399 bp, Homo sapiens
gattttaaaagacaaattggaaaaaaccagaagagaaagtcaaagtgaaagggaggaatttgaaagtgagttcaaacaacaatatgaacgagaaaaagtgttgttaactgaagaaaataaaaagctgacgagtgaacttgataagcttactactttgtatgagaacttaagtatacacaaccagcagttagaagaagaggttaaagatctagcagacaagaaagaatcagttgcacattgggaagcccaaatcacagaaataattcagtgggtcagcgatgaaaaggatgcacgagggtatcttcaggccttagcttctaaaatgactgaagaattggaggcattaagaaattccagcttgggtacacgagcaacagatatgccctggaaaatgcgtcg

SEQ ID NO: 538 - DNA, 171 bp, Homo sapiens
taaatttccttttaattataaacctattatgattggaagggatattagagattactgagttcaaactcctcatttgacagatgaggcacaaatgcccacacaggctcagtcatttgcctataataagccacaagcagccaggtacagtggctcacgcctgtaatcccagca

SEQ ID NO: 539 - DNA, 590 bp, Homo sapiens
tgggcacagacgtgagtgagtgtgtgggatgaggaagaaatgtgtggaagttcttgtgtgatggagcaaaagttcttaagtgcagcaggtgaatttgctgacattgcgttgatttgttgggatagggattgaggaaagttggtagaagtttagaataatcactgagggaaaaggacagggtttgatggggagactagagagaaacatgaagggttgcctgtccaggaaagttggtgtccaccaaagttggagtctatgaatatctaaagtcagatattcttgtgatcgtgatatttattcagcttttgttgagcttagtagtttagaagtacaggaggtggatgattccattgcttaaaggtttggttttataaaagttctgtcagaaggatgaaagagcaagagacttgaggttaaaatgttccaagagtgtttgaagaaatgaactatgttattctaaagatgtccatagaggctgggggcactgtggctcactcatcccggcaccttgggagcccaaggcaggaggatcccttgagcccaggagttcaagaccagcctgggcaacatgatgaaatcctgccactacg

SEQ ID NO: 540 - DNA, 670 bp, Homo sapiens
agtctgattcaaggtggatctttcaatgaaaggggaacatgattaggattaagtaaggataaagataaaataatttatgacctgtgaacacaacaagatgaagattttcaaggtgaggattttgaggtaagtgattcgaaaagtcttggggtataaatactggcttggtgctatttgttggagagttcagtgttcagttaaaagggttttatgagaagttcctgaaacaaacaatatgcttatttacacatatcttcctgggcaagagtactctggaatagtaaaatcagattgatgaaggcagtggaatggtaaagtcatattagtgtagcagctaaatagtaaagttatgttaatgtatgcattaagttttttgggtgtatgtggtttgggttctcagtgtcatctagccccccactcacatttattgttcttgttattccctaaaatagtttaatttattgtttatttttaaaagttgccaatggtatccaggttataaacacactctgtaactaggtaaaatctctaataaccagaaatctcatatacattctattttgtcttatattttcagttgttctgttctttgctttatcaggaaagccaaggaaataactctcatgctaaaaattcactgtcggacgctctggaataaaaaaaaaaaaaa

SEQ ID NO: 541 - DNA, 621 bp, Homo sapiens
cccgattctgaaaccttctttgctcaattaaactctgctaaatttaatttgtctaaggtttttcttttagcaacgttcatggagcttcactttatagggacagggaatattaattgtcagaaaacaaaaatgaaatacagaaatagcttgattatttacagcttggctcagcatttaccacatttgcacatggtctgaccagttaacagactatgattggcttaagcttagctactatgattggctaagactaagccacaagttacaaaatatactcttaatttagattgcagtctgtttacacactatgttaggtaaggatgtaagtacagaggcagctttaacaatctaatttaacaatattatctaatttaacaatattatccagtggcatagaaagaataatgtgactttaggtttttactaaataaataaatgtagaaatatcctaatagaggacacagtggccaaagtatactccaaaaacatacaagtcataataagatttaagtgagattttaatgacaggtttttaaaaaattgtcttaagaataaatcattcaaaccatggtaaaatagttgacaatcgggaggctgaggcaggagaatggcatgaaccca

SEQ ID NO: 542 - DNA, 516 bp, Homo sapiens
tacagacagcacttggctggggttagtgagtttcagcagaatgcatctcttgcactgacgtagtggagaaatgtttgtccttgggttttgtttttgctgaatctttccttcatattacctgcttcttggtccctgaaggtagatgtctgcccaagatagagccatctgttttaatttctccccttgccttttcctcttcctattacatttgctggcttacgtatcaaatcaggcttgtgttcctagtctctaaatagaagtgcctcctcaaactactctataaatcattattattaataacaaggataataatgataatactaaatagcactcatgtaaaatcttccattacaaaatgctttcagaaatagtacctctgggctgctggtttatataggaaacacaaaaactgattaaaaaagatgacttttctagccaaaatgtgtttgcttttctgggttaaattcatttgtttgattgaaaattttataaagaaggtgtgtattggagaggtct

SEQ ID NO: 543 - DNA, 621 bp, Homo sapiens
atctccccattcctggagcccccactgacacctgcctgtgtccacccagaatactggagtgacatgacactggttagacacagcagtacagccgggtagccaacataatgtcctatactctgggaaataggcagtgcagcgcactagggaggctgccctcaggacacaggatgctgaagtgtgcgttcaccagagcctgagagctacttgctgaggccactgccactgagagcaaccttattcccctaatctcagcagcaaggctgcaacacatgccctgaggataggctctccccacacaccactgccccagtcgctgccacttgagcatgccacccaggagcctggggatagccctgctctgcccaccatagcctgcatctgtacataccactggaggacctgagggcaggcctccccagcctggtattgccaccattactgccatcactcacaccacacacactgcctaggggcccgaggacctgcacacaaaccccgcccactgctgtcactgctggcacctaagtaagccacttgcaggccaaggaattggcctgataccactgacactggtacccacattcactgcacagaggcccaagaacaggcacacttggg

SEQ ID NO: 544 - DNA, 528 bp, Homo sapiens
ctagttactctcagatgaaataatacacatttgtttcttctcaaacaaaagtccattcactgctcaaacaagctggaggagaagaaactagcttgaggatggcagacaaaagtcggtgtatccacatgtgacagcttgcagattgtgggcatgctatgacatattcccaaataatattcatcagccatttcttccaggtctactgctttatatatattgaccatatcatttctgaatatgctcattgtaacatccatttatatgtttgaatttttaaatttatctgaataatataactactttagcccttacgatgttcggttatcttagagatttaaaaaataaatataaaaaaagatttaactaaagaatatagctcagcttaacattgcattattttttgtttaagtatctgtatatttctttgagtgcctttcttatctggtattaggggtagatttatgcctctctgttaaactcattggagagattaatggtagcaataacagttacagaaaaaaaaaaaaa

SEQ ID NO: 545 - DNA, 87 bp, Homo sapiens
atagatgagatcttctgctccttagctctcttgctttaaaaaagtgaaggcattgcgtctagagcacttctaggaatctgactggat

SEQ ID NO: 546 - DNA, 276 bp, Homo sapiens
acaataaatctgttagcatgatttgatctgataattctacttttgagattttatcccaaggaaattatatggtgcatgtatcagggctttgggggatgggcgaggagcataattttacactggcaatgggaacatcgttagggttactgccaaaaaagtagggggtgggagtggcataaccaagtgtctgttaatagaagaatacagtatagttagtaaaagtaatacacaaacatctagatttgtcaaggaagtaatacttgggaagatagtaga

SEQ ID NO: 547 - DNA, 480 bp, Homo sapiens
aacagtcctgcctacacaaacatcaagtgaattactattctaataccaccaaggtaatctcaacaaccattttctggggtcacacaatgacaccaaatttcttcccagtgctttttaattcaaaggattctcttgcaacccatcaaggctactcttgattattgataagctcttaagatgttacaataacaaagtatattttatttagaagtttacaggcttcaacaaaccctttttctactgcagtttgtgcctttctgtcctttgtgtcctaccctgtggccacgaattatatgaagaaaaagtgaccctcctgggttgagaggggtgggtgtggaagggagagatgaagaattctacctaccactgtcctaagtttcaatttataaaaaaaattaaaattcatgaaataaaaacttattttccccttccaccaaaaatctacaaacacccattaaaatgaggacatcctataaacac

SEQ ID NO: 548 - DNA, 433 bp, Homo sapiens
aaatccagtgggaaacagaattgtgggctgccagtcatgagggagggagaggagtattgcatggaaataaaactgacacatagtgtggatgggatccaggggagaaatgcggagcatgcaaaggagtcagctgaggacggaaccacgggacctctgcactcgggaggctggaggaggaggaagatggcgcctagaagagcgagttccccgggagagaggtcagggagcgaggagaggcaggaaactgcagggaggcaaggccggctgcaggaaaggagcccggaaacctcacacgctcataagcaaactagagagtccagaaggccacagagaagacccaggtgggctccaagggcaaacaggtcccagacctgaaggaccagacatctcttaggaagcccctgtcccagcagacaaggagagagagcctgtg

SEQ ID NO: 549 - DNA, 612 bp, Homo sapiens
acacgtaaaacagaacaaagctaagagaactaagaccaggaatgaataagataataaaaacaacggagctccgcagtgatgagagtgagggaataggggaagaaataaaagaacttatttccactcacttataaaagggttagacatgaagtcaacataatagactttttaaaagttcaactaatcaataaattgtgtgaaactcatgtctaacacaacaatgtggggtgtatttattatgaagtagaggtggtagtgagttgcttttttatgctgtaatcagctttatctttgaaggtagttttaatatttttcagtagagaagcgagagtaattcctggagaactctagcacaacacacttgcattacaacctttactaataggtttaaaattatagtgattatctctaaatacagtgacctacatgtttaatattgttcagattacattcttttgttaaaattagctttctggagttcctgccacactgaattagagccacatccatctatgccgaattggatatcattaaatatctggatttatgttattttctcttggattattttaatcattatcctaaaatatccatacactcttaatgcaattt

SEQ ID NO: 550 - DNA, 546 bp, Homo sapiens
agttcccatgtttagaatttgctttatagatgtactcgcaaaattatgtcaagattatgtaccagagttttttgcagcacaattttaaacaagaaaaacaaccttaattctgtcaatgaaataccatgccggccgcgcacagtggctcacgcctacaatctcagcactttgggaggccgaggcaaatggatcagctaaggtcaggaattcaagaccagccgggccaacatggtgaaaccctgtctctactaaaaatacacaaattagccaggcatggtggtgtgcacttgtaatcccaaatacttgggaggccgaggccagagaatcgcttgaacccaggaggcggaggtagcagtgagccgagatcacgccattgcactccagcatgggtgacaaaagcaaaactccatctcaaaaaaatatatacatatatcatgccaccatgacaaagaatgaagccgactggcatatggataatgtagaaagagctccagaataaaattgtatgtgaaaaagtaaggtgcaaacaatgtgacactattattt

SEQ ID NO: 551 - DNA, 384 bp, Homo sapiens
tggctcactgcaacctctgcttcctgggttcaagcaattctcctgcttcagcctccaaagtagctcggaaacccccacctgaacccaatatggctaccacaggcacctgaaacgatgcaacagagagatttgtacacaaagtaaaaatcataaaatacagttccctttagtctcaatctttatgttatacatcccatattttgtcacaaagaagtgtaagttaacttcatactttagtaatgcctaattttttaaaagaagaaaataaggccgggtgcagtggctcaatcacctgaagtcaggagttcgagaccagcctgaccaacatggtgaaaccccatctctacaaaaaacacaaaataaaaagtagctgggtgtgctggc

SEQ ID NO: 552 - DNA, 597 bp, Homo sapiens
gtcgtgttctgcactggggaagtttcaaatacagacattccgctttgtatcattgccaaactggaagtgattttgtgttttattcaagcatttcaaccacgctctgattagaaaacttttgatttaccacgttctgggaagaaatgaattatctagagcagagataaacctgtggtctaaaaatgggtctcagtggtgtccatggaaactgaaaaggtcacatttgtgtgagtgactgtatggtttgcagatgggagaggatttaaaactttctcagattctcaaatgggtgggtgaccccctcagtggttaagagctatttcctgcataggaaaagagttcactcactggctcttggaatttcatctcgcatgttgctcaggtagtttaatagaatttacgaaggggccacaaaggagtctaatgtcagtcactgaagagtaaaaattagaagctgatgagaaaaggccaggtgcagtggctcacgcctgtaatcccagcacttagggaggtcaaggtgggcaggtcacctgaggtcaggagtttaggaccagcctggccaatgtggcgaaaccccgtctctactaaaaatacaaa

SEQ ID NO: 553 - DNA, 559 bp, Homo sapiens
cctccagaacatccgggtcactcctaagaatccaggatccagacccagtacacacatatcaggagctcagatttcccacatcaggaagggaaataaagactactttcttaggccgggcgcagcatctcacacctgtaatcccagcactttgggaggccgaggtgagtggatcatgaggtcaggggttcaaaactagcctggccaggatggtgaaatccagtctctactaaaaacacaaaaattagctgggcatagtggcgggcacctgcaatcccagctactcgggaggctgaggcagagaattgcttgaacccaggaggtagaggttgcagcaagtctccatcgtaaataaataaagtctatattctttgagggcccaaacaagatgctttcaaaggcccaatcttccctcccttttaaaaagtgtgctctcgccaggcgcagtggctcacgcctgtaatcccagcactttgggaggctgaggtgggcggatcacctgaggtcgggagttcaagaccagcctgactaacatggagaaatctcatctctactaaaaata

SEQ ID NO: 554 - DNA, 583 bp, Homo sapiens
gcatgcccctagggaggtgggtgtgatcagttttttaacaatttttaaagcttaaggattcattaggaaatttgaggcttgttataattggacagtaacatcaaaaaatcatctacagggagtagtttttttcttttttttttctgagatgaagtctcactctgttgccaggctggagtgcagtggtgcgatctcggctcactgcaacctccgcctcccgggttcatgccattctcctgcctcagcctcctgagtaggtgggactacaggtgcctaccaccacgcccagctattttttttttgtatttttagtaaagacagggttgcaccatgctggccaggctggtctcgatctcctgaccttgtgatctgcctgcctcggcctcccaaagtgctgggattacaggcgtgagccactgcgccacgcccagggagtagttttaaagttaattttaaattgctggtaagtaagaaacgcattctactctggctgaagagcttacagcccccccacttgcaagtacccctgaccacagcacccgtgccctcggagctcccctcacccacaaactcagctcctccc

SEQ ID NO: 555 - DNA, 523 bp, Homo sapiens
ttcttccacttactgacaaagacagcccatgtatactctccaaatctcaatttctttgttgtaaaatggtggttctagtgcctacttcaaagttgttgtagggattaaaacagataatatatgtgaagaatttttattcttcttctattattcattgcttagcatataacagatattcaatgaataatatttgtggctatagttatggaggaagagaaggatggtttactagagtgatcttttgagtgcaatgatcacgttatttaaacttgtctcctcttagatcgttactggaaacactgctaagagatgtacgattgtaaggcaacctgtcctgtactctgatatgattaattacaccattccattaataactccgtggagaaaagtgctacatcctgatatcttctgtatatatgaatggactttcataaaaacaaggccctgtttaacttggtcatttcctgaaggacatgatttaattaaatcttcttttatacttaattccaatatcatgtggcac

SEQ ID NO: 556 - DNA, 490 bp, Homo sapiens
accagatacacatttaaaagagaaaaaaggaacagaaacaagtcatttgagagtggagacttataagaaggagtacatttgagttgaatacacaaatctttacttctctaccaattcctattcccaaaatgaacatattactggggaaagttagttgagaatcagagcatatgttattggggaaaggatatgtttattgacacataatctgtaccaggtatgcattaaaatatatttgttaatttaatatttaaacctgagagataggtattgtttcccagatgaggacaatgaggcaaagaaatatcaagtaacttgccaaaggttacaagatattcattccatggatgcacaaagaagtgcatctagttccacagctgattatggttgtcttgcttttcttcccattgcaccagcttgtcctccaaaatcatgaatgatacacatgaagataactttttttaaaaaaaagcagaaatacacaatgatc

SEQ ID NO: 557 - DNA, 511 bp, Homo sapiens
gatcctcaccaatgtgggtgggcctcattcaatccattgcagacttggatagaactaaaaggaagaggaagggcaaatttgttggctgcttgagctgggatattcatctttctcctgatcttggacatcagaactcctgattctcaagcctttgggtttggactggaggcaccagctttcctgggcctccagcttgcagatggcatatcatggaacttctcagcctccaaattcataactctaatacaccagtacaatggaaagattcctaaattcaaaagccagaaggctgggttcctgttcccaccctgccttttaccttctgtgtgttcctgatgaagacacttcatgctccactatttacttacctctgaaacgaagggctgacccagatcagttgttctctgacctgcttggagggactcagaggctgtggagcaacagatttgggaatgaggaatcgttccctggaagagtcagagcgctcgtagacacattctgctggattgca

SEQ ID NO: 558 - DNA, 508 bp, Homo sapiens
gcctcagcctcccaagtagctgagactacaggcacatggcactatgcctgctaattttgaaaaaaattttgtagacatgtggtgttgctatgttgcccgggctgtctctaatactcctggcctcaagtgattcttttgccttggcctcccaaattgctggaattacaggcatgagccactatgcctggccgaataagaaatttctaatggctgcacacatctttgaaagagctgagacatttcaggaacaaactcgtgtgatacagcccattacctgaaccttccacttgcctacctattagtcttcttttggaagatgggagatttttctcagtgcttagttaactttcccttaagcataagtaattttctaagccccttcttggtatctcactccctccgtaattgattaacattaaaacaggggcagttacaaaagctcaagtctagcatttcagtgttactttgggagacgctgcattgataatattgacgacaatcatttctc

SEQ ID NO: 559 - DNA, 444 bp, Homo sapiens
gaaaagatcaaggtatatgctgaattacttggcatgcaccaaggaaggatggccctgtgctcaagcaggaatagagatgttggttgtactgcagggttacctatgggattgctatggggctttattaccctgaacagtgtctttggcctatacagccttccttaaagctctacttctcagttattgcccttgattgcagtgccattaggaaggagagttaaataccattttcttgccattgctgaatgcaatttgtgatcaaatgtaaaggtcagggagcaacaacccctggcacctgtgccagaggctcactgaaacaagctcattggtgaatgaacgaattgagattgccccttcttttggcgtcttgagaagctgcaggcagtcattcctactcctttagaagtgggcgttatggtgtgtacctgagagctcaactctgag

SEQ ID NO: 560 - DNA, 474 bp, Homo sapiens
aaagcccaagttcagctaaggtcttgtaggtaaccaagccctggctctttccactgctgctcactgccgggtgccctgagcacaagagcagtccccgtcattactcccaggcccactgttatgggcacgtctgctttccacagactgcctgtatccaagggtagagcccctcttcctcctcttgcatccaggtatcctgaagtttccacagctcctgtaaacttggaaacaaggaacccagcccctcgggtgccccaaagccatcagtttctcccttgctgcagtcacccaggaatccacctgtaaggaatatgacttctgtgtgctctcacagctgtgtacatcgatcaggtcaaggacaatagtcaatctactgacaccactttataaagcttgctacagtttaagattatcatgctgagaccagcctgaccaacatggagaaaccccgtctctacttataacacaaaattt

SEQ ID NO: 561 - DNA, 312 bp, Homo sapiens
tttagtctagggttaaatagtgtgattgcttataattcattttattccaaatctgtcttttttcttctctattttctcaacttgtctccgactgcatttataattggtgtcatttcttccaagatggtgccattaagttgtctttcagtctttaacttttaggttttgaattttcatctctttcttgggtttcttaatgtattttttaagaatcttggaagagcagtttgaaggcagccaaccaaatgccattatgagcaatacatttttgctcttgggatttttttaacctagatttaaaaatctcatctt

SEQ ID NO: 562 - DNA, 398 bp, Homo sapiens
agaacatcagtagagattgtgccaagcttttccttaaaattttttggtaagtgtagtcaaatgggtgtaggggatggtggtgaggggggagatgggaagtttttaatcaagggatcacactgatgagtggtatgatccagaaatgtcttttctagcaccaaagttaggattaactggagaagcaagatgctggaggcaggaagaccagaaaaatagttcattgcaatagttcatgtgggaagtgagactaccgcaaaacaggtcaatggcagaaacaaaaaggaggaataagatgttataaattgaggctcgtttacattcttgaaggcagggcccaagtcttacacctgcagcactaacacaatgccttcttgctggcagggactcaatttatagat

SEQ ID NO: 563 - DNA, 455 bp, Homo sapiens
gtcaagtacttaagaaagaggaagatactcatccagaaaataagaggagcagggccaagagaagtgacagctgtgccccctcctgactgtaggagaacagaggctgtgtaggggaaggagggacctagcaacagaagatcatctgacagatctgagcacttagaaaagttgttaggaggccaggtgtggtggctcatgcctgtaatcccagcactttgggaggctgaggcgggtggatcacctgaggtcaggagtttgagaccagcctgggcaacatggagaaaccccacctctactaaaaatgcaaaaatcagtcgggcatggtagtgcatgcctgtaatcccagctacttgggaggctgaggcaggagaattgtttgaacccgggaggggaggctgcagggagctgagatcacgccactgcactccagcctgggtgacagagtgagactctgt

SEQ ID NO: 564 - DNA, 443 bp, Homo sapiens
aagaaatgatttttaaagaagacttaattaccactctatgtgtttttaatgctggctgaaaatacacaagaagacaagctaaagtgacatgtgacaagttctcatttagtctgtcagccatgatagcatattcagaaagataaacaataaaaaaaaaggatcaagagataaaggtagatcctcccatgacctcaaaataattatagtatttgctggtgaggccaaagtttctgtacacagatacctgacatagacagctctatggaattcaagggaaaattaggggaggggacaggtgacaagctcagtctgtggtattaatcgagtagtattctgactgagccccatctgaatttttatttacccattctaatatttcctggaaactaaggctttttacttctctctcagtctactcaaaatgaactactccccaccccaag

SEQ ID NO: 565 - DNA, 497 bp, Homo sapiens
acaacatgcatgaacagatgaatatgtaagcagagagatataaacttgatgaaagcatcagaaaaatgtactagaaatcaaattcactgtaattgaaataaagaatgccttggaggagtttaaccagtaaactggacacagcccaggaaaaaaatcagtgagcctcaagatttatcaataaaaacatcccaaactgaaatggagagaataaaagagtgagggaagaactcacagaactgcaaacatgaacttacaaatatattattcttggagaattaaacataactctaccagtaattgtcagattaagcatgcagaaaatcagtaaagacatagttgaactgaatagcaccattaataaagtaggtctcattgacatttatagaatataccaactaggttataaaacagacattaataaatttaaaaaaaggaaagcatacgaaatatgctcttagactacagtggaatttattgaaaattaataacaaattata

SEQ ID NO: 566 - DNA, 318 bp, Homo sapiens
attgccaacagaatactaacatttttctctttactccttttcctccaggtcctcatagataatttattgagcaatctgataactaaatttgagttatgaaactaatgcttaagagtattttctatttcatttcttccagatatgttggtaagacccgttcatatttgtttccaagtcataaagaccaaatcatgtttacagggtcataaaggagataacttcattttgagaatattttcagttgtgtgtactctctgaaaagaagattaattctatgtgatagggaccagtgtaatttttaaacactaattgggcttg

SEQ ID NO: 567 - DNA, 456 bp, Homo sapiens
agataaaatatttgtttatatagtccttcatctaaaccttgacacctgtattcattcatacatgaaaagaggattattgtaggtacaggactgtagcaatggaaaaactttcttcaaaaagtcagctttcatggagaaagagaaatgggatatgaaagaaccttaagaggttaaaaaaaagtggaaaatatgtcacattatagtgacttcattcccatcttcccatgtagaaatcaaccacccaacctcccatccattccacttcctacattgctaaaatactagtgaataaaatgatctctttttaaaattagttttgtattactccatcattctcctaaccagtctttctttctctagtcttacttcatcaatctgtttattaatccatatttcagacttcataaactttttaaataaaatatattcaattaaatcccttcattgcacctacat

SEQ ID NO: 568 - DNA, 442 bp, Homo sapiens
gagagattttaaagacactagaagtggctatgtacagataacttttttcttctgcatgagaaactgaccttgggttcaatcacttttctgtgtctgttctccccttgataaagaatggccatcggccacacaccaggcacctaggcttgggggactttgtatgaactgaaatacttcataggaagacagttttgggctctcctgaccatgctgactcttgtaactgagcatgttgttgtgggagccaccgtgcaaggattagtataagagatatcggttcttgtggagcatgcggcatctaaactagcaagggaataagagtcatacctggcaggtggtatgagtcttatttccttgcacctttgttgtcacttggacagctcctgggcaactatatgaactgctgtgagaatgacttgcattgaagagaaatgcgtcatgc

SEQ ID NO: 569 - DNA, 375 bp, Homo sapiens
caaggatgtcatcactggtcctctgaaacattatactagaagtcctaatcagtgtaatagggtaagaaaatgaaataaaggcacccatattagaaagaaagaagtaaaactggctttattcacagacgacaaaacccacaataaaactaccaaaactaatgagtgagttttgcatggtttcaggctacaagatcagtattctacaatcaactgggctcttatatactaacaatgccaacttaaaagtttaaatctttaaaaaaatagtatttaccacagcacccaaaatatgaaatacttaagaatatggctaaccaaagaagtattagacttataccctggaaactaccaaacattggtgaaagaaatgaaaga

SEQ ID NO: 570 - DNA, 350 bp, Homo sapiens
accaagtaggactctatgtgttatgttatgaagaaagatgttttgctaacgagatccacacatatctttgatgttcaaagtgggaatatagtgtagcaagaagaaaattgttgaaaatatttccaattgtatatgttatgcatatcatctaaacataaacatgatgcattgaaaaaaatactgttggcaaagcaatttagaaattccagaaaataagccaggcatggtagtgtgtgcctgtaatcccagcactttgggaggctgaggcaggcggatcccttgaagtcaggagttccagactagcctggccaacatggtgaaaccctgtctctactgaaaatataaaaatt

SEQ ID NO: 571 - DNA, 358 bp, Homo sapiens
aaagtgattgtatatatcactttttatcctaggtcaggataagcaagcagtacataaatttttaaaacaggtattttaggtagtgatacatgctataaaaattacatggatagagaatgaccaaagatgactagattgaatttaccacttctttgagtaggtggcagtggttcaagttggtgactgagttctaaacgatgggaaaaagacagccctgcagtggtatgtgggaagtgttctgggcagaaaacatgttctgaagctggaacaagcttggtactttaaagaaaagaggctgggcgcagtggctcacgcctgtagtcccagcactttgggaggctgaggagggcagatcatg

SEQ ID NO: 572 - DNA, 518 bp, Homo sapiens
gcttaatacccggatagtgaaataatctgcacaacaaactcccatgacacaaatttacctctgcaacgaacccgcacatgcaccccaaacttaaaataaaaattaaaaaagaaaaaaatagttatatagtaaagaaaaagtagtaagtgtcagcgggagacttcaaaattatgaacaaagtaaaagaggaacgagggtggggtgtcagatctaaataaaagaaatacaaaaaataataaagaaacaacaaaatttgccaaaaatatccatactagagaaactacttttttaataatcatgaaaaaagcatgattatataaataaaagaaaaaagcaatgactactaaaatagaatataaaacaataaagaaaacctgtagtaaactaagaaattgttgagaaaatattattggtattttcaaaaggcaaaattgaagtggcagtattaaaaaagggttgttgcacactgtgtatatttaaaaggcaaattagaaaaatggcttaattacctatgtagc

SEQ ID NO: 573 - DNA, 535 bp, Homo sapiens
tggctcactgcaacctctgcctcctgggttcaagtgatccccctgcctcagcctcccaagtagctgggactacaggtgcacaccaccacacccagctaattatttttgtattttagtagagacagggtttcaccacaggtgacacgggtgtagtagatgacggggttggccaggatggtcttgatctcctgacctcgtgatctgcccatgttggcctcccaaagtgctgggattacaggtgtgagccatcacgcctggccaaaagtaaatttatagtgaaaatgttttcaatatctaaatagaaaaaataaaaatagacagcataaaaagaagaatcagaagaatttttaaaaagcagatgtgagaaatagaaagaaaaaataagtaataaatataaatgcatattaaatgatgaataattctaagagctgattcttcttaaacgcatggaatgtcaaataatatattctaatgaatctaatgaagttagagagaaaatgcagaaagtatatttgaaaagagaatagtcataaca

SEQ ID NO: 574 - DNA, 486 bp, Homo sapiens
ggtgacaagcaacctcgggccacaagcctttgagtgtagtgtcctatgggtcccagggaaattggaaggggtattgcagtcattttagtcacatagacacatgccttttcaatatccaatgtttgatggaagccatttgggggcactctggcaactgggttttcacaaattggattttgggacataacagacagtaaggaggtattttacaaattgtccccaccatagcataaaaagattactttaaaaagcatctcagggctgggtgcggtggctgacacctgtaatcccagcactttgggaagccgtggcgggcagatcatgaggtcaggagttcgcagaccagcccggccagcctggtgaaaccccgtctctactgaaaatacaaaagttaggtggattgcctgaggtcaggagttagagaccagcctggccaacatagtgaaaccccgtttctactaaaaatacaaaaaataagctgggcat

SEQ ID NO: 575 - DNA, 395 bp, Homo sapiens
cgcatactttaatacatcacagaatttggcagaaagaagattttaagcaattgcctggtggcactgccactagcctaggccaaatcagaagctcttccctgaccagcatctcatgaaagtgctatcagtgaggcttcagttgaggtgggccttcaagagttgtcagtggaaggctccagggcctggactttcttgctcccaagaggtaccacaagggtaaatgtacccagatctggaccaacatctccttccagcccaacttctaccttcccttccatcatggaacagtaggtgcagcctggtgcacaagcagatggtggactggaaggtacatcaaggtaatgcatgggagatggagatggccagctgactcgcaactcaccttgagggagcag

SEQ ID NO: 576 - DNA, 173 bp, Homo sapiens
tgattcttttctgggggcacatatttattacatgtttaatttttagaaaaataatacaaacaggtcacacgaaattaaaaaaagtagagatgagggcatcgcagacttggcctcccaaagtgttgggattacaggcgtgagccatagcgcctggccaaaatgcaattcttgac

SEQ ID NO: 577 - DNA, 538 bp, Homo sapiens
agagggcagggcttacagggctgtcacccttattctccgctgagctgttttaacacgtagccatccgcagatggcagcttctaaaagagcattaattgtaacagacccccagacactaccatggggccagagcccaaaagtgctcaccccagctcctacacctgcccctgcccatctgcgtgctctccctcccataaggggtttgagcacgtgtcggccaagcaaacgagcttcacccctgtcacaagtcctgagaggagtcagggaactctcccatttcattctgacacaggtgggactcagcattctcagaccttcaaaggcctgttgggtggatgtggaggtgtgcgctgccccaccaagctgatgcctgatcaggggaggccactagaatagtctcttgtacagcaacagagcctcttactacagtgagcttctcctggggctttcagagtacgtccgagctccacaccaagaagagagccaacccacgtggatgcagctcggttcttagggctgacttgaaacttgataagac

SEQ ID NO: 578 - DNA, 428 bp, Homo sapiens
agggttcagttgagtcttttgcttcagcctcccgaatagctgggattacaggcacctgctaccattcctggctgaccttttgtattttcaatagtgacggggtttcaccatgttggccaggctggtctcgaactcctgacctcaagttaccagcccaactcggcctcccacagtgctgggattacaggcgtgagccaccacacctggccagggtataataaaatgcttaatagaactagtctaccctcaaccggaacaatgaaaatttagtcactgaagtaagtcaaagaaacagtttcactgatgagggaatcattctacatgaaccataaacaaggcaagaaactcattaaatatatctgctgtggtgcaatgtgccctggaactacaatggttactactccctcaatattgcccttagtgaaagc

SEQ ID NO: 579 - DNA, 498 bp, Homo sapiens
cattcactttctgatttagaatttcttcaaaattgaggaagattggaggatagacaatttctttttctttaaaataaattattgaatgataggaagacctatccagatctgatggaaaagctgagcacctcttggagatgctccatattagattttgaacaggatgcattgggatgtgaaatatccagcttgattctcttgggaaaggtatgagagttttgctgtgggcgagacaagggaaacagatgctttggcagtgatcagaagggtggactgagaactgagaacactgtccacctttttctctttttgggcacacagctagactacattttacaacttccctgcaactacacagaggtgacatccagccagtgaaatgtgagtaggattaacttgcttaatgcttagaactgacccattaaataacaaatctcccatagataatttgtaattctctttttctatttgtagctgtgtggaaagacttcaaagaac

SEQ ID NO: 580 - DNA, 519 bp, Homo sapiens
gaactcctgacctcgggtgatctacccacctcggcctcccaaagtgctgggattacagctgtgagtcaccatgcatggcctggaatctggatttttttcacaaactttctcagagaattacacctgactccactgaattctacaagcccagattttctatttttgcttagtaattctagtgcctgttacgtgctaagtggccagggccagattaaaatgttagcatccaaaggtattaaagaaattatgccccactcgttcccatgtataaatcaatatgaaatgataataaatagcaaaaatacatgaagagggctgggtgtggtggctcacgcctgtagtcccagcactacgggaggccaaggcgagcagatcacctgaggtcgggagttcgagaccagcctgaccaatgtggagaaaccccatctgtactaaaaatacaaaattagccgggtgtggtggcacatgcctgtaatcccagctactcgggaggctgaggcaggagaatcacttgaaccc

SEQ ID NO: 581 - DNA, 481 bp, Homo sapiens
cacctaccaacatgtcttattaattcaaataattcattccaaattttcttcaatgtttaatgtacaagtcatgccatctgtaaatagcagatttgttcttctaatatttatatactttatcaatagtctttgtttttatactctaggaaatcaacagaatgtgacaccacaggttgattaagaataccaccgtggaagacagtgtggtgattcccgaaggatgtaaaactagaaataccatttgacccagcaatcccattactgggtatatacccaaaggattataaatcattctactataaagacacacacacacgtatgtttattgaagcactattcacaatagcaaagacttggaacaaacccaaatgtccatcaataatagactggattaagaaaatgtggcacatatacaccagagaatactatgcagccataaaaaaggatgagtgcattcctttgcagggacatggatgaagct

SEQ ID NO: 582 - DNA, 515 bp, Homo sapiens
ttccgaaaaatatagtttcactttctatattatccaaaactattccaattagtaacttgtactttaaaaaagacaactgttttataaaatacactaaagagatttaagagaatttaaaggtcaaagttacataattacattctgctcttcattcagtgctctgaatcataaaggcatattctcatctctttttttactcaccattctcaatctttaaaaaaaaagaacatttggctgggcatggtggctcatgcctgtaatcccagcattttgggaggccaaagagggtggattaccagaggtcaggagttcaagaccagcctggccaacatggtgaaacccagtctctactaaaaatacaaaaattagccaggcgtggtggtgggtgcctgtaatcccagctacttgggagggtgaggcaggagaattgcttgaacctggaaggtggaggttgcagtaagccaagatcgtgccactgcactccagcctgggtgacaagagtgagattccatctc

SEQ ID NO: 583 - DNA, 522 bp, Homo sapiens
tcttacttagttaatattattgtgacttcaaataagctaagctgtggctaatgttttctcatctataaaacagttgataagagtacccatttcataggcttactgtgaggactaaatgtattaattagaattaagtctaaatttttgagtaccatgcctggtacatagcaagagggcattaaagattaactgttattattatttgattatagcaaatgtattactgaataatgctggaggcagagagatttaattcctaatcctgtatttaattcctagtcctagaattttttagttaatgatgttgagtatgttagttaacttgtttgagctcaatcttaacagaaatctaatagaattgttgtgctgaataagctagttatttaatgtaacttattagtacatattttgtcattattagatgtgtggtaaatgataggtcaaaaaagattgtaattaatggcagagaagtaaagtagttgcagataacaactgtaaaatgctggactgaaaagacactga

SEQ ID NO: 584 - DNA, 506 bp, Homo sapiens
gagagtttgagtttcagtccctaaagccaggggcaagtttttcaagagacccatactgcagggccacattgtggactatgtaacttcagctaatttcttggaaatgtgagtataattgtctctgcattttatatatttaagtgatatgatgtgacagcatctgggttataggatggggggttctgaaccatgagaacccctaaatttgagaccgttttgtgtcaggatattctgagctctgtctcaagggattttttcctctgacccacagtgcagaattgtttcctgattaggctgtttcaaagctaaaagggacaaaaatagggctgagcagccagccagccaaatgtaccttttataaatctatctctaaacttgtagagaactctaacaatggtttcattaatttaacaatcactcaatgtcatatctattataatgtactaagctcttaagagagaaagaaaaaagaaaattgttttattcccgtgatttaatttaaaatg

SEQ ID NO: 585 - DNA, 530 bp, Homo sapiens
gttacttttcaattcctaggaaattgaattctcttctacttattttcagatcccaactcaagtaacactttctcacagaagctatccctacataataatttgtagttatgtttagtagtgtgattatttgtttaatgtttgtctctgtcactacactgttagttccatgagggcaggaatcatttgtccaccatagtatccaatctggcacagtacagcaacaaaagaagtatttgctgaatgaataaaatgagtgtgtgtggctggttgggggtgggtgaatattaatgtgaacataactcctcaaagaaagtaaagaattgaaaaaggagaaggaaaagagaaaacattttattatgaatatttcaaaattgcaggaaacacactgcaaatccccggggagccacttcctatttcaatcaaacccttattcaacattcttggttcctttttgttttaattgagatataatacttagatctcaagtattccattgacgggcgcggtggctcacgcctgtaatcccagca

SEQ ID NO: 586 - DNA, 605 bp, Homo sapiens
ttgactcatgcatttgcaattaaaatatttatgcttgtgtgtgtttatcaggatactcaatccaaaccttattcaaactaccacagacaagaaatgtgggaatttcttggcttctgtaattaaaacacagagagggtgtgatgcagctaggtctcaaggacaactggaagcattgatttcagtgccactaagactgtcttcccatctacctctgttttctttgcctatcagtgtatttctcttatatgtgtttcttttgcaagaatgaaaagtaccacccctggcaaacttcaggcctcacatgtctctatttcagcttcaaagaggaagtgaaatgtcttctttctgatgcctaggaaaagaatcctgagatggggctacggttatattggcttgagtcaatttttgcggctgggaagttggtatcatcaggaaatatgaaagctttactgaaatcacatgtttgaaatttggggaaagatttttctataagtgggaagagaaaacttggcaaacagttttatgtactttatatgtaacactcacagcaagctaaaattcttttaaacttaaaaaatctgtttttaaaatggtactacgaagca

SEQ ID NO: 587 - DNA, 604 bp, Homo sapiens
tggcacgtgcctgtagtcccagctactcgggcggctgacacaggagaatcgcttgaacctgggaggcggaggtgcagtgagccaagattgcgccactgcattcaagcctaggtgacagagtgagactccgtctcaaaaaaaacaaaaacaaaaacctgatatagagccttatggtcatgatctattatatcctgtgtattgcacatgaaggaaaatattgtctttaataatattactgctggtttttaaaaaatcattaagtttcagaaagcttgctttctttacctcttactttctagctaagtagataattaatgtggttttatatttacctttaaaattctgtagttgtagagtcttctgccttgtgtttatacagagtttataaaaatttacagtgggccgggcgcggtgacttacgcctgtaatcccagcactttgggaggccgaggtgggtggatcacgaggtcaggagatcgagaccatcctggctaacatggtgaaaccctgtttctactaaaaatacaaaaataaattagccaggcgtggtggcaggtgcctgtagtcccagctacttgggaggctgaggcaggagaatggcgtg

SEQ ID NO: 588 - DNA, 552 bp, Homo sapiens
cggatcacttgaggtcaggagttcgaaaccagcctggccaatatggtgaaacccgtctctactaaaaattcaaaaattagccagttgtgttgttgggcgcctatagtcccagtactcaggagcctgaggcacaagaatcgcttggacccggaaggcagaggctgcagtgagctgagatcaaaccattgcattccagcctgggcgtcagagcgagacttttctcaaacaaacaaacaaacaaaagaatcacaccagcctagagcgagtaggatgactagaatctcagcagccacagcaccaggtggatcatcgccctggagaggggaatatgagggctgagtcacagtgtcatccaaaaaggacttgtcagcctctgcagaggctgcctctcacctgcggaacacgtacccactgtgctgtaagtcctggagcaatttgcttcagccttctcaggtgtatggttttatgccttggcttttccattgtgtccacattttctcagaaaatgcaaacttcttgagaagtgacctcatttccctcacctgcagcaag

SEQ ID NO: 589 - DNA, 605 bp, Homo sapiens
ttttacttctttcggtggaggcagaaattgggcatgagacagtatgaggggtggtctcctcccttatccccaccagaactttttaatgaagaattggaatatgactttgttaatatagtggaatatatttgagcttgcatcatgggtaagtgaagagctattacggtttttgggtggccacatcacccttgtttatttttcctgtaacagcagcattccaatttagtgaaacgaaagacactgaagttatgcttacctataattatctctattggataaattagtaaccatgttatactaatatctactgtaataatttgatagtaacttttttgattagatacacttagtataattttaatgtactatttataatgtacataggatttttaaaaattgtctgtaaccataatccaattaaaacactttatattccaaatgtatgaatataaaaatattgaaattactaagggattcattcaaagcaaatattggtggtgttatattcacactactgtataaaatactgcttaatttatatgaatgcagtttgtctacaaacactacacataactatgctaattgttctgaagtaataagcagaa

SEQ ID NO: 590 - DNA, 584 bp, Homo sapiens
gagctagcaagaagctagaaggaaacttctggtatcaaaacaataaaaaaaaagaaaaatttttagtgcaaccagtaaaagcattgaaataaggtatgctatttccaaactagttaaaaaataaatataatgaaaagttaaccaatcaaaaaaacagagggatatatgcacatataccaataaaaaaaacagagggatatatatatatccatatatatgtatgtgtgtgtgtatatatatatgagataatagaaagcataaaataattcagaaaaaccaaatatatcagaaattactgtaaataccgaactagaaataaaaattcagcaattatatgtaagagctttgttttaagcaaaaataaatagcaaagttgaaagttaataatgggaaaaaatgaatcatataatattaaccccccaaaacttgtttaactatatcaatacaagaaaaacagactatacaagaaggaatataaaaatagtataaaatttccccactatcagagtggggaatctcaaatatattccttgtatttcagaatataagggaaaatttatcgctctatgtatttatgttacaaa

SEQ ID NO: 591 - DNA, 208 bp, Homo sapiens
cacttgaaccctagaggtggaggtttcagtgagcagagatcacgccactgcactccagcctgggtgacagagtgaaactctgtctcataaaagaaagaaagaaaagatattgtagagaaagacattcttgttcattgttgatgggactttaaaatgtttgagcctcttcgaaggcaatttggcacagctattccaacctcaatgtctt

SEQ ID NO: 592 - DNA, 573 bp, Homo sapiens
gagaaagaaaggaggagaataagcatctgacagccactgagccggggctgccaccaaaggggccttgaagagaggtagagggcatggacgctctgaatgcagatagaaaaaagaaacagacaagaaagagaaggtggtagaaaaggtgagaaaagcaaagtaagagaggtgattaagagggtccaacatcactaagttgagaaaaatgcaagtttccaggaagaggggcagccgacagtgtcagaatatgtgagggactgggaagctgtgaaatcatcatatttcagaacgtgaggtcagtaattctgagggtaaaaataaaagctgcaatggaatgcaagatgaggcacacaggcaagtgtagagggataaaaaaggactttgctaagaagaaacaaatgcagggcctcctggagatagtgagctacaaaagatgcaagaaaaagaaggtgtttgctaaaagaagacagtagggtaaagaggtttcttcccacaataaaaaaaactagcatccacagaaatggaaaagtggctgggcgcagtggctcacacctgtaatcccagcactttcgg

SEQ ID NO: 593 - DNA, 610 bp, Homo sapiens
ctatattttcatcttttaattagtatttatttattattattattgtgacaagatctctctgttgcctaggctggagggcagtgccacaatctcagcttactgcaacctctacctcccactgatccctccacctcagtctccagaagagctgggactacaagcccacgccacttggcctggctaattgtgttttcagtagagatgggttttcaccatgttactcaggctgatggcaacgatcctgggctcacgcaatctccttgcttcggcttccccaaatttaccatgcagcaaagcggttgctctgttttcattaagattaatacaaactagaattaaatgcaaaatctcctattttgttatacaacttctttaaggaaatcacaggttccgtggtacagaaattgtttttaccatttaagctagagtactatggtgctgaaagaaagacatacgtctcaggcttatgtaatttcagcagaaattttctttaaacaaaatatttattttatcttctcatttctacacataaacagaatattcatgttgtagcttgcataactatgtattgttggaagtaaagcacaaaaacatttagggctcatggctt

SEQ ID NO: 594 - DNA, 561 bp, Homo sapiens
  misc_feature 477: n = A,T,C or G
ttatatatttgcaaatattccaaaatccaaaacaatccaaaatctaaaacacttccggtcccaagcatttcatataagggatattcaacctgtagtatagatacaatagactcctaaagttgaaaccaccatgtattcagatggggggtgaagatagtatgaacacatctacatggggagcttagcgtattaagaataattatctaagcaaaacactttacccacttcaccacaatccttaccatgacttgacgcacaagcttaatggtttcactccagggtctattttggttaaattttgcatggagccgttccaggagagaactcatcttactcagcttttctgactctatgatttaaatcagaaaacgttatcagtaactgttctatcaagaccatccacagttttccttgcaaaataaattcccacacttcatcacagtaagaattcagttaaaatattttccaaaatcattntacttcaaaacatccaaagaagacatttttaatggcaagatgacacacaagttatgggtctgatgtaaggaataccataccact

SEQ ID NO: 595 - DNA, 581 bp, Homo sapiens
tggagtaaaagcaagggcacccaagacggcagggaattaaaaggaagaactcttaattagaaaatagaaaatgcctcctgggtggtgttagtaataggtaaatttaagctgagatgaggttagagaggacagaaatggaacagatgaaaccacataagacagaaaagtagtggggcatgttgcagcaaattgactccacatgggctgtgtacagaggaggaaactaggttggggccagatcctggacacccttgaattacagcatgagaaagaaagttgtaccttaattcagactgcctgggaggcttatcagggggtggaatggtagggattgggagggagggcgtgcaagggcatctattgaacagagtgggaagattgaagtggtgctgatatataaactggattcgaatgaggggaggctgggagtagatggatccaggcaattatgttaataacagtctaggaccgtggtctttaaactttattactgcatacctactaaaataattttgaaaactctgtatcatgtattttaaagttgacattcaaaattttctccataaaatttccatatttgc

SEQ ID NO: 596 - DNA, 551 bp, Homo sapiens
ttgcattgggatgtgtaagttttcaacgcatgaacactttaagattcttaaagtggtttcttgagatagaatgtactgctatggcttgaatgtgtctcccacattcaagccatagcagttgtgcacatatactataaggcaacaggaatcatccataaacagggggtatgagtaagagtaaggtaactataaatagaaaacatatgtactgtgtacaaatagaaggtaagcttttaaaatggcattggcaggagcactgaagcagagatttcaggggacaagttatcataatggtgggggaacagcattcctgctgctgagtgggcttagaccagctcctctgactttttaaaaaaagtttcatcccatggccagactataaggacagtgatcaagaaagactgagccatcaggtacagtggctcatgcctataatctcagcactttgagaggccaaggtgggaggatcacctgagcccaggagttcaagaccaccctgggcaacatagtgaaaccttatctctacaaaaaaataaaaataaaaaaatgag

SEQ ID NO: 597 - DNA, 595 bp, Homo sapiens
  misc_feature 89: n = A,T,C or G
agagaaaggttggggtaagtaatttcctcctaaaggggaaaaaagcctacaatttttgtataagtaactgaatccatatagaggcaggnctgacacttgaaaaaggtcacacagtgtgagtatccttagaaatagaatgtttcagtattgtggggacaaagttcagctcacttaagaacatttcctattacgaaccagttattttcaaaatgagactgctatgtagttatataaattactcaacaactgcagtagaactagatgtaatagctacaataatatttctagtataaattatctaagaatcatttttaacatatctcctttgttagtattcattatactcaaagcttgagggacaattgaataatcagcctctatattttcaaagttgttctacattgagagttgtcatcatttagttaagaaaactcgaaatttttgcacttatgttcaatgaggcaggttgaaaaagagtttccgctcttaacacgtcattattctcttttttcaaatgtaattacttagtcaattaacgtcactcttctgtaaaacatttaggtgtaagtgaaagccatttctttatcatcatact

SEQ ID NO: 598 - DNA, 459 bp, Homo sapiens
ctgtcaaatgcaatgctcccaggctttccatctctagtcctcagacatgtcttcttcaatcagagtcacttctaggccatatcaggcttggacagcatcagactcaggactgcacctttctaaatgcacacgcctcataactggaccttcttttcctttttttttctttagagacgaggtctcactatgttacccaggctggtcttaaacttcctaggcttaagtgatcctcccaccttggcctcccaaagtgctgggattacaagcatgagccactgcacccagcctgtaattgagtcttaaacactgatttgtatgggccaatctggctttgttttgtgggctattctctaattaaatgagttgttttcagctaatagtcagttaaaaacacatcacagtggttatttctcaaaacctaaaaccgaaaaatttttaaaaacacaaaaaacagcgccg

SEQ ID NO: 599 - DNA, 463 bp, Homo sapiens
atgatgcctgccatcaaggcttccttttccacttccctgtttgtacaatatatgtctattggcccttctaacaggaccgcatttctgagagaacgcattatgtgcttcctctacttaagtagaattttatgctgagatctataagatcgcagacaggtgataaaaaatataagccagtatatgtgcccccctcttaggcttctggagtctcttgggaatgaaccagttgatggtatttcctctgaaagctgcttcacctaaagcagggcagcatcttctctaggaagacccagaaggttgcagcacaagtaaggtgatatcctggcctctatggctgtcctgctgagatgtcctccagaccttccataccatggggtcagcttgtgtaactatgatatatagggtctggacagtctaatctcatagaggctgaaccggtatatatttgtgactagaatgcccc

SEQ ID NO: 600 - DNA, 637 bp, Homo sapiens
agtccagcacacagaatccaagctctgcctgtgcattaggcttcaggacatgagggaatggcagtgaattagggctgcactatgccaggaacactcatttaccacaactggatttgtcagcagttccagtgaactttccttaggcattatagaattaactgtacttagagagaggttcttggttaacctcagtgttttcacattttaaattatttcctaagtttcaagtgaaactaaatatcatttgaaagacttttaaaggcagtctgcccaccccactccaactcaccccaatttccactaacaactacttcaaatgtaattgtcagaaagagcaccccactccactgcaccccaaatcagcctccgatagatattgcatctgaccctggggggcccttcccgctttcctcttgctatgctcactacactttatttccctcaatgaaaactccttccccaccctcctaatgtgtgacttcacattctatacatagaatttctttttttttccaaagtgaatatagttttatatattttttaactacataaaaataaaacacactcaatacaaaaagaaatggataaaacgcaaatgtgaaaacaaactcaccaatcaccaaccactcagaacttt

SEQ ID NO: 601 - DNA, 636 bp, Homo sapiens
acatttaataatgaattggacacaactggataatcatttggaaaaaaaagaaaattgtactcatacctcacataatgcatcagaaagaactccaaatggatctgaaatgtaagtataaacaatgagagagatatgtacaagaggaaaacatgggcacattttttataaacgtagagtgaggaaaaccttcataattagactcaaaatccagttgcaataataataacaaaaaaaaagattggtaaattttactgaatagaaacaaattgcatgacaaataaaccatagtaaaatataaagaaaataacactgtgatatatagttgaggtgtcatggataaaaggccaatttcctggatgcataaagaattctttactgtcaaaggaaggaaatatcaaaatctgacagaagaaatggcatttaaaaaacatggggaaagcactcaacttcactcatattcaaagaaatgctaattaaagctaccgtgtgatgcaatttcttacctattagcttgtttggcaccaattaaaaagcttaagaacccaccctgtcagtgaggctttggagaaaaaggcactcacaaattgctggtgcacgtgcaaaatgatacaatccctatggaagggaagtgacagt

SEQ ID NO: 602 - DNA, 514 bp, Homo sapiens
ttacaacaagcagggatgtcaggaaagtcaattaagaggtgacctccaatagcaagcctttgtcattcaggtttaggcaacattctttgtcagcctctaagtaacactaactgttgaccttttgctttgcattgaaaggtcattaggataagttaagcctcctaagcgtgcactacttttgaacctgtggctcacaacattccattaaaggggttatcaaagggtggctagaagaaaaaggaaaatgtcactatgaactttttaatctataaactacattaagcagttcaaattgtcatctgtaattcagttgtataattagaaatactttcctttcaacttaatccaaatgccacatctcattgtgatactaacagtatgttgtcttcaccaatgtatagctgtgtttatttctatacttaaatgtttagaagcaaaatttcctgtttctctaagctctaagtttccttttttagtaactcttccatatcaaagacatctcacagaacctctc

SEQ ID NO: 603 - DNA, 511 bp, Homo sapiens
gctcactgcaggcgccacctcccaggttcaagctattctcctgcctcagcctcccaagtagctgggattacaggcgccaggcatgggactaatttttgtatttttagtagagacgggatttcaccatgttggccaggctgttctcaaactcctaagctcaagtgattctcccgcttcggcctcccaaagtgctgggattacagccatgagccaccgcacccagccgcactcatgtaaacttgtaagtaaatccagtaagctttaaaaatcctgaagttgtgtaattttctcaggggaataattttacaggtataagcgtagaaaattatcagttctatttctataatgtagacttagaaagatcctgtgtactgagagtgagatgaaatttggacaaaaggagacttatggactttcacaacaacagaacaatcatgatcaaagcttatttttgccctgtgctgggcactttgtgtgcgttgacttggttagtcctcacaccagccctatg

SEQ ID NO: 604 - DNA, 516 bp, Homo sapiens
actaattccaggggtgaggtgttagcggtcctgggaaaattgaaagacagcaaatatatattggggttcctggggtctggagctagacaactatgtgggacttgaattccggctcagcatttattagttgtgagaccttacgcaattttcttaacctgttagacacagttataaagttaggggaggcaagttaaaaaagatatatatgtaagactgtttgttaaagtattacttataatagcaaatgtctgttactggggactggttaaataacaattttgtctccacacgctcaagtactgtacaagtataaaaggagttgagaatagctttagatactgttatagaatgaactccattggatattgttaatttaaaaatatgaggtggagaaacacatgtatagcatggtattatttatctaagagagaaggagagaaatacacacaaatgcatacacgtgtgaatgcacacatgcacacttacattacaaaaatggaaaacaaagcaaagctt

SEQ ID NO: 605 - DNA, 523 bp, Homo sapiens
  misc_feature 427: n = A,T,C or G
cacagattatgcttctaataactttaaatattaattatggaggaaacgggttaatcattttaaggattctttttggttgatataatgattctattaattaatatttgtcttatgggagccataagcgtaataggcataatgagagcacacacttgtaagtcagagtggttcttacaggggagacaggaaaaatggagtccaaaaggcctttctgtaagttccttgggagcagggactaggtctttcttgttcaccattatgtcagtatcaggcacaatgcttgacgcctagtaagtgttccataaatagttgaatgaatggatgagtttctcattaagcacttttagtagctcatatttcttgtactgtggataatcaagatcaattatattcatctaaggttaagagcctttgctatactcagttntctttattaatgtaaatttaataaactgatttttttaaaaggcatgcatctatgtatacacacacacacacacacacacacacacagacacacaca

SEQ ID NO: 606 - DNA, 565 bp, Homo sapiens
ggttgagtggtcttgggcaagacactgtccctctctgagcctcactttccccttctgtggaataaagggactggaccatcctaactcatgttttttctacagagaggacctctgtctacagccagacttgataatgaattccccaggagtccaacctctggccctaaaaagggggttcaaggaaatcctcataccccacctctttcaacagcactggccaatggcccccatgctgcaggtaaaaacatggccaaagatatggatgaaacaaaatccaatccagccaggcacggtggctcacgcctgtaatcccagcactttgggaggccgagacgggcggatcacgaagtcaggagatcgagaccatcctggctaacacggtgaaaccccgtccctactaaaaatacaaaaaaaatagccgggcatggtggtgggcgcctggagtcccagctactcgggaggctgaggcaggagaatagtgtgaacctgggaggcggagtttgcagtgagccgagattgcgccactgtactccagcctgggcgacagagcgagactccgtctcat

SEQ ID NO: 607 - DNA, 345 bp, Homo sapiens
atgaaacagcctacaacttcagataaaatataattatcaggtagattaaaaataagcatgtttaaaatgagaagtcataaaagaagtataataataataacataacagaataagacgtcaaaaagattagactgagctacataggaaatcaaatataactcagaaatttaaaaattatcatttaaagcttactatgttaaaccaaagattatatattaccaaataaataactaatgaatggaaagaaagatctgaggaatcttcagaagcctgtgcagagagatgaagagacagaacatgcagaggaagggcttactgacaaggagtgtggactgtatgaggact

SEQ ID NO: 608 - DNA, 459 bp, Homo sapiens
aaacagcacctatattatgatccagagacactcagttgtaagggaactaggacgggatttctcactggcttctggaggcagttttgcaccacagttgcacagatgaggacaattgaaaggttgctggtgtgatagaaaatggcttgaaaaatatcagtccatcaacaccatcccgactggtggtgcacgtacccacccaattcattcttctaaccaataagaatctgcaaaacacaaccgtctttcaggtatattagattgtgaggccccagcatatgtgagatgtgcttcttgcctccaaaacaattactttctttacaaattttttgtttgttgtttacacaaggtctccctctgtcacctagactagagtgtagtgccatgatcatatctcactgtagctttgcactcctaggctcaagaaatcctccctcaacctcctgagtaactgggactaca

SEQ ID NO: 609 - DNA, 585 bp, Homo sapiens
agacagcaacatgatggcatagaaaagtatgaaactcattggtaaatacaaatatatagacaaatactgaatattactgtaatgatggagggtaacacacttttaattcaactgtaaatgttaaaagacaaaattagttaaaataactataaataaatatatggtaaaagatatacaatatgaataaatgaacatagtgccaacaataatataaagtgtagggagaaaataagttagagttactggatacaattgaacataagctgttatctgcttaatatggactattataaaatattttacttaagtgccaaggtagccataaaaaaacctatagaaggtacacacatacacacacacacacacacacacacacacacacacacagaaattaaagcatttcagatacaaaaatcaacaaaatacaaagagagatagagagagagaaaaggacacacaaaagatctacaagactaacagaaaactactcataaaatggcaatagttacttttttcctatcaatagttactttaaaggtaaatggaataaattcctaaaaaaaagtcatagagtggctgaatgga

SEQ ID NO: 610 - DNA, 531 bp, Homo sapiens
tgggtgattgcatagttttgtgctagtacctttttagaaggctttaggttgcactaactagagacaatacaagaactattgaagctggtaataaaatatcccattgaaaatgattaggccaatgttaaaaatgacagcattgagacatactggattgtttataaggaatgagtagagtctgaagagaagggaaataagtgatatcatttccctaaaggagctgaattaaagtattggatttatgatgtttttatttatgcaggggccatttaaagcattttcattttcaatttttatgtgaatgctgttgcacacttactcttttatgatacaaccttatgcagcaggctgaattagggacctgtttaacttctgggggtaactcatggtgttgaattagatcttcgtatgtggtttccattagaccaaacttagtgactgccttccacactatgcaccctcatattatttgagaactctcagaacagttctgttaacatcagtcaatttgcattcacagctgcattcaat

SEQ ID NO: 611 - DNA, 215 bp, Homo sapiens
ttgtaagttggtttcaggctctgttgaataaaagtgtttgaatctttttttctctattaatatttcttggtagtacatatggtcaaatgtttattaaagaggaaaaaactggtaagctttaaaatgctgttaaaagttttggaaacttccttgacagaaatttcatttttggtgttgttgaaggttaacttaaaaattatgtgtgtgtgtgtgtg

SEQ ID NO: 612 - DNA, 362 bp, Homo sapiens
aagatggcaaatgtggtaggttaataattaaacatttggaaccagtgttcttagtgtgattctagaagtgtactagaaagtcaaactaaagttttctgatatcttaatgaaaaaatcagttgaaatttactctaagctgtcaaacatcattgttccctaaaaaggaaggtcattaaatgtacctaccaaacacataaaaaagctttcagctcatcagcatagatcatattgaaaaatttgcttcttattgtacccaaagatctcaaagggaatatacacattccttcatttgtcctaaactaaaatacaaatataatgtgtgtgtgtgcgcatgtgtgtgtgtgtgtgtgtgtgtgtgtgtg

SEQ ID NO: 613 - DNA, 427 bp, Homo sapiens
cagagttccaggatcctggattatgaggttcacaagagctgattgagctctctcatagcaacttacgtaaagggaaagctattgaatgactggtattgtttgagccctgggaactagtgcagacatctgtgtgctttcggatgtatggagttctttgtgtaatcagtccatttagcctagactgaaggaagatttttattcctctctctaaatttggcctctattatattagtctgagatttttttttccttataataatgactagcagtgtacagttcagactaagcaacgggaagatgtgtgtatgaaattgttagagaaatgaacaaccagagttacagtaaacagttgtcttatgttacagtgagtagaggtgattcctatgtggctgctcctaatgctggagcccctcagtctgattccaca

SEQ ID NO: 614 - DNA, 631 bp, Homo sapiens
tgtagattaacctgaaatctcagcattttgaaacttcaatgcctaataagattcaataatttcttcaggtggaataaactagttcccagagataaaactaacctattttgtattgttttcagaatacagtactactggccgggtgtgggggctcacacctgtaatcccagcgctttgggaggccaaggtgggtggatcacttgaggccaggagttccagaccagcctggccaacgtggtaaaaccccatctctactaaaaacacaaaaacaattagccaggtgtgatggtgcgcacctgtaatctcagttacttgggaggctgaggcaggagaatcacttgaacctgggaggcagaggttgcagtgagccgagatggcgccgctgcactccagcctggtccacagagcatgactgtcccaagaaaaaatacacacacacacacacacacacacacacacacacacacacacacatagtactattacaagactatttcatacttgatatgtgtttcatattaagcacattgggagggtagaacagatcactgtatacttttcccttctaaaaaacacacactgagatgagtcaggcataatgactcatgcctgtaagccctgtactttggca

SEQ ID NO: 615 - DNA, 567 bp, Homo sapiens
  misc_feature 350: n = A,T,C or G
gatttaaactacactttcattcagtgcctcatgaaataattatgctgtcaaatattagcattgttgcttaggaaactggtatcaaaatactaacttttctttctgtttatctcttactacttaataataccaacaatttatggctcacttaacctacaatttagatcaataatataaattgaaagatatttgttaaaaaagaacactgtcaatgtctctctttaaaatctaattctcatttgctatactaaaatatttagtcaccttttctaacataactccatcttggaactacgtcctctaattaagttctggggggaccaagaatggcatctgatgccattccttanaataaaaacaaaaacacaccttggtacaattgcacattctgaattagcttgtaaaagcagcacaactgtcccagaaacaagcaaatcactcttggatatattatgatatttttcaatacagtaggcttacataatcgatgccattatagaactcagcaggtgacagtccacatcagtaaacagacatctactgatgacaaagaaatagtaacaatag

SEQ ID NO: 616 - DNA, 563 bp, Homo sapiens
catcaaccctgagcattcaagcctgcgtttccctgttaggaacctcggtggtagccggagctctgagaaacccctaggcagaactccttgcctagtttatggcagacatcagggaaggaaaggcaaatttcaggtctttctcacaataaataaataaagataggtagatttgattgatggatggatggatgaaacctgggagtctacgggcaaatatttatcagacactggaagtgtaagttgtcacaaagattatggagtgcacctgtcttatgaccctgttattttatcctagtatgtgcactagagcatattttctaacagtgtaaattgaaggctcacaaattagtttagtgagagaaaagataacggattggaagagaattaccatattcattcgttgtgttttaaaatttttaaagtaaaatagagacattatttttttcatgctttcgaatgcatctataaaaaatagacttgagggctgggcgcagtggctcacgcttgtaatcccagcaccttgggaggccgaggagggcggataacgaggtcaggagttggag

SEQ ID NO: 617 - DNA, 532 bp, Homo sapiens
ggttacataattaaaggggagctctcatttatttatttatttatttattttaattttattttattttatttttgagacggagtcttgctctgtcacccaggctagagtgcagtggcgtcatcttggctcactgcaacctccccctcgcggggtcaagccattctcctgtctcagcctcccaagtagctgggactacgggtgtgcgccaccatgcctggctaatttttttggtgtttttttagtagagacagggtttcaccatgttggccaggctggtctcgaacgcctgacctcaggtgatccgctcacctcggcctcccaaagtgctgggattaccagcgtgagctactgctcccagccctcatttattctttatgctttgttacaacttattttgaggaacatactgttggactctggcagagacagcacctcttgcttttctaccggaggctgttttgactccgggtcagaaacaccaaacccctactgctccatgagcaacatcgagcaggggatttactcctgggat

SEQ ID NO: 618 - DNA, 551 bp, Homo sapiens
agaactaacaattaaaggagaatgtgtattttctttcttcctttctttttttcaagaatcagggtctcactctgtcgcctaggatggagtgcagtagtatgatcatggttcactgcagcctcaacctcctgcctcaaacaatttttccatctcagcctcttgggtagcagggactacaggcgggtaccaccatgcccaactaatttgttagtgcgtttttttgtagagacagacagagtcttactatgtttccaggctagtcctgaattcctagcttcaaatgatctaaaggagaatgtttctacagcaggttagagacagtgtatctagtggggaaatccagctgttcacctcctcttttctgaaataaagtactactctattaattatgatatgaaatcatatatttgggtctactaaaaatttgttctctttattgaacttaatctccattttaggtttggtgaggctacttattaattttcaattgaacacttgtatttaaaagcatttctggctgggcatggtggctcacacctgtaatcccagca

SEQ ID NO: 619 - DNA, 422 bp, Homo sapiens
acagcttcctaggtgctggtaatatgcatccaggattggggaccactggaatagggcatgtcagaagcatctccctctggcagttttcctcagcttagggtctaaatgcttttgcaatatcaaaatgtcttctttttaatttttaattttatctttttttaatacagggtatcgctatgttgcccaagctagactggatctcctggcctcaaatgaccctcctgtctcagcctcctgagtagctgggattacaagcacacaccagtgtgcctggctatcataatgttttcttaattctatttttatcatttttagcagagtaaatatttgatacactatgagaacagccagggtaaataaacttgatggtaagaaaataaaaagctttgtgaacctgcatataggtatctatatcttaagta

SEQ ID NO: 620 - DNA, 522 bp, Homo sapiens
tggtgacactgccacctgcagaccacactttaagtggcaattctctaaactattccattttttttccctgcttgttaatatttccacttccaaagctacagattttccacatgaatgaaggtctgaggtgtgttttcaaaataactcaggtcagcaagatctgtaagaagggacttggactgtgggagcggggaagcaaagggaaggatgatatacatatatgggttacctaagccaagcctacaggtgttcaagcaagaattacagaaagccagtgttgttgagatttttcctacatttatctgcctcgtcctcctagacagcatttaagttgcaaaatgttttttagcaggctaatgacaggttacatccactacactatatcgtgatggaagaagcaacaattctttttcaaggagaggaggtgatatggtacttcccatcagagccagatgtgaagaaggaagacaaagaatggttttattttctatcgcaggtcactgaacctgtgtgtgtgtgtgt

SEQ ID NO: 621 - DNA, 562 bp, Homo sapiens
agacacaaacttgctttacctgagggccaaactgttatgaatacttcatgtagctttcctttcacctttggggtggaatagtacctaagtgaaaaggttagtagattccatttttcttatcaattagttgcttaagcttttcatctgtttcttgtaaagagtcttttaaaaagagaaaataacagttttttgaaaaatttttagaagtttctgcacatgaataggcatccctggatgggcctgatctgggagccctcatttttagatgcattttttaaagtgttgagttgttcatctggaatttccacataacggccatcttaattttaaattgtctttggtgatatttcatcatttttgtaattgttttctgcttcctgaacctaatacttatacatgtaaaaggcaagcatagctggaaaatagattacttaattctatagaaatcaaggattttatttttacattgaatctttggtgtcttccagccaagataataccccgagagggaaacaccacacggttgggtcatgtaatgctttcacagtaaacctcattacag

SEQ ID NO: 622 - DNA, 346 bp, Homo sapiens
aggaagaaaatattctacgaattgaaaggaagaaatattttatttgcttacaaagtatatctttctacaaacacaagataaaagcaaggaactaacaaattattttaaaaccaatttaattatagttacccacaataaactaattaaagaaaaaaaagtagaaacattaggaaggtcattgttatttactatgtggaaaccacggctatggtggtgattattccttgttttagtcgcaaagtacctgaatcttttttggcattttgggctccccccatcatgtaagtcctgctggatagcaaggtatacccactactggagaagttgaagcaacagaacttacttt

SEQ ID NO: 623 - DNA, 549 bp, Homo sapiens
tgcagtatggtgatttaaaaaaaaactacaaacagttttcaaaatatgtaattatttaggttaaactcctttttcataggtaatgaggagtggacataaagaatatttagcatgtttaaagaaaaagccatcaaaacagtgtttcttcatgaatcaccaaatgttcttaaccttttaacctttggtatctggtatgtgaaatggcagtgttgtgtgcccttgaaaagaatatgaccaggaagaatgatattctttagatatcctctggaatacaatataaacaatcccacagcgataataataactaacacttacatagtgtttactatatgccaggcactattgtaaggaatttaaatgaattaactcaatactcaaaacaactctatgaaataggtgctattattccccattttacagatatgaaaaatagaccataaagagggtaagtaccttgcaaaaggtcattcagctggaaaaagcagagccatgattccaatccaggcagtctggctgtgtaggccacaccttaacccttaaacatgatgc

SEQ ID NO: 624 - DNA, 430 bp, Homo sapiens
agggtctgtattgattgatatatggaaatgtaatctgcttgaggtgactttatagaacataactattgcatataacaagacctaaatgcattcctttctaaatggaaatctaaacacagagtttgaaaatttaggtaacactaaattcccctttcttgtacttcataagtaacgaagtatgaggaaattataaaaggtgtaaaagtgggtttggcattgtgctaccaatgctaatgggaagatgacttgtctgtgcccttggatcatgtccttgtgattctattgtatttaacaataatgtgaatttggtccatgagaaagatgtcatttctctcattcactacaaaatgataacataagatgagtaatcagctccaacctttgccttacaactagtatttcagaaatgaataatggattacggattgct

SEQ ID NO: 625 - DNA, 548 bp, Homo sapiens
accaccttataagtggggaaaccgagattgaggagctaagtagtctgcccaaggtggcatagcttgtaagggcgagagtcaggattctgccccagaccagctgactccagggcctctgcttcacggtaaaatggcggtgagtcaggtgcttacgcctccagctcttgctgacccttcccactattgcttttcttcttcccattcagaactgaactttggtctagcttgggttgcatcttgagttttggtttggtttgtttcctcagctttatggccggcacaaggagtatctcagcagccccgtaggcaccgactttgagatggtgagtagcttggcttcctgcagcactgtgagctgtgtttagccggagcattctgactgtggatgagttacactacctctcttaaaggcccaaaggtatactctacagtgtgaaaaggaagtcaaagaatagcacatatagtccttgttatgtgttttgcaacattgcatgttgatagagaactgttaatgctaagaaaaaggtctgaaaggctatgcacatgct

SEQ ID NO: 626 - DNA, 497 bp, Homo sapiens
  misc_feature 319, 375: n = A,T,C or G
gtattctaagtaccttgcgtagggactgacaagtaacagaaatttaataaaatatctgacaactagtcgattgatttatttaagaactgtctttgaataccgtaaatgtttaccaagcatggaacaaatctatggagttatcttcacagtcaattagatacttgaaaaaaatagataattgatatgtgttttcaatagagacaattataataataaacttaggtcaacatttagaacatgccatgagttcaaattactcttatctatcagtaattaaatgcttacattgaaaaaataataatccaaagaactatcttanaatcagtgtataaaattctattggaatttatagcattctaacacagatttaactgncatactaaaaaacattattagtcattagagtaatatttacatatattacctaccatatgtgacattgtgatttaactcagctcttcgtaaggattcatcaagaacatcatacattaattcgc

SEQ ID NO: 627 - DNA, 516 bp, Homo sapiens
agtgagccatgttcataccactggacttcagcctgggtgacaaagtgagaccctgtcacaaacaaacaaacaaacaaacaaacaaaaaagaaaagtagtattcacgttttggacattcctatctaaactaggtggaaagagaaaatggagagtactgggtctaaggaggcaggtattctagggtaagtaatttggtattttaatttaagcagaaagacatggtcccctacttttccccttgggatatgccctggagaatgacaaaatgattttaaaagaaaaaaatatattttaaatttgaaaaaaaaagcagaaggacaacagagtgaaatgtattcagtgtagggcaaaatgaagttgattttagcaaatgcttagatcaatggacgagaaaggaaacaggctacattacatatccctaggaaaagcagcttatcagaagtcatattcagtcacttttttctgttgcctttttgaacatagatgacacttgacagtttgtaatataaacatttt

SEQ ID NO: 628 - DNA, 406 bp, Homo sapiens
gcttgcctgatgccacggggagtcaatgacaagaccatgcttggaacacaggtcttttggagtccagagttcattctctcaaccactgcaccatctatacctgcctgttagaagtgttcaaactaatagtatccttcacaatcaagaccctggagagggaccataatttgtccaggaccatccagagactatgggtgggcagggtccttcgttcacctgctgatacatctagtggctgtctttgcagcctttcccaaactgtgctccgtggaaccctggccctctgagatgcgccacagcagaagggttccccagtcaggtgggtctagggagggctgcatactctgggatcctcttgttgattgatagccagacagagaccttagaaaaccctgctgggccagtc

SEQ ID NO: 629 - DNA, 471 bp, Homo sapiens
ggccaaatgtactatacagagcatctggaagaaagtattcttagcagaagaaagagaagtgcaaaggccctaaagtgaaaacacaccggtaatactcaaaggacagcaaagaggccagtgttaaatgggaaagggtaggaaatgaggtcagaagtagcacaggatactctgggccatcacaagggccttgaaatttgtctcaagtgtgataggaagccactggaggcttatgggtaagaaaatgggagaaatattatctgatcagaaagcagctgaagttatttgtataatagcagggtttgggagagagaggaaaactctgagctagttattaaagtcttgataatgagggatgactgggggatgggtaggtgagagcaatgagagacacagggtggcacagctaagtagaataggtctgaaagaagctagcactcaatctactagcactagtggattacatttatgcct

SEQ ID NO: 630 - DNA, 81 bp, Homo sapiens
gtatgcattttacccttgatgggtcaaactttcataatagattgatactaggccacagattgtttacaaaaaaaaaaaaaa

SEQ ID NO: 631 - DNA, 456 bp, Homo sapiens
aaaaacctgactcatcagtgctggtgtgactcacaggccaacaaaactggcttgccagactggttgggaggggaacctgctgctgccaccataactcggggctgtgggcaggtaaagcccatccctccatccctctggctgtagaggacgcatcctacccaccgccagatgcagggcctgggtggtgggcctggctggggcaccactctcagcctgacccccgccctggaacagccacagctgcttcaggaacttattagcgaggggcggagctgggagggaagacaactcaggggctttggaacacagagaggtggctttaagaatcagagaggaggccgggcgtggtggatcatgcctgtaatcccagcattttgggaggccgagacaggtggatcacctgaggtcaggagttcgagaccagcctggtaaacatggtgaaactccatctctact

SEQ ID NO: 632 - DNA, 474 bp, Homo sapiens
ttatattttctttattaagatgagcctcagaaagtaatatgaagtctttgataactgtaatatttagaggtatgataccgaaggttttgaggaagtaagaaaaagagtagcacaaaaaaatgagcacatgttctggggtttatctgaatcaatcagctttgaaatgataaaatgccacagtttgttgtaattgtccatgacaggacaaaaaatgtacaatttattcacaaagatagctgtcacctgtaatcatgccttatcccaataaaatatctttaaatagtggaatgtatagaatcatacccaatgtgtgtggcttctgtccttccttcaccagtgaatacacatcttgcagccagtaggtcaccaaaacttacatcaactggatgccccacagggtagaaagcctaccaaaaagacaaacacaatgaatcattaatattaccaataaaatccagaactacatgtttgact

SEQ ID NO: 633 - DNA, 583 bp, Homo sapiens
aggtaccaagtatgtatcggctactgtttgaagtggtgctgtgctggagttactaaacaaaacagacacaagtctctatttttgtgtaacagacatgcaggcaaaggatgacattaagttaagtttcaattaaagggaagattgtggacaagaaggaagatacactccaagcaagtccctcaatcttagaatagcttcttgggcctgctcccctattaaactgtgataagcactccacctgtctgcttatctgcaaagcaaaactgggtcttggaaaggactggtagactggtcttcatttttagcttacgctaataaaagagctgagcctgccgggggcagtggctcagtcctgtaatcccagcactttgggaggcggaggccagtggatcacttgaggtcaggagtttgagaccagcctggtcaatatagtgaaaccctgtctcttactaaaaacacaaaagagtagccaggcgtggtggtgcacgcctgtaatccctagctacttgggaggctgaggcaggagaaccgctggaactcggaaggcggaggttgcagtgagctgaaatggcaccatagcact

SEQ ID NO: 634 - DNA, 569 bp, Homo sapiens
ccaaaggatgataccatgctttgtggctttccagatatccgccacccctaaccaataggacattggcaagtatctatgaaatcagattctcttcctgtcagtaagtgggggagttcaggaggccacttagatatatagtatgtcactgatcactggaacttcagcaagtcacagcctttctttaattgaatatgctttttcacaagtttctaagttaaataaaagaagtagaatgtcatatgaagctattcctaagaattttaggagactctagagaaaggtcagtttattctctagatcacattagattttcttttgaaggaagtatgccatttagctgatcattttaaatagtaatgaataattgtgtctggttaaataccaaggcccaagatctataaattaaattctttaaaaacaaaaataatctgattggtcagaagcagtggctcacgcctgtaatcccagcactttgggaggtcgaggcgggtggatcacctgaggtcaggagtttgagaccagcctggccaacatggtgaaaccccatctgtactaaaaatacaaaaatc

SEQ ID NO: 635 - DNA, 596 bp, Homo sapiens
aagttcaaatttacattttactccttaaattgttttcaagttgaccttagaacattaatgttaatttccagtttctccatacaaagtcttagagaacaatttctgcagtgcttttaaaacttgttttaccttacagacgtgtttccttggtcatattgcctttcctttatttctactctaatttcagcacatgtgcctcttcattcttttaggtctagttaaaagcaaaaaaaacgaacttttgattgccattcaaagcaatttcactacacatgcattttatttctactcctagtcaattttccatgtttaagtctgtagatggtggtatagtccttggactaaggccatcatcttagttatctcaacatctctcagggcttggcacaatgttcagcacataataggtcaacatcacatctttcaataagtgaaagtgtatgaaagtagcttaagatgttaatcaatcagattttggcagagccgatcattatactaacatttaaaggactttcctctgtaaacgacactgacaattttaaagaaattaaaagtcacggctactttttcttcatattcccaaaaaaaaaaaaaaa

SEQ ID NO: 636 - DNA, 611 bp, Homo sapiens
aaatggtctcccgcacaagcccttgtctttgcagcccaagtgaatgatgcctccctagtttcgagctctgccacaatcagcaggacaccccaatgcaaggatgctcttggaggtgtggcctgggagaggcaacctgctgatccttggacagggaaaaaataaaaggcaggaaaatagagccaggagaaagaacaacttgtggtttaactgactcctagctggcagggcctgttatggcccctctcctcctcccagtaaaacaatgttaaagacaaagaaaatcccaaagctgaagatttcttggaaagttaacattgggaacgttggaaccatccattaatagattttgaaaggactatctactgagatggctggtagagtgggtaagaaagacagttgatgggctgggcgcggtggctcacacctgtaatcccagcgctttgggaggccgaggtgggtggatcatgaggtcaagagattgagaccatcctggccaacgtggtgaaatcccatctctactaaaaatgtaaaaacatttagctgggcatgggtggtgcgcacctgtagtcccagctactagtgaggctgaggcaggagaatcgcttgaaccc

SEQ ID NO: 637 - DNA, 623 bp, Homo sapiens
atctcaaaaaataatatttaaagccatagaatttataatttatgcgtcaatagtttctcctttaagtggtcaccaaaaagatatcaaactttttttgctataagagcatatttaaaaaatatcaatgaaagtgttaccagttttcaatcctcctcacttggacattaaagggattaaagttattgtcagcacacacatggatcagctttcaatggaaaaaaattaatgttttttgatgttgtttcttttccttaaggcttaaggacactaggagaaagacataaatagaagtatatattatcatctagatggtgactctccaaggggatgatgagggaaaagaagtaatgctaccctaattctgaaataataaaagcttaagcaatgaatggctgaattcacacctcaaaatttcatggaagacaggcatacaaagataagctttcaaaattgaatgaactcattaccacaattaaagaaaacaaaaagaaacattttgcataactgctggttttgctgctccttctgctaatttagtttgtctggaagagccactgtgtggaccacccatgcttcaatgcacttaaccaatacctttagaagaaaacaggatagctacaaag

SEQ ID NO: 638 - DNA, 531 bp, Homo sapiens
tccctcccagtggtggacttgagacgaggaagaaaaactgcctcgcacgggagaacttaatgagatgaatctacttgcccctaccttcttctctgccctagcgatttcacctccttgagcccccaatgccctgtatgttcattttatgtagcaggtggcatcctgaaaacccggatcaagcaaaattctcttccaccaagccctattttaaatatcctggaggaagaggaggctcctccttagaaagatcctcctgctcagtttgaatcgtgaggtaaggctcaccgtcaggtctggggatactgggcattatctttggtccttaggccagtattacctaaagaataagaagttttaggccaggcatggtggctcacatctgtaatcccagcactttgggaggccaagacaggtagatcacttgagcccaggagttcaagatcagcctggacaacacgataagacccccgtctctacaaaacagaaaaaatagccaggcatggtggcatgtgtttgtagtcccagttactc

SEQ ID NO: 639 - DNA, 599 bp, Homo sapiens
taaagctagaagatttatcacgcagcaagttcaacctcaggaattccatataagtccacaagcgcatgtgtctaaaaactgttgagtaagtaaattcaatgatgaaaactgtaatttatatcaaggatgagaaatactctctttgtaggtctattgtcaatgactaatatatgaagaattaatgcagttgatcatctaaataatgctacacatgtctgtttccattggcctgtggacaagaacatgtgtcagtaaaaaaaagagttttgaaataaatctcagatattatgattgtttcattttctctaataaaatgtgaacatttattcattcttggaaaataattttgaatagaggtatattcaggtatatgtgttatattcctttgttaactttataggcattagtttcattaattaaatataatgtggctttggtggaatgaaaaaacactagcctgaagctgaactggtcacttttcagttttgtgtttggtgggtgtggacagacatgatgtaattctttggagaattgagacaacttgggagatttacagggcacatgtgattgtatttccattagtgaaattgtcacacatt

SEQ ID NO: 640 - DNA, 585 bp, Homo sapiens
agggcgtattggagtggaactacttacagagtgtcagggcaagtccttacatttgtttatgcttaggacacaacacagaagataattttctaagttaaagattgtatgattttatcttgacttcagaaactggtcatacttttttactttagtttctaagaacctcagagctgaacttgaaacaactttaataattccaatgagacatttgttatttatcctttttaaaaaagacttttctaatttaaataattttattattgctctaaatttgccaggttcatttaagaattttataaactgttttaaaactaatttacattaagttggaataaagttaaccaaattaatacaaacatattttattgcacttctctttattgtgcttcacagataggaacattttttctttatttacaaatgagatgtttgtgacaaccctggtgaagcaagtctattggtgccatttaacaaacagcctgtgctcactttgtgtcttggtttcacactttggtaatcttcacaatttttaaaatatttccttattattatattcgttacggtgatctgtgatcagtgatcatt

SEQ ID NO: 641 - DNA, 588 bp, Homo sapiens
acctctcaaatgaaagctcccctgtggctacggggaagaggcgccctgggggaagtagccctgggctgagactagcttgaatgctctcctttctaaagctaacagcaaagtcgcctggaaccagggtggctggtctcgcttccaaatcataaaggaagaaagagctctagaagacagcatcttcaaagaagagggcagtgatcaactgtgtgagttacaacaccaaatatgaaaactggcagaaagaatcacttgcacactgtttgcataaaataaaaccacaatgaaatgacctagaaagggaggcaataaaagggtatcaggaaaagtatgaaatacacacacacaggatttctctactggtaaaattgcaaagcaacggaaacatccaattatgccgaaagaacgactaaagcatatggtaaaagccgtgagtgtggatcggggaaggggcaaggcagcagccacacagggaaacccaagcccgtctcttgagacctgacagtccaacagacaagacacatggcatgcgacgtgaaatacgatataatcaagcttcatttaactgatctatctgaaaccccgtgt

SEQ ID NO: 642 - DNA, 463 bp, Homo sapiens
tgctacttcccagggactgagctggcgttggtgagggacaggcagaagccatcctaccatgggtccaggcctggcgtgcctcccctccaccagtggcttccccacctctgtgctggggagctcactaattcacatggcactggtagaaaacctggaattgtctgaaagtttcttcttctatttattattatttatttatttatttattttgagacatagtttcgctcttgttgccctaactggcacaatctcactgcaacctccgcctcccgggttcaagggattctcctgccccagcttccagagtagctggaattacaggcatgcgccaccacgctcagctacttttttgtatttttagtagagatgggatttcaccatgttggccaggctgctctcaaactcctgacctcaggtgatccacctacttcggcctcccaaagtgctgggattataggcatgc

SEQ ID NO: 643 - DNA, 583 bp, Homo sapiens
cagccttggggtatgagcctccagtctgtcaccaggtcccctcttggtgacaaacacaatcaggtgactgtgccctctaggatgctcagtgtcacacaaacccagtgtgacaggtggaatgggctaggagaaggccccggaaggaatgaagccacttagaggcccccgtggttgggaagccaacctgaggcaggaggtcttgcttcaactagcccaggagaggctcttccctctacctccagggaccgcatttccctctaggaactgatggggagaaagcacaaggccacccaatctgctcctggctgcaggtgcctcaagagtgggtccccagaaagcctccttggctgccaggcaaaatgtgggtacagccaccaccagctatgtgtctctgagcaagtgttttgacctctctgtgctcaatttcctcatgtctaacatggactacaatggagatgaacacactgcccactccataaagctccattcattttatataagttaatgaatgtgatggcgggaacagggcctgacctatgatacgggcttggtgagaatttaatattgtagtatacatatatat

SEQ ID NO: 644 - DNA, 563 bp, Homo sapiens
ccatctgtgtgacctcgttccggccatgaaacccctctgagcctcagatttctcatttgttgtgtggaaatggtgataatgtctgttctacctgccccataaggttgctgtgaagatgatgtaatataatgtatgtgaaagatttaatttaataatactaaatagagcattataatattttctgatattaatccattaagataactatttactagctgtctatttggctaactgataataatccttttgagctagtataggcaataatatgcatggtacctaatctcctgttcttctcttgtcaagcctgatccaaatttttgatgtatcttggcagaactgagccagtcttccaaagaactaaaataataataatgaaaagaacatatttagcaataatatttttgagataacatttttcttctttggctgtacttgctaaaacaacttacccaattttctggaactgtccttctaagtagttccaaacatatcttattttctgcactttgatgcatctcacctgcaaaagaaaagtactaagaaaacctctagtttgagga

SEQ ID NO: 645 - DNA, 546 bp, Homo sapiens
ttaacttcactctggtgtgtttgtgtccttgatttccttggtgtcaggcaacaaacctcaggtattaccccagacaaacaatactgcttcacagagaatacctgatctcccaaaatttggttaagatctgaagtttattttgccgtacaactccattttttgaagttttacttgcttccaacaaggaaggcaagatttcttgcttccatgatgatggaaggcaggtaattcctctatggagttggagctcgctcccaacagggaagatgagtttgagttttattcctgactctaggatggtagaggctgtcttcagcctgagacccatccctaagtaagttaacaaccagctgttcctaatttctctttaccattagagtgcccagtaatcatattgttgggtttttttattgttttttccagactttcttccatcagatttggtcaaatctgagtgagaatttcaaattttgggtaacaaagcctctctaatttggctaaaattcctctccactgcacaggaaggggaaaaaacaaacacgtgct

SEQ ID NO: 646 - DNA, 582 bp, Homo sapiens
acattaccttattcgattattcaattccttaactaaaatataatttagttgtaatttaaatcataattccttgaaaaagattgtttttcaaatataaggtattatctgttttataactctggctcactcctggtttctatgcactttttcttaacagcattttaagacattaattttaccttattgataatgcttcctttttgaaatctttccagcagtgaaattaccatgcaaagtataacttcaagtgtcaagaacgcaaacatgactaaaaatatattgctttacacatacaacaagtgtatgtgtttctgttttactggtttagaagatgtgtcacttgaatattcaaaattcagtgactttctcaatttcggagaattttaggatgtagttgttcaaggcgcttatttgatagataagggaaatcaagtgccaagaagttacatgatggtacaccaccactcaggctagggccatgacccatcatcgatctgctggttcttagcgctctgcctcacatcaagaccagtggaacagccacctgcatcatttgctgagtaagcatttgaacgtgaaatt

SEQ ID NO: 647 - DNA, 555 bp, Homo sapiens
tccccaggggcaaggtgggctggaggtaggtgacaaggtttggctcccaaacgggcactggccaaaaacaaatggaccagcagggccaagtgacatggcagaagaccaggtgggtgactcggtcaacactttcaaacatccccaaagttatagtaagcatcaagagacgggttactagagtctcactgttaagagtaaaaagagattgtgtatgcaaacaattagaaaaatcagaaataactaatgtttaaacaaaacctaacaccgtaatacttcaagacctttgggctcatagtctgcctgacacataggaagtggacaggatggctcagagcactgtaaaggacctcacttgacctcctgcaagtcagttcttctcaggacaaagtggacttttccacaagtttgcctttagcaatattataataaactgcacttcaactgtcttgaacaaactcacagctccacaccaatgcagtcttaaaaatgagactggccagtggctcacacctgtcatctcagcactttgcgaggccgaggtgggtggaccacctg

SEQ ID NO: 648 - DNA, 567 bp, Homo sapiens
atgagggaagtactttgttctatttgctgttgcagtcacagtaccaggcccacaagtagataatagagctacaagaagaaccaaggtatgaaccttgcctttaaggtctactggagtgagacagacatgtaaacagtcaatttaaatgcagtgtaatgaagcctacgactggggaaagaaagggaaagacacctgacccgtgcttgggactcaggaaaggcattctagagtaaatgacacctcaactgggactttaaatgattaagaattagccagttgaaaaaataaaagtggtttcagagcagaggaacagcatgtgcaaaggctctaaggtaagacagaactcagaaatcagaggcagaaagggaaacaatgaatctgaagaagttggcaatgacccttaagccaaattaagggatctggactttatcttggggacagtagggagactgctaaagagttctgtatgggaaaatgatatgatcatttcagaactgggcattttcaacggtatcttccacaccacccaagaaaaacagtgggtcagaaaccaattgaacttctctc

SEQ ID NO: 649 - DNA, 573 bp, Homo sapiens
ccccattactttccctcacgggtgctgatatcacacaggttttgaaattgttgatgcttggtcccattcatatttgggatttgtgaggatcttctgtcacctaatcatagggttttaagttttgctgttcacatttttcaactcttttggggtgggattcagggagattcagagtacatgtttactaagtgcatatgtactaatgaacttattttataagtgctatttccattccaaaaagtcctagatgaggtcccatttaacccacaaaataataacggatgccctgatatgctctgggacagggtctatgcccagtaaagaatattaatctgttatttgagctatctaattggatcaaacttatagcacaatgtattacggactaaagtttgtgtacccccaaaattcatatgttggactcccaattcccaatgtgatggtatttgtagatgaaattttggggaggtaattgggtttagatgaggtcatgagggtagagtctttatgatagaatttgtgtccttagaaaaagagacaccagagagcttgtgcacgtgctctctctctatg

SEQ ID NO: 650 - DNA, 568 bp, Homo sapiens
agtaagttttggatagatggtgtttaactagcatatttctggagctgaagggtgtggagggagctaccagcatgtaaataactcaaatgtgaaatgtagttatgactgctgaggaagaatattatcaaggacaataacccttgttacaccaatatttacaagtcaagcggaagaaacagagctctcaaatttaggagacagctttcaaacattttcaactgcaaaccacaggaagtacactttacatcaaaggccaggacacaaatacatacctgtctgtgtaactgaaacaaacacaagtcaaacaaggatcaactacttttccattaaccatttatgattaacttgttaccactgtaccaatttacttttaaaattacataatgcgcttaaagtcagctgactctcagcatgacctaacaatcttttcatttagccctagcttctctttccaatattctcaagcagtcacaccaaagctttggtcatcaacaccactctcctttcccttagaaaataatgaaaaattacagatatattttcagatagagaggggagttgagagaat

SEQ ID NO: 651 - DNA, 544 bp, Homo sapiens
ttaaagattaagaatactcaatgcgccaagaagtgctatataccagaaaagtttgtatcaattaatgtatctaaattaagttaaagtttctttcaatttaatgtgcttgcagatgtaaaattgcatgtttaagttttgcagttatgtactaaatctggtgctacacttctaatgtctaaaggttttattcaatttcaatttatttgttttatagtttgccagaatgtgcttatgaaaggcactctcagtcataaaaataaaattataagcagactggcacataactatttttttaaataataaactttctgattttagagacttgtattcttttataggtcctggttctctttcacgctctgacctataagaacccatacagcatgcattgctgtgtatggaaaagcagtaaagggaagtacagccaccttttaggtcccatgaatagcaaaatctctttgactaatctcttgtttcagggtatgtccactccttgtttaaagaatgtaactggctgggcttggtggctcactcctgtaatccc

SEQ ID NO: 652 - DNA, 566 bp, Homo sapiens
tttcattttcttttaataaagctgtttaattttgcaaaaacttttttaatgaaaaacgtatatttatctaaccctaaactctgtgttcttaaagagagtcaatattttacaccctaaagttgaactatctaattttttcatactttaataaagccatgtacatatcattcatccctgtgagaattagagcatagcatgtggtaatgatcattcattagtttttatgaatttaaccttgtgaatacttttattacattttcttagccattaaatacaaaacaatcacaaaatgttagtacttgtatgttctctgcatgtttccaataaaactatgttaaatcaatattgtaaatgatacttttcaccattttgttcaaagtgcaacaatggataaaatagtatattgtctctggcatgaatattcttattataaactattttccaaacaaatgtctttcaaagcacttgccatttagtaagcactaaatactggcagctggttttactgatatcattcatttagcaagcttataaaatctcagtatgaagtggcttcaaacttacca

SEQ ID NO: 653 - DNA, 550 bp, Homo sapiens
gtttgccttctctgcagtctggcccacttcatttggggtttcccatgccccctgcttcacatcctttgactctggcttttgttccctccctcccagaatagctctcagttcatgaagcacaccaaacgccggaagctgacggttgaggacttcaacagggccctcagatggagcagcgtggaggtgagtggggtgcaggctacagagggctcaggtggcatgaggccacttccatgtccagttcagggctggcgatgtggtgagacattaagaccaaacgctgccgggcatggtggctcatgcctgtaatcccagcactttgggaggccgaggtgggcggatcacttgaggccaggacttcaagaccagcctggccaacatggcgaaaccccttctttactaaaaatacagaaattagctgggcctggtggtacatgtctgtaatcccatctagtcaggaaactgaggcatgagaatcgcttgaacctagcaggcagaggttgtggtgagctgagattgcactccagcctgggcaacagagcaagaccct

SEQ ID NO: 654 - DNA, 539 bp, Homo sapiens
gaaagtcagtatcacagctcaagtcattacggcagaaggaagggtagtctcagtcctgtttttaggataattaggacatcatccacggggcaggcttgagtcttttggttcgggaattttctgccctgagaaaagacatcattgagatacaggtagagtgttccttatgcaaaatgcttaggaccagaagtgtttcagattttagattttggaatatttgcatatacataatgagatagcttggggatgggacccaagtctaaacatgagattcattatgtttcatatacaccttctacacatagcctgaaggtaattttaaacagcagttgtaataattttgtgcatgaaacaaagttttgactgtgttttgactgtgactggccacatgaaattaggtgtggaattttccactgtggtgtcatgttgacaagcaaaacgttttggattttagattgttggattagggatgctcaacctgtgtagatttatcatttttaaaaatgcttccatctttgaaggaactttcatgtaatcct

SEQ ID NO: 655 - DNA, 571 bp, Homo sapiens
acatgcatgaatctgataaatgtcacagtaagtgacaaaaggtcacaaaagaatatattcagtatgacttatatgtgagttaaaaacaggcagaattaaaaatatatgtttggtaaaactgtaaacagaagagaaagatttgattaaaacaatattcaggacagtgagggggtgagggtataaagtgaaggaagaagatgtcacctggaaggcttgaaaagtactggtatattctactgtctaagctaagtgctaggtccttgttttcatttcatcattctttaaactgaacatatactacgcaatattctaatgatcaactcttctacaatttaaaaaatgtaatggaacttgttttctaagcatgctaccaaaggcagaattcaatttaagaaataaaccttaggctgggcatggtggctcacgcctgtaatcccagcactttggggggccgaggtgggaggatgacttgaacccaagagtcaagaccaatctagacaatatggcaagattccgtctctataaaaattagctgggcgtggtggcatgcacctgtagtctcagttactca

SEQ ID NO: 656 - DNA, 529 bp, Homo sapiens
ggattcatggttcaaaatagaaatcgtaatgaaaattataaaaatcttttaaaagaaaacccaacattaaaacctgcatggtgcagctaaaggtgtgtgtggagggaaactgaccttaaatgcaaatattagcctggaaatcagactaagaaatgagcaacagcaaattagggcaagacataacggaaggcaggagacagcaaagggcggcagtgaacgcgcaagcacgcggacacgtggcagggaggactaagacgccgaaagttctttgaaacacaaataaaatcaataaagtctcagataactaacacgggaggaaaaaggtgttatcactataggttccatcacattagatcataagagaacaatttaatgctaataatcttgaaagtgcagatgaaatggacacattctcagaaaaacacaaattaaagcatcatactctgggctgggcacagtggcttccacctgtaatcccagcaccttgggagcccgagacgggtggatcacctgaggtcaggagtttgag

SEQ ID NO: 657 - DNA, 475 bp, Homo sapiens
gggttgagtgaaggtgaagggcaaaaagctcagctggcctatcccttcaattctggaaaacaataatttcctgggaaatttcattttgtatactgtcacttacatagtattggggagcgcctaagtccttagctagaagagaatctgggttcaattctcatttagggggggctgaggtgctattagtaatgaagaaagggcagaaagtgagttagataggcaatcagtcatgtctccacactcctgctagatgtactccatgagagcaaagtctctatttctaatattcctggctttgtgcttggaagctagcaaatctatgaactatgtattgaataaatcaaaaagcacaccatgattttattttgccaaccattttatgtattattagaaccaccagaaataaatgggtgggggattctagaaattactgtaataatacagtagaaaatctaacaaattttgtgacccatca

SEQ ID NO: 658 - DNA, 580 bp, Homo sapiens
tgtgtggtaggcaggcctgcctggaatttccgacagccctggacctcgcctgtggtggtctgcccttcccagggtgcctgttccctgcaggcagggcagccctgggagggcacaaatgtgactggcagagggaagagacccccatgcttctgcacaggcctcagcctgagtgcacttacaagtgagggagctctggctgcccaggccttgtggggagagcggggaggcctggcccagtgcccttccagctcaatgcgatggccctgctcctgctggacattgcccctcccccgcctgaacagctgctcccacaggagcctaggcaggcaaaaattcccacagtgctcccagttgaccgggggcctccccgtgcctcccccatttctattctcttttccccaggcccattgcagggggtagctctgaattcccagcttaatggggcccacagcccctcgggcagcctggagcccacagagggtgtcagcttggagacctgccctcctcgccttcatcagcaccaggatggctttgtcagcaccacgtggcaagagggacgagctgaacttctaggcaggga

SEQ ID NO: 659 - DNA, 564 bp, Homo sapiens
gggggggggaactggatagataaaaattactctcttagcatatttattatgccaacaatgcaacttaatgcatctttgatgatgtgcaattaggtattaaaatttctcgtaactagaaatgttcttggtcagtgagaattactgtagataatttcaggtaacgtgggggtaatttggctggttaaaaggcctgggtcaatatataaagcactcaatttaggaaaaaaagattgttcttcacattagtcctctgtttagctatattgggaaatgcaacttcatataaaacatgaggagaaaaacagtaattatttcataattttaaataaatttctaaagatacaaaatggcaactagaaaatagtccttcaaaccataatgtactgatatttttttttctaaagggtcaattatctttgcacaaagttaaggagttttattcgctttaaattactggtttaatttagatttctgattcttattttaattagttgccctgatttttttttccttgattttctctctctcacaccagggtttccatagggaagtttttgggttgtt

SEQ ID NO: 660 - DNA, 546 bp, Homo sapiens
tttatgaagaaatgcctccccctcccccttctccccaaagtacggtgtggcagaaaacagcgccaacaggtcctgccagtcagaagccactcccctgatttcatggctcaagaccccaactataaattaacccttcccaccttgaatgtgtacacacactactgagatggaggccgatccttgccatgggatgaacctgagaattgccaagacccgccttcccacgccacccaaccaaatcatgtggtatctggtacaagtcattttccccctgaaatcccacaagaaaactattttgaggccgggcacggcggctcacgcctgtaatcgatcacaaggtcaggagatcgagaccatcctggctaacacggtgaaaccccgtctctactaaaaatacaaaaaaaattagccgggcgtagtggcgggcgcctgtagccccagctactcagaaggctgaggcaggagaatggcgtgaacccgggaggcggggcttgcagtgagccgagatcgcgccactgcactccagccagggcgacagagtgagac

SEQ ID NO: 661 - DNA, 542 bp, Homo sapiens
ctgatagaagtttggtgtgtctccccaaaataggccaaaaataaattttaaatatataaatgcatgaataattatgaaaattatttccctattccggactcaatatgcttacctaaaaaataaaccattcactagatctacggtttctaatccagttgctcttcaagaacatctggagaattaaagaaatgtaataactttattatacctcctttttctactaaatttctctatgtagattctaggcatgtgtatgtgtgttttgtatatatttatgtgtatgtaactatgtatgtgtatatatatatctctacacacatgcatatatatgtgtgtatatatgtatatgcacacatttatgtatatacatacctcatatgtgtagggctgtgtatatacataaatacacatatatataaacatatgatatagtagtaccccttgatccatgggggatgtattccaagacctccaatggatgcctaaaacttcagatagatagtaccaggccgggcgcggtggctcacgcctgtaatctcagc

SEQ ID NO: 662 - DNA, 564 bp, Homo sapiens
aggctgaagtgcagtgatgcgatcatgactcactgcagcctcaacctcctgggctcaagtgatcctcccaactcagcctcccaagtggctgggaccacaggaatgcaatcataaacttctgggctcaaatgatcctcttgatttggtctcccaaagtgcaggaactacaggcatgagccactgtgcctggctggaactaaacagatcacactgtcctaaaagaaaatatttcccacgtattacttttagcagcagttacaaaattgcgtttagttttaaaaactatatcaattttaaaattccatttataacgttaaaatgttctcagaggaaaaaagagaaagataaaatgaggccgggtacggtggctcacacctgtaatcccagcattttaggaggctgaggtgggtggaacacctgaggtcagaagtttgagaccagcctgaccaacaaggtgaaaccccgtctctactaaaaatacaaacattagccaggcatcgtgacaggcgcctgtagtcccagctactcaggaggctgagacaggagaattgcttgaactcggga

SEQ ID NO: 663 - DNA, 529 bp, Homo sapiens
ttctgaataagcagctgaggatttgcctattaattcctacaaccctctgtgtctggcaacagttttccaagttcttagagaagtgtttgctcctctctagtttgataactctctgtgtgtacatgctatttctatatcttattcatttattgagatgtgagtgggagaaaagttccatgatctcataatttttctctggaagtaaaataataaacatataccttttattataataaattataaaagaaaatatggattgaaaataatttagaacctttctggagggcaatttggcagaatctagccaaccttttttttgacctagtattttcacagtaggaatttatccaaaagatatacaggtgaaaaatggcacaggaatagggtaattcattgtagtattgtttgtaattgcaaaagatctggaaaaaaccatgaatatccatgaaaaggaaatttctcagataaatcctgatatatctatacaactggatgatacacagaagtaaaaaaaaaaagagagagagag

SEQ ID NO: 664 - DNA, 532 bp, Homo sapiens
tgcaccatgactgagggaattggctgggacataaaaaggaaagctctggctatcatggtcagttagcaccaaatattggatctgataatatcggatagttcacttggaagcactgagtagtatattgagaactttgcatttcacctagtgagcagcaggcaaaggcagtatctgaactgggatgacatttcattcaagatttttatatgcactgttcacagtacagagtatatgcttcttgcatacacattcaaatgtttatcacatgacatcaaaagcataagcaacaaaagaaaaactatataacttggacttcactaaaaatttttaaattttgtgctccaaatgatacaatccgaaaagtgaaaagacaacccatagaatgtgagaaaatacttgcaagtcatatatctaaaaagagacatgtatccagaatatataaagaagtttataacttgacaataaaaaagacaaatagccaagtaaaacatgggcaaaggattggaagagacatttatccaaagaatatata

SEQ ID NO: 665 - DNA, 572 bp, Homo sapiens
taattgcctaactagactccacaagaatataaaaccgagcaccttagtactgccacagtggccttcctcccacttacttggcccgtggccggtgtcacatatctggtcagcaccatctgctgcaaccgactctcacttagctcataccagccctctgaaccctaaatgcctacatctgattttcccaggttgagttgtagcctcaaaaccaaggttgatttctcaggctaaacttctgttaaaaacaaacaaacaaaacacccctggtggaggacacatcagcattttcctctagggaggatcttttaatgtaatgacccaccttttcttgttaggtcggccagtggttcctttaccggttcccctacatcaagctccaattcagtttctggccaggcacagtggctcatgcctgtaatcccacacttggggaggctcaggcggcagatcacctgaggtcaggaggtaaagaccagcctggccaacatggtgaaaccccgtctatactaaaactacaaaaattagacaggcgtggcagcacgcgcctctaatcccagctactcgggaggctg

SEQ ID NO: 666 - DNA, 484 bp, Homo sapiens
gaggagccccagagtatctcaagggacttgcaggaactgcagaagaagctgtctctgctgatagactccttccagaataactcaaaggtcagtttccaatcactatgtataatggaaaatcccaatataacactagcataaacaagatagaaagttatttctttctccagtagaaggaatttggaggtaagtcaagaatctttctggcttaccgccctgccatgtctatgctgtgaccttcaaactccttgtctgagatgactgcaagagcatcagccattgtatccatctttcaggcaacaggatttgaggaggggggaagagagaagtgcaagccacctacaatttaaggaaacttctgggagtcgcacacaatacttccaattacatcccttaagccaacattgagtcatttgccactaatggcaaatgcaattctttagctggataaagaagtctgtgcaacagatatcatccttttttt

SEQ ID NO: 667 - DNA, 548 bp, Homo sapiens
atctaaagtagcacctgcacccactccaactttgtatcacctcatctggctttacttttcttcacagcacttattcctacccaacattatattcttgtctgcaatttttttgtatttttattatctgtcttccctactggtgtataagctggatgacagcagtgattttgtctatttagttctctctagaacaatgctatctagaataagtgttcaataaatatttaacataaaatttatgtttcacttttagaaacctcaaactatagatttcaaaagtagtaaccattcctaaagtatctaatttgattagtcttaatttaaaaaaattgtttgggccaggcacagtggctgacgactgtaatcccagcactttgggaggctgaggcaggcggatcacaaggtcaggagtttgagaccagcctagccaacatggtaaaaccccatctctactaaaaatacaaaaataaataagccaggcatggtggtgtgcacctgtaatcccagctactcaggaggctgaggcaggaaaattgcttgaatctgga

SEQ ID NO: 668 - DNA, 569 bp, Homo sapiens
atggcacttaagatttcaataagttgagaagtatagtatgacagttaagactaaaagagtaaaagtgtccacttcagtcagagccccaacagtgttttgacaagttgatcttaaaattatactgaagggcaaggaccacgaatcagctataattctgtaaaagaagaaggatgatccatactaccaggtatcaatgcttatttcaggctagataattaaggcataagatatttactgatgcaaggaaagacagatacagcaatgggacaaatacatgagctcagaaattaatccaaagcatataaagaaatgtgatattacaggaataatcatagaaatcaataaattaaaaatgggctatttagggccgggcgcggtggctcacgcctgtaattccagcactttgggaggccgaggtgggcggatcaccaggtcaggagatcaagaccatcctggctaacacgatgaaatcccatctctactaaaatacaaaaaattagccgggcgtggtggcgggcgcctgtagtcccatctattcgggaggctgaggcaggagaacggtgtgaacc

SEQ ID NO: 669 - DNA, 553 bp, Homo sapiens
catggtagattttcagagaaatcagctggataaattccagtttaaaatgacatctggctagctattgctgcccgtgacacagcctctcttgatttccaattaacctctctaatgaagacacagaaacagtgcagccctgccatcgtaaaagtggagacgctctttccctctccctctctttgcattggctcagagacatagcatctgcagcaattaaaaaattggatggccatctctcaagtctgtgagttgctttttaaggcagccaaatcttgccatcctcaatatatttgttgaagatcatatgttttgtaaaatgacagggtagaaagttgtgaccttaatacatggatcctgggaggaatagatactataagtaaagttgtgtgatgaggacagagacaaggacagactgagcagcagggcctgctggacactgtagactttcatatgttctgctgattttgaatgttaaagaataaggcaagaaaatttggaagcgattccacctcagtagagcagagctccattagataaaaagctgaaaaaaaaa

SEQ ID NO: 670 - DNA, 492 bp, Homo sapiens
ttagatctgtaagggtctaaagtatatcagacgagtgagaatttcatcaaacttgtaattttgacacagcacatacatatttttcacgtgggatacatattgttaacaggagaatttggtaacaagtgattgaacttctagagctggtgatttttttagcagaactttagatatttaagaaaaattatctgcatataacagtcaaatttttcccttcatacaccccctgtctctaacctacatgtgctgctctatgaccaggtctaaattccagatgttccaagtagctcttcatttagtcttgtcttctgatggcacctaaacaaatatatcaaaacttgtacaacatttagaaagtggaacttgaagattttctttctgttagacaaatagacgccatctggaaaaaataaccccaggcgcttggacacaggagcatgacgcttattggctggacaccatatgaataccttacactactttatttggctc

SEQ ID NO: 671 - DNA, 471 bp, Homo sapiens
ggaacaaattgagagtgtagaaggtatgctgttcactgcagggacaagggatactgtcccttagcaagagcaacagacctgccttttatctgttatgttcttgagctatttcctgaaagcaatcaatacaacactcataagttaaattttattgaattcatagttacaaaagccaggaagtcgtttagttattaaccacatggtttgaaattgatggaattgagacagaaatcactttaaaaactgagagagggtgtcatagtctgttctggctgctgtaacaacatcccacagactacgtagcttataaacaacagacatttatttcttatagttctggaggccaggatgtccaagatcaaggtgccattagattccgtgtctgctgagggcccacctcctggctcatgaatgatgccttctagctgtttcctcacacagtggaagtggcaaggcagctctctgggactc

SEQ ID NO: 672 - DNA, 568 bp, Homo sapiens
gtcgtacggtttatacttcaccgtacgactcctctcccccactcctttgtgagtctggtctcttgccagtttcttaccctgagtggtgctaagcagataactcgtggttattccaagatagcatctgagtggagccacttcaggactagagggatgtgtcctggatctttggtctgtctcatgccttgcaccaagcttgtgggtgacgtatcatgaccttgttggagtgattgaacttgatctattgagacgcaatccaggatccctagaaacaagcacggtagactgttactgtgtggcaggtgtttcagtgacctcccgtcatcaagaggtgtgtgtgacttgacaataaaaaaataagtgtcctaaaagaatttactggctgggtgcggtggctcacactggtaatcccaacgctttgggaggccgaggtgggtggatcatttaaggtcaggagtttgggaccagcctggccaacatggtgaaaccccatctctactaaaaatacagaaattagccgggcatggtggccatgcctgtaatcccagctactcgggaggctgaagca

SEQ ID NO: 673 - DNA, 526 bp, Homo sapiens
ggcctaatatagttgaaaatacacaagcctagaactgtttcatatattcccaagagacactctttgacaggtgtaccaggaggtatgtacatgaatgtttatagcaattaaaaagaatgtagggcggtggctaaatctcaactttgaagttcaagcaaaagaaaattaaaggagaatactcagagtatgattactttgatatacaaatttaaaacgagtagatgtactcatccatggcaaaactataaagaagagcaaggaaaggttatcatgaaggtcaggagagtggttaccttcagagggcgtgcaatgaggaagggacacgtggtggcttctaagggagtagcaatgttctacatcttagcctaaatggaggacatatggatgttctcattattctttaaactgtacatatttttatgtagtctattatatgtatatctcaaaataaaatttttaaaagaaataaagattctacatatgtatacacatgtatgtatgtgtgtgtgtgtgtgtgtgtgtgtgt

SEQ ID NO: 674 - DNA, 461 bp, Homo sapiens
tttctcaaaaaaattgatctgcaaaatggggatggtaaatgctgcacagcagtgatgaagatggtaagtcatcaggtatgatgaaagaactttggaaactttcaaggtgctatacaatcacatgagagtgattacatggtgattttaaactgtaaagagctctataaagccaggcatggtggctcatgcctgtaatcccagcactttgggaggccgaggcaggcggatcatgaggtcaggagttcgagaccagtctgaccaacatagtgaaaccccatctctactaaaaatacaaaaattagccgggcgtggtggtgtgcacctgtaatcccagctacttgggagtctgaggcagagcattgcttgaacctgggaggcggaggttgtggtgagccgagattgtgccattgcattccagcctgggcaacaagagcaaaactctgtctcaaaaaaaaaaaaaa

SEQ ID NO: 675 - DNA, 484 bp, Homo sapiens
tcctacctttcttacggctgcatagttcaaaaattgccagcaaaccaaaaggaggtaagagagaggcatgggacaaatttccctctgacatacatcagaaggaatcaaccgtgctggcatcttgatctgaaccttgtattctccagaaccatgagacaataaatttctgctgtttaagccactcaatctgtggtacttggttatgtcagccctagaaactaacacagctaggaatgaaatttctccattatttttaactctaagtcttgtttttcttttcccaatgcgcagtggacgtgttggttctatggattatcgaggtattctccagctctttcactatataattcagatgaccctctgatttctgtttttccataggtagatgaaattgcttgtcattttgttagctttcccttcagttgggcaacaaattatttagattcttcactagaatatcatttgtttatgcttaggcagccca

SEQ ID NO: 676 - DNA, 557 bp, Homo sapiens
aatattttaactaactgtgaaatagaatgaacttcaaatattccctctggagtcaacctgcaaccataaatatttataaaagcaattatttacataaggacagatgaccatttattattatttgactacagtgtactaaattctattcaagactaaaaatagtttagtataaataggtataagtgtggcacttctagcccccaggctgcttgctgatagcataagaatatgagtaaacaggctgggcgcagtggctcatgtctgtaataccagcactttgagaggccgaggcaggtgatcacctgaggtcagaagttcgagagcagcctggccaacatggcgaaaccccgtctctactaaaaatacaaaaattagctgggtgtggtggtgggcgcctgtaatcccagctacttgggaggctgaggaaggagaattgcttgaacatgggaggcggaggttatagtgagctgagattgctccactgcactccagcctgggcgacagagcgagactctcttaaaagaaaaaaaaaaagaatatgagtaacagaataatgt

SEQ ID NO: 677 - DNA, 557 bp, Homo sapiens
tgctctcaaactcctggcctctagcaattcacctgcctcgttcacggacttttctgatcttgcttgtctctgtttagggtttctggagtcagaactgctgtcaggatgagtgggaagggcatcccctcacctgtctgtgcctcagattcctcatcttcaaaatggagggaataaaactacttaccttgaagggctggtgaaaggttaaaatgagatgtaattagtttagacattacattcatacataattagtttagaatagaaactggcatgtgttaagtgttaaaataaatattggcagcttttgttgctttatctctatgaatcctttgcagaagttagagatcacggattatctagaggtaggccatggtggagaattgagaatgagatgtggagtggtgattggatgaggaagtcatataagctgcaggaagggcgagtgactgaggaagcttttgtggagtcctaattagagaaacagagttaggctggcaggaccaagggaaagcaaagagagaaagcagataaacggccgggtgtggtggctcacgcct

SEQ ID NO: 678 - DNA, 528 bp, Homo sapiens
agaccctgtcttcagggtgcggagtcaggaagatgtgggtgtagttgggcgggggggcagtggtgagggtatgggtcacatgacacactgaaaacagatgtgtggaacacggcacaatgaatgctgtgattgggaacagtatcagatgctatgaggcaaattggagagtggcacctgagccttcgtagatgaggaggtagttggggcctcctggaggaggagttgacttctaaggtaggacctaaaaaattattaatagaagttcttcaggtgaagaaggcatggagggggaagagaggtccatggaaaagaaacaacagtatgcaaaagtgaggaagcctcactcctggaatgtctgtggaactgcagggtggagtgtagtagcagatgaggagggagggatgaggctgcagaggtgagccggggccaggtcacccagggcccgcatgtcaggctcggggaattggacttcatcttgagggtcatggggagccctgaaaggtatttcctctggggagtgactcagtc

SEQ ID NO: 679 - DNA, 586 bp, Homo sapiens
cgacagaagggtgagtccttgatgttcttacagctgttgctgatcactttttggggggttttgaggaaaaactatgaaattgattctagacaatttaggcttttgtggttcactggggcccataaaactactgagctggggaagtgtgattgggagaataatgatatttattcaacgataatgtgcttcacatacataaagagaactctgcacagcccccgatagaaagttacggaaacattctcaagttagaaacagtaaatgttttgaaaataaagtggcactgtcttagaaatgcaagaaggcagaagcaaaatattagatttgataattaagaatataattaatgatgagaaaccccatattttagagtaagactatatcccatttatcatggctttcagtcatttgaaaatttatgttcgttagtttgattgtattttccaccagctctaaggaggagctggaagggtgtgtacttttttcattaacattggattgcaatattcaggcacctatctgttcttactttaaacagaataatttaggaatgttagttctaaactcaagctgagacaagataaag

SEQ ID NO: 680 - DNA, 533 bp, Homo sapiens
ctcccctcattttaaaaatggagaggtaatcgtgcctctcatgagcgaatagttttagtatgcttagaacactgtcctgtacatagtaagcattcaacatatgttggctaatactactgaagccaattgtaacagtagtattagaagccgtaataatattaccccagtcaaatatgtccataattggcaatagggaaagaattgctgccactcagcagtatttggagtattgaatgtcattgtttactttttctggaaggagcgtgacctaagacactgatctaaactgaatgtgcatggctaatggtgtggatagacagagattttaagtgggcaaaagtgaaggttgttttgacaagaagtttcaggaaacagtgatgtggatgaatttcccagaacggtcccagaatatgagaataatgtcccacgtgaatgctaatcgaaattcccactcttcagaggaggctatcagcaatcaggtacacatcaaccatatggctgtcatgtagtctcttcgtatcaccccacttact

SEQ ID NO: 681 - DNA, 584 bp, Homo sapiens
acaattttatcccttagaacccagaacagctgggagcagataaaatcttcttgggttatgagctactcaggaggctgaggcaggagaatcgcctgaacccaagaggaggaggttgtggtgagccaagatcgcgctgtcgcactccagcctgggcaacagagtgaagctgtataaagcacattgggccaggcatggtggctcacacctgtaatctcagcactttgggaggccaaagcagtggatcacttgaggtcagcagttcgagaaccagcctggccaacatgttcccagatgatgctgctggcctgcggactgtactttgtgaacttatgctggagcagatggatcagaaaccccggccagaggatgctcaggacccatcaagcccccgcggggaaggactcagacccccaaccccaccaaattaaagcaggcaatggagaattatactgaagggattcttcggttgggcaaaaacatgattagatctgcattctaaagactgctcgcagagtagaggatggattggagcagggagtctactgcaatagtacagatgcgatagtgaagacttcatttaaagc

SEQ ID NO: 682 - DNA, 574 bp, Homo sapiens
ccctgggttaggaaaatgctcaccaacccctgggttagatgcacccttccagaaacacaacccctttcctactgaccagccctgtggacatgctttctctagccagtgtccatcttgaatgcaggtaacggcctggcctcagagctgagggcacctggtgctgggcgcatggcccttcagaggctagcaaaccagtgcttccacagaaggctcaggaagatggggtggagggtgtggtgggcagctcctctccgctgggcagctcctctctgctgttgaccctcactggattcatcatctagggtgttctagtaagtaatgaagaaacaaagaaattcctttgatcagggctatataaatttcctagggctggtgtaacaaagtaccacaaacagactgacctacacaaaaggaacttatcatctcagctgggcgctgtggctcacacctgtaatcccagcactttgggaggccgaggcaggcagatcacctgaggtcaggaatttgagaccagcctggccaacatggtaaaaccccgtctctactaaaaatacaaaaattagccgggcgtggt

SEQ ID NO: 683 - DNA, 565 bp, Homo sapiens
attccttatttgaaaaagagcaaagttgctcatatcctcaatatcagtccaccactgaacctaaatccagtttggttcaaacagcactgtgcttataccattgctaagtatggtatgtctatgtatgtgcttggaatggcagaagaatttaaaggtgaaattgcagtcaatgcattatggcctaaaacagccatacacactgctgctatggatatgctgggaggacctggtatcgaaagccagtgtagaaaagttgatatcattgcagatgcagcatattccattttccaaaagccaaaaagttttactggcaactttgtcattgatgaaaatatcttaaaagaagaaggaatagaaaattttgacgtttatgcaattaaaccaggtcatcctttgcaaccagatttcttcttagatgaatacccagaagcagttagcaagaaagtggaatcaactggtgctgttccagaattcaaagaagagaaactgcagctgcaaccaaaaccacgttctggagctgtggaagaaacatttagaattgttaaggactctctcagtgatgatg

SEQ ID NO: 684 - DNA, 574 bp, Homo sapiens
tcctgcttcaagatatggaatcaactctcctccaaataatcctggttccttttaatggagaatgctattaaagatcacaatctgagtgctggctgcatgtgagcgtggagcagggaaggtggggaaacggggtaagcgtgctgctttggtggcaacagagacagaaacatatttacttgtaaggttgtgttcatactactctttccaacttaacacagcgtgcctggtgggttccacccacatttctcacagtatgagccttcagaggccactaagaccttctccatgcagacctaaataagaagccataaattcagcctttaccttttctccccatcccttcctgtcaggggaaggaagctggacagagattattttctgactagcagaaacagtgccaccactttactcttgtaagaaggctgccctacaaggatttggttttcaactgctttctccagcatatattctatgggaatgggggtgggtgcatgatcaactttgtattttgcacggacgcccctgtagctgggtcaaggctggatgacaggacagaggtcaggacagagaagca

SEQ ID NO: 685 - DNA, 554 bp, Homo sapiens
ggttgcctgcaggttggatttaggtgtgctctgcatgtctcactttctggggctaatagatacctgagatatgcatgctcttctcatggcagatggtggagcacaaggtctgcaaggaacccatcatgcctcttaaagcctccactgagaaacgtcacactggtgcattcaattgtccaagggtgggggcttttttggtggttaataaagggctaggaaagagtgaacatttgtataataataaaatccacatgaactactagcatattatatattagttactatgtcttaaactcaatggcttatttccatttcattatacttatttttataattttcattagtgaaatacatgtttgtacaaaaaacccttaaaaatcctcaaaatgttataaaatgaacacccagatccccactttgatgaagaaaacgctgaattttgttcatatttgttttctgtcatgaatgtaactaaaatatttgtacaactatacaatcaacattaaaaatttatatagcatctattgacttccaagtgtaagacacatggacac

SEQ ID NO: 686 - DNA, 545 bp, Homo sapiens
ctataaatagaactgtcgtgaagatgcaatgagatgaattttagctcagagcctgccacctggtgacttacccatgttaggtattgtggttacagctctgctgtcaaaccacttctccaactctctttctagcctcagttcatttgtcaaagggtttggccccagtattttgctggatattcagaagtacgacctcacgtctgcagaatgccactgactttcacacgaggcctcccaggaagggatgccaggcctcagacactagctgttggatctcgggacttgccactccactttggcatttttcaggaccacacggcatacagttgatctaacagtctttcctgtcctcccagtggtcagctgcagcccagttctagggcttctgtgggagaagacaggagagggctgggagtcagggcacacagatgtgtcagatgaggctttgcttgcaaggagctcaccacttgggtggtggagaaggcccagaaggcactactacagtgctcccaaatcaggaaaagattgctaaatgcccgtatact

SEQ ID NO: 687 - DNA, 561 bp, Homo sapiens
aggatatcccggatttattaccattttcttgaaaactttacttgaacatttttccattcatgtgaaagcttagtcagagtgcttcatagctgtattacatgaacttcttaaactttccttaatgtggatgttaagaaagtgaagatttaataaaaagaaattcagatatttttaaaataaagggatatcttatatacatttatttgaaattgattttcctgacaaaggccatcactgaatactgaactcgttaatgggctttttattaggtctaagtgctttcctatcatttctcagccatgcgacacagtgagataaaactggtggagtctctgcatctgcatgtaaaatgatagagaacagagagtaatcacataaagaagctaacaagaaaaagcctttacaaatagtcgatgctcaataaattcttgtggattgaatttcttaattaacaacaaaaggaaggagcccagaaaaagtgaatagtaattcagattaggagcacaagccatcatgccaaaatgaaaatcaagctaggttttaattaatggaaatttgaaa

SEQ ID NO: 688 - DNA, 539 bp, Homo sapiens
ggtattgtgaagcagggctgatgcttctcctggccacatgtgggcaccacttatgcctcttccaactatacttgtcactctctttcgtagtttacaatctttttttttttaaattttttttcttaaattttattttattattattatactttaagttttagggtacgggggggcaatgtgcaggttagttacatatgtatacatgtgccatgctggtgtgctgcacccattaactcgtcatttagcattaggtatatctcctaatgctatccctcccccctccccgcatcccacaacagtccccagagtgtgaagttccccttcctgtgtccatgtgttctcattgttcaattcccacctatgagtgagaatatgcggggtttggttttttgttcttgcgatagtttactgagaatgatgattaaagattttaaacattggaaagtttaaagtcttttaactccaatgaaagacctttgactaccccttactcccaaaagtttacatttaaattttaggagtaatgtagcattattaaa

SEQ ID NO: 689 - DNA, 566 bp, Homo sapiens
ggaggtgatccacccacctccttttatttaatattaaaccagagagattttttaagaggccatccagcatgataggtaagagaaggtgcctcacatctcgctctgtcatttccatgctgttgtaattacttgagttctacgtgccttagttcctcttctgtaaattaagagtaaaagtagtatctacttcatttagattaataattaaaatgagtaaatgtaaatataatgttcatataaatatcttagaaaagggcctgacacatgagatacccagaaatataagccagtgttgtgataaactattacactacctgattatatcctttttttctagattctatattaggcttgcttgaattttctaatcctattaaactaattttgtaggatgaactagaaggaagaaagacacataaaagtaaataaacatgattctcattgctacaaccacataaaccgtcgtagaaaaggtaacctgacctggccgggcgcggtggctcacgcctgtaatcccagcactttgggaggccgaggtggttggatcgcgaggtcaagagatcgag

SEQ ID NO: 690 - DNA, 565 bp, Homo sapiens
tttcttattatggcgaaatagtattccattataggataacaccacattttatttatccattcatcagttgatgaatggataaatatggatgatatttaggttactttcactttaaactcttattatcaataatactgaacatttgtgtacaagtttttgtgtagacatactgttttcatttctcttgggtactggcagtggaattgctgagtcacatggtaactctatacttaacttactgaggaactgccagactgctttccaaagctgctacatcattttacattcccaccagcagtgtgtgagggttcccttcctccctgtgccctccattcttaatacttataatgatcaacagtgatgacaacccattacaacttcacatttctcagttggggcactgaaagctatgtgtcctctcttttttaatggaaatattataaattgctaggcgtacaaaatttctcatgagaaagtataaagactttgttgagcacctttcatttttgccccttctctggcttaactaagtaatctcttgagaatggtatggtaccatgctctt

SEQ ID NO: 691 - DNA, 572 bp, Homo sapiens
attcatggttcaaaatagaaatcgtaatgaaaattataaaaatcttttaaaagaaaacccaacattaaaacctgcatggtgcagctaaaggtgtgtgtggagggaaactgaccttaaatgcaaatattagcctggaaatcagactaagaaatgagcaacagcaaattaaaccaagacataacggaaggcaggagacagcaaagggcggcagtgaacgcgcaagcacgcggacacgtggcagggaggactaagacgccgaaagttctttgaaacacaaataaaatcaataaagtctcagataactaacacgggaggaaaaaggtgttatcactataggttccatcacattagatcataagagaacaatttaatgctaataatcttgaaagtgcagatgaaatggacacattctcagaaaaacacaaattaaagcatcatactctgggctgggcacagtggcttccacctgtaatcccagcaccttgggagcccgagacgggtggatcacctgaggtcaggagtttgagaccagcctggccaacatggtgaaactgtcgtctctactaaaaata

SEQ ID NO: 692 - DNA, 572 bp, Homo sapiens
actggactgtgaatgtcaccgagcttttctcagattttcttctctacccttaggtaggaaaggatggcgagagtaggctgggattgggtactatccttctcccacatggttggctagggtgagctttagttgagtatttctcttctcccacgtggaaagttagagctgactagaattaggttttacccttctcctagttcagttaggctctgataaaaccccagaatgttaggctctggttaactagcttctcctgagggcagagtttgtcaagaggagcacagtgctctgaagctttcagaatgattcctatttccgtctccctgctggaagctcaaggggattcttcttgagaaggtaaaattcacaaaagtatggggtcctcatatgagggagtccccctgaagtttttaactctcagacttgttctcacctagcctctaacaatttgttgattacagttcaggtttcctaactctggcaccggttcctataaagacttctgtacattgttctcaatgtttgcatttctgtctctgattatgggagcagtggtttgccctgtgacctca

SEQ ID NO: 693 - DNA, 428 bp, Homo sapiens
gaggcaccacctctctctctctgtttctgtctctctctatctctatctctatctctctatctctctcttcctctccaccatgtaagggcacagcaaaaaggcagccatcagcggggcaggaaaaggaccctcacccaacgcaaccatgctggctggcatcctaatctgggacttccagcctccagaaccctgagtaaatcttgcagctgttaaagccacccagtgtgtggtactttgctgtggcggctgacttagccaggggctgaagagggttagctgaaacacagatcgaaaggctcagagaagaagacatgctagaatggatctaatcctgctggctgaccactatggggtcagtccttcctggagaacagtctattttccaaggtgagaaagagtgcactggtgagggaatgccaacaaagctc

SEQ ID NO: 694 - DNA, 559 bp, Homo sapiens
tgagtgctcccttgggcaatacaagcctgatggctgtgccctatcagacacaactgggtaatgcttctgacagccaccagcctgctacagttgaagttactgacctccattaatatacaacattgcactgaaatacactcctctatataagaaactgagtaatgagcggagcactacaatacttataaatacagatgcgttaaatatgggggcacatgcacatgtatacacactcacataacaatttgacctatcaaatgtcaaaaatgactaatgctggggcccggtgcagtggctcacgcctgtaatcccagcactttgggaagctgaggcaggcggatcacgaggtcaggagatcgagaccatcctggctaacacgatgaatccccgtctctactaaatatacaaaaaattagccgggcgtggtggcgggtgcctgtgaacccggcgtgttcccgggttcacaagaatgaacaagaatggcgtgaacccgggaggcggagcttgcagtgagctgagactgcgccactgaactccagcctgggtgacagaacaagac

SEQ ID NO: 695 - DNA, 572 bp, Homo sapiens
tgcggctccgagaggaggacggaagggtgaatatgtagaaacagggagtagaacagtgggtagcaggagtgggcagggggaggaagtggggagatgtaggtcagaaggtacaaactcacagttatgtaggaggaatgactctagagacctaatgcacagcatgaggactatagttaataatattgtaaatatactgaaaatttgtgaagagagcagattttaggtgctcttactacacaaacaaaaaggtaactacaccagatgatggacatgttaatttgcttgacttatataaccatttcattatgtctatgtataacatcatgttgcctatcttaaatatgtacaaaaatacataaatacatcacacagataatcacctcataaaagaaagtattatccttttctgataagatggaagaatcaaagaaaaatgcaagtaagtcatcttaacatagttcttgcagtttagttaatgctcatagaagttagctgctatgataataaaaatggcgatgctgattgttgttataaaacctggccaggctagcatcccaagacagtctgtgagt

SEQ ID NO: 696 - DNA, 489 bp, Homo sapiens
ggggtttattttttgagcaaaatggtcatttgccaagaagttctcctgtcagaagttctccagaaaattccaagacttacctgggaacaaaagaaagcctgctagcccagaaatgagaattttaattttgatcagctctcaggagatctgtgggaacctcaatttgctcagtgtctttgaaacactgcagtcttgtgtatactgagtgggtggccatggtagtgtgccatacacaggtgcaataaaaaatagcttatcaactcctgacttcaggtgatcctcccgcctcagcctctcagccttgccaacatggtgaacctctgtctctactaaaaatacaaaaaattacctgggcgtggtggtggacatctgtaatcccagctactcgggaggctgaggtgagagaatttctggaacctgggtggcagaggttgcagtgagctgagattgcaacattgcactccagcctgggtgacagagtgagactct

SEQ ID NO: 697 - DNA, 578 bp, Homo sapiens
gtttgccttctctccaggctggcccacttcatttggggtttcccatgccccctgcttcacatcctttgactctggcttttgttccctccctcccagaatagctctcagttcatgaagcacaccaaacgccggaagctgacggttgaggacttcaacagggccctcagatggagcagcgtggaggtgagtggggtgcaggctacagagggctcaggtggcatgaggccacttccatgtccagttcagggctggcgatgtggtgagacattaagaccaaacgctgccgggcatggtggctcatgcctgtaatcccagcactttgggaggccgaggtgggcggatcacttgaggccaggacttcaagaccagcctggccaacatggcgaaaccccttctttactaaaaatacagaaattagctgggcctggtggtacatgtctgtaatcccatctagtcaggaaactgaggcatgagaatcgcttgaacctagcaggcagaggttgtggtgagctgagattgcactccagcctgggcaacagagcaagaccctgtcccaaaaaaaaaaaaaaaaaaaaaaa

SEQ ID NO: 698 - DNA, 569 bp, Homo sapiens
  misc_feature 154, 155: n = A,T,C or G
gggcacatgcactgccctcagcatagccgccttagcacttcaggacttaaaaggacctcagagtcactgaatcaaagctccctgagagtcaaattcctctgtgaattcctttcttgcagggagggtggggagaactgtccaaacctcagtcttnnaatttttgaaaacagcaaaacttcagacaaagccaagtctagtgaagaaggtcaacaaccaggatgaacacattaaaataaggtggggccaaaagatgacaaaactggtttgcttctctgacccacaaaatggttctgagaggtaattccagaagcacctagagtaacaccctcctcccactgctgctgccggcacaacctctccaagggtggatagagagctcatattaacatctttaaggctgggcacagtggctcacgcatgtaatcctagcactttgggaggctgaggcaggcgggtcacctgaggtcgggagttcgagaccagcctgaccaacatggagaaaccccatctctactaaaaacacaaaagtaatctggcgtggtggtgcatgcctgtaatcccagctactc

SEQ ID NO: 699 - DNA, 519 bp, Homo sapiens
ttcttaatatggctcatttaatgaaataattggtttttgttagtatggtccaaatttaaaaatggtaagtttttattcatttatattttcaaaagaaattgatagtttacattcatgatctttcagagcatgttttcagagtattatatattttaactgcaatgataaagagaatttcttttaagcatacactcaaattgaggctcccaactcactagtacttttccagagattcagctgcaagtaaaatctgaatagaaaaatcttaaagcttcaaggcatttcaaatttattaaacataaaaaattgaaattgtaaatagagacatgtaagtgtttaggagatacatagatgggtagacaagattgacagatgattgattgactgattgcacctgtgctttgttcccatttctcacctactttatttgtcttcagcctcctcatcaaatggattctccatgttgtaaaattactcatgtctccctttaaaaagaaatccagcagactcaactcttgc

SEQ ID NO: 700 - DNA, 546 bp, Homo sapiens
ggtattgcattagatgaaacagggaaggagacctttctgagtgactgcacagttggaggcacatgtctcccaaatgccctctccccttcttgcaattttagcactattgatgttgtttctctgaaaacagacactgaaaaaacatctgctcaggaaatggtttcccttgatctggaaagagaatctcctttccccccgaaagaaattagtgttagttgtaccattgggaatgtagatacagttctcaaatgcagcatctgtgggcatttgttttcttcttgctctgacttggaaaaacatgctgagtctcacatgcagcagcctaaggagcatacctgttgtcactgcagccacaaagcagagagcagctcagcactacatatgcatatcaaacaagcacatgggccacagaaggtcttttcctgtgatctttgtggttttcagtgttcagaagaaaacttgttgaatgcacattatcttggcaaaacacatctccgtcgtcagaatctggctgctcgtggaggatttgtacagatcttaacaaaa

SEQ ID NO: 701 - DNA, 544 bp, Homo sapiens
cacaatttaggatcgtgccagatcacccaacaaaagatggctaatacgctgaaagcaggtctcttggcaaaaacaggagtatgaagaatgtggacgtacatttccaattgctcgtgggaggccaggtgcagtggctcacgcctgtcatcccagcagtggattacttgaggtcaggagttcgagaccagcctggcccacacagtgaaacctgtttctactaaaaatataaaaagtagccgggtgtggtgacgcctgcctatagtcccagctactcaggaggctgagacaggagaatggcttgagctcaggaggcagaggttgcagtgagctgagattgagccactgcactccagcctggatgacagagtaaaactctgtcacaaaaaaaaaataaaaaataaaaaaaaacacaagaaaacaaaaaaaaacccaaattgcttgtaagagacccctgccagcatagaaacatttacccatctaatgattattcaagacctgggaggaaatgaaggtgttttatttgcataccaaattcaattaacta

SEQ ID NO: 702 - DNA, 471 bp, Homo sapiens
gttgcactctctttgacagtattttgttgagaatttttgtgtctatattcatcagggatatgggtctgtagtttatgttattgtttttgcttttgttattttgtatatgtgtatccttttctggctttgtcagtgtaatgctggcctcatagaatgagtttggaagaattccctttaattcagttttttaaaaaatattttgacatgaattggtattaattcttctttatacagtaaagcaacatgctaagatggttatttttagagagagctcttaggtagttgtgcaaataattaatttagcatgctggcatttatgttgttaattaaaggaggaggtcagttcagaaatcatggtttggattaggtactcctcaaattgtacctaaaagaaagatcacgaggtcaggagatcgagaccatcctggctaacacggtgaaaccccgtctctactaaaaatacaaaaaatt

SEQ ID NO: 703 - DNA, 574 bp, Homo sapiens
ttatcagaaaacccaagagtaaagttaggcttgtgagtaatgctagtctacctaaagctgtctcaaaaatcctattatctacctgccttggaccacttgtcagtaggcaataaagaattcaacctggtatatcccggatatactgcaaccaagattatcatgggacaatttctctgccacaatatatacagatgcttctctggttcattaattttacactgcctttcatacatatttgctcaatgtcacaatataattataggttgtgatattttataatctgtataggttgaattaagtcttcaaaaaagtcttaatccccacaccttatttagaaataaagtttttgcagttataattagttatgatgagtttcatactagagtaggatgggctcttaatactataagactagtttccttataagaagatgatgtaaagacatgagggaagaatgccaaatgaagacagagggagagattggatttaagctgccaccagccaaagaacgcctggagctatcagaaagagacaaaggaggatcttccctagaggcttctgagaaagtatggac

SEQ ID NO: 704 - DNA, 570 bp, Homo sapiens
tgtatagcttgagcagtctttagcagtcctgcattttcgaatcctgtgtcaaagacattataaagttggagataatcaatgtgcaaagagtaattgttgtctaagggcttgcaaatctgcacaggtagatgaagggaaaagcaactaatgtccatttaaaacctatacttcactagatgtttccctagcattatcttttttaatttgcacaagttaaaagtaaggaaactgggattcccacaggaaatgcaggtagtagattctggatatgaattcaaagttgggtttcctaactttaaaatcacacattgttggggcagtactaacaaaatgaaaagttgtccaagaggctaatacaacatgcaggttttaatatgtaatggtgtgattcatcctacttcattagagtaaatagtttgagagcaaagcagtgggtgataggacattggatgtttggggtgacttgtctatctgttggtctttaagtacactttctttcatcatagacatgtgtgaaaaacacttattttaatttaaatatacaattattaaccctagttgagactactt

SEQ ID NO: 705 - DNA, 573 bp, Homo sapiens
agcctaaactaaggtagtggcaatgggtgtagaaaggaggtaagaaattcaaagagtgctatggaatatatacatattaatgttgctgatcactttttttgtacgctctggggatgtgacaaatatgggttagggggatctcagtctgtactttgatttaggcaactgaatatacataaccttagtagtaccattcactgagttttgttttgtgctctttttgggaggagatggggaagaaaaataatccatatgaagatatgttgcgtttcaatgcctatgagatactaagaagtaggtattcagtagaaagttgaaaacttgggtctgctacttagaaataaggcctgttttaaactagatatgtgtcagatgatttagagaaacacaaggaaaaagtcaagaaaagatagcatcaaaatttaaggcagcagttgggacacaaagggagataaagtgaataggcttataaggaactgtcagaaggaggaaaaaacaagataacgtggaacaacaggatgaaaatagaagacacacgtatagtgattattatgtggcaggcactattctaaa

SEQ ID NO: 706 - DNA, 543 bp, Homo sapiens
atgcagacatgtgtacctctaaatcttgtatcactcaccagaagtttgctatgactctgtatgaacagtgtgtgtgtcgtagctgtggagcatcgtcagatcctctaccttttacagaatttgtgcggtacatttctacggggagggttatgcaatgaggttgaaagaatgttggaaaggcatgaacgctttaaacctgaaatgtttgcagaattgctacaagcagcaaatacaacagatgactataggaaatgtcctagtaactgtggccaaaaaataaaaattcgccgtgttttaatgaattgcccagagattgttacaattggtttagtctgggactccgagcattctgacttgaccgaagctgttgttcggaatctagcaacacatctttatcttcctgggctttttttatagagttactgatgaaaatgccaaaaatagtgaacttgaccttgttggtatgatctgctacaccagccaacattattgtgcctttgcatttcacaccaaaagttccaaatgggtattttttgatgatgc

SEQ ID NO: 707 - DNA, 570 bp, Homo sapiens
ggaagaacaacagagcaaagcacacaccctcccgggtaatgcacttgaatcaatcaaaagcgtatacttggaatctaactgctgatggtttgggtacatctaaacttgtaacacaataaggagtgcagaagagtttctcttacaaaacttactgcaaacaatagaatcgggacagggtggtgcaaatagcaaaacaaaaggagcattttattcttcccccctccccaatatattaaatggttactctcaggcagaaaaccttttagttccaaataaatctcaagtaatagaaccagaagcaaaccaagctttctaatctacaccaaaatttctgggagaaatcttctacagaatccattccctctgtgtgtctcttaagagctgtagccaagagaaacttaaagaaataaggcagaaatattgtacactgaacccctgccctgccaaacctgactcaggaagccctatgtatggaaactgcataatgctcttggcatttgcagagctgtgctctcagataccttccagaagaatgacagtgtgtgaagggggcaggtcatgactattttt

SEQ ID NO: 708 - DNA, 583 bp, Homo sapiens
gttgccaggtaccttattttaccaggcactgttaggctgacctgatttgctggagttgctaagggcaagtagtttgtaaattcttttaacaattttaaaatacctttgcctctgagcacaggcataggtggcaaaactccatagtttatctacatacataaattctgttttatgagatgtttcttagacttgttttgtgactaaaagaaaaatcaataatataaatttcaaaaaaaaatggttctgcaagaaaaataaaactcttcttcccctcagattgaaaaaaagtttaccaaaagactggaattgatgaatggagctaacagatcagtgctcaccaacctgctttacattgtctttggtagtttcatttttttgcctaacaaaaaacactcttccctcccacgatggctttaatagaagaactataaatttctaatgtaggaatttacttaggatggttattgggaaggtgtacagaacttttttttcaaggtacattagtacaccacaacctctttatgctttaggtgattggcatctatcaacattcatccttttttgcaaagagagaattgagaat

SEQ ID NO: 709 - DNA, 539 bp, Homo sapiens
gagggaaaggaacaaaaaccaagaagatgttacataggagcagagcagaaaaagggccaacaattccagcaccaccatcatcattcctgttaaagatccgaccaggactgcatcctcttgacagcatgctgcaacacagtagaacgagagaaacgaagacttggatcccaccctacagcttgatctactggctgtgatgctttggtttcactgcctgacctttgcctcagcttcctttttttccatttgtaaaatgaaactgacaatgcatcttaaattgattataaaaatcagttgagaatatgtatgtgaaaacactttgtagctgagatttaaaatgttatatatggctgggcgcactggctcacacctgtaatttttgcatttgcaaaatttgcaatttgcaaaatttgccttacatcacatctgtaatttttgcacacctgcatttttagaggctaaggcacgcagatcacctgaggtcaggtgttcgagaccagcctggctgacatggtaaaaccccatctctacgaaaaata

SEQ ID NO: 710 - DNA, 579 bp, Homo sapiens
tctgtgcataaatggacatggattatatgtgttatagcaacctatcaccttggcaccttgttatcagcttactgacattcaaactccaagacagctagaagaatgactcttttccaccaaacagtattttaaacaaaacttaaacccaaagtgggatttggagttcacctctgagctcatggaaatgtgaataaggtctaagaccaggtcaaagtggtcaaatagcttggaattcattcagatattttttccttgtcaattaaaaaagggataattttctcttgccagtgagtagcctttggtttgggaatattgtataacccaagaaaccatcttaataaattagccaggaaatacactgcttgagcactcttgttgtttggcctatggggagaccatatggctaaatgggccaggggggataaaatggggcaggaaatatgcatgatgaacatcagggaattgcaatttttgtacattcacaatccaccacaattcattgcaccaaattcctttcattttttgtcactgatcacattcttatgaagcaacttctagtatgttgggtctataaaaacc

SEQ ID NO: 711 - DNA, 444 bp, Homo sapiens
ttctcaaataaacattcagttttttctgttattgggggaaaacctttaaaattgtatctcacataacaaaattaaaatttatttgcctgattcaatgaaaggcctcttctatactttgaatgaataaactggccacggcaatcagaaatagtaaaaacaggccaggcatggtggctcacgcctgtaatcccagcactttgggaggccaaagcaggcagatcacgaggtcaggagatggagaccagcatcctagctaacatggtgaaaccccgtctctactaaaaatacaaaaaattagccgggcatggtaggggacgcctgtagtcccagctactcgggaggctaaggtaggagaatgacatgaacccaggaggcggagcttgcagtgaggcaagatcgcgccactgcactccagcctgggcaacagagtgagactctgttaca

SEQ ID NO: 712 - DNA, 451 bp, Homo sapiens
ccaattaatattttgacccaaatattctctctatgaaattgcagccttggaggcactccacctctctgccagtcatttctttaaaatagtagaggagagagacaaggagattaagcaagggaaggaaaattctacaatggaaagtgatcagttgtctaagacccatggatcagagtcttcaatgaaaactgcagttatagttaaaactataggaatagataaataaggagaaagaataaaatgaagacatagaaaagaactgcaccctgcagtacaagtggatcatcaatacccttcctcaccttgtgtgttttaacatacattttgtgatgtgatttaaaaacaaaaacaaaatcattctgctgcaggtaagaggaatattatttctattttataaacgaggcaacagacagacaaaaagactatatggaatttattaaattcatttact

SEQ ID NO: 713 - DNA, 311 bp, Homo sapiens
aagggactctggtccaagtctcaaacacatccataaccctgggtttgctggctggggtttcatggcactgcctggcctctcccttccagtctggcttccctttttctgcggcccaccactcttcctgcatctgtcacactcgtctccatacacccctgctgagaccccttctctcctggcccaccagtcagaatggaagttctactggcctccaacttttgaattccaacctggcctttactcaagcccacgccggggagcttttcctgactaagaactccttgagcctaaccttataccgagaattccct

SEQ ID NO: 714 - DNA, 580 bp, Homo sapiens
aatccaagaaaacatcccagaaatattgatccataacagacatatttaagataaaacttccagagaagcaaccaattagaaagagtgatagttcttctatattcttgactaaagtgaagatgtatttcaaaatttgttagtatgctgtttaagcagactggccaagactactcactcacttatgaaaagatcatattagcactaagtggagaagcagtgctgtgaattaggaggctctgttagtatatcttgtatgttcgttaactctcagctgcaggaaacagtaccatccctagcagcaagcatttaatatgggaatgcaaatgcttacaaatcacttgaaggtcttttggcctaatattcagaatcactccatgaagaactggcttgccagtgagctgctgtctttttcggactttaataaaataccactgtggctattatctaggcacaaggaagacaccactatcaaaactgtctctcaacaaccactaaggtagtggctagacattagtctctgttatagaaaatctcaacatcactgtacttgtctgcagcaacagctaaagcaaaggaagta

SEQ ID NO: 715 - DNA, 547 bp, Homo sapiens
taacatcttcagatgcccagaaaaaggagcagagaatttacattgtagtgaagtgaggatagtggttttttctaacagtttattatataaattttcaaatatgcaaaaaagcagaataattttacagtgtacaaccatatgcccatcaccttgtttctacaatcaacggtgtacttgctttaccacgtatctttcaagatgatatttgaaattaatgttttattatgggcattgccaatgtatgtgaaaatagagggaataatataatgagccctcatatattcatcatctagtttcaacagttattaattatggctaatattatttcctataaccatctgtctcttgtcacattcttcactagattatttaaaagcaaatggaattttgttgagtggatttgttagaagcaaaggaatacagcataatcacaggccctggagcaagagttgtttcgtgatcaaacatggaaacccaagttggcagagaaggacatggggccaggaggggactgataagctagaataaaatggaaggatcaaggggc

SEQ ID NO: 716 - DNA, 507 bp, Homo sapiens
caaatggttcttatttaggaaacacacacattattaccttagaaaatatttcattatatttgcaagctacataaaatagttcttgtatgtgtataatttattttatcctatcattctagaaaggattttaattggttcttatttttaatgtatgttaactgaacaaaaggctgtataattttctgtacacatatgaatattttctaactcattttcattcatctcaactttagaatgtctcatttttcttgactaaaaaactctcagagccaacagttatgccctccaaaggaagcaatgcaggtgataataagtgaaaaaatgctgatacagacccttttcaggttctggcaactgagtggctaaaaatagccagctagaaaaatatgtacgttcaaaaaggcctttgacaaaattcaacaacccttcatgctaaaaactctcaataaattaggtattgatgggatgtatttcaaaataataagagctatctatgacaaacccaca

SEQ ID NO: 717 - DNA, 557 bp, Homo sapiens
ggtgagctctacaaacttctaaacagaatgtgcaaaagacttccatacattttcacatttttcttcatccaactcatcttttaggtaatgaactagcaaatgtatcatgtagttttgaatttttcaagtatgtattttaatgctgcaagttcatgttttcaattcttttaaggatgtttatttaccattttgataataacttaaatcttcaaatatctggtatgactccatcaattgaaactctcttcataccagattgcaattagcatcatatggtataatgccaattagtgattcaatcacacaatggtatagctccatttctctctatatttataaatttcttctcatatattaggtgtatttgtaattatctaaaatagtcactttaagtacatttattaccaaatggtaatcgctgatatattcatgtaataatttaaaataacacaagacacataaacaatttccatctacaaaaataaacttattataaaaatataaaataatattatcttagagctctgaaaaagcaatccagagaaatgacttgctga

SEQ ID NO: 718 - DNA, 461 bp, Homo sapiens
atgcaccaaacatgaagactcagtctgcttggtggaacccaactagccccaaagacccggtgcttgcctaacgtctggcaaagttacagctgagactgggaactcgaatttcattaatgttttctattaaaagcaccatttcccattagtatttggagggtaattgatctctagaagtgcatctcagggcagggctgaaggtgttaccacaaagggggaatgacttcataagtctcccactgagctgccacaaagccaaatgaaaatatctccagttccctggggaccagtaaggctattagattagagctcaggtgaagactatttgatgagtcagtcttcagaggaaaagccacggttgtaatagcattggcttgccaaagataaaacagcatttaaaaaccaggtaattttaaaagccccaaatcaaaggttgagatactttataaactttgaacagt

SEQ ID NO: 719 - DNA, 573 bp, Homo sapiens
tcacctcccaccaggttcctcccccaacacctggggattacaattcaagatgagatttgggtggggacataaagccaaaccatatcagaccccattcctctctggacccgcccctcaccccatataactactctgaattgtccagttgaagagactgtcatcctccatcacacatctacggtggacagaggatgggactcacagcacaccaacagcttacgtaaacaaacacacagaaacaaaacaaaacaaaaactcttctaatctctggagactattattctaagtgaagtaactcaggaatggaaaaccaaacatcatatgttctcactgatatgtgggagctaaactatgaggatgcaaaggcataagaatgatacaatggactttggggacttggggggaaaggtgagaggggggcgagggataaaagactataaatggggtgcagtgtatactgcttgggtgatggctacaccacaatctcacaaagcaccactaaagaacttactcatgcaaccaaacaccacctgtatcccaataggaaaaaaaataccttctaatctcaacact

SEQ ID NO: 720 - DNA, 521 bp, Homo sapiens
gagcagactgaacaaatgatgtgagaatctcttcagttccaaccaagtggcgggaaccagctaagagttgggtactgctgaggaaaattgatgggcagttggtaaaataggtgtgaatgagagaaagctttgttggggaaccatggtgggtatgtgggcacgttctacattactacaagtattgggaatttcccaggggaacagcaaaatcttgtcttatttatgtttaattttaaaaaattcccactgggtgcagtggctcacgcctgtaatcccagcactttgggaggctgaggcaggcagatcacgaggtcaggagatcgagaccatcctggctaacacggtgaaaccccgtctgtactaaaaatacaaaaaattagccaggtgtggtggcgggcgcctgtcatcccagctactcgggaggctgaggcaggagaatggcgtgaacccaggaggtggagcttgccgtgagccgagattgcgccactgcactccagcctgggcgacagagccagactctg

SEQ ID NO: 721 - DNA, 570 bp, Homo sapiens
ttaacttcactctggtgtgggggtgtccttgatttccttggtgtcaggcaacaaacctcaggtattaccccagacaaacaatactgcttcacagagaatacctgatctcccaaaatttggttaagatctgaagtttattttgccgtacaactccattttttgaaggggggcttgcttccaacaaggaaggcaagatttcttgcttccatgatgatggaaggcaggtaattcctctatggagttggagctcgctcccaacagggaagatgagtttgagttttattcctgactctaggatggtagaggctgtcttcagcctgagacccatccctaagtaagttaacaaccagctgttcctaatttctctttaccattagagtgcccagtaatcatattgttgggtttttttattgttttttccagactttcttccatcagatttggtcaaatctgagtgagaatttcaaattttgggtaacaaagcctctctaatttggctaaaattcctctccactgcacaggaaggggaaaaaacaaacacgtgcttggtttctgagcttgcttcctgtc

SEQ ID NO: 722 - DNA, 546 bp, Homo sapiens
tgagttggagattgcagtgagctgagatcgtgccactgaactccagcctggcaacagagcaagactctgtcaaaaagaaacaaacaaacaaacaaacaaaaaaacagcactagctatcagaagacaataaattttattgtttcacgggacaccagtaaacactaagtcaaatattttcatgtattgatctttaccatatcacactgttcccattttacaagctgtttcatgatttttaaaagtagttcacttttaattgacaaataataattgtgtatatttatgggatacaatgtgatgtcttgatctgtgggtacactgcagaaagagtcaatcaagctaaataacatacctgttacctcaccaccttatcacattttgttggtaagaattttaaaaatctgttagcaaatatgaattgtacaatacatcataattaactatggtcactacgcagtacaatagttttgtaaaacatcccacctatccaattgaaactttgtgccccttgagaaatatctttcttttcccaatccctcctcctct

SEQ ID NO: 723 - DNA, 571 bp, Homo sapiens
ggagggctgtggcaagccatgtgcacaaagatgcctgtttcctgtcttcttggttaaaaacaaaaacaaaacactggaaggaaccccaaagccaagctgccatgggttgcagagtgccagcccttaagtagtgttgttcatgggtaaacaggagacggataagggcagggggaagaaataacaaactcaaggcatgaatgtggttatccaaacatcaagggactccttcatttgcatttggataattgtgcagttatatgatttgttacatggagaccagatggaagtaagagagctcatcctcaacttcctgtacctctggaagtctttacacacatgctggaaagatagaggagagttcattagcatcaaaccaccatggatttcataatcaattcctaatatctgaatagatgcagaaaagtcacaggcatctagaagtgtggcccaagttctgttcttcaatcggcccaccaattatccctatgtatctcgattttgttatctaaaagatcacatgatggaggatgtaagcaagtaatacagccaagacccagtttacagtgtctag

SEQ ID NO: 724 - DNA, 562 bp, Homo sapiens
ctccgtcttgccaggcgagtggcgagtcttcagcggcagaacgtggtcctcccttcggggtccctgagctgcaatgcagccgcttgaggctggggacggctccaaggagcccccagtcaccaagaagcagcctccagaaaggccgctgcgggttccggggaaaggcgggctgaacgtgcattcccgtgagactgcctggaggggcgagctctgctgcggggcagggggtgcctgatgtgggctgaggcctgtgcagagaagccaagaggacacctggaccctccgccgagtccagccaccagagacccagagccccccacgaaagcagagcctcgggccgggccctgtggctcacgcctgtaatcccagcactatgggagcccgaggcgggaggatcacgaggtcaggagactgagaccatcctggctgacacggtgaaacctcatctctaataaatatacaaaaattagccgggcgtggtggtgggcgcctgtagtcccagctactcgggaggctgaggcaggagaatggcgtgaacctgggaggcggagcttgcagtgag

SEQ ID NO: 725 - DNA, 555 bp, Homo sapiens
gttcggaggactcattgcgctgagcccataaagaatcctgagaagttctatccagagaaaccagttcattttgtccagtgtttcccaaacttatttcctcatggagccctcctccctttttccatggaatatctattaacctcctgcagggtgagattccaaggtgtgacttgggcaaacactatccgtaacttccatagattcactctcagtccccttcagggggggtttcagagcaattaaatgcctactgtgtgtgaggcccacagcaagtggctaggaatacatcaataaatcagacacaccccagcttgggaggaacctgcaggctgagcgacagccacaccttactgcttgagtctgacctgggcccaccaaggctgtataaccttgaccaagtcactcttctcctctagtcttcaattcctccaactgtaaaatgagagaatgcaatgccacaatccctaaagacctggccagccggagcaccaaatcccttaggctgccatgattggttccagagtgggtgcatgaaccaagctgagccaatgagcg

SEQ ID NO: 726 - DNA, 486 bp, Homo sapiens
gacagaagggtacggctgctagaagacgagggaagggtcacattccttttccgactccaagcataataaagcataattccctctgcagaggaaaaatggaaagcggaaagagacaaaaagcttctctactatgtaggtaaagaacacctgcaaattcacattacctatgaattgatcatttgactgaacatttttctactaaagtattttactgcaagagcagctgtagacaatacacacatcaataagcaagttttgttccaacaatttacagaagcagggatatttggcccatagtttgctgatccaaatttaatttacagattttttttaaagtgccaatccagcagacaattataggggaaaccactattttaaaactcaaaaattcaaatatataaaagtgaatttagaaaaaagcctagaggtgggaaggcaaggaatatctgaaattgtttctttttatttatagatattaaagtaata

SEQ ID NO: 727 - DNA, 565 bp, Homo sapiens
gaactttactaataatgaaaataaccactgtgctggtccagtggcaccacttcctttttcatctcctttgtattcttcaggttacatcttcagtgtcaggaagaaaagccttctgtctctctctctccttgggattaggttaaatcttatttgagttttctcataccattgcaactgcagttttacacatttagatatgactatggaagatatgaccttcatgaagacttttggtgtcatggatgtagatgggtgctcatggaatatttctcagtcgaatacacgagttaataaatgaatgagtttgggcttcacaattaaattggaggtttagataagaaaacctcagagaacaaaacatgtataatattttctaattgatttatgtgtctgccactctggcagatgatgaattcaacatgacctttgtacttgaagtgttcatgttaatctaaagcattccttattgttttcagggctacctgagaatcctagaacatttatgaatattataattgaaatacttaggaatgaatttctctcccagcaggttcttcatatcccc

SEQ ID NO: 728 - DNA, 384 bp, Homo sapiens
agcttaaagtatgtgtaagagaagatgcctaggaaaatgaaagtagctccagagaaaatgggctgaaagaatatatacaagaagcaggaaagagtcatgggtcatcttcaagggtaaattaatttaattctacctttgaaacagtaggggcagcctcctccttacagtgaacaaaaggcagcaggtgcatttgattctaagctaaaatcagctaattttctgaagaaagtaaactgcctacttgaggaaagctcttgctgtgggtataggggcctcagagagaaacagagaggaacctgagttaactgcaaaattctaccgcagatataaagaaaaggaaacaggagaagtagctctgcaaaaaaaaaaaaaaaaaaaaaaaaa

SEQ ID NO: 729 - DNA, 410 bp, Homo sapiens
tagcttctccaagtctctgttttctcatttacatatctgctacagtcatgaatgtatattgtctccctagaggattgtggggccatccgtgatgggataaaaattattaatgaggaaatgttctcaaacctaactagacggatagctggagagagaacttagatgtgtattttataaattaccatgtgcacatacaccctttttttggcaagtggtgggaggtatcagagattctgggtgggggctgtggcctaagcagctccttggtcattgggacggtctctgggccctgacgcatgggagggacagttggctggtaggacacttggaggtgggggctccagctaagccactgcagagatggggcgtgggccatgcaaggtggtgaagactgggtgtaggtatgtgtg

SEQ ID NO: 730 - DNA, 381 bp, Homo sapiens
acctgattcatacccctcagccccccaggcatctgaagccacacagggccctgctactggtttgctggtgtgcctaggccttccctctgccttttcccaagcaggagaaagccatcactacaggaactcatactgaaccaccagaccacattcgcgcaggtccctgtactaaaggccagtccatctgagctcccagggtaggagagcagagctcagaggctgtgtcattcacatacccacccacctgcagagggcctctctgggtcatcagtggtcctccatcctatgaggggcaatgagcttccacagagcacaggtggaagctgctggtgtccctaggggctggagcactgagtttcatactagaatctgatatagagt

SEQ ID NO: 731 - DNA, 172 bp, Homo sapiens
ctggttttgaactcctgacctaaagtgatctaccaccttcagcctcccaaagtgctgggattataggtgtgagccaccacactttgccaataagatatatttcatatggcatctaaccacaaatattccgaaggtttcagaaaggaactgaaaggaagaaatgggctggata

SEQ ID NO: 732 - DNA, 323 bp, Homo sapiens
gaactcccaggctcgagtgattatcccaccttggcctcccaaggtgctcagattacaggtgtgagccactgtgcctggctaccataccctgtaagtgtgtttttatcaaaaacaagctatgatacaggccatttattttatggatgatatctccatatgacctaattggcaaaagcagtcctcaaaacttatcaaagcatatactactaagtactaacagattcacctgttggtaaatatttttttgttaaaaggatgtagaaagtgttaaatattttataaaatataaaaattaagaattgactatattttatcatgaaaag

SEQ ID NO: 733 - DNA, 499 bp, Homo sapiens
ttattatttccatttagatttgtttttagctacttttttggctaattttcagattaattaatttacatgttagttagaatttgaatactgtgactagcctaagcaaaataaagatagtgtctaaatatacctgagctattaaaacatagtcgttatttgaagttggatcacattgtacatcagagcccatgtactgactgtgacctgtgttcttagagttgactaaaactgaagataagtttttgttctccacagggtcattttatgtgtaggtgaaaatatttcctagaaacattcttcacagtaatttgaaataatgaaggcaaatatcatatgcataatgtgaagaaaacctaagaataacaatttatctttaatatgcaaattaggaaaatgactttagtagttattaacctgttgactgtacaggtaaccttcaggttccgattgtgtgggacagcagatagctttgtcctcggagtccaaaagagaggcagga

SEQ ID NO: 734 - DNA, 226 bp, Homo sapiens
ttttgacaaggaaacatgaaggacaggccattaaaagataagtaggaaaacataatgctgtccacagccaaataatcataataacaaggaacagggagcaaaagaatagaggggtgagaaggaaagcaccaactctatcttaagtttttaacatgctttcagtattttctaggattgcagaggaagcccagaaggacaaacaagtactgggatgttggatttgggg

SEQ ID NO: 735 - DNA, 294 bp, Homo sapiens
gggtaacctggagacattcagaaaatatctgtggaactcctgcattttgtgaggcactgcccagggcattggagagagagatgcctttgtggtggtcctaaaagagttcacagtctggccaggagacattgtacaaacagactataaatggctgtgcttcttttttttctaaagaatgttcagcgggagcacttgggacctacctgtgagagctgaggaaggcttcacagaagaggtcttgcttaagaggaaacatttggggccaggtgcagtggctaattttttgtattttct

SEQ ID NO: 736 - DNA, 291 bp, Homo sapiens
gacagaagggtcaccctttcacatttctaccagcaatgcactagagttcaaatttcaccacatccttgccaacttgtgttattttgttgtttttgtgctgttgttgtttttaataacagccatcctaatgggtgtgccttccttaggaggcagccacatatgaaatccatgtgcctgtgttaatgcaaaggtggaatttcctatggctggcatgctcactgcacagggatggaaggccagttgggtggaaaggatgagaaagctgaggtcctggagggctttgagggacgg

SEQ ID NO: 737 - DNA, 415 bp, Homo sapiens
aggagaggttggcactttcaggaagtcacaattagttcagcatgagggagggctgaaaattccctggtggcccagggtgcagcgggcagggtgagggaagcttgaagaaccaaggccagaaaggtaagaacgaatgtcacaggaggagtcaggcatcctctgagttccatgagaagccacacagggtgtcaggctggcaaatgacatgaccagacagccatggaaataccactctagctggatagcagcttgcggggcagagccgttcttacctcccctttctgagcctccatgaggacatctgctcccggtgtccactgccttccgggatctccctcccttctttcactggctctcctgtacttaccctttttcctggtcctggactcttctactcctttcttcaaagtccctg

SEQ ID NO: 738 - DNA, 437 bp, Homo sapiens
tgtgtagacaattgtagaatttcgagctaggagtagaagagaactaatgctgagattcctttctgttaattttttttcatgattctgataaaactcaggattctctcctcagaaacatgtacacgtaaaattttgcatataaattttggggcttggccaggagcagtggctcatgcctgtaatcccggcacttggggaggcctaggtgggtgaatcacctgaggtcaggagttcgagaccagtctggccaaccttggtaaacctcatctctactaaaattacaaaagttagccaggtgtggtagcaggcacctgtaatcccagctacttgggaggctgcggcaggagaatcgcttgaacccgggaggtagagattgcagtgagctgagactgcgccattgcattccagcctgggcgacaagagtgaaactccatctc

SEQ ID NO: 739 - DNA, 468 bp, Homo sapiens
ggtattatctactaaagatgaatcaagagtgcaaaataaccaaaatcaaattcaccagccccagctaagtgaaggttattcagtacttttagaataactgacacagaggcagtgattcatcttgtcttccccacccgcctgtttttgagatggggcctcactgcagtagctcaggctcgagtgcagtggtgtgatctcggctgaggctcgagtgcagtggtgtgatctcggctcactgcaacctctacctgccaggctcaggcgatcctcctgcctcagcctcccgagtagctgggactacaggcgcacaccactatgcccagctactttttttgtctttttttagtagagacagggtttcgccatgttacccaggctggtctcgaactcctgaacttgagcaatcctcccacctcatcttcctgaagtgctgggattataggccagccttttttttttttttttttt

SEQ ID NO: 740 - DNA, 122 bp, Homo sapiens
cagcacatagcatctaggacctgatacatagctgataccagataattatttattgaaaatataaatcaatggatatctatccaaactgcaattctaatgctctatataatttataacttcat

SEQ ID NO: 741 - DNA, 461 bp, Homo sapiens
gtttgcctattagctgctttgtattgctattattataaatagacttcacagttttagacttgcttaggtgaaattgcaattctttttactttcagtcttagataacaagtcttcaattatagtacaatcacacattgcttaggaatgcgtcattaggcgattttgtcattatgcaaacatcatagagtgtacttacacaaacctagatagtatagcctttatgtacctaggccgtatggtatagtctgttgctcctaggccacaaacctgtacaactgttactgtactgaatactatagacagttgtaacacagtggtaaatatttatctaaatatatgcaaacagagaaaaggtacagtaaaagtatggtataaaagataatggtatacctgtgtaggccacttaccatgaatggagcttgcaggactagaagttgctctgggtgagtcagtgagtgagt

SEQ ID NO: 742 - DNA, 140 bp, Homo sapiens
cttcaatgcttctttagaatgatttgtgtgtttttccagatgcatccgcatttgagattgaacttaagtttagctgagtggatcaagatggcccacatttgtttggaagttatgtttgaagtgttatgagaatagagagg

SEQ ID NO: 743 - DNA, 345 bp, Homo sapiens
tatgttattggtaaagcttcaggtcaataaaaggctattactagttaagtttgggggcagttaaaagttttatgcaaatttttgaacgcacagggggtcagtgccccaatccccacatcttttaaaggtcaattgtatatgtttgtttgatctcacaagagagacaatgtttccacttaaatagggaattaagtttcatgacgacttcatttgattacttaatttcaagcctcgtctgcaactgtgaatatttactgagagtccgttgtgtaccagccactattttaggcactgaggatacaaagaatagagaaacagtccctactttcagatattttatggagt

SEQ ID NO: 744 - DNA, 232 bp, Homo sapiens
  misc_feature 182: n = A,T,C or G
aaccagtaactagatggcaatcaggtctgttactgaagatggaaaaactatacttaagtttgtataacaatctttcataacatggcttcacagaaaagaagtataaaaaggattccttggttgaaaaagagtgctcttttcccttcattatttaagattaggacaaatttataaaacagganactctctttcataggaagtcaatttacagacttccatcaagcccttagag

SEQ ID NO: 745 - DNA, 337 bp, Homo sapiens
acagggccctgctactggtttgctggtgtgcctaggccttccctctgccttttcccaagcaggagaaagccatcactacaggaactcatactgaaccaccagaccacattcgcgcaggtccctgtactaaaggccagtccatctgagctcccagggtaggagagcagagctcagaggctgtgtcattcacatacccacccacctgcagagggcctctctgggtcatcagtggtcctccatcctatgaggggcaatgagcttccacagagcacaggtggaagctgctggtgtccctaggggctggagcactgagtttcatactagaatctgatataga

SEQ ID NO: 746 - DNA, 389 bp, Homo sapiens
agaatactaggtattaagtaaatattgtttgagtagataaaagacattagtgttaagcaataaccctacattcttaaaaaagagagagttttattaaattgctaggaacttaaaatttttggatctcacattccaaatgcataacacaagattttgctttcagtgtgtatcactcaaaattaagctagtaacaggtaaactagctatgttccctattcttatttcttggatatgaggagaggaaacacatgcagcaggaaagaaaaaggtgactaacaattactaaatttcgagagtaaattggattgttttgctctgtgcaactataaaatggtgattaacaaacaggtgctaaatgttaatgaagtatatgagattaaaaataaaat

SEQ ID NO: 747 - DNA, 261 bp, Homo sapiens
aacccaactgatcccacagcataatcattgtcatattttgcaatatcaattgttaggtgataatttagtagtagggagatagcaacacctccagcagtgtctatgatagtatgagtgggtagtctagtttagtcccagattgaaagaggtctgataaccatgttaattagattaggcctcaggcaattttacagtactgttcattgtaagacccaatagatatagctgtgatctaacagggaatgataaagaccaacaagc

SEQ ID NO: 748 - DNA, 114 bp, Homo sapiens
atagaagtccttttgagtgctggattttctttatttaggattcttttattccatcttggttccagcttttaacattttaaggacattgcatagaagttatttagggttaggctg

SEQ ID NO: 749 - DNA, 434 bp, Homo sapiens
gacataagggggaggaggtgagtgccagatgcctccaatctgccatgttgaactgcctctgtatttctcatttttaaattgatatataacacatttacaacacagtacacaagtcttaaatatatagttcaagagattttgacatatgggccaggcacagtgactcacacctgtaatcccagcactttgggaggccgaggagggcagatcacttaaggtcaggagttccagaccagcctgtccaacatggtgaaacccgtctctactaaaaatacaaaaaaattagccaggcatggtggcatgcacctgtaatcccagctgctcgggaggctgaggcaggagaatcacttgaacctgggaggtggaggtcgcagtgagccaagattgcaccactgcattccagcctgggaacacagcgagactccgtctccaat

SEQ ID NO: 750 - DNA, 253 bp, Homo sapiens
gggagaccgcctgggctcccagcctggctctcagtccagcggagtgaccttaagcaagtcatgcatcctgatgggactgcagatgcctccccaaaatggaactacgggggaggatggatggatggaatgaatgaatgaacgcatgacttattcaacaaccattagccaaggccctacatgctctccctgttccaggtgccagaaagggcaatggaaaaacaaagaggctcctgcccttgaggaacatgggacg

SEQ ID NO: 751 - DNA, 456 bp, Homo sapiens
taggtagaggtttaccttccctgcttggaaagcttctattagtgccacaattcatgggcttatggaatgccttgttttatcaccatgtatcacaaatatctttgagcaagaaagtaattttattatgagagaagtgtggcagcagagtcatgcccatggaattaactgatcttacccatcactcaggaacagctagtttgataggatagaggaaagtatgcagaaggatcaatcgtggtgctggctgagagaaaacccctgtaaggatgtagtataggactcaacccagtcaccattatatgttgtcatctactcaatattcagaatgcatgggcctgtgaaccaagaggcagaggtaggagtggctcttctattattcctaataactctcttgaaagtttttttctctacaactttgtctctattatattgtccctataggattggacttggtga

SEQ ID NO: 752 - DNA, 416 bp, Homo sapiens
agatccaaccttgctctaatatgacttataaaaggcttacgggaaatatggctggtttcactgttaatgattcccctctcctttcttccctctcttcatagcaggctttattgcaagaaaacttacaggaggcaaagtgttcaagtgtaaagaacgatacactgactatccagatatgagaataatttactctgtttccttgaagagattacaccacaaaatagataagttagtaggtaaagaactgctttcttccaaccaaaaaaaaggagaaaggtggtttttagtagttttagttttgccaaaactaccgaagttgaagacttcccaaaactactaaaggaagactgaagtggaaggactgcttgaggctaggggtttgagacccggctgagcaacatagcagggcagggagt

SEQ ID NO: 753 - DNA, 502 bp, Homo sapiens
accatgagttactatttagtagccacttgaacagcagatttacatctgattcaacatgtaataatcattcaaaaccattaactacatgaatacaaaaataattattcctatacccagtaaaaactgacaattaggaggcattacaattcctgtctttaaattctgactccttgaagtctatactagacatgcccaggaaaatgctaaaaccggcctggacagctctggccatgatgcacatagtaacggccacctattttgccatcacggatgtgttgtaggattaaaaatagacttatgcaagtgacaattacaagccatttataactataaaacttaacaaaatagctgccagtttgctgaatctgaaaaagaaacctgtcacatttactgaattagtttaaccatagaattcagatgttaaaagaaactagactaaaggaagaacttctacaagctctcctgtcataagatttttacagtttctcttgactggaaacat

SEQ ID NO: 754 - DNA, 507 bp, Homo sapiens
cggagcatttctttccttgctgccacctcaggaaggggcgtattctgccagggtcaaatgcaagtacgagcagccactccagcctgtgtgagctgtctcgagtctcttgctattaaggaagaggaattaagaggaactcaggaagaggtagttcactgaatagaagcctgttttgcagatggtgatatccagtcaggagtatttttaatcactgtctacagagacacctacatacacacacgggtggggaatgaacccaaagtttttaggtgaagtctctcagggcccacccgtgccacagaccttcctcggttgcagagattctgggcaaagcatctgtgctctcatgagattatcctggggagatttagaagaattttgtggccagtcccaagctgtgctgataatttttaacacctaatgctactaccaatacttttgttaatacaggaaagactggctgggcgcggtggctcatccctatctctacaaaaaaaaaaaaaaaaa

SEQ ID NO: 755 - DNA, 192 bp, Homo sapiens
agctagtgttgtgccttttacatattagagcatcataaaatgttttgttcttgtgttttttatttaactctctgctcatagccattcatacctgactatagtctatttacttggatctcttttctatgtgcctgtattatctatttgtttgctttcttgcttttgagttgacttattgtactttaggattca

SEQ ID NO: 756 - DNA, 337 bp, Homo sapiens
gttcattcctgggatcctatcatttgaacagcattgtacataacttgggggtatgtgtgcaggattacccaagaataacttaagtagaagaaacaagaaagggaatcttgtatatttttgttgatagttcatgtttttcccccagccacaattttaccggaagggtgacaggaaggctttaccaacctgtctctccctccaaaagagcagaatcctcccaccgccctgccctccccaccgagtcctgtggccattcagagcggccacatgacttttaaaaccactgcgaaaatttccccaaagcataggtggctttgtgtgtgtgcgatttgggggc

SEQ ID NO: 757 - DNA, 471 bp, Homo sapiens
cgtagaaatcattaaccacaacccacaatatgactaaatgtaatttatataatgctactatcacagcaaggtatttcttaattatttgggcattttaaatatttagcctaactacagactaaatttgaggaactgtcctgaatattagcaaaatggcttttctaaaactgaaaatttcattaagagactagatatttatacatgtgtagaaactgtgcattttcgattgtgcccctaaaggaacacaatattcttctgtgagatgggttttagggtggcataaagagcaaatgaggccaggtgtggtggctcatgcctgtaatcccagcactttgggaggccaaggcaggcagatcaactgaggtcaggcgttttgagaccagcctgaccaacatggtgaaaccccatctgtactaaaaatacaaaaattcagccaggcatggtggcatgtgcctgtaatcccagctactc

SEQ ID NO: 758 - DNA, 444 bp, Homo sapiens
cagcaagatagctgaccgtcttcttttgattctaaggcacgtattttaagttgcgagatttttgaaattagagtgtattttataattaatgtggaacattaaatttgtccccctctcccctgaaggctgtttttggtagacaggtcattttacaattagcggtgtcttagaactgagagaatatggaactgggagaataaagccttttatgtacccaggagaaaggactgggggctggctaggccatcgcagctcaccagcaatcccacagctagtgacatgcatttcctggcattggggagcacagttaacatctcttattcctattttcaaaaaatctggtgttataactgagcctcattcaaattgcagctgaaatcctcgataattctaactgattgtaaaatatgccaagaatctctctgaatttgtgggagggtaata

SEQ ID NO: 759 - DNA, 550 bp, Homo sapiens
ccgccacccttccctcttctccagccagacgcccctgggctctcttccccttcccagtgtggacattcttgacctttattttcagccctcatgtggcactgtccctgtctattttctgcagtagcttcttgcatttagaaaaaattatgtttgaaatgttattatcaaagataggggagaggctcctaggttataaaaaatacttgaagttgcaaccagctattaattgaaaaccaaaaataggccagctgcggtggctcacggctgtaatcccagcactctgggaggccgaagcaggtggatcacttgaggtcaggagtttgagaccagcctggccaacatggcgaaaccctgtctctactaaaaatataaaaattagctgggcgttctggcatgtgcctgtaatcccagctgctcgggaggctgaggcaggagaattgcttgaatttgggaggcaaagattgcagtgagctgagatcacaccattgtacttcagtctgggtaaagagctgagatcgcaccattgcactccagcctgggtaaagagctg

SEQ ID NO: 760 - DNA, 508 bp, Homo sapiens
aaatctttcatgaagggagtgagacggctacctcttccattttatacacagagaaaattatttttgctcatctttcacctatggagtctaccactacttgaaaaccagcttccaacctctctgagttttcagtgaatgatctgaagaggaaaggactgaagcaaggaggttaggatgcagcatgcttattttcaatgtaatgtaattaattaattagaaatctgattcggaatgtctcctgtgtacatcagaataaaattactaataataaatataaaaacctaccatctctctcctcaaatactgtgtcttcatagaggaattgtctgatctactctaaaataatcagcacccaaatttattcattctctttcctctttttctcctttaatgtctttgtatttctcatctaaaattatataatttatttattcttcttatctactgccttagtcgctggaatgtaaactccatgaagactttggcattgtctacattttttactcta

SEQ ID NO: 761 - DNA, 483 bp, Homo sapiens
gtatcctgctggaagatagagactgtaaattccaaaaacaaaaacaagacaggtggggcgtggtggctcatacctgtaatcccagcactttgagaggctgagacaggtggatcacttgagctcaggagtttgagacagcctgggcaacatggtgaaatccagtttttaccacaaacacaaaaaattagctggctgtggtggcactcgcctgtagtcccagctacttgagaggctgaggtgggaagattgcttgagcctgggaggcggaggttgcggtgagctgcgatcgggctactgcattccatcctgggcaacagagtgagaccctatctcaacaaacaaacaaagcacagagaagaaagtatgtattaaatttttatctaaattaaaaaataaacgctttcctttttttgcatggagtcttttttatgtttcatattaccatattctatttaccactatcagtttattagaaattcatct

SEQ ID NO: 762 - DNA, 307 bp, Homo sapiens
agacacagaaggggtgagttatgagctatgtggaggggtgatgggtagcaggcaagatgacaatgataataagcaggcaagggagaggggcaacgagggactgtggaccactcagggctagtgtagaagagacaaatgactgattatgacagaaggaggcttaggctaggattcctagaggggaggcctggcaagggactgagataacgttcttgtcttgtttgcttaatccttcagaggatggccccaatgtaaccagaactcacctctttcttccttctctcttaactccatggacctggcatac

SEQ ID NO: 763 - DNA, 399 bp, Homo sapiens
catcctttaccaccacctctactttacctggcagtgagcgcttctttggatgtctgggaagattcactagagtacagtccatgagggctttcatgcactgccgattcttagtcctactcagacatctattctctacagatacttgtagaatgaatgaatgaatgagtgaatgaatgaagaaacaatcaaatatcatgagattctccgtagggaggaagatgtggggctatcctcagacactctctgcaccctgcctcagccatttcactgtagggaatccaagacactacagcataagcacatctgtgaggctaccaactcccatgattctggactgacagcaggccacaggtcccttcctgtcttgattgatatcccccacagcaccaaagggagaac

SEQ ID NO: 764 - DNA, 507 bp, Homo sapiens
gtggaaaaggctgctagcgtacagtaggaaactgtgggaaggaggatttagggaattgtaaagactagcccatcttaagtagggttagtgctcctggtatgtggaatgcctttttattccttgcctaggagtgagtggcaatgctctgctatgtagatcagtatttcagtcctgaaccaccagggccaagaatttgccatcctgctggggataataaccggcaggatgtgacatattacaatcaatgtgcatagagtaccttccttatgtcagcatgatccaaacactttacatgatgaattactttattctcacagcaaccttgtgaggtggatgccatgattcattatttatagatgaggaagctaaacacagaatttaatccatctgtggaagatcacgcagctaatacatgatagaacttggatttgaactcaggcagccttgctgaaagtcatgttctactgcctgagactgaaataatattatatggatggagtgctcttg

SEQ ID NO: 765 - DNA, 502 bp, Homo sapiens
aacataatttttcattctgattctaaagctttcacaagaaagacatttatcatatccagttccattaaaatattcacttcttttaatccacttcaatggtgaaaagaaaaagtaaattacatttttcacatttccaaacaccatccatttccatgacacacacaggtatctccttgccaagaaaagtcagtggttgtctgttttggaagggaagtaagaaagtggcattttttatttcctgaagaaaaaaaaattaaataggtcaaatacataaaacttccatgaaaagagccacacttcatttcagccattaaagaaaaatgtgtttaaattccccaaaggaaccctatgctctacactgggaaaggcttattcactgctgactttcaagaaccagacatgacttatcacaccgtgtaaccaaggcactgaatggaactgaaaccccaaggagtcttcttatctttctgctttctagataccaggaaaaaaaaagaagcag

SEQ ID NO: 766 - DNA, 572 bp, Homo sapiens
ggtttgaaacctacaggaaaatattggagtaaaaaaaatatagaaaatcaaacatcaaaggaaatgctggaagtgtgggaattgataaaaggagcacaggaaaagtgtgcagagcgttgttacccaaagtgctgtgggaattttatacacatatgaatacagctcacaaaacacacaaatatttttgcttccctggatcatttactggagtcttttacatacacattctgaagtataaggtatgcagaattttctaagcgtatcatagaattccattccaagaatacatttcaggaaaactattgtcaatcagggaaacattggtgcagaatagtaagaaaagaaatacccattaagactagtagttacacagtggacatgaaaatactaggcagcaaggagttattaaaaagaaagcatgggctgggcattgtggctcatgcctataatcccaggatcacctgaggttgggagtttgagaccagcctgaccaacatgaagaaaccccatctctactaaaaatacaaaattagctgggcatggtggcacttgcttgtaatcgcagctactcg

SEQ ID NO: 767 - DNA, 448 bp, Homo sapiens
gttgcccaggctggaatgcaatggcatgagagacaacctcattacaacctccgcctcccaggttcaagcaattctcttgcctcagcctcccaagtagctgggattacaggcacgtgccaccacacccggctaattttttgtatttttagtagagacggggtttcaccatgttggccagcctggtctcgaactccttacctcaggtgatccacccacgttggccaccaaaagtgctgggattacaggcgtgagccaccgtgcccggccttcagttgagggttttatgaggagtcaatgaaattattaagtgaggaacacagtgcagtttataatggggactcactcaattcgtgttggttgcctttgccctgctccatatgagttgaccaaggacccatgtgggcaccccactgtctctccagcacacttgactgctgtgctttctgac

SEQ ID NO: 768 - DNA, 557 bp, Homo sapiens
gtaagccaaacgcaggaccttataaatccccactgaaaggaaagtagcaaaataacattgccctttgaatgccttgtccgctctaaacaccaactgtaaaagcttcctatctggcttcttcctgtaacttatttctttacttacttatccgtaccccctgcccaccaacccccatcccacgatttcctattgcctttatggagcatagcacaattatatgctctagcccaagatttgcaattaagtattctttaaaaaaatgcaatatattttcaaagtcaccctcaaaaatagggactttgctttatagtctccagctctcaaagaagacagttaccagtgggtatccatgacacctgatgtgctgggccagtttattttcttattttaatgcctacctttaaaacaacctaggttacgtgagtgcatagttagacttacgtcccagtgttctacgacaatagctgtatttcaacaaatgactaataagttgggttgtctttgtcttgtggatgctgaggcacttcagtcacagatgctcaatgctaccttactga

SEQ ID NO: 769 - DNA, 497 bp, Homo sapiens
acctcttcacaaaaacatttattaattacaaaaaggaaaattataactttacagaagtcctggcagatacttaattcaaatgatcaaaatgaacacaactaatagggcaaattgaaatcatgagccactagatatgatgtgatgataataatacattatttctgtgatattctcggaaaagattcttgattataatcatgaggaaacaacagacaaacccaaattttaaaacattccacaaaaacacaaactgaggaacattccacaaaggaataatcttcaaaagtgacaaatagtggaagacagaccgctaggaacaccaataatcccttcccttgagttgggcagaacctacccacttttaacaaacttttaattacttacttttaaccagtaagatatgggaaagttgatgggatatcagtcccatcattacattatggcatatttaagattccctcttgctagcagagatgctagaaagactccacctcact

SEQ ID NO: 770 - DNA, 518 bp, Homo sapiens
atagatcaaccttctcactcgtacctcaccttcatttcctaaaggaactttacaataatcttcacctgtgataaaccctttttaatgttagcatttactttgtgtaaccaaaatgaaaaccagtttgcaatatagtctattattaagcagaaggaaactctactgtcttaattactaactaaatccatgaaataaattgaattgtgttctaaaagctattcatttaaaaaataaataaaagattagagcaactataaaaattgtgcttaaaaccctatgaaaattaatttccaggtagttaccttgattacaatcaataacattgcaaaattccctgacgttgttttcattgatttcagcttgctttctttcaataaatgcagatattcgtctgtcaatctacaaacaacaagttttaacagcgtaaacataagattttttaaaataataccctctcgcccccgccaaaaaaccttcttacttctgctttccagcctttatctgaactacttctggat

SEQ ID NO: 771 - DNA, 469 bp, Homo sapiens
attagaactatgaacctctacattcaggatttttaataaagatcaagagaccaaatagtgcttgcccttttcattcaatgtgcaagggcaagaagaagttaatgataaaggtaacatacacagtggctacttgaatgacagcagttcattcctgtgtactaagttcctgtttgaactgtctttaggtgaatcgctttgaggttttggcagtcagcctctaggtatttggcattaaaccaatcatagcttaaaacttgggaccaagcttgctattaaagtaggggttcaggccaggcacggtgactcatgcctgtaatcccagcactttgggaggctgaggcgggcagatcacttgaggtcaggagttccagaccagcctggccaacgtggtgaaacccagtctctgctaaaaaacacaaaaattagctgggcgtggaggcgtgtgcctgtaatgccagcactttttggg

SEQ ID NO: 772 - DNA, 282 bp, Homo sapiens
tcattgtgtttgtggcaaaggaggtatgtcaaagcagggacctttcgttttgaccaaaaatgcatgcatgcttggaaaatctcatctgattagtaatgattaatggcacaaataaaatacatcattgtgattattatgaatagtattactttagctgttattattttggtgtttatgtttctcaaatatatctgcttatatatgtttcctttgctacactcttgtttgattgattctaatgaaatatatacacatacaccatttgcacatttttcacaattg

SEQ ID NO: 773 - DNA, 145 bp, Homo sapiens
aacctagaaggtctactccttagaaggtctataacctagcagtaagacctacatccttggagtaaggaccacttccaaaagtctctaccacaggtacgagaactatatctttggattaagagaaaactggagaaataccagctta

SEQ ID NO: 774 - DNA, 513 bp, Homo sapiens
gagggactgtggcctagttttaaatgattttaatcactgattgtattaaagtgatctagcacagatagtacccacaaccactattaagaaaaggtaaatcatctctggacaaatataatatcagcccaggcctcaaaattatctctataatttttcatagacaatgtttagaaaacaacttaaaatatctaggcacataagactgcaaatttaaaaaactatataagatatgacaaaacagacctacagggaagccagataatttagttaatcagacatagattttaaaataaccattgttataagagaaataagttctactgttagacagttctgtagaatgactatagtcaataatatatagtttcaaatagctagaaggaagatattgaatgttcacacacaaaaaaatggtaagtgtttgagatgatggataagcttattaccctgatctgatcactatatattatatgtaccatagcatcactatgtgtcccataaatatgtacaatt

SEQ ID NO: 775 - DNA, 375 bp, Homo sapiens
agtgtattaataacagaacagctgtaaccatcaattcctagacatattcttctggtgactagaaatcctggtaccagggttctggttataggtttgtacaaaaccataggactttgggggtcttgtttttttctcacctgcgatttaaactacaatttctctagcacacaatttaggttaatataccctgaatccaagaaaaattaatattaaaatatgcatatagcattttttgctaactcaattttactttcgaacacaaatcattcaacccaaataaataatattcatgagtaacgaaatgctaacatgggttactaggataaataaattgttatttgcatgtcactgaattagttttcaatttataatcag

SEQ ID NO: 776 - DNA, 464 bp, Homo sapiens
gtttaagatctgggtgctggcatggtccatttctggtgaggtccaccttctaggctgcaaacttctgacttcttgttgtagcctcatgtggtgaagagcagagaggagaaacaagctctctcgttactataatgagggcactaatctcattcatgagagctctgcccttatgacttaatctaatcctcattacctcctgaagtccacagctccttatccatcagggggtaaggtttcaacatatgaattctggggtacacagacattctgttcataacaggtatgtaatgacatttactttctaaatggtatttgaatgttgttttgtttattgaataaccataaaccaaggagttaagggttgcagatgctgtaaaccttatttaacagatgaagcaggctgggtgctgtggctcacgtataatcccagcattttgggtggctgaggcaggcagatcacctga

SEQ ID NO: 777 - DNA, 370 bp, Homo sapiens
agcacattaaccagatgttatgctgagctgtatctgcaaaattttaaaactaaattggctccttacacatatgttattcaagatcagttctctaaatcttaatcacaagacattaccattgacaggaccaggtgttgcatcaagaaatctgggggttaaagtaaattttgattttaatgtgtgtgtgtgtgtgtgtgtaagaaaaattactttcatctccttaaaaaataataaagtggtaagtagagatggtctgtgcatgtgtgttatgtatatcaagtattaatcatagcatatataccagaatgcatgtgcttagtaaatgcttatacaaaagctgagtcatatatgaatagcacctcatcctagc

SEQ ID NO: 778 - DNA, 395 bp, Homo sapiens
gacagaagggtttagacataataaactggcagtgatgaaattttgcttcctccaatcctcaagtattattaaagaaggcacttctcctgaggaagagttctgaggagcattggtaaagttttgaagtcatccaggtgggaaattcatgacaagccttcacctcttagaactggaatttggaatatcttgaattagaatttggaatattttaggattaaaatttggaacattttaggattagaatttggaactaaaatagttgtcatagggagttatgttaacgtatttatttgcattggaaaatgaagaatagagttacaatgttgcttctgggcaaagacttgaacagacatttcccaaaagaagacatatgaatggccaaaaagcacatgaaa

SEQ ID NO: 779 - DNA, 76 bp, Homo sapiens
aagactcataatactaataaataaacgtaataatagaatccagggaatcataatagttgggctcagtgtatttttc

SEQ ID NO: 780 - DNA, 550 bp, Homo sapiens
tagtcccagttactcaggaggctgaagcacaagaatcgcttgaacccgggaggtggaggtggcagttagccgagatcacaccactgcactctagcctgagtgacagagcaagactctgtctaaaaaataaaaaaagaaagctgctttctgaagacagaggagcttccacaactgtctttttccagcatttaaaaatcttccactaaaccatctggtctctcttagcccacaccttctccagaccgaagcaaaactgttagcactttttataagaactatcaagcataagaggttatttaccttgaagggataatcatcaggatatagtcagtgatcgtttattcacatatcaaactaaattcaacagatagctatgaaatataggctgggcacggtgactcaggcctgtaaacccagcactttgggaggccgaggtgggcagatcacctgaggtcaagagttcaagaccagcctggacaacatggcaaaaccccatctctactaaaaaatacaaaaattagccaggcatgatggcattcatctgtaatcc

SEQ ID NO: 781 - DNA, 543 bp, Homo sapiens
aaactgattttccaacttatcaatacagtatgaacatttctccaagtcaattaacaaaaagaggaaatatcactttaaatgaatgcacagtttctctatatagagaaaaataatatgtgtgcatatatgcatgtgtaaatatatgtatatgactaaattctacaagtttttaaactatctttttactgatggagactcatcatggtttttttccccctgtactacaaacaaagtagccataaacattctaacattctggagtatggtatcccttatatgaaatgcttgggaccaaaaatattgtagattttggatttttttcaaattttgaaatattttcatatcataacatgatatgttaggaatgagacccaatctaaatttatttacattccctacatatagtatacatgtagcctgaaggtaattttatgtatttgtaaaattttgtgcaagaaacaaaattttgactgtcttttggctgtgaccagtcatataatgtcatatgtgaaatttttcacctgtggcatcatatcagtgctc

SEQ ID NO: 782 - DNA, 462 bp, Homo sapiens
attaggattctagagctttaggaaattgtacatagtaacacaaatggtatatagcaaactaaggcttaaaatctgagttctctgactccaaagtctgaatttataaccctctcaccatatgtccatgtgaaagtaagaaaactcacacgggataaactgaacattaatcctgactgtcccaactctgaagtttgcatacatgtctgaatttctcaggcaaagtaggacacttcttgaatttcagtcatcgctccattttagacagtgatacttaaatggaaaatgtctaagttgaaatatagaactataaattaggccaaagtatttattaaaaacacaaactgaatcagttcaggatccttatataagccagctctagaaagcaacaaaagtacagctcacatatttctgcaggaagcaagatatattttgttctcccaaacatgaatagcaatactgcat

SEQ ID NO: 783 - DNA, 396 bp, Homo sapiens
gaccaggacggcacatactgtatttgtatatggcaccaatggaagtgccacagttgcctccaggaaagggcagcatgccagggaaacagggttgagctgcctgcctaactcagggctaccaacacacaatgaaagaagggttctgcagaaaaattttctgctgccagatgaagccaaacaaacaaacaaaaacaaaaatacctctctggtcccttcctctacctctacttgtggaacaaaagcaaagcctattaatagtaaacttttccatttttctccatatttactaaatgattttttaaatggtctcataaaacccgcctctaatcccaatgccaaaaaccaaccaaacaaacaaaaataccacaaatctttctctataagaatgaacaagtg

SEQ ID NO: 784 - DNA, 244 bp, Homo sapiens
agttttaagttgggtggccaggaatgctcgaccaagcggacttgaaaagctaagggctgaacatgagaatatcacagggaaatgcaccccaaacgctaggtctttccaccatatctgcccctggggtctcccatctcggtaatggcagctccactctcctccatcatccctgattccctgcctcctctcattcccccatccaaccagcattcctgccccaggacccttgcacttacccttacct

SEQ ID NO: 785 - DNA, 500 bp, Homo sapiens
gttgctttccaattccctggacatttcctggaactatgtcggcagtacctggattatcaacacccttcatagatgccattgtctccctacccaaaccagaaactgctgctgaaataactttgacaaatatttgttttataatctcattctttagtttaaagatacaaaagctccctattgccaaagagattttttaaatgtaagctaacatacatctggccatttatgtaatcaactccatcctttcttctttcctgtacaaatctacctctggccaagtaaatctatttccaaactccaatcagcatgatttatgtagcctcacaagcatttctgtttttagctgcatgccagctccactgcctgaaatattccttctcctttcttcatcaatgaatattcactggcacttcaaaaacaaggtcaaattttctcttctcttttacaggatgtgctccttgacctatgcctcctgactgacaccactgctctaccctcag

SEQ ID NO: 786 - DNA, 496 bp, Homo sapiens
tctttgatgtgtactctggcacttagatgacatttgagcatctgactatcctagtggaaactcaaaaagcggcagtgtttgctaactgattattatcttttgccttccaacaataaacacattgttatgccattgacccatagtaaacaaaaataaaagtaatagttgaagaaaataaaatgtaacaactccatgtcactgtgctatcataatcatgtcaaagacaaaagcatacacatctcaaatgtgtcctacaagatgttaacgcacatgtccaccactgtgctggctagtaccagtaccatctcaaaaggcatttgtcatgttactgattcttctatgagacagttcctaaataacagcaaggttgttaacctgcattattaatctctctggctaggttaacaataaactctgaaaatagaatgaagaagatattgtattagtttgttcttacactgctataaagaactccctgaaactgggtaatttggga

SEQ ID NO: 787 - DNA, 92 bp, Homo sapiens
tgcatacaaggcttacctacaattgaccatttttgcactaaatgcttttttaaagtaacaagctaatatcttcttaatataataatatacat

SEQ ID NO: 788 - DNA, 483 bp, Homo sapiens
ttctggtgagaggcaagcttcctgacaacgccatgctgagtgtttgattggccggccagacctgttcataaagcatttcacaaaccgtcctttcttacgcaaactagctgggaataaacaggccccctgtgggtcttagaactaaagcaaatatgaacctcaaagaacaaaggaaaatcattactggtggcaggaatatgagagtgcttccacaatactatttcacaagtcttttctacatgggcttcagtcacaaaggtggtttgacattcactgagcagcatgggaacaattctagaacacttattctatccctgagctatttctgggataaaaatattgttaaaatacggctgggcaccgtggctcatgcctgtaatcccagcactttgagaggctgaggcaggcagatcacctgaggtcaggagcttgagaccagcctggccaacatggtgaaaccccatctctactaaaaatacaaaa

SEQ ID NO: 789 - DNA, 101 bp, Homo sapiens
atgagggacaacagttggatccataaagtgaaaagataaactttctctgccatttactaataaagtcagtggaatgaactatctgatgattatggcagctc

SEQ ID NO: 790 - DNA, 210 bp, Homo sapiens
tttgggtatatccatctcttcctgtcctaagggatgctggtcagtgtaccagaagtaaaacaaattggcttctatggctgcacaccaggacaggtcttgattacatgaaggaccttactaaacacccttccatcctaacaaaaatatgtggagcatttgaccattgcacagggatgagttcccactttactcccacaaatgtgatttgtg

SEQ ID NO: 791 - DNA, 538 bp, Homo sapiens
ttactttcagtgactgtgacataaaagataacagaaactcttctgcaccacattgcttacttttacaataattcaagtattgggtaccagaaaccattaccaacaagcaagttccagtacctttggaggcacaaacgaacaaatgacactctctggagtaacttccaatatatttgcaccatgaaaaatataagaatctcagaatatacataaatcaaaagaaagtttttatctacattaccagagattttaacactaaatctactgaatattttccttaccaacacaataatctatgccactgaacattactatttggctggtcactaatatggtggcctataatgcaaagagccattccaataaaaccttcccactatgactgcactgctcttaatggttttatttctaggaacattgcatggcaggagatgccacttccctcttcctcctatcagactttgcatttctttgatataaagcaccattcataaccatctttttgttttctcccattccttccctttgcaataacaaa

SEQ ID NO: 792 - DNA, 298 bp, Homo sapiens
ttactaactgcagaaagcagtgtctgcacctcaagtaactgattatttagtgcccttttctgtgttttcttctatgtacaatggaattatctaaagctatcttatagttaatatttaagtgataaatatttttatatcatcatcaacacatttattgtggcttcattaaacaagactatgtcacactgtcttaaagagattataggtatcttagtgagagctagtgtttaaataataacttgtccagatcttccagtccatcatgtagtatcatttctctttgcatagaaacaaatac

SEQ ID NO: 793 - DNA, 402 bp, Homo sapiens
aaattgtggttacactaatacaatttagaggagatcatcagtttgtcacaggttctcaagacatgaaaatccaccagagaggctctattagactcaatgcatcatttcacggaaggacatgtagagatccttcacgagaaaatcacttctttccttctttccttcctcttttcttttcttttcttcttttcttcttcctttctttctctttctttctttctttccttctttctttctttccttctttctttcttgacagagtctcactctatcgcccaggcttggtgtgcaatggtgctacctcggctcactacaacctctgccgcccaggttcaagcaattctcctgcctcagcctcccgagtagctgggattacaggcgcctgccaccacgcccagctac

SEQ ID NO: 794 - DNA, 529 bp, Homo sapiens
aatgatgggttatagctatatgcccaaatatttaagcaaaacacgacaaaagaagggtgaagagaccttttatctaatggccaaagtagaaggtagcactcataaaatatactgttttgtgtaataagtgaatggaatctttacacaattttttgctagggttaattgtttaggaaacttttctaattggcaactacttcatagaaaaacttgatccagacctatatgtggaacttccctttatattaacttgctgaaattattaaagttaaaagcttgtttttccaggttgatactctcaagacctacaaagaccagcacattgaagcaatcagttgattaccgtcatgatgcctgcatatgtttgtttcatgtcagacacacctgaggtctgtaattgaatacataaagagtgcaaccatggaagaaacaaggttggcttgtggtgttcctatggcagcatcgacacagcttcaagtgcaccatgagcatgagcactgccaagaaaatatattggctctcaactctc

SEQ ID NO: 795 - DNA, 458 bp, Homo sapiens
tttgataacaattaagagtgggtttccaggttccttgggactctattttagtgttcgtttccactccagattagacctttccaaatactctcagaaactttagatgtcctccaatcaaactctgctctcttgaaaagactgccagcagtcttttatacctctctatattgccattccagaaatactggtatttggggtcatgtttctaactagggaattgagagttacagatagcataaggagtagtataaggatattgcaacaaggattttgtaaaggatccctgagtaagggatctcaagccttagatggaagaaatatatcatgtttgcatgtgtgttagtgtgttagtgtgtgtgtgtgtgtgtgtgtgtgtgtctcatccagcttgtggccctatgagccctgtacagaaaatggtagaggctgagaacatagacattcccacatttaataat

SEQ ID NO: 796 - DNA, 541 bp, Homo sapiens
gataggaggggcatgctgcttgccaccatcttacagggaaagaagctgagaaacctagtggttaagagactcgtcttgtgttgcccaatgaatgaaccaagcagcacctttcatttaaccattaatgtggttgtttggaaatagctcttgctcctaggaaagattggaggcagagcaggaaaactcacttttgtaagacgagttctcagctggagttgggacagtctcattctctctgtgtccggaaccgaactcatcaacttcctgccagagttcacaatctatctagctgctcaacttcgacctctccttctctctcacttctaatctagcaccaactcctggcaagtctactctctaaatgtctcccaatacttctccccaccccactgccatcgtcatcgctagagacccatgatctcttgcctggattacaggcatcccagccttcagactcgccctctccaatctactttgtagtctgttgtgacagtaattcttctaaagcgacatcagataaagactgtacttacttttctat

SEQ ID NO: 797 - DNA, 417 bp, Homo sapiens
tggttattatttgtaactcacagggcagaataacagctctagagctcaatttatctggaggagattcagcacacctgcttctctttttccactggcatggctcttggtgcaaatttgtatttatgtaatagttagaaattaaacatcagcaccaacagaaaaatattcaacgccctttattaaacatcaaacaactttgtcaatgggaaaagctgccccaactgttttagatcttacctctcaacattgttgtcaaagtacctttccactctctggtagtgtctttgagagggtttgtctattggacttaaaactacatacacaaaggtaagataaaggttatttacacagccaatcttaaaagtagaatatcagcactctttaatcttcccatttttttgtagagacacgatctat

SEQ ID NO: 798 - DNA, 474 bp, Homo sapiens
accacctgggtgacagagcgacagagcaagactctgtttcaaaaaacaaaaaacagaaacaaataataacaccagttgtcttatgtgtttaataatatcttttgtaaattttagtgagttatcttggaaggtagtacctcataaaaagtagttgaaattcggagttttttcttttgctaactttgtgtaatattaaagtttagtttaattaaagtagtacatatagattttcttctaaagagtttgtctattctatttgtgtgtgtgtgtgtgtgtgtgtgtatataatatatatatgcttagaaaagtacctagaaatatgcctctctactgttaatgatggcatgatttgaaaagcttaatttttttctttatgtatgtctacatctcttatattttaaaatgatgaacatgtactatttaacaaaattaaatctctggctagatgcagtggctcacatctgtaatcccagc

SEQ ID NO: 799 - DNA, 605 bp, Homo sapiens
catcctttaccaccacctctactttacctggcagtgagcgcttctttggatgtctgggaagattcactagagtacagtccatgagggctttcatgcactgccgattcttagtcctactcagacatctattctctacagatacttgtagaatgaatgaatgaatgagtgaatgaatgaagaaacaatcaaatatcatgagattctccgtagggaggaagatgtggggctatcctcagacactctctgcaccctgcctcagccatttcactgtagggaatccaagacactacagcataagcacatctgtgaggctaccaactcccatgattctggactgacagcaggccacaggtcccttcctgtcttgattgatatcccccacagcaccaaagggagaaccaggtgagtgtagaccctgtacaaatgcaaaagagctgttcttcccctcccctacacctttcctcccaagctcagatgaccttggctagcgccaggtataggaaatgtaactcattcagcaggggttgtccccaaaatacttccgtgtgacacctagactccagcttttctgtcttaacttgaaattaaagaattgggagaagact

SEQ ID NO: 800 - DNA, 551 bp, Homo sapiens
ttctgcttccacgtctacagcacgcgcctgccctggcatccatcatacagctcttttcctgtagcattattcaaagtaaattctgatacaagaaaattaggactaccttttcaagacaatcattttctaggttagataatatctgtgtactactggcattactgttctttccatctaaaaatcagccctcttaaatggtaccccttgaaaacaacttgaataaattaagtagtaccttgccagattctggaaatgcaaaacaaaaatgtcctagtattttagaccagtggtttccaacttttgtttatcccacagtcctagctattaaaaaaaaaaaagaaaaagggaagaaaagaaaagaaaagaaaaaggtccatctatctatggatctattatctactttcctccctatctatcaaccatctatcatccatctatcatctgtctatccacccattaactcatccatctagctgttatctatttacttatctacccatacatacatcatacatctatctatctatctacctatctttttatccatccat

SEQ ID NO: 801 - DNA, 557 bp, Homo sapiens
gcttgacatatgtagtttccagaaattttgtcagtgtttcttagaacttgtttaaggtgccatgaaatatagcagtgaaatgtaaagtgttggaattgtttttctaggaaaactcattgtagatggagagcaaggtatctaataggatgtggaagttataaataaatacaagaagacatgaggcagcagagagaaagagaaagtagcagagagaaagtgaaagtagcagagagaaagtagccaagagaaagtgatggtccattcatttgtttatgtactcaacatcttccagttactgcctactatgtgccaggcaatatgcttgatgtttgggggatatgttggtgaatgacagagacacatccctgtcctaacggaggtttcaccctactgggacacacaggcaagaaattagtcccactgttcacgggatatttcttataatcagattgctcacatttcagtagatatacagagaatactagaagatgtttacatcttattattgctccttatatatcctctgttcttttaattctctagtaatcctatttcac

SEQ ID NO: 802 - DNA, 576 bp, Homo sapiens
gattacaaccctgtaattaacaaatgcagctgcttgccactttcaagagatacactccaaacacaaggatataagtaaaaaaaagagaaaaatatatctgataaatattacgtaactatattaacattgaacaaaatagactttaaggcaacaaaaaagaccctgaggcaaaaagctgtaggagaaattgcataatgataaaagggtcagctcatcagggatatgtcacaagtcttaacttgattgcagctagtaacataggttcaatatatggaggcaaaaacaatcagaaagctgaagttctttatcaggagaagttgagtcctacagtcacatggaagattttaacacacatgacggtaactagtagcttagggagattgaaaaagaaaaacaaaacgcaacccaggatgaatacgaatctcagcaacgcaatttgaagcaataaacaaacacggaaacttgaacttaactacttgagaatacgcattcttttcaaatgttcagaaacttaaaaaattttttgaaataatctatgtttcaaagatgaaatcataatggaattagaatgataat

SEQ ID NO: 803 - DNA, 483 bp, Homo sapiens
gaggagccccagagtatctcaagggacttgcaggaactgcagaagaagctgtctctgctgatagactccttccagaataactcaaaggtcagtttccaatcactatgtataatggaaaatcccaatataacactagcataaacaagatagaaagttatttctttctccagtagaaggaatttggaggtaagtcaagaatctttctggcttaccgccctgccatgtctatgctgtgaccttcaaactccttgtctgagatgactgcaagagcatcagccattgtatccatctttcaggcaacaggatttgaggaggggggaagagagaagtgcaagccacctacaatttaaggaaacttctgggagtcgcacacaatacttccaattacatcccttaagccaacattgagtcatttgccactaatggcaaatgcaattctttagctggataaagaagtctgtgcaacagatatcatcctttttt

SEQ ID NO: 804 - DNA, 513 bp, Homo sapiens
gcaggacccatacctcatagacagccaggtcggtgcaggcataggggatgatgccgagcatattgggcaggtagccgcggtaaagggcgcgggtgccctctcgctgcaagatctgcctggcgcagtccagcagccccttgtactggcccgtccgacgcaaggtcaaccgcgtcttcagcacctgaggatggcggggaacaaggcagctcatttgattgaatcctgtcaatgaccctcggggtagccattgtccccaccctacaaacaaggaaaatgaggctcaggaaggcaaagagctgggtttcagacccggatctgtcagattccatggaatgctctctgaattttgagttctgaagcacaaatgctggcaaaggccaagagagtgagggaagaaggctcacgtctgtcttcccagccctttgggaggctgaggcgggaggatcgcttgaggccgggagttcgagaccagcctgggcaacatagcgagaccccatctttacaaaaaaatca

SEQ ID NO: 805 - DNA, 603 bp, Homo sapiens
acattaccttattcgattattcaattccttaactaaaatataatttagttgtaatttaaatcataattccttgaaaaagattgtttttcaaatataaggtattatctgttttataactctggctcactcctggtttctatgcactttttcttaacagcattttaagacattaattttaccttattgataatgcttcctttttgaaatctttccagcagtgaaattaccatgcaaagtataacttcaagtgtcaagaacgcaaacatgactaaaaatatattgctttacacatacaacaagtgtatgtgtttctgttttactggtttagaagatgtgtcacttgaatattcaaaattcagtgactttctcaatttcggagaattttaggatgtagttgttcaaggcgcttatttgatagataagggaaatcaagtgccaagaagttacatgatggtacaccaccactcaggctagggccatgacccatcatcgatctgctggttcttagcgctctgcctcacatcaagaccagtggaacagccacctgcatcatttgctgagtaagcatttgaacgtgaaattggatggaccctaaaagaaagt

SEQ ID NO: 806 - DNA, 652 bp, Homo sapiens
ttgagtagctaggactacaggcacgcagcaccacacccagctaatttttgtactttttgtagcgacagtatttcaccatgttgtccagactggtctcaaactcctgggctcaagcaatctacctgcctcggcttcccaaagtgctgggattatagggtgtgagccaatgcacccggacacacaatgtatcttttagggaatacagacatgtaggaaaactgtatagaaaggggatgatgagtgaatttcaggaagacagatacctctgagattagaggggaggatgagatcaaagaagagtacacagggggattcaaagtgatggtggcactccatttttaaatgaggtgatggatttacaggcttccttggatcattggtttgttgttggttttgaatcattagcttttataccatttgtattttataactattctctggcagctacttgtaataaaaataatttttaaacttgtaattttttatcattttccaattttttattataaatgtccccaaatttaaaaagtaatgtaagttacccagagactctggaggctaagataagaggatcgcttaagcccagaagttcaagaccagcctgtgccatgtagcatgaccccgtctccaaaaaaaaaaaaaaaaaaaaaaa

SEQ ID NO: 807 - DNA, 453 bp, Homo sapiens
atttcaacaaacactcccttccttttgcaacatccatcttcctccctcccactacttcatcttggctaattcttactctttaggtctcaatctagctgtcactttctagggctgtcttcctcataggcaaaactagtagaaaatgaggctatctgtaaagtctaatgtggaccatgtgtcattaggaatgccctaggctgcaagtagcagaacagtgactaaagcaatgaagtcataaagtatggagagctgatacacggagcatggtggaatggtgggttggaaaaagttagggggcgcaggcacagaggctcatagcctgtaatctcagcactttgagaggccaagggaggaggatcacttgagcccaggagttcaggaccaacctggacaacatggcaaaaccccatctctaatttttgtattttttgtagagatgggggttttaccatg

SEQ ID NO: 808 - DNA, 515 bp, Homo sapiens
gtgactcaaccacaatgacttctttattaaagctattacaaaataaatactgttatgggcaaaaagaaaaacatgaaatgtagctcttagcagtaatatgcttggctctcaggtatgctggatataaaaagaaactaagctctccttgttaatagagatgattcaaggtgggataagaaaaacaatcatctagctgattgagtttctgcccctcatccccatctcttgcctcatcatttccttctattttcagggttatttttcttgacagggaaaataaaaatcttccaggagaggcacagtaacagcagatgcaactcgaaaataaaaatcttccaggagaggcacagtaacagcagatgcaactcatgtccttattccagacttctttgcattttgaagattaaaaagaagaaaactactaaaagctttaagaactatccaccagataattatgatacaagagtataaacacggtcagtttcaatagccatttcctcaagtgcaacttggca

SEQ ID NO: 809 - DNA, 368 bp, Homo sapiens
taatagtaagaaaattattgaagtgtgtttttataaagaatgactacaacttttagagatttttgcttgttgatgtttaaaagctctttaatttttttgtgccctgctaatggactgtctttttagctgccccaaagtatctctgtttgattactaaagaaatcagtagaaaacttttattgtttacaaattgaagtctcagaaatagacaatgcaatataattttcattaataaagacctataattagagtgacaatgtaatttattgcccaatttgataaccttgagaatgggagattgttttacatatatatacacacacatatgtatatatgtacaaacgtgtgttcattacatatataaacac

SEQ ID NO: 810 - DNA, 307 bp, Homo sapiens
ctttgctaaatgtttgcaatttctaagtaaaccttttatctcctaaaatgagtgttaagtgtgattttgtttttacttttggtgctttaaacttgagtctagtctaccaagctttccattttatttgctttgatggtggtaggggggtggaggtgtgaactgttgtctaaatgaaaccaataattttatgacctacatttgtagaaagaataaaaatgccactatgtctagaacataaaagaaatgtcaaaaacaaattagagatatcgccacagttgtttttaaattgtattaacagtgactaatt

SEQ ID NO: 811 - DNA, 301 bp, Homo sapiens
catctcctttaaaacaaaaagcaaagcacaaagttacacgttcacatctcttccttacaatttttcaatgggaagttacctagaatcagcaataagagggacactgacacctcactgagtgctcccttgggcaatacaagcctgatggctgtgccctatcagacacaactgggtaatgcttctgacagccaccagcctgctacagttgaagttactgacctccattaatatacaacattgcactgaaatacactcctctatataagaaactgagtaatgagcttagcactacaatacttat

SEQ ID NO: 812 - DNA, 153 bp, Homo sapiens
taacccaaacttttccctagaacaactaaaactgcaacaaatatccttttaaatacatttgttgtacacataagtaactatatccttgggtgagaatcttagaatactgttttaaaaacatgtgaattcactggcactctccctaacagctca

SEQ ID NO: 813 - DNA, 498 bp, Homo sapiens
gggtattatcccatctatgaaaggtagtcttaacaactggcacagcaaggggtatctagacaatgaccaccaccactgggggtctctcttcttatgtcttgccttgttaatttgttgtattgtcgagacaattatgctgtttgagtttttttctgcccactggcaagcatactttaacctgtgcaaatttatgctgcatttgctgagtctttccaagtttctgtttagaattaaatgaacttaatgcctggaagcatcagtaatatttaggaacgggagtttggtagtagctccacgtcatgtgtcttagcccagacctatctttgtgtctaatattgaatcaagtggttggtatccagtaagaaatgtggctgacactaggcacaggggaataattcctactgtgtgatcactggttgtatgtctcaaccatgcatcagcccccattctacagtgtgtcctaggaaaaatacctgttactttgtgcactatacaggt

SEQ ID NO: 814 - DNA, 372 bp, Homo sapiens
tttcatctctctggtcctcaacgtcgtcatctgtcaaacagggttaagagacattcaaaagatacaagggtgaaggcgtgcgggtgggcagggggttgggagcgcacactgtggaaacggagagaccctacacctctactcccatttcccttctcgtcatggatgggggcctcccacagtagcaaggtgagggtgatgagactgcctaagaccctgaatgagtggaaggaaatcaaacaccaccatgagaaagaaaaaaaagcaagatacactaccaggaaaacgcaaaaaaagggtgactggagacaacggcaggagttcaaacatctcttgatgtcagaaaccaaggtgagatgtgggtggatggagtgc

SEQ ID NO: 815 - DNA, 570 bp, Homo sapiens
accatgccccccacgctcaccccatggagaagcctttctgtgcaaagacaggagggctagggacatgaagagaagcagagtgtgaggctcaaatctcatcagcctggcgaggctataactcaattaaatgcaaatctcggtgttgctgtgcaggtgttctgtagctgtgcttaacatctacaatcaattgactcaaagtaaaggagatcatccctggtaatgtaggtgggcctcatccaatcagttgaaggcctcaagagcaaatcagcttccccagagaagaaattctgcctcaagattgcagaataaaatcctgcgtgagtttccagcccggggcctgcccttccaatttcagacttgcaaacccccacaactgtgtgagccaattccttaagagaaatctagctgtctcctttccgtgtcttctattgattttgtttctctggagaaccctcactaatacacagaggaaagaaggaagagaaggagaggggatcctgacagtgggaggccctgtttcctcttgtcctggaggccaccacctcatttgtgcaccactgggtggacact

SEQ ID NO: 816 - DNA, 536 bp, Homo sapiens
gctaacggtattaaaaattaaaaaaatgagagagtgagtaagctaggacactttgaatacttcataagttatacctatgctacttcaatttaaatccttcaggttaaaacaaaaaatgattggaccctttaacagaataggtgagatctgcccacactgtgtgcaggatttgggtcaggatttcctgaggccattcttcccacagcaagcacgttttggatgccccctatgttcagcccctcaggggtgctgattgtcctcttttctcctttccctgcctgcccctacccccatccatgccctcacttgtgaaatgtgagtgtgtaggtcttatactggcccagaatttaatttgatttgggaaacaatttaagtcattacatgctcaagattttcttcccccttcacacccacccaaaaagcatcattgactaaaattttaaactaataaccaacagggtattgataccaaaagcagctgttaaagaaatagcacttcaggccaggcacagtggctcacacctataatcccagca

SEQ ID NO: 817 - DNA, 535 bp, Homo sapiens
agtcaataaatggaaaacaaatgagtttctgaagtgtcttcatcaaataatagaattatggccagtagtaaaaaaaagaaaaaagagttatggccagtaattacaatataatttataaagtttctagtcactccttcactgatagaatacagtaatatgtaagcacgaatgtgtttattaatagcctgttgatataatttatgaaaaaagtacagagtttacaacttttttttgaaattggctcctgagtaataaaaagtttcttgacattgattatctaatgagagctaagtatgtgaattatctaacagagttcaatattatttgggaataggttttagagcccttttaagttgaaaattgagaatgatcaaaacattcctaattctcttaaatcaccagtaaaatacgtatcactttatgcatagccttacaccttaatatgcatctaaagctgggcgcggtggcacatgcctgtaatcctagcactttgggaggctgaggcaggtagatcacctaagggcaggagtttgag

SEQ ID NO: 818 - DNA, 473 bp, Homo sapiens
cggtgctataaaatgtatgtataaaaggttaattctgttatgacagatgtggtccaaggaagacttttgggttctgccccagttctgaaccctgagaattacatgtagaagttagataggtgttgaaatacccacttaagactttaaacgacttaagcaagtttgaagaatgaaacttggaacttctggcctttgcagtcctcctgtccatgtgaagacctgcggtttactgcaagagagtaactgagtctgcagagtgaatattcacctagccagaggtgtgactacagccggcctccccatggcaagtgctaaacagcccagaagaaggaggtcccatgaaaccatgagctctagcatggctgtccaccggagcaagggggcgccctaatgctgtatattcttgccttgtacctcaggagcactgagttaggggagaaagaggtattccctcctgggaatgacgtctaagt

SEQ ID NO: 819 - DNA, 538 bp, Homo sapiens
tagagggctggcagtggtttgggaagagaaaaatgagagggatatgttggaggaagattgcacagagttgtcaacttactgatgtggatggttagggagaaggagtaggaggagtagtcaatggtgattgagagaatcatgatatccttggcagagagaggggtctgaaggtggtttggagattaaaggtgatgtgcatgatttatagcagagtgagggactagttggcaaccaaaaatttctactcagattgaggctggagttatgattttatgaaatgttgctgatggcagtttggaaggaatgaatgtaatttaccaaaaagagatggcagagagagaaaagaaaagggacagaagataagacattgatggttacactttgagtcagaagaattaagggagccactgagaaggtgtacacagagctgctggagggcaaccagaacagcttgacagatggagtccaagctggcgaggctggagtgaggcctttggaattgatttctatgaagaaattatgtgaggctgtatcacat

SEQ ID NO: 820 - DNA, 460 bp, Homo sapiens
tgtctgtttgtttggttttgtttctgtttttttgttttttgggggtatttttttgttgacatggagtctcactctgttgccaggctggagtgcagtggtgcgatctcagctcactgcaacctccgcctccctggttcaagcgattctcccacctcagcctcctgagtagctgtgactacatgcacacaccactatgcccagctaatttttgtaatttttagtagagacggggtttcaccatgctggccaggggatcaggatggtctgacctcaacccgcctgcctcggcctcccaaagtgctgggattacagtcatgagccaccgtgcccggcctaaaaactttaaacaaggatggctgaaacatcgatccaacacataataggaacccctttcttctatcttcatgtccccattatctccaggattcttagaggattttcttacatccttattacctct

SEQ ID NO: 821 - DNA, 509 bp, Homo sapiens
taaatatttgcttaaatgactttttctcttctaattgctgatcacaatggatctcaaacttttaaaaagtatagcacacttttcgtcagtaaataaataatgaaattaaaattttagcaaagcagagatgctattctggtcgaaggggtttgtgagtacagcctggatctccaacctccatgacctccaggaacattctcacaggtcctgagagattttgggatattctgtggatcagaaaaacaattagtagcagccacctctaccaagggaattctctgcataacagaatgttgttaagttttcatatgcatcatcattttgacactcatattattataagatttattattgttattattagtttcagtattagtatcagcattatcatcccccttctgcagaagagtacacaaaggctgaaaaggtttaaatatcttccttaggtggtagagcctgaatttaactctaattagtttgactctgaagccatcattcttaaccatcat

SEQ ID NO: 822 - DNA, 459 bp, Homo sapiens
ttgatcagacactacctgtgagctctctttttcttagttctaataaggaaatagatactaagtcttagaaatttttaaatactttgggcacaacaacatttttttaaacaaagacctagagcaacatgttgctggactttctgagcaaagaaagtcaagtgatatagaaaactgactcctgggccaggggtggtgtctcacgcctgtaatcccagcactttggcaggccgaggtgggcagatcacgacatcaggagttcaagactagcctggccaatgtggtgaaacccatctctactaaaaatacaaaaattagccgggcatggtggcatgtgcctgtagtcccagctacttgggaggctgaggcagcagaattgcttggacccgggaggcgaaggttgcagtgagcagagattgtgccattatattccagcctgagcgatagagcaagactccgtct

SEQ ID NO: 823 - DNA, 482 bp, Homo sapiens
tgaaaattgtttgattctaacaataggtcatgcctaggagattttttttgcccttttcttcatattgtgaatttcaaattatgttattaaacaaaaatattaacatactatttataaaattgttgatttgtgttcttttctggattaccttgtgctgatggtttcacaggaataacttctcagatgtctttacaatttacagatggctttacaaatacagcttaactttggaacctgctgaatgtgtttactgccctagattctaaacacctgtatcttgaaagaagctgctgtgcaaggcacaacctactgagtcattttcaaaacactgagtacagggagcaggtgttcagttgtcagtaatggaataaaacaaagttacaaactgggttagttagtaatatgaggtgcacaaactatatttccagacttgtagataaatttctctatttaattttcaaaattattaaaatactctactc

SEQ ID NO: 824 - DNA, 341 bp, Homo sapiens
gagagattctcactgctatctggctggcagggaatccaattacagaatctcatttcaacatctcttttccaaaccaccctggcatcaactcttgaaagctaaagtccctcagaagaaggccctgagatagagactggcaagcaggaagcttattagggagcacttttaggatcaaaaactttgaaaggaaagggagcagaggggaagggaagggaaagaagtaggattgtaaactggaacccatctcccatcatatacaaaaaccaactcaagatggattaaagactaaatgtaaggcttgaaactataaaactactagaagaaaacacagagaaaacaat

SEQ ID NO: 825 - DNA, 274 bp, Homo sapiens
agaagaccaaagggccaaaagagtcaacttctgaagaagcgcaaaaagaaagttgaggaaatcttaaaacatgttattgagcttaaagttgcaaaaataaactcatgtaccataattcatgagtagaaaaatagactagtggaataacataaaaataaaaacaatgcttacataaaatgttgtaactgatttggatgtcattagaaatcagtaagtaaatagatggacaatgtaatgaaagatgctaggcaaataatgtggtagggagaataat

SEQ ID NO: 826 - DNA, 522 bp, Homo sapiens
cttgggaggctgaggcatgagaattgcttgaacccaggagacagaggttgcagtgagccatgatcccaccaccacactccagcctgggtgacagattgagactctgtctcaaaagagttattaccaaaacaatagactataaaatctgtagtcttaatttgcatatcatggtagacaggaaaatacctttagcatcttaataaaagatgaatcaaactctctaataaataccctagaaaagacaaacaatacactaaatataagattaaagagtagtttctaatacatcattctaagacaaaatgagggaaaaaaccccatttcaaatttaagtcaaaagaaagggtgaaacataaaggagtctgggtgcggtaatcccaacactttgggaggccaaggcaggtggatcacttgaggtcaggagtttgagaccagcctgggcaacatggtgaaaccctgtctccaccaaaaatacaaatattagctgggcgtcgtgatgcatgcctgtggtaccagctactc

SEQ ID NO: 827 - DNA, 423 bp, Homo sapiens
catccacattttattggaaaaatattattttataaatggagaaaagcctggaaagacctctaccaaaatactaaaggtgctttttctggatggtgcatttataaatgttgttaacttctttatgttattcaatggacatgcattttgtgagcaggaatgattatatttaaaaatctgagtttgaatgccaatttgatcgtgtctcagctgtgctatctttggcaagccacttcttttccagagttccaatttctacacttctaggactggggtaataaagtcattttcatagcattgttctgagaaagaaaatgagatcatgtgtatgtgtattgtgtgtgtgttgtgtatgtgtgtaccctgaggctagatctggcacacttttagagcaactccagtatgatggccacacacagacactct

SEQ ID NO: 828 - DNA, 479 bp, Homo sapiens
tatatttatttatttatttatttatttgagacggagtcttgttctgttacccaggctagagtgcagtggcgcaatccccactcaccgtaacctccgcctcctgggttcaagcgattctcctgcctcagcctcccaggtagcttggactacaggcatgcgccaccacgcccagctaatttttgtatttttagtagagatggggtttcaccattttggccaggatggtctcaatctcctgaactcgtgatccatctcagcagatcacgacaccccaagtgtctcctgggggacaaaattaccctcttttgagaaccagtaggttaaacaacagattagacagataaggagagaattagtgaagggaaggatagctctagagataattcagcacattctacatcagacagggagagaaataaaagtaggtaagagacacagaggatagatttccagaagaatatatctaatcagaatttcag

SEQ ID NO: 829 - DNA, 504 bp, Homo sapiens
actggactgtgaatgtcaccgagcttttctcagattttcttctctacccttaggtaggaaaggatggcgagagtaggctgggattgggtactatccttctcccacatggttggctagggtgagctttagttgagtatttctcttctcccacgtggaaagttagagctgactagaattaggttttacccttctcctagttcagttaggctctgataaaaccccagaatgttaggctctggttaactagcttctcctgagggcagagtttgtcaagaggagcacagtgctctgaagctttcagaatgattcctatttccgtctccctgctggaagctcaaggggattcttcttgagaaggtaaaattcacaaaagtatggggtcctcatatgagggagtccccctgaagtttttaactctcagacttgttctcacctagcctctaacaatttgttgattacagttcaggtttcctaactctggcaccggttcctataaagacttct

SEQ ID NO: 830 - DNA, 252 bp, Homo sapiens
ggtggcagatgcacatgcattcccaggaaggcttaggcactgtgctgtactacgtgggtttcagatccaaggtttgttgtctggtctgtagttgcaagcgataagtggctaggatgccaaactttcacagatacccaggcactgggtgggagtaaagtgaagtacaatatctcagagtaattcagaaattagaataacatatttggagttgtgtggtggtggtggcagtggtggtggtggtggtggggtgtg

SEQ ID NO: 831 - DNA, 512 bp, Homo sapiens
gtcccagaacttgtctcattgctgtcaaacatgacaccatagtccttctctggttcttcctggcaaagaccttctgaaaatcgttttgtgatgaaagttagcacaattcactgtgaaaggtcccctgggtaggtgggtcacaaccctgctcctcctcttgctctctgactacaagactttggtgaggggctccctgtcccagagtcttctttcttcgcttgttagcataatcacagtcctcactacaaagccagcctgtaaggggtaggtgagttagcaaacgtggaggcctctgcccagcacccagctcacagacggagctcaccctccagaagctagaatcatgtaatataaaaatacattattctggccaggcgcggtggctcatgcctgtagatcatgaggtcaggagatcaagaccatcctggctaccacggtgaaaccccgtctccactaaaaatacaaaaaattagctgggcatggtggcgggcacctgtagtcccagctactcg

SEQ ID NO: 832 - DNA, 524 bp, Homo sapiens
caagtagagaattgggaccaggaaaaataaagccatgaaataatgagtctgctgtattagagtaatgtggaacaagtgacaatttcattttttaagaatgctgtttgtacaaacaaccccatcaaaaagtgggcaagggacatgaacagacacttctcaaaagaagacatttatgcagccaaaaaacacatgaaaaaatgctcaccatcactggccatcagagaaatgcaaatcaaaaccacaatgagataccatctcacaccagttagaatggcgatcattaaaaagtcaggaaacaacaggtgccggagagggtgtggagaaataggaacacttttacactgttggtgggactgtaaactagttcaaccattgtggaagtcagtgtggcgattcctcagggatctagaactagatataccatttgaccctgccatcccattactgggtatatacccaaaggactataaattatgctactataaagacacatgcacacatatgtttattgaggcattattcac

SEQ ID NO: 833 - DNA, 488 bp, Homo sapiens
ggggcaaggtgggctggaggtaggtgacaaggtttggctcccaaacgggcactggccaaaaacaaatggaccagcagggccaagtgacatggcagaagaccaggtgggtgactcggtcaacactttcaaacatccccaaagttatagtaagcatcaagagaccacttactagagtctcactgttaagagtaaaaagagattgtgtatgcaaacaattagaaaaatcagaaataactaatgtttaaacaaaacctaacaccgtaatacttcaagacctttgggctcatagtctgcctgacacataggaagtggacaggatggctcagagcactgtaaaggacctcacttgacctcctgcaagtcagttcttctcaggacaaagtggacttttccacaagtttgcctttagcaatattataataaactgcacttcaactgtcttgaacaaactcacagctccacaccaatgcagtcttaaaaatgagact

SEQ ID NO: 834 - DNA, 572 bp, Homo sapiens
tcttagaggtcaccacaaggtcgctggagaaacggggaaacaaagatgccagtggaaatcttccatttagttttagcctttatttgttaacattcttctgtcacaaggtcttctcacccttgccaattatagaaagccattaatttgaaacccattataagccaccttatgatcaagaaaggatcaagctgaattaaattttccagcccaggaatattgatataactgaaacacaagatggaaaatctggacttgaagatcccaactagcctgcgtgttctcaaagccatgtgctgagaaaagaccccaccctgttcattttaagccttgtacttgtactttcctttgaaaacattgaactttagatttatttgactgaaaaacagatcttaaattttcccctcaaagatttttaattaggatatttccaactaattccttttattttaggaatggaagtaaaagcaaatgtatactaattctgtcattgcttgtttagaagagaatgagtagatgcttatctacatcaatagaaaattaagtaacgatataaaattataaacacagctact

SEQ ID NO: 835 - DNA, 432 bp, Homo sapiens
caccatctttgtattttgtgtcatgacttctcaagagaagacagaagagtatccttttgcagatatatttgatgaagatgaaactgaaaggaattttttgttgtccaaacctgtttgctttgttgtatttgggaaaccaggtgttgggaaaacaacattagcccgttacataacacaggcatggaaatgtattcgtgttgaagctttgccaattttagaagaacagattgctgctgaaaccgaatcaggagttatgttgcaatcaatgttgatcagcggtcaaagcattccagatgaacttgtcataaagctaatgttggagaagctcaactccccagaagtctgtcactttggttatattatcactgaaataccatcactttcacaggatgccatgactaccttacagcaaatagaattaattaaaaactt

SEQ ID NO: 836 - DNA, 602 bp, Homo sapiens
ttacatggcctggtcctaccagagactcacccaatgccagcctccagccagggagagccaagtttgcattttcacacgcatctcacactcctctgcactctcaacttggagagctccaaacagggaaaccccaagccttgctggcttctgccaaccccctgagcagaagcatgggtcccctgatcaccacctcaccaccctcatcctgatctcactgtacactccctttcctggtctgctaagtagcgggtgtttttccttgacactaacgctacagctagaccacggtgggcttggcaacaggtgtcttcccagatgctggcgttaccgctagaccaaggagccctctggcggccctgtccgggcataacagaaagctcgcactcttgtcttctggtcactcctcattgtcccctcagctcctatctctgtatggcctggtgtttcctaggttatgattgtagagcgaggattattataatactggaataaagaataattactacaaactaatgattaatgattcatatataatcatatctaagatctatatctagtataactattcttattttatatattttattatactggaacagctc

SEQ ID NO: 837 - DNA, 376 bp, Homo sapiens
gggagaactttatttctaaagccattgttagaaacagtggagatcttggtggatagcagttaagagaaggctggtagcttcataattggacaaagtggcagagtagccagaagtttaatagaaagaaataggaaaagaagaaaccatgaagagtattaataagattataataaaccatggagaatgcgaatgttgtacacagctgctaagttgcacctacaagggattaatcagggcagtaaggaagtctcactggcacaaggggcttacacataacctgtcaccgaacactaccagaacaataagctctgctgatttaagggtgactcttggaaagccaggagtaaaaatattaacctagtcatccccagcagtc

SEQ ID NO: 838 - DNA, 450 bp, Homo sapiens
aatctaagtgaatagtcctatatgacaagtataattcatcaagatttgattaacatgacactgttcgaatacaagatagattctctttagtaaagacaagcatctgagtcagaaatagtgaacacacacacattgaaataaagaaaaaccttaacgtagcatatgctagaagacaaaggaaaactagcagaggatctctgtagtacttaaacattttttgatattttgtggtgctcacaacccttgttaaaagaaagagtacattatctgtagtacttagttggaatattgcagatgtttctagtctttgtaaacatatcacagcatcttaattctttgtttatttgaattgctccttagtcatgtctctttttcattccattcttaatcaccgagtctgtgattaaaaatggcaaacatgtgttttgagaagaaactaagctatgattt

SEQ ID NO: 839 - DNA, 446 bp, Homo sapiens
  misc_feature 88: n = A,T,C or G
tgtcggtattcagcttgtaaatatctatcattgtcagagcttgcatttaaggaataaattcctagtcacagccatagtcatattttgnggatgtcaaaactggcctcagaatacagaataagtaccatttcccattgttgaaagtacactttgcttctttattacatttgtttctttatcttctctatagtctatgttaactgtatttcttcttttcaggctggctaaagttcaagaaaatactattgcttctttaagaaatgctgctagtcatgtaagtaacctttaaacaactttagactgctgaggtagagaaatatggatcagggagtctcctccagtttttattaatagttaggggaatatctcttggcatttatattcagatccatggtgaagatcggaatgaagacaatagaaccataagcatcttttctttttttttg

SEQ ID NO: 840 - DNA, 369 bp, Homo sapiens
ccagtgaatttcatattctggatggggtagtacttacagcacatcattgacaatgttcaggttctctgaatatatttaaggacaacaaacacagcatatggagagaggctacagacacgcacaataaaggaagcttttctgatctttgcttttatgatagcctagaggtttattatcccttttctgaggcattcattatcccaagcataatcaaacaattatagtcatatgtcgcttaatgacagggatgtattctgagaaatgtgtccttagcctggattgtgtagtctgttacacacctaggctataccgtattgcctattgttcctagcctacaaatctatacagcatgttactgtactgagtact

SEQ ID NO: 841 - DNA, 448 bp, Homo sapiens
ggagtactctgtactgcgggtatgggctctctccagcagtgacaactcagcatctctctagtggccactgcttttgcttcctaaacatgctgttttgagtagcctcaccttacaaatagatttgcagaacaggaagaagattcttgaaagggaagattgtgatgaaaccgataaaaatctctgtattaaaatcttgtacagccttctgttttaatatcttttcttctggatgagacattagtctttaacttttgaggaactctgtaactgaagacaaacaataaaataccaacagagaggaaattattaaggattatatgtatttaaattacttttatcagtaacccactctagcctcagaaggtataaagctaacggagaaggggacatttaaaaccaatgtatttttattctgtaaatctttaacttaaaatagtattttgaattc

SEQ ID NO: 842 - DNA, 478 bp, Homo sapiens
atttttagtctttcccttcatcaaaatggagaattatttgtttgcatgtagattgtggtagagttggtatgtttcagatttaatgaaatgcagaacagaataaatccctcgggaaagaaaggaaagaggggatacgccagacttagtatatgagagtagtcaaaagcctggttttaaaagtcaaagaaaccccaaagttgacacctggtccctatgctaactagctgtgtgacctcctccatgttacttaacctttccgacctcccagtttctttagtagcaaaatggagatgttattattaatataacagaccttgttgaaaagatgaaatgagacattgtatgtaaagcactttaggaggacatgtctgtcacatggctgtgctaaattagatgttattatcctgtcaacaggctgaatagcaagggggaaaagttctaaactttggaatcctgtcgtaatacacacagagatctc

SEQ ID NO: 843 - DNA, 318 bp, Homo sapiens
cttccacatgcatggacactgccagggctcccacatgaccttccaatggtggtgcaaagcacccagggtctgcatccagcagcttcagtcaaggcccctgctctattgctctggcgagtctcaatgacttgattcaagaggcagcatgggcccgggcttaaaagagccgggccggttcctcgctgtgtgaccctaagcaaacaatatcacttctctgcttcctcatctttttttaatttaaattttattttcttttaattgagacagagtctcactttgttgtccaggctggagtgcagtagcgtgatctcggctcac

SEQ ID NO: 844 - DNA, 426 bp, Homo sapiens
cacctacacacctgttttctaattaacctggtcctgggtaatcttgtccagcaataaagcccaccccctcccacagcaaggattgacttggttatgcagttggcatttttacttatgcttactgctggctatctcctcaaatccttaaatcttgtctttccaaataaagtgcgattccttgagggtaggaccgtctcttctgcagccactagcctaggggcccagaaaaagaaaatcaggaatagctaaataagtcatgtatgtgggatataataaactaagcagtattaatcatattaacaatatatagtgtttactagggggtcagacactgttctaagcacttcagatatattaacaactgttaaatgtagctagtgttacatacgtgtgtttcactaatgagaaaacaaagtcacagaaagc

SEQ ID NO: 845 - DNA, 410 bp, Homo sapiens
aggatagtgattacagctcatttattaaaatagcaacattggtacatatctgagtcaagcctggaactccccctccctctcaactagacaagttaggctttaaaattactgtaaaaattaagtcaaattgcctgtgaaggtaagctcttagaagaattttttaggtagatgatctacataacaagacatgcaccaaccaaatctgcagtcaaatattgggggaaaaaagcaacaacagtaggtttgtgtttattgcgatgtctggaatattttaaaaattaagctcctggcctcagcctagggatttctaatcaattccaggaaatgtactgtatctttccttgaggccagcaggaaagccccttggcaagggtgtctggaatggccacttgacatccccagcacacctc

SEQ ID NO: 846 - DNA, 437 bp, Homo sapiens
ggagctggcagggcatggtggctcacacctataatcccaggactttgggaggccaaggcgggaggatcacttgaggtcaggagttcgagaccagcctgaccaacatggagaaaccccgtctctactaaaaatacaaaattagccaggcacagtggcgcatgcctgtaatcccagctactcgggaggctgaggcaggagaatgaaccctggaggtggaggttgtgatgagccgagattgtgccattgcactccagcctgggcagcaagagcaaaagctgcttttttagtttatcttacctgcctgatctctatggggttagagtctgtgtgtactagtgcacataataaactcaaaagcaaagatggctagaaaatgatggttattatgtattggctgacttatttgacactcttaattatttgtcctgtggggtcat

SEQ ID NO: 847 - DNA, 371 bp, Homo sapiens
aggagacagaagctgctatacctctttcaaataagcagatggaccggtagtgactgactttgcagaggaatcacacagtacctgtaagtgcacaaaaatacctgtaagaaatgcagtactgtgtttgtccgaagctcccaagagtctcagcatttggaggcaccagatactaaggaagataggggtcagaaatggagctgaaaacaggggagctggtcggaaaatctgtgtacactgacaggtggacccctacgattttctccctatgtgcccttgtggatgggtgagtcccttcactaccaactccctggcctcaggagaacaaggtttattctttgcaaaattaatgaagagctgtctggactttgaaa

SEQ ID NO: 848 - DNA, 291 bp, Homo sapiens
gagttttattctctcggacaagatgaaccaggaggactctagacatggatcagcaggcacactgatgatgggaatgtgttactgaaaacaaagagaagtaaataaaaatctacgcacggagcagtgatatctcagggtcccttttcctattcatgaactctgatagatctggcctgtgccccttccccacaccaattaagaaattgctgaatttccctctgacagaggaaaaaaaccaacttacccatggaacaaaagcccatgaaaaaaagacttaaagatttttaccac

SEQ ID NO: 849 - DNA, 418 bp, Homo sapiens
tagcactcaccagcagacaagaagtagcaggtgcaaaaaaggctcaaaaattttggcaaagaaaagcttaaaattgtgaaaattttatccattaagttatattttctggaaattgcaacacccctgcaattattccaatttagtgatggaacatatccgttttgcagactgagaatctctaaactagttctaaaaatttaatactacaagttgtcccgtaccagaaaggctgtgacttgtctattaatagatactatattaagagctcatttttgctttggtagagggctgagaggcttcagttttgctgtttgcactttccatttcctgttaccacatgcaaatgaactattcaactttttttcctttctcatattaacttacctaaatgtttgtgccatatacaaaatggtatcta

SEQ ID NO: 850 - DNA, 412 bp, Homo sapiens
agtgaggactataaatatcactgaattactatggaggtgggctgctgctatgggctgtgtggaaatacttttgatgatgtgtttgcatgtatatttcttgggaggaactcctgtttaatatcccatgatgaaatgctgagaatctgccaggcgctgtggctcacacctttaatccctgcactttgagaggccgaggtgggcggatcacctgaggtctggagttcgagatgttagaaacaaatgctcgttcctcagtgcggaaaagaagaactagcactcagacaaagaattttctcagcaaggcaattttactttctgcagaaagggtgcttcttggaagtctgattgccatgagagcaccttgaacaaagaaaagcagaggtttttatccctgctgcattgggtccttact

SEQ ID NO: 851 - DNA, 383 bp, Homo sapiens
caatgtaacctaatgagctttaactttgtccccagatactcttatttattgttactaactgctgcaatgccttcaggtcaatatctgggacaatccaatctgattttgaatccagatacaacatcctatctctcctttcctctctttttctttcagaagcagtgtaaattactggcattagcaatgacagcaaacagaaattctcaatagcaaaggtaggttttggttgcaataagaagtagatgtaattttcttatatgagttctctcatcatgaaactcaatctctttgtgtgttaacgctggcaccaacacttggagtatctaactttcagcatgattgtctcacaggtattggacaattcttactctcttctattaact

SEQ ID NO: 852 - DNA, 437 bp, Homo sapiens
gaagaaagcctgagtatggtgattagtctacccaatgcattgtttctcaaattttaggtgtagtaaaagggatctgtggatacattttaatgagaacctaataattttgggtccccagtaatcgacttagacttacttttaatatattgttgcttaaatataaaaataggcataaactctatatgctttaagaattttaataaaacagataaaactaaaattaatgttcacttaatgtgcctactgattctagatttaatagtagagcttcagatccacttatacctttttttgaccttatcattacaaatgcagaacatccctgttgtataagtaggctgaacaaagtggtactagtaccatcagtcaacattttgtgatagaattcagggtcatcagactccataccaaatgaaaattttggtggagagcaactc

SEQ ID NO: 853 - DNA, 338 bp, Homo sapiens
aagatggatgcattacaaccacacccacccaaaaccctgaactaaacagcccacgtgaaacttctttcccaaaaagcattccaggtgtctatggctctggctatataaccctaacataaaaattgtcaaatgccttccttgtgtgactcagtgtagatgacaaccctatgtaggttcactacattttgaatatttcacctatcagaaaatctggacagaaaaagagactatttgtcaggataggagaccatacgcattatggttcatgcaagagaaagtggttataaaacaatataaatcaaaggaaacatatttatttaactttgtacgaatatact

SEQ ID NO: 854 - DNA, 403 bp, Homo sapiens
  misc_feature 239, 240: n = A,T,C or G
cagaaggggtagaaactcagaaagagtggaaaaaggagaaggccaattatgctactgagacaggattcagatatatcaacacaggtaccaagcaagggcaccacaaagcaggtggcagctgggactcaagccccatgcacactagggcactgcatccttgattggaaaacacaaagagcctgattctatacttattggatagggatgtcattaggagtcaagttcagtgcctgggccanncatgtttctctctttgctcagtttccaggaagcttaaaaccaagctgatgcgcaaaagacagaggctgttcctttctctcatctaacttcatattccctcctctaccacctttttaattgcttaaattttattctcttttcatttaattggaacttgcatcaa

SEQ ID NO: 855 - DNA, 369 bp, Homo sapiens
gaactggttttctttgattaataactccatgccatatctaatttttaaatgccttgcatccacacttatcacaccaaaatactttaacattctttactttcacctttgtctctgatgacagtcagtgcaaaactactttatcatcccagcagggaaggccaatacattcccagcaagtataatttctaccagaacaactcatgaaatgtggtaagaaatagtgtgtgggtgtcttaagataatactttttaaaaaaaaatagagaagagagttttaaaaatctttctttttaaaatgagatctaaaagggggaagatgaaagaaaaatgtgcagaaaaataaaatacaacaaagtatagatattatata

SEQ ID NO: 856 - DNA, 457 bp, Homo sapiens
tgcccaggttttgagtgggtgtaagttttcagctcattggggtaaatgcctaggagtgcaattgctgggccatatggtagacctatggttagccttgtagaaactgccagtctgcttttgcattctcaccagcaatgaaggggagtcactgttccacatcgtctccagcactgagtgttgtcagtgtctcgggtgtgctgtgcttttaaactattttctttttaaagccgggcagattggaaagtatgcatcatttttgttgcccacaagaagcttgttttgaactgttttatgttcacagtttgggatttttcaggcaatattgctgagctttaacaggaactttgcagtcctgtcaacctgaatttgagcccttcatttgcaagtaaccttgccgtgtgactatgagcaaggtacctaacctctccattgttcagtttctttatctgtaaaatgc

SEQ ID NO: 857 - DNA, 511 bp, Homo sapiens
ggttatacctgacagatgtccttccaattaatattttgacccaaatattctctctatgaaattgcagccttggaggcactccacctctctgccagtcatttctttaaaatagtagaggagagagacaaggagattaagcaagggaaggaaaattctacaatggaaattcatcagttgtctaagacccatggatcagagtcttcaatgaaaactgcagttatagttaaaactataggaatagataaataaggagaaagaataaaatgaagacatagaaaagaactgcaccctgcagtacaagtggatcatcaatacccttcctcaccttgtgtgttttaacatacattttgtgatgtgatttaaaaacaaaaacaaaatcattctgctgcaggtaagaggaatattatttctattttataaacgaggcaacagacagacaaaaagtgctttatcaatatagcacccctcacctttatgatgcagttcattcctggaagtcacactgaaaaaa

SEQ ID NO: 858 - DNA, 475 bp, Homo sapiens
gtgaattagaatataacccataaataatatctggccacatacaaagtaattgaagatcaatttaaatagccattggattaagaaatagagactgaggtaaatttacagggtcagggaggatttaaggaggaagcactgacactggagcccaaggacctgggattacagaacagattctaccagtgctaactgactgctccagagaaaacatcaattctgttcatgtgcagctactattcatcaagaaagggattacaacttcagaaatgtgttcaaagtgtatccatactttgatgtattaatgaagtaatcacattctacacataagtactccatatggaatattggggagggggtgttccaaataaagagattgaggatttttcatgagaactcagtgtctgctagaaaatatctaagtaaaatattttacttaagtggaaagtgtggatgtttgtgcatcaaaagtttcaag

SEQ ID NO: 859 - DNA, 441 bp, Homo sapiens
gatctagcattatattaaaggaacaatatatgattaaccaataacttccagaaattcagagatgacttgatatgagaaaatatatcagtgtaattaatcatgttaataattgaaaggagaaaaagagccagatgctgaaaaagaacttgaaaaaatcaacatctattttaaaaaaagatctttacaaaacttagggtagaaaagtaagtccttatcaatatgttatgcaatgtttattttaaattgtttatatgatacttaatagtatcatataaactttatacgatacaagcatccctgtcgaaatcaaggtccgaagaagagtcctcgttagcatgtgtatcatttaacattcttctggaatgtttagcctatgcaattagatttcaaaaagaaatcagaaacataagacagattactctttgatggtgatttgactac

SEQ ID NO: 860 - DNA, 400 bp, Homo sapiens
cacttctgtcactttgccatagacgaagaatacatagttacttaaacaaatagtgaatttaattgatcacattgtgtgtgtgtatgtgtgtgtgcatgtgtgtctatgtattgcccatttgtgcatatacaattctggactagggctataagatataatatagggcttcatgagtttgtttggaaagtaaaatatatacatatgtatatataaaagacagtagctatatatatgcaatgcatatgtatacacacatatctgtatatctatattaacagacatatagacatgtggacacatatatagataaatagataaaggtatactacagaagataatacttggtaacagaatatgaactgcataatgcttgaggcattgcgaaggtgcgtcacaatga

SEQ ID NO: 861 - DNA, 451 bp, Homo sapiens
gaattgtatgacattatcagttagtgtgttgtgcacaaccattttcaaacaccaattctttttaattgtatgaaccttgataaatcaagccaacagtctacctatatttaccatagtgtttccttcacttattcactaaattttggagttaaaaaaatttctgtttgggaaacaatatctcattattcaaaatagaatatattaaagtttgagggcacttgatttgaatgtaataatacatttctaatgtgtatgtatgcaagtttgtatattcattatacacaggcacatcaaaatacctgattttgaaccaggcattataaatgtctagaaaatatccaagggagatgatggtatccaatacagaactgcaggaaaatcattacattattttacataatcattacattatttcattacattaatagaagtaaaatatctattaaaatac

SEQ ID NO: 862 - DNA, 397 bp, Homo sapiens
ttcatgaaataatggctgttataatatatgaaaagttaggttaatataatccactttagaaggtaattttgaagatgtaaaaagaccacatatattgttaagtgctagtcagcagaagctctcttaacaccatgtcactgatttctgcaattaacctgccaactgatgccaaggaaatggtgaccacactgagccaatggaccattttctagcacctctgtccatttctcttctcatcagtttcttgccaagaatcaggtgtgtttgcttccaaacctgttttgtcaactgcacttgttattgtaattacataatcaatgaaatatcatgagaacaaatgaactgtatgtgtaaaagaaaatcaaattatgtctggaaaaaaattcttgataaagga

SEQ ID NO: 863 - DNA, 260 bp, Homo sapiens
gaaaatctaagacctgagtaactattaaatattacttactcatgcatcaatcctctgaccactgtatgtcccctgacatgagaatggtagaaaagggtgtattagtaaggcagcaataggccgggctcagtggctcatgcctgtgatccaagcactttaggaggctaaggcaggcggatcacaaggtcatgagtttgagatcagcctgatcaacgtggtgaaaccctgtctctactaaaaatacaaaaattaaccgggca

SEQ ID NO: 864 - DNA, 492 bp, Homo sapiens
caataagttttcattttaccaaagaattaaaggaaaaaagaagaaactagttactaattaaggaatagttagggaaattccatattgctgggagtgcaagtggtaaaaattctctggaaaatgatgttgcaatattaatccagatcttaaatatatttatatacgttaactagataattctccttctacagttttatcccatagaaaatattaaaaatgtggacaagatttatgtccaaagatttttttatctaaattctgtttaattcatggcaaatgtctgtatgttcaacaatagaatactatgtttaaaaaaattaaagtgtatttatgtgatgaactattatttcatggaacttgtttcctgtcatcagaattcatgggtacagacctaaatatactttataatctgtgagggtttgtgatcaggggaggatggtagcaaagattaaaatgaaatatataccaaaaacttaatagtaattatctctc

SEQ ID NO: 865 - DNA, 289 bp, Homo sapiens
taccatgagtttataactgggtgattgtacctagtttgaggaaacatggttttgctttggcacagtgaattcagtaaacgagtgagtcaaggaacaaatccttatgcaagaaataatgcttgtgcaaggatatgcccaacagacttaatatactttatttactaattaaatccatatgaaacacaaagagaggaactactaatcataatcaacgaaaaccataaattaaataatttgattggaagtaactttagagatcatctaaagcagtgcccttaaaatgtcagag

SEQ ID NO: 866 - DNA, 338 bp, Homo sapiens
atacaagaacagctggatttggcccgtgggccctaacttcccgaaagcccctggttaatgtagcctgccccttgtttcccactctatataactataggactgatcacctgaggtcaggagttcgaaaccagcctgaccaacatggagaaaccccgtctctactaaaaatacaaaattagcctggcgtggtggtgcatgcctgtaatcccagctacttgggaggccgagggaggagaattgcttgaaatctgggaggcagaggttgtggtgagccgagatcatgccattgcactccagcctgggcaacaagagcgaaactctatctcaaaaacagcaag

SEQ ID NO: 867 - DNA, 302 bp, Homo sapiens
cacacctaactgcaccaatgctactcctccacacatcatctcctactacacacccctcctccaatttccccactcaccaatgctcatttctgggctattagcaagtaaaacagttacccccagtttcctacgcatttatttacatcaaacatcatgttctatgctgtgatccattttcagcattgcagttttaattaatgtctaatgaacaaatctcgtctttgcatgtttcacaatccacagacaagttaataaatgagaatgtttcattataaaaatcattgcttccattatctatctac

SEQ ID NO: 868 - DNA, 426 bp, Homo sapiens
gggaagactgaggcaggagcaagtttaaggagggaagatcttgagtttaacataagtttgagatgcttattagatatcaaactggaaatgttatgtagagagttaaatatatacatctgaagttcaggggagaatttggttagagatttaagtttttcagtctacaggtggtatttaaagcaatgacactggataaggtcactaagagatccaaatgtagacagaaggactgagacttggcacactataatatgaaggggttgaggaaggaacctcacttattcataacacacaaacacatataaattatgtattttgtgtaccgggagaaaaccataaactatttactgcttaggagcatgtctttcttatctccatatgctttgtataagcctggcacacactcaacaaacatggggagtgata

SEQ ID NO: 869 - DNA, 422 bp, Homo sapiens
gggttggagtcagaaagtccatgcttttgggggatgactcctttgggaaaggggatagagtaaaaccagtcaagagagataaggtgaagggttcaaggcagctctatatggaggacaagggtagggacaagaggtagtaagtaagaggagaaagatgaacttttggtttttcaaaatattcctagtcactgtcctaatgttgataccaatggtacattcatagcatgggatattctgcagccgttaaagaagtaaggtagatttatgggtaaaaagaaagtgtaccaagacaaggatgccttctctcaccactcctattcaacatagtattggaaattctggccaggacaatcaggcaagagaaagaaataaagagtattcaaataggaagagaggaaggcaaactatccctgtttgcagat

SEQ ID NO: 870 - DNA, 496 bp, Homo sapiens
cattatgaaccccaaaggatgtaaattaatcaaaagattagagatttcttctcttcaaacacacataacctagaaatatgttaggaaacttttagtaaaaataacagtagactacagcaagaagtgcaagaaagtcactctctctgaggactagaacaaatggaagccacaaaaccaagagaagagaaaaaacagggacaatagagaaattgcatgcctctactgcctgtaggaataagaaacatcaaacagcccaactcttaaaggcttatttaatctcagtatttactaccccacacaacaaaaaatttacaagccatgctaaaaaggcaagaaaaacacagtctaaagagacaaaacaattatcagaaccaaacaccagtatggcatagatgttggaataatcaaacaaacatggaatgtgacatgacaatgattaataataatatgttaaagaggttaaaggaaaaatatagataacacacaggatgagata

SEQ ID NO: 871 - DNA, 446 bp, Homo sapiens
actgttttttgtcttttttttagtcaaggtctcaccgtgtcacccaggctgaagcgtagtggtgtgattttaattaatttctgccttgaactgggctcaagtgatcttcccgcctcagcctcccgaggagctgggactacaggtgtgagccaccacgcccagctaatgtttttatttttacagagatgaggccttgctgtgttgcccaggctgggcagatcctcagcctcccaaagtgttgggattacaggcatgagccactgcgcctggccatctcatgtttaagtaagcttgggaagtgctacctgtttctgcaatactgattggagtgcttgctccatcacggtgctgagcacagagacagctctttaaaatttatcacacttaatcgtcaccacagccctgctaagtcacgggtcataccccccctttacagatggaaacac

SEQ ID NO: 872 - DNA, 441 bp, Homo sapiens
cagtttagatgcatttgtcgtaccgtcaaggggtaaaatattaaggctgaaatcgtatctccattggcgactgtctgctggtgtcccactttctgtgttgattgagtcagatgacagagcaacaattagtattcagagacaagcgctgcccccttcgaggccccagaccaggcaaagtggcaagtccaaggggcttctcactcaaatgcagtcatgtcagtggtctgtcattaacagcaagatcaccagtcaactagggccagccaaggttgcttgaataaactaaaacagaagctggcagaatgcgataaagcagctaaattctgcaaaactaccaagtgactgtttaccaggctgctgaatgcacctagtttattttatgcaagtcagactaagcctgcatttggaggtcaaagcaactaggctagaaaagccaccatt

SEQ ID NO: 873 - DNA, 374 bp, Homo sapiens
ccatttgagaacttacagcaagagaaaactctcaaggaaaacaaagcttgatctgcaaaggtcacgtgtgtacctacgctgggggaagagacctttccaaagctctttttgtgtactggaaaaaactcattacctgttcttcagtatgggaatagtcaaataaatgaggacccagccccataataaaatactatgtagtcaccaaaaagaatgaggtaagaatgtaggagtactgactgggaacaatgctgatgatacagttttcaatgcaaaaagcaagttccacaacaatatacagagtacaatcctgattttcgtaaaagaaatacaatttaatcaggatacatacatatgtatgtaattatacatatgca

SEQ ID NO: 874 - DNA, 454 bp, Homo sapiens
ctgagctccctttgctggcctaggaaaagctagctggccaaaatggtctcagttttcaatgggatgcagttggacaagagaggatgcatcagacaagatcagtttgaccttggctgcaagaaggagcagaaggcaaatgctatcttccccagtgaaaaacatcactagccatccagggaggaaatctggttttctcaactggagaagatagctacagttcaaaagtttagagtcttcttcgtgaatacagttcctggcatcagttgagggatcagcgtagataagtggaagttcccacttatagcatgtttgatttctttcccccaatgcagtttattacctctaagtttatcctgtagctcaactcggactaataaagttttctctagtacagaaggtccatagaggatctactttattagtttaagtgggttttaattagtcaattagagaa

SEQ ID NO: 875 - DNA, 375 bp, Homo sapiens
ctaataaaataaatatagaaacaaacctcacagaacactcattcccctccagctttccagagcaatcaaatttctgtcctacctgtgagaggcaattcaacacgatgtcgaagagcacagatcctggtgccagcccacctgaacttgaagctcaaagctttactaagcttctattgtatacgtacacattaggggctatagaataaaaggcaacgacaactgatttgaaattggactaagtgcttagcatatacacagcatctaaaatcctcccacacaattataaagttattccattatcttaactttacagagaaaaaatcaaaattcaaattgttggttgtaacgttgtataattgacaatgtttttaaaag

SEQ ID NO: 876 - DNA, 455 bp, Homo sapiens
ttactgattaaagtaattttacagtgtattctgcaagaacagtttttcttagtttgtactcagcttaaagatacacaggaatgcaaatgaaattactcactaaggcactgctccctatttggaaacaatacttctctctttcccaaactgtgtgaaacatatttcctttcaaaattagattaccactttcttttattttgagatctttaaaataattctacaagttcttgaactactcagaaatgaacttgtaataaaatcaagattgggaaatactgttttattaatttgagcattaatttcatgattgcatattacttagcctctaactagccactatggaattgaccaaaaatggcttatctccagtagttattctttctttaattaatttttaataaaaatatattagcatggtaaaaatcacataatacaaaggacaggcaatgaaaagt

SEQ ID NO: 877 - DNA, 491 bp, Homo sapiens
caggctcaggccgggggcagcaaaaaggcggagcaaaaaaagaaggagaagattatcgaagacaaaactttcggtttgaagaataagaaaggagcaaagcaacagaagtttatcaaggctgtcacacatcaagttaaatttggtcaacaaaatccacgtcaggtagcacagagtgaagctgaaaagaaattgaagaaggatgacaagaagaaagaattgcaggagctaaatgagctgttcaaacctgtagttgctgctcaaaaaataagtaaaggtgcagatcccaagtctgtagtatgtgcattcttcaagcaaggacagtgtactaaaggagataagtgtaagttctcccatgacttgactctggagagaaaatgtgaaaagcgaagtgtttacattgatgcaagagatgaagaacttgaaaaagatactatggataattgggatgagaaaaagctggaagaagtagtgaacaagaagcacggtgaggc

SEQ ID NO: 878 - DNA, 120 bp, Homo sapiens
tctctcatcttcctatagtatgcggacactgtgaggaccagcatactattctttggctaatgataggacaatgtgagttatatgcaaagacacacacacacatacacacacatacacacg

SEQ ID NO: 879 - DNA, 592 bp, Homo sapiens
acttgaggtgagttgtacattattcctatttaggtatgaaattgtatttgcagttatgtttcaaatctatcttcaatagtatgtgttaatgtcatttactttatatatcaagaatgcaggataatgcctggcacacagtaagctttgaatgagcagagaaaatggatgattagctgaggggttctgaaacaggcagtatcatattgttgagtggccctgcgctctcgaccatcagcagtggtttcagtggtgttcatgccttttgagtagccttttccctgcttatagaatcccagaagtctgacagtctttcttcatttcatcccatatttgccccctttatttcaaggggattggggagatgttggttaaaggaagcaaaatttcagatagataagagcaattagttcaagaaatctattgtgcatcacggtgactataattaataacaatatattgtatacttgaaaatttccaagagagtggattttaagtggttttaccacacaaatatgataagtatgtgaggtaatgcatatgctaattagcttgatttagccattccatgatatatacatgtatcaaaacatca

SEQ ID NO: 880 - DNA, 617 bp, Homo sapiens
ggcctgaggccctcagtgactgcagccttcgacttagaaacggctaagcctgaaatgatggggtgtgccccggatgcctcagacaacagataaagctactccagccaggaagacacagaagtggaagacggagataaaactgcatgaaacgaagggataaaggaagagcaggatttctaaatgaagataccggttcctaaaggatgcaacctgagagaagcataatgaccatatcagcctatttataagcaggcagttaactcattcatcactctgtagctgacgcctgtgcccccagctgcactcacatggcgtggtgagctttcacctgagtgcggcagttacggccccagtagcagtcaggacgggatgttacggccactggaaaaagagaaggggtacgcatctatgagatgtattgcacgcacccactcagctacctgaatcccagcagagacccaacgacagacgctgcggtggaaacgcacggcctctggtccctccataactagtttcctcggaccgttctgagatttcaggaaaggaaacacatgtttaactaaaaacccaactgagggtcaggtacagtggttcatgcctgtaatcccagcactttg

SEQ ID NO: 881 - DNA, 578 bp, Homo sapiens
  misc_feature 471: n = A,T,C or G
caacaaggctaggcactttcctaaatcagactcttacgaggaaaaacagctcacatttgttttctctcttcactgtggaaaatgttgcccacagcaccagggggatgatacccacttgccctgtgggcttatctggctcttcagggataaagaaagatgagaaaaggccatttagttaatgaggcctccacatccagttagaatttccttcggttccttcttccctcaatcctttcttctaaggctgtaagtggcctgagggtttgcatcactttgtgagtgtaaaatgttaggctcataaatgcttagtgagaacacaccttctctgtttcagacactgtgctctgccttgggcatacaaacatgaataagacactgtgtctgctttcctggaactttagactggcaagagaggtggattattttagcactacattattggtcttctgatagacacatggactctactgngggagcccaaaggagcagttcctgactcaagagagtagagtcagattttacctcctccaggaagataaaacctgagatcagcattgaagaatgtatcggtaggagtc

SEQ ID NO: 882 - DNA, 451 bp, Homo sapiens
gaggcaatgcctcaccatgcttcggctcacgctcggtgtgctgcacccactgttctgcacccactttccgacactccccagtgagatgaacccagtacctcagctgaaaatgcagaaatcacccatcttctgcatcgctcatgctgggagctgtagactggaggtattcctatgtggccatcctggctctgccccgatacatttactttctacaacttagtagaaccaacttacctcatttatatgagaagcatgcaagaagggcatagaaattgtccattttagtacacacttaaggaaaatgacagtaaagatgagtatcccaaagcaaatttaaaaacttaaaagataggaattataagtgagtgattcaattagatcataactttttacaatactggaataaacataatagtacacatgcatataaaaccaagtattagagaatata

SEQ ID NO: 883 - DNA, 492 bp, Homo sapiens
agaactgtttgtttatttatttattgagacagcctctctcttgcccaggctggagtgcagtggcaccatcttggctcactgcaacctctgcctcccagttcaagcaattttcctgcctcagcctcccgagtagctgggattatagacatacgccaccacgcctggctaatttttgtatttttagtagagacggggtttcaccctgttggccaggctgattttaaactcctggcctgaagagatctgaccatcttggcctcctaaagtgctgggattacaggcgtgagccaccgtgcctgcaataaggaggcttttaatctaaggtctgaatgacaagaatctaaaccatgaagagatcaggggagaaaaatgcaggaaaagaagacaaggacaaaggccttaaggtgagtgtgagccccaacaaaagtgggggagtgggggctggcacatgctgggttagagggtgaaggaattagatgaattttgaatact

SEQ ID NO: 884 - DNA, 363 bp, Homo sapiens
gcaaattgaattaactaattgcaaacccagtttgctctagctgaagtatgtggaaaagattggattaactattatatctggaaagtcaaagggttttctggcctcaagcattgatgaatgaagggtatcaagctatatcaacaggatggatctctctcttttttctccactttcctctgtgctgtcttcattctcagaaggtactttccttgtggcagcaaagatgactcccatgatctctggatctgcatagttcttactatttgcaatctaagaacctatctctttgcgtccttattgctctttcagaaggtctctgcttgacgctcttagataatgtgtccacccttgagtcaaaagaag

SEQ ID NO: 885 - DNA, 395 bp, Homo sapiens
aacagcataaattctactttattgtatgtcaaccatatcatattctttttttttttaagtaagctacataatttatcagctctttcaggacagcagatgtcttcctcatgatatgaaaggttttttgttgttgttgtttattaaacaaatgtttgaattctgccatgtgctatatgctgggaaagcagcaaggattggagtgatcattgtcccctgctctcatggagcttatgacctaagagtgaagacaagcatgctacatgtacttagtatctgtatccaagaatgattacctgctgatgctacagttttgcccctgcttaaaatccttaattcacagaagtagaacaggaaataagaaaagctttaaacacaaaactagcaaattacacatt

SEQ ID NO: 886 - DNA, 534 bp, Homo sapiens
gactaacggcattttcattcgtgaacagttcagattaactcataaacaacagaaacattttcacagccagacaatggcactctgtccgctgtcaatatttctcatgttttggaagaagcctgaccaaccaggatgacctcttgccatagcagtgtggctattcaggctagttccaggacgcagtgcttgtcccaatgtaattacatatgctgcttgacattagggagccactggagaagtttattaaaagtaatttccggctggccacagtggctcacacctgtaaccccagcactttgggaggccgaggcaggaggatcatgaggtcaggagtttgagaccagcctggccaacatagtgaaaccccatctctactaaaaaaatacaaaaaaattagctgggcatggtggcagacacctgtaatcccagctacttgggaggctgaggcaggagaatcacttgaacccaggaaaccgaggttgcagtgagccgagatcacgccattgcactctagcctgggcgacagtgtgagac

SEQ ID NO: 887 - DNA, 542 bp, Homo sapiens
ctatactaatttaagaaacctatgaaacattgatgtacttgaaattgactttggtgcaagtatttaaatgagctatgatattccaccaatcacaacaagctgtggttgtcaaaatttacaaataattttaactttacttgtgttttgttaaaaaatttttaaatctaaattgtacgtctaatctctaccaattaatatacttgtagatgtgttgtcaatggggactttgtcactgctttgaggtttaaacaactattctcccatagggaggctttgtgtgtgtgtgtgtatgtgtgtgtgtgtgtgtgtgtgtgtgtgtgttgtcttttccagttaatgtgcttagggtttgcgacaggagaatctaggaccaagccacatcagttctctccttaatccactccatctgcctactcttccagttgtgctaccatagtgctcagtgcatttctaagagcaacaaaaatgaataaatctcacatgagtttttaaaaaataaatacataaattaaaatattttgcatcaaaatgttccacaaatg

SEQ ID NO: 888 - DNA, 616 bp, Homo sapiens
tgacagttccttctatacacacgatctctcctgccaccatgtgaagaatgtccttgcttcctcttcaccttcctccatgattgcaagtttcctgaggcctccccagccatgtggaactgtgagtcaattaaactgctttcctttataaattacccagtctcgggtgtttctttattgcagtttaagaaaggactaaaacagaaggcaaagctactttggaatcataatgtattctgatactataatcactcaggataacctatcactgagacaaacgtgtgcagtgaccctgtcttttctgggatgagtccaccttaatcattttgattgaaatgactacctacagtggcattttaccaggtgggaaaaaaaaaactattcaagattgttaatctccttacagataacagaagtttgatatctcaaggacatagaaaatgagcctaatttgaggttcagtcacaatatctcaatttatttaaaaaccagtcaagtttcagttcttttttgatgaacactctgtgtgatctgatatactgctatgcttgtgtaaatgtcccttctcaacttaaaagcttttctggcctggcataggtcaccaaaatagatggattta

SEQ ID NO: 889 - DNA, 522 bp, Homo sapiens
gttaaagtgttaagtgaaataagaccttgaatggtgaggaatggtcaaacaactgctgtaagaattacgagggatagaataccaagccaagagtcatgcaaatcagggatactaaagaatgaggaagcagagttggttttatgtaagcaaaagcaaatagcaggaagtgtagcctttttaaagaaatctcagtaccacagcctgttgggagagattatttgtgattgggagaaatgggagccatcagcaagcggaggggcttggaagtgatggatttttttcatggtttttttcttctgactccgttcgagattataggtccctagaaggtaaaaatctggtctttcattccacaaagtgttttttgttttgtttttttgagacggagtctcgctcttctcccaggttggactgcagtggcgcgatctcggctcactgcaagctccgcctcccgggttcacgccattgtcctgcctcagcctcccgagtagctgggactgcaggcgcccgccaccacgcccg

SEQ ID NO: 890 - DNA, 501 bp, Homo sapiens
gcttttagccatctcaattattatgacctaagtttctggttccttcttttgctcttttgtgttacttttactctcttatcacttccagaaatagaatgccattttgatgtgtgctgatgatgaaacactcatgatagttgctcattattagtggtctctggtcacacatttcaaataagcacagaaatgtaaagaatagccatgtgtagaaaaacacatagaaagtaaatggtgctgttgatttgttctgaaataaggactcttcttcctgcaaatgtactcattaagatgttgtaactggctacacagtgttctggttaaaattggttaaattttcaccaaagctatgcatcctctcaattagtatttcagaaaactttattcaaataatccacagctgaaatgaatggtattttaaaaaccatacagatatgatgatatatatctatagtaccatacacacataatacaaaatttttggtcagaaacaaccaatgggga

SEQ ID NO: 891 - DNA, 563 bp, Homo sapiens
cagtaaagaactagtttaagaatgtgacaaggcactgaacctaatataataccagggagtcaagacaatgagaggaaactcatactgagggtgggatatcaactggtggaatccttcagagaatatggcagtaagaatcaaaggtttatattcataggcttgatctagtgatatgcatttagaatctcagacttagtctaagaaaaatctgaaaaacacacaaagattcgggtacatggatattaacctaactgccaacaatagattggttaaaaaaataggaatatcatatagccataaaaaaatcatgtttttgctgaaaattaaaaggcacaggacaatgcttacaacttataaagggaaaagagcacttgcaaaatggaactaatcagttctttacttggatccatatactgtttcaggtagttgatgatatatcacaaatgacatgtatcattgtttgtgtacacatatatacacacacagatacacatattcatacatatatacatacatatatacacacacacacacacgggagaaagagacaggaagggagaaag

SEQ ID NO: 892 - DNA, 567 bp, Homo sapiens
aaacagaattgtgggctgccagtcatgagggagggagaggagtattgcatggaaataaaactgacacatagtgtggatgggatccaggggagaaatgcggagcatgcaaaggagtcagctgaggacggagccacgggacctctgcactcgggaggctggaggaggaggaagatggcgcctagaagagcgagttccccgggagagaggtcagggagcgaggagaggtaggaaactgcagggaggcaaggccggctgcaggaaaggagcccggaaacctcacacgctcataagcaaactagagagtccagaaggccacagagaagacccaggtgggctccaagggcaaacaggtcccagacctgaaggaccagacatctcttaggaagcccctgtcccagcagacaaggagagagagcctgtgccaggggctggggagaaacccgcgcaggcagccacacagccagtttggatgccaagcaaaaacagccaaggtcatccgggccaagtcaaatcacaggccaccaaccatggcatggccaccctgtgggagcatgagcaggaactctg

SEQ ID NO: 893 - DNA, 500 bp, Homo sapiens
cttccttaattgtattccattatctaatatgtttatgagaaaatgactactatcaaaggagctttctctgatcctgatgattgtatctgaaatggcacctccctcttttcaatctctacctgcttatcctgccttatcttttgttgttattaatagtgcaacacagtattttaaatagtatagttttatcaatatattagatgcacttatctctcttagcacatattatgatgccagggccattagattaggaaatttgttttattcactattatgtctccaacacttagaataatgtttgacacaaattaggccacaatcaatagttgtttgagtgaataaaggctgggatacatttacctccatctcacttcaaagtctattgaagtggcagaaagatgtaaacaagaacaataaagctaccacccaatatacatatacaaaacaacaacagaaaaacaaaatttatagtcacaacagagcagagaaagagttagccc

SEQ ID NO: 894 - DNA, 297 bp, Homo sapiens
ctcctgtcctcctgtaggatccaggctaagctggagaggcctcactggtgtggagctcgatgacgtcatctaatctattagtttgtttggggcccatgagggcataatccactgatggcctcatcgccatgccgtgggtccacactaccctcaagctgaggctatgcttcctatagcaggaataccaaggctctttcccaggagtcctgatgagaactttgtctcaaggactcctcattggcctggccggaactttcttagtgctgcctttagtctaagactttttctgtcccacct

SEQ ID NO: 895 - DNA, 268 bp, Homo sapiens
cttgctatgttgctcaagctggtcttgaacttcttaagggatccttaagggattctctggccttggcctcccaaagtgctgggattacacgtgtgagccaccgcacctggcctctcttcctcttgatagtgttatttatccctaggaattgggaggaaacctagctttctaggacccactgagcggatctttgtgccctgaagagcacctttaaatgttagattccagccgggcgtggtggctcacgcctgtaatcccagcactttgg

SEQ ID NO: 896 - DNA, 660 bp, Homo sapiens
atgatttaatttttttctttgtcatgcaacaaaactggtacatgtagattcttttgaatagcatgtgaggtgctagcatttattttaattctttaatatttatctttatgcttataatagttaaccatgagaaagtaagttttctgacatcaaaatgtgcttttgtataatgactaagagaataatataatctcatctattgtaagctataaccaggggaagatatattataataaaaaataccaagacctatgagactctagaattgaattggaaaagtaaatgctgtaatactttgaaagagaaatctctcagagtattcaagaaacttcaggaaaaaggtaggacttgattcagattttaaagaagtgtagaattttgaaagtctcaaataactgcagtaaccatattaaaggactgattgatagtatgaaaaaccctgtgaaaatgctaccaaatgcagtgaagatggaaggaagaaggtagagaacgtgcccataatactggattaacagcagaaaagattagaagttaacatggggttagagttaggaagcaagcttagaacatcaggcagacaaatacttaattgatgatacaatacacaatagtcgtcggtatgtttttcagcaagtgtaagatatgataaaacctgaattt

SEQ ID NO: 897 - DNA, 412 bp, Homo sapiens
cttcaccattcacaggatggtcttgatcttctgaccttgtgatctgcctgccttggcctcccaaagtgctgggattacaggtgtgagctaccgcgcccagcctctcctaggtgtttctttaaatgtagatacctgggccctacctgtgccttacagactcagacgcaggtagtgggtctcaggaacctgcattttaacttcctcctctatgcatcatttgagaagcatggctcagattctgacacaggaactgctttagttagggccttctgttgtgtttgaagtgctgtgttcctattataatggatactgatctggctaacatttaacaagaatcacagccttaatgaaaaacgtggaaaacatttattttcttttaaaaaataatattttcttttgtttttgatagaat

SEQ ID NO: 898 - DNA, 679 bp, Homo sapiens
ctttggaaccgaacctgtggtatctctgggatatacctcagtctttagactaaagtaaggagctgagtgagggtttcatagagtaggtggtgatttcctgattttctggagaataagtgagtacttaaatagtaggcacagaaagatgcagagagggaattctcaacagcagtggtgcttttttttttaacagaaaaacaaagttagacattgaaaagtaaaagtttctcagtatgggagatcctcaagaaattcagaaagtgattataaacaaagaatagatcataaactactatgaacattatgctgtagtgtttaggtattacaagacaattgcacatatgatcaaaattttatttagaaatattcctgtgatcaaaacagagggatactttcaggggtgagtgagaagggatttaaatagacactataacactatggggatattttaaaataaataattaaacgagtaatgggaagggagaaaagtgtttggataatatttaaacaagattaataggacttggggttgcttgggtgtaggtgaaactgaccttaagaaggagtacaggcatacttcagacacattgtaggttcaattccagaccactacaataaggtgagtctcacaattttttaggttttccagtgtatataaaagctatgtttacattatact

SEQ ID NO: 899 - DNA, 669 bp, Homo sapiens
agagtgcttaacaaaactgtgatcaaaagaatccttaaaattgcctgtaaaaatatcttaattcagagatatgtgtcaacatgcaaaccattctttgatactgatctgcttggttttgttcacagaatcaaacacaactttactggaaattaatgataataaatatttttgtttcctcaatattgtagaggggtagttagaaagatagtttaattcactgctgtggctttccaaatatgttccttggaaatgtggatcttcaaggaccatttggaactcacagtgttgaacatatgtatagcctatgcttggagtcatgtttttgtgctttacttctaatggtgaattgggagcctgaagttacaatcacagcatagaaacaaaaagagagaaaatttatgggtaggaatacaaagatactaatcttacagatataacactgtgttagatatagaggaattaatgataatctcagtttggttccttgtacagcagcataatagataaaaatatgctttttggaggcatgcagcaggttttcagatattgaatgacgttttctatgagcaacatttcctatgactcagtttccttaaacataaaattgtgttaatatgacttaatcatcaaagggaaaatgcaataataaaaatattcgaaaaatctgag

SEQ ID NO: 900 - DNA, 357 bp, Homo sapiens
ttggatctacttcattggtgcaacattccaggtttgataaaacaattgaaacacagacatatacaactatttacttcacacacacacacacacacacacacacaccccttaaatgcatgtgaatttacttcttttataggtaaaagaaccatgactcagattttcctgcctccttacttttcttattctctttactgttccctaatttctttctggtgaaatttgctatctctcattctttgcccctccttgtagccttacctcaccctggcttcatgtggccttgtgtcagctcatcattttatttctatccaggagtcattctaggaaatcaagtaagcacgtaaaaaatcaaaa

SEQ ID NO: 901 - DNA, 433 bp, Homo sapiens
ctagcatacaataaggatgtcatcacaagtaagtgagaaaaatgaagcttttaatttttatatggttaaaatgatcagtgttaatttttttcatgactaccggattttgtatgacagttagaaaagtctttcccaatctgaagttataaaaaaactagtccagggtttctgtctcatgttcattaaaaaaaaaataaatttattactggtgttagaacaattagctagcatctggagtaagttagcattgcacatcttacaccagaataaatcccaaattgattaaaggttgaatttaaaaaataagaccatgtaagtacaagacaatatcattgaattcttttatgtccttggaatgaggaagacctttcttaataaaatacaaaatctagaagtcactaaagatgaaaaggataattttaactacataaaa

SEQ ID NO: 902 - DNA, 569 bp, Homo sapiens
atgtacaattattatttgtcaactaaaagaactttgaaaaggaaagaaaagttttttacattattccaaacactcttcatgaaattcttacataaaattgttccacctgtgtcttttgatatttggttacagaaaaactggacatatggttccttctcaggaagataaatgtaaaggtttaaaacagaccccaaccaaatggagtgtcacattctgatacgaacgcaaagtcaatgtgtgctgactgcacaagcagtgaataaacacctgaccttgtgacactggaatgttgcaaagtcatgaagtttaaacaactgatgatgtacaatttttgacattccataggcagactatatcccttgtagtttttcttaaagacagtgtttactttcattttaataatcccactcttcagcctcctagatgtcacctagtttatatccttctggtgcacagctgaggctcaaaattcccagcaatattgtatctctgcagaaaacttgcttgcacaagacttttattcactcaacacacatttattcaacagtgaataagagtgggacacaagt

SEQ ID NO: 903 - DNA, 572 bp, Homo sapiens
ttactgattaaagtaattttacagtgtattctgcaagaacagtttttcttagtttgtactcagcttaaagatacacaggaatgcaaatgaaattactcactaaggcactgctccctatttggaaacaatacttctctctttcccaaactgtgtgaaacatatttcctttcaaaattagattaccactttcttttattttgagatctttaaaataattctacaagttcttgaactactcagaaatgaacttgtaataaaatcaagattgggaaatactgttttattaatttgagcattaatttcatgattgcatattacttagcctctaactagccactatggaattgaccaaaaatggcttatctccagtagttattctttctttaattaatttttaataaaaatatattagcatggtaaaaatcacataatacaaaggacaggcaatgaaaagtgtgcctgctgcgtagtccagattcccatccagaaataatcactatttgtactttcttgctgatcttttcagaaatgttccatgcctacatagcattcatgtgtactaaataaatata

SEQ ID NO: 904 - DNA, 439 bp, Homo sapiens
ttttggattcagttactttcatgttagagtcttttctcagttattaggtgattccttgttttctgaccataattaaataaataattagctaaatatttcctcacatccaggcttggattctgtttctctgggtcagtagttactgtcatacatctgctttgcagcttttaaaagtgtactgacagaattagaaaaaaaaatcttaaaattcatatgcactcaaaaaagaggctgaatagccaaagcaaccctaagcaaaaagaccaaagctggagacattatatgacctgactttaaattatactacaaggctatagtaactaaagcagtgtggcactgttataaaaatagacacatggatcagtgaaacagaacagagaagcaagaatgaagccacatacccaactgatcttcaacaaagtcaacaaaaatgtacatt

SEQ ID NO: 905 - DNA, 154 bp, Homo sapiens
tgcaaatctccgtggcccatataccagtcaagagtacctgacgagcccttagagcccatttttattcccaagtaagtgattggctggatgacttcccttacctactttgtccagaggctgttcacctgggagacctgctggtatatgggccacg

SEQ ID NO: 906 - DNA, 465 bp, Homo sapiens
ctgacattttgcctcttaatgtgcatgcttgagcccactagcccaactccagagatcttgttgggaagctgctgatgatccgtttcaggtgttttctatctggagactgcctttcgctggcgctggctgtgaccagtgattcttttggagaggtagttaacaaccgcctgatcatcacctgatggtcgcctgacattctggtatatttatgaagactgtaagggtgactacagaaaggaaatgcaattgtatttctattttacatttatggccttgaaagagtagcctggattttatgaaaagactggtatttaatgcaaggaacgaactctggagtcagatacctagtgtgtccagggacaggctgcccttagtttgagcaggaagctatatgtgcagtttgaggcatcttggcagatggacagcagcccatttcgggtactgacaccgggcactgagtgctat

SEQ ID NO: 907 - DNA, 643 bp, Homo sapiens
tcttagaggtcaccacaagttcgctggagaaacggggaaacaaagatgccagtggaaatcttccatttagttttagcctttatttgttaacattcttctgtcacaaggtcttctcacccttgccaattatagaaagccattaatttgaaacccattaaaagccaccttatgatcaagaaaggatcaagctgaattaaattttccagcccaggaatattgatataactgaaacacaagatggaaaatctggacttgaagatcccaactagcctgcgtgttctcaaagccatgtgctgagaaaagaccccaccctgttcattttaagccttgtacttgtactttcctttgaaaacattgaactttagatttatttgactgaaaaacagatcttaaattttcccctcaaagatttttaattaggatatttccaactaattccttttattttaggaatggaagtaaaagcaaatgtatactaattctgtcattgcttgtttagaagagaatgagtagatgcttatctacatcaatagaaaattaagtaacgatataaaattataaacacagctactagaaaaacacaaacgtcccaaataatcagaaagaaacacacatacgacaaagaagaccacttattgaaaga

SEQ ID NO: 908 - DNA, 451 bp, Homo sapiens
gtctaacttcttacagaaacttggttctgtttctggtccctctagtttgttctgtttagttgtctctacattttggcacccgtaacatgttcttttatttaaggcggggcagctcctcttatattattcttcctttttacaattttcttggctagtttcacttatttacacacacacacacacacacacacacacacgcacacacacacacacacaggttcagtgacctgcgatagaaaataaaaccattctttgtcttccttcttcacatctggctctgatgggaagtaccatatcacctcctctccttgaaaaagaattgttgcttcttccatcacgatatagtgtagtggatgtaacctgtcattagcctgctaaaaaacattttgcaacttaaatgctgtctaggaggacgaggcagataaatgtaggaaaaatctcaacaacactg

SEQ ID NO: 909 - DNA, 269 bp, Homo sapiens
tggagctgagtcttaatggacttcttctaagctccagatttctagactctctctcgtcccttttattttggtcacaaactgactaattctttcctgagctcacttctctttttttaataccttgttcaaaccagagtgccaaagccaagacatattattgtttccaaccatttcccctagacgtgtaggatcattagatacatagtctgcctcctaaattatcccaagtacagttttatcaaatgttttcccacaacttaacataaatc

SEQ ID NO: 910 - DNA, 270 bp, Homo sapiens
atgcagcatgcttattttcaatgtaatgtaattaattaattagaaatctgattcggaatgtctcctgtgtacatcagaataaaattactaataataaatataaaaacctaccatctctctcctcaaatactgtgtcttcatagaggaattgtctgatctactctaaaataatcagcacccaaatttattcattctctttcctctttttctcctttaatgtctttgtatttctcatctaaaattatataatttatttattcttcttatcta

SEQ ID NO: 911 - DNA, 444 bp, Homo sapiens
gaggcaccacctctctctctctgtttctgtctctctctatctctatctctatctctctatctctctcttcctctccaccatgtaagggcacagcaaaaaggcagccatcagcaagccaggaaaaggaccctcacccaacgcaaccatgctggctggcatcctaatctgggacttccagcctccagaaccctgagtaaatcttgcagctgttaaagccacccagtgtgtggtactttgctgtggcggctgacttagccaggggctgaagagggttagctgaaacacagatcgaaaggctcagagaagaagacatgctagaatggatctaatcctgctggctgaccactatggggtcagtccttcctggagaacagtctattttccaaggtgagaaagagtgcactggtgagggaatgccaacaaagctcaagatgcatgttcttt

SEQ ID NO: 912 - DNA, 387 bp, Homo sapiens
aatgcaccttcaccctgagactgtctaaaaaccaagcttggctgatatttggaggatcctaggccaggcgagcggagcagctgagtcacaccctgtatgatgtgtctgcaaatagatctgggtcaaaatgaaatacccccttgcctggctcagagagaggcaatggactgtgtgaactcactgcttccctccatctgggcacagtggttgctgaaaagaggaagtcacagcctgggagagttgggtagcacagacaattctcgagttttgaaagctattggcctcaatgagccccgtgctccatgggaataaagggcacaagatcctccaaccccattttgcatttccatgttaaaaggtgtgtgaattcagtgcaaagagatgtag

SEQ ID NO: 913 - DNA, 414 bp, Homo sapiens
tagtaatttaaagaaaaaaaaagaaaacatgtttggagcaagagtacacatggtatgattagggcagcaatgactagtttgctccagtttggctggagcagagatgtggcacagtaggcttgtggcaggcaagaggatcacactgtgaagagccttgaatgcatagctaattcatttggtttcgtcatgtaaaaaaggggtccagtgaccacatctttgaggacaaaactcaaccttttgctgagaatacatttatacctgtcagatcacgtgactttgctttgatgccgagaaagatttcaccatggcaatggggagcccctgaaggtttttgagaatggtgccatgtgtgattataaaattagcctccagtgtggtggctcacacctgtaatcccaacactttgggaggctg

SEQ ID NO: 914 - DNA, 331 bp, Homo sapiens
ttcccacttttgagatgaagagactgaggttcttagagaatccaaggccactccatatgatcgaggactcaggtccctcaaagtcagtgcttctgacaacattcttttgctttttgttcttttctttcatggttgaggctttcactacatataatggataaatggtccagttagcggcacaggtttcagtctcactgaacctttaatcaggcacatcccccttttggatgtaatggaaataccagttaacttccatcaataaccatcttagtttcttcttccataggtctagctatatgaccttgaataagtaacttaacactcctgaaca

SEQ ID NO: 915 - DNA, 549 bp, Homo sapiens
tgacaggaattgataagggcacattatgtaaaatctggagggcaagcctttcccttttaggtcaacactcacccgcaagctaaaaaggctaatcaacagaagcattttctgtgttcattccagagaatttcccaggggcacaataaatctagcctgcctgtttacaggaacattgttatttaacaagctagtttccaagcttaagagttttcggtttcatcaaatctaacccagcttgctaaatgcctgacattcattattgtctgctccggttcctctgtgtattataagataattttgcatacttaatataaagatagtttttacccacaggactaaccttaaatttattagaaaactattctaaactcttggatccctttctcttttttttcttaaccatttacctatgattccatcctgtctttaacctgcccactagtacttctagctagctagtttatctgatttacacattcagtaatttatttgttcatccatctaatgttattttgagcctctgctctgggctatataaatgtgatatta

SEQ ID NO: 916 - DNA, 629 bp, Homo sapiens
aaaggcaaaaatctcataaatctagtttaaaacacagcaaaacctggggggtggggagaagctggcaaaatgcatataaggcattaatagataatacagaaagacctccaagaaatcaatacaaaacatttttagaagtccattttaacttctgtcaacattagcaggacatctaatttgaatacccactactgtgctcattcgagaaagttcaataaatatcttttcatgcctaacatgtactaagggctagagagatcagtataaacacaacagatgtgtaccactctctcaggtaacttacagtttggatttgattcttacgtgataaaagcattccattataggatcatctctctgtgcccacagtactaataaataattctaatccatttgtttatttatttctccatagttctattatgttttccattgttttggaaatattataattctcatgctacagggtcccacaatggggtaatgtatatttttaaggaatatttcctgtttcttaattcatcatacttttaaccaacttattgggctcacattctgtaccagtctgtaatatatgctaggactataaaggtcagtaaaggtgattcctgttctcagggaatttacag

SEQ ID NO: 917 - DNA, 286 bp, Homo sapiens
ttctaactctgaaaaaatcactagttgtatctggctttagttaagtcatgtgcaaaacaaaggtggattatactaaaccctactcataacatcacacaaagtaaattgagttgaacagagttaacactgaatttctctcaaaatggcatagtgatgaagaaagtaaacaattagcacaagtgacgaaacattttattaccatctataattttgggaatttctttagtaattatccattctccaggctgtagcagagactgtccataatacatatcagactctgcac

SEQ ID NO: 918 - DNA, 477 bp, Homo sapiens
atatcctaagctaaatatgtaggttattcattctattagaggaatatgaagtccatgttcttagtgaactggcacattgagacatactgcctgatgagatgggctgccaaattagtaattgtacttttcaatgagatgaagaaacatctatcttttttttctcaacttagtctgaaaaaattttatgtcattggtcactgaaataacacatattctttgtacaatacaaaaaacacataaagaggaaaacaaaagtcaactagtatcttattttctgttcacattattttagtgttttgctttttagtgcatcttcaatgcctttgtatttgtttatatgataatatggtataataatatagtatcttgagctgggtatggtggttcatactggtaatcccagcactttggaaggccaaggtgtgaggattgcttgaggccaggagttcaagaccagcctgggcaacatagcgagac

SEQ ID NO: 919 - DNA, 632 bp, Homo sapiens
ttacaaaatgaaaggcctaggagaaagcttagcatatgacacacgaaactttgtgtactcttattctgccatgctggaatcctagtttcaagtttctcatgccatctttgctcccatgagcctcataatgtcttttgggggtattcacagatttccagtcccaaaacgcccgtctgtgtaagcacagcctgcagctgacatgtcaaataaactctctccctaagtcatgacattctcaatattgtctttcctgttgttaacacatcacttcatcaaggtgttgggatgggatggaaaacaaggggttaagccagcccaccagtgcccaggctggttcctgacagccgacgctaggtccacccttacattctgtgaagaacactgcccttgagactgtgggatgattcctccttagggaggaaagatgtcttcacctccccaaagccttcttgtccaaaggcttgccaacttccaccaggcccactaattagatgttagttcacatcgatccagggctggccataacccacagaactcctggcctagccctgcagatggctccacgcaactaacgctgtaagaatctaattccatgttttgaattacttttcacaattcttttcacttcatat

SEQ ID NO: 920 - DNA, 606 bp, Homo sapiens
agacaataaggtatggtggagattgtggcaaagtagagaccacatgccctctactcagcactggccaattgttacctcctcttccaattttcaagtctaatgggaaagctatatttttatatgaaacctctgaattggcatttctctcagcatttttattttgtttttacatcatgtgtggataagacaaaacatgtctgcaggtaggcaatatctcctgaggcagtggaatggtccactgagttttctccttcagaaataaaacctatagctgtggcttgtctctgggctggggcaagacaaggctgaaaaagagaggctgaggcaacttctgggagttagttgataattaatgctaaaacttttataactgataaatttacctgtcaaatttcatggctttgggaatatgaaaaacacatctacaaacctcatctaaggccgggcacagtggctcacatctgtaaccccagcactttgggaggccaaggcaggcagatcacctgaggtcaggagttcgagaccagcctggccaacatggcgataccccttctctactaaaaatacaaaagttagccgggcatggtggcaggcgcctgtagtccc

SEQ ID NO: 921 - DNA, 626 bp, Homo sapiens
atttgaactgggccaggaacaaggttctctttccagagaccacagaactccaccctaagaacatatgcagtgaaaacttcaccttcacatctttcttatttgtttaaactgttccaaccttccccctttactgatagcttttttggaagataatcttactttcttagttcaccttttatttggttttgaaattctgggcattttctagacaatagaatttcatattggtatgtgcatataaattaaaggattaaaatgatttatatgagtgtgcatttttgtaaggatatgcatatgatcagttctttttgagagtctatattgttacaaaaataagaattgttccccacctccacatgaaaacagacaattctaacagactgaatttctaaactgagtggcacttggtattttaaatttgattactattgggagaaaaaagcaatttcctatttcttaataaaaaatacttggaaaaattcttacagcattcttaaagctttgaacttagaaaaattctatataaatgaaaggcatgtatttatgtgccacttaaaattaaagttttaaaataaaaaaagagaatttacagctgaattacctaacactgattccgtcacaggaca

SEQ ID NO: 922 - DNA, 405 bp, Homo sapiens
gagtgattacgccctggcaccaggcccactttccttcgctctcaaagataccgctattgacacatctgagccggactgggaactttgagttgtcttatggctgcaatcactgatttgtgttaatcacccctttcttcccttgattctcacttactgtcccacatgactcctctatcatagatagtaaataaaagcttgaatgcacgcatgaatgaacggaagactagactggcccaatgtgggatctaggactgtgactacatttttttatttgttgagccaaagaagtcccataaaagaaggggtcttactcccatcaatcaaagttaagactgtacctggggctttttctacggcatgagtcagcctttacagtgaggtctgctttgcatctcctcacccatc

SEQ ID NO: 923 - DNA, 401 bp, Homo sapiens
acattctgaacttccgtttcctcatctggaaaataaagctagtactgggaaatagtcataatttttacaaggattgcattcaattaaaacatctagaacatactgcagctcttactttaataagataagaaatcctctccaggtgggtaggagtgaccgacagcaaggagtcatggactggagaaatgcctggagtccacagggcagaggagcttccaaatatttggtttaggacagagtcagacagtcatatagcctccagtcgcagacaggagctcaagtattgaacaggaaactgaggcagaaattccaattctgaacaagatggaggcgacagggcacggatttggcatgcagataccccgggctccctccgtctccatccccatccccccatccct

SEQ ID NO: 924 - DNA, 540 bp, Homo sapiens
ttttgttccttatttattagaactctttcctttttctcaactatgaatattcctatcagtcatacatgagtactccaaatagccacattgtcttataaatagtactccaaatagcctttcattgtcttctaaaattctgtaatactttttcttagagcatataacacactgcacagaaatagcttgataagcattacataattttaatatgcagaaagcacaaagaaagtttaaaggcatgatattaccctacacaaaataatttagtgctatttaagttaaaattaatctaaaactgaaaaaggctgtttgtttttagtttctgtactattcgctaggagcacttaacacatatgaaattttattggcacatttgtctctccactggatgatacgctcttggaaaatagtgacaatgtcttgccttattaatcttagtctataaacccagcacaggtctggaagaaaatacatgctaaaatatttgtgcatacatgaatatgtactttagcaaaaataaaacaaaaattaaatacattc

SEQ ID NO: 925 - DNA, 562 bp, Homo sapiens
cctgacctcaggtgatccactcgcctcagcctcccaaagtgctgtgattacaggcgtaagcaaccacgcctggcaccctaggggtttattttcagaaaaataatttgaaggaaaagaaattttatttattttagaatattttataatagtttttccccatactaaataaaaaattaaaggaatgtctcaaatgtttaacagtagagaaatgattaagccaattatgccatctctacatgatggaattatatagtttttaaagataagactcatgatgagaaaactcatgcaacaacatcaaataaaaaagagagtataacaaatttatatgtatatatatttggtaaaataacatcaaatcaaagtagaacacaaatttgtgtgtacataaactgtgattacaggccaggcgtggtggctcacgcctgtaatcccagcactttgggaggccgaggtgggccgatcacgtcaggagtttgagaccagtctggccagcatactgaaaccctgtctctactaaaaatacaaaaaaattagccaggcgtggtggtgggtgcctgta

SEQ ID NO: 926 - DNA, 543 bp, Homo sapiens
acagcaggactgaatggagatgcatgccgagaaatttcacctatttggatctctccagagcctatgtggtcttatcaataatcatttaatagcaacttatattattttactatttacagagagtgtccacatatgttaacttccttgatcctcacaaacaccctatcccttgggtattttctaccagccccatgaggctcagagagatttacatgactttttgagggtttgaacccaactctttggtctcaaaaacatctcattccagtacacctcattgcctcccaagccctgtatccaggaagacctgactcaccagcatgctttctgtgcgaaaggacaccagagctgagaagtaaatcgacaccacccccaatccctgcaacttcctcttctctgtcctgtcattgagaacaccagcctaagggcacgtttttctccttccacgttctattaaagctcagtagtctaactcctactattgaaaatgagagaaacaggaaggaaagtctcaaattccaactttggaaaccacgttgaaag

SEQ ID NO: 927 - DNA, 376 bp, Homo sapiens
acagaaggggaaatacttaaaaacatagttaaatgtttaaacatcagtttaaagaacagattaaaggaagtgatagttaaaccaaaacattatatagtccagcaaagtaatgggaaaagagaaaatatcctcccaccattctaagcacattaagagtttttcaaagaatttcgttcactttcatttcaagaaccaaatatgaatgttgccaatatctcacttcacttccttgcagcctaaccacggatagcatcaagaaagcattgcttccagctcatcattctccctcccttagatacattaagacaattttgatacatcaacaaccagagacaatgtaaaataatgtcagagttaaaaatcacaaggcttttgg

SEQ ID NO: 928 - DNA, 435 bp, Homo sapiens
gaaactgggtgctgatgttttgagaagggaacccttgagtggtctcaggttttatttaaatttttaactgacaagtattgagctgctttcctggtatttggcacagacagttcatgtctctgagctttgtttttccgtgactctgtccctctcagagacatttgacaagcgttatcagcattttccgctttttatctaatggctttttgggtctgtctgcatgatgataacattcaaaagaatctacacatggtcaggtgtgatagttcatgcctgtaatcccagcactttggaaggccgaggcaggtggatcacttgaggtcaggagtttgagaccagcctggccaacatggcaaaacctcatctctactaaaaagacaaaaattagctaggtcagacgtggtggctcatgtctgtaatcccagcactttggga

SEQ ID NO: 929 - DNA, 83 bp, Homo sapiens
tctagactctctctcgtcccttttattttggtcacaaactgactaattctttcctgagctcacttctctttttttaatacctt

SEQ ID NO: 930 - DNA, 504 bp, Homo sapiens
tttacaaagctatactcatggactgagcaatatagaatccttctcatcgtatcttgttacagtctaaaaccttgtagtaaacgctgtctaatattccactcagtaataattttttctttttgagacggattctcactctgtcgcccaggctggagtgcagtggcacgatctcagctcactgcaacctccgcctctcgggttcgagcaagcaattctcctacctcagcctttggagtagctgggactacaggccacaccaacactcctggctaatttttgtatttttagtagagacagggtttcaccatgttgtccaggctggtctcaaactcctcccaaagtgctgggattacaggcgtgagccaccgtgcccggcctccactcaataagaattttcttaccaattctccaaacttttgaccatctgtaccatataagtaatgctgaaataagtgttcataggcatgttacttttcctgtatttggaatgactaactatactac

SEQ ID NO: 931 - DNA, 503 bp, Homo sapiens
ataaagccctttccttccacaacttggtgtctgaggggttcttgtctgcggctcatcctgctacagtttctgctaatttttttgacttttatttttcttgtccatctctgatgcttgctttgctactccactttgaggattttgggcagcttcaccctcagccattccaacagtccatccatttgcctcaagctctaggcagtttctcctggttcttctgttcctggcatctaagatttgtcagcagggcctggtttccaggaaccatgcatggctatggcctcctcccacctggagggctgctcctgcacctctgactggcaatggttccagctgcggcccagctgagcacagcaggaatggcagcagcaactggagcatccatgcccagggtcacctagcccagggacaccttagctacaacccagggttgatgtccagctccatgcaccaaaagccaaggccaaccagagcatttcctggacaagatctctcggtctgca

SEQ ID NO: 932 - DNA, 415 bp, Homo sapiens
ttttgacaaggaaacatgaaggacaggccattaaaagataagtaggaaaacataatgctgtccacagccaaataatcataataacaaggaacagggagcaaaagaatagaggggtgagaaggaaagcaccaactctatcttaagtttttaacatgctttcagtattttctaggattgcagaggaagcccagaaggacaaacaagtactgggatgttggatttgggggatggaaggccctgagaaagtcaaagacagcacattcagaaaagagcacgctttcggaagaccaagtccaaagttgaatgttgtgaccaagaaatgaattccctgaactcattcctattctttcccagactcctaggttgatctttgaagccacccagtgtatagggcctagtgggtgagccattcagc

SEQ ID NO: 933 - DNA, 448 bp, Homo sapiens
atacctttgtattctttttaggaatataccataagcgcagatttgagatgaagtgtatcagagcttttcagtttttctctaagaaatgagcaggctatttgcaataaacataaaaaaggaagtactgtagggataaaagaggaagtgaatggaggcaggagtagttcctgagactatcaatgggtcagttcaccaagacagaaactcagaattaaagtctaatgtatttataacttacttggctagtctatttaaggaggatatactgatgctgagaactgtctatgccacaaggatttaaagcctatatatcagagcatgatttgtactgagtagcgaagtcaaggttaagatgcggcacatgttgaatgtggacaatctgtcactaaatcacacaatgtccaagatttatggtaatgttatgactctgaagggcaaaaatataacg

SEQ ID NO: 934 - DNA, 112 bp, Homo sapiens
tagtcttttggatatacatgtgctatatttttaaggttatattttttgacttaagtaatttatgctgtaaaagacagagggattttagtcaaaggcctcttttcctagtata

SEQ ID NO: 935 - DNA, 586 bp, Homo sapiens
gtagtgagttaggatgctgtcagcagccaggaactgaaaccccatctcgcattggcttagatcacgaagtcactggttgtccccatttcacagaaatccagagcacaggctgtgggaggagtcaaagatgccatcaaggacccaggttttcccatctctctggactattttcagcttgggccccactcttaggctagtaacaagtctcatgtggacacaatgatatttaaaggaagaaggaagaccatcctttctgtggcttttctccagaaagctccctggcagatgtcccctggcagtccattggttggaaatgggttgcatgcctctaagccaatgttgggaataagaatagaatccgtggatcacctgaggtcaggagtttgagaccagcctggccaacattgtgaaatcccgtctactaaaaatacaaaaattagccatgcatgcgtggtggtgcatgcctataatcccagctatttgggaggctgaggcaggagaatcacttgaacccaggaggtggagattgcagtgagccctgatcatgtcactacactccagcctgggtgacagagcaagacttcgt

SEQ ID NO: 936 - DNA, 437 bp, Homo sapiens
aaaaccacagtataggtaaaattgggtttaaaataagtcaaatgctctgatttgaatactgattaggataacacacactcatcaataaacatggagccacaatgacctcaggaggacaaggagcttgtgatgtgcatcagttgtgtttggcaaatagcttttacttatgactctgaagtctgcttaaatccaggttcccaaatgttaaggacatgaagcttctacctcaactgccagcactgcatcaggcaaagcttctatttttgttaggaagtcaagcagcataataacaacatagtcagttctctagatcatctttctcgtcttcctactccaaattgctttttaggggttttaggaaaggttttccatcctggacatgcacttagggaggtaatgaatcattattcctaagccatattcttattctattgcac

SEQ ID NO: 937 - DNA, 581 bp, Homo sapiens
ttatcagatagcttaaaataactacgattagtatgacaggctctaatggaaaaatgaaacaacatgcaagaacagatgaatatgtaagcagagagatataaacttgatgaaagcatcagaaaaatgtactagaaatcaaattcactgtaaatgaaataaagaatgccttggaggagtttaaccagtaaactggacacagcccaggaaaaaaatcagtgagcctcaagatttatcaataaaaacatcccaaactgaaatggagagaataaaagagtgagggaagaactcacagaactgcaaacatgaacttacaaatatattattcttggagaattaaacataactctaccagtaattgtcagattaagcatgcagaaaatcagtaaagacatagttgaactgaatagcaccattaataaagtaggtctcattgacatttatagaatataccaaacctaggttataaaacagacattaataaatttaaaaaaaggaaagcatacgaaatatgctcttagactacagtggaatttattgaaaattaataacaaattatagctgtagaaacccccaaaatattt

SEQ ID NO: 938 - DNA, 216 bp, Homo sapiens
gtaaattgcacaatgcagcgcttttgactttgcactagatattagggatcagtaatgtaaaccaggaagagagaatgtttccttgagagctcccactcaccctgataatttttctagtttcaccttgagacttactcttattctgcaaatactgtgactgtatcttgagacccaaacatttaatgaggcttaaaaagaggatggtctactttgctg

SEQ ID NO: 939 - DNA, 426 bp, Homo sapiens
attgtaactcaaaaaggtagattgctgaggccaaggaaatgaaaggatgcaaagagaaatggcaagagaaatagatgtatgcttcaggaatgaaagaaaacaagaattgtaaccagtcttcaaaggcagaacaagtacttacaagacagatcaaggggataaaacttagctctatagaatctctatgttataatctatattatcttaactcttaaaaaggctgggtgtggtggctcacacctgtaatcccagcactttgggaggccgaggcaggctgatcacttgaggtagggagtttgagaccagcctggccaacagggggaaaccctgtctctaccaaaaaatacaaaatttaactgggtgtggtggtgcatgcctgtaatcccagctactctggaggctgaggcatgaggatcacttgaaccc

SEQ ID NO: 940 - DNA, 579 bp, Homo sapiens
tattgctcagtgtcatacaaggataaaatgaccatggtgcaaagggaaattgaaaagttgtatgcagaagacacaaacaaaaagatcatggagaatcaactgatggggcagggtaggggaggagtccataggccatatttcctaaaaagacaacctatgaacaaaaattttacagtaaaatttaaagacttgttatgttcttagaacttacaatgaatattttgtttcacataattccaaccaaatccccatttcaccagtgagaaattagaaacttagaaaatgggtttgctagccaggcatggtggctcatgcctgtaatcccagcacttcgggacgctgaggcggacagatcacctaaagtcaggagtttgagaccagcctggccaacatggcgaaaccccatctctactaaaaatacaaaaaaaatagctaggcgtggtggtggtcgcctgtaatcccagctactcgggaggctgaggcaagagtatcgcttgaacctgggagttggaggttgcagtgagccgagattgcagcattgcactccagcctgggtgacagaacaggacactgtctcac

SEQ ID NO: 941 - DNA, 413 bp, Homo sapiens
cctgggattttgccggatgtcattcaatggctttcaaggatgatgcacagctaggccataggagagtaagctcaaattcccaccctgtcacccatacacagaaactcattctggtttttctgccatgtctaggccatacaatgaaagtcgctgaagaagaatatgaattttgcctgcggatttgctaacactcgacaatcctaggaggtaaaaggcaaaagaggggctgggtgtggtggctcacgcctgtaatcccagcactttgggaggctgaggcaggtggatcacctgaggtcgggagttcgagaccagcctgaccaacacggaggaaccccgtctctactaaaaattagccgggtgtggtggcacatgcctgtaatcccagctactcgggaggctgaggcaggagaatc

SEQ ID NO: 942 - DNA, 540 bp, Homo sapiens
aaccaccatccagagtctctttccaaatctccaggttttccctgcgctgggtaatcatgactattggccacaggatcaactgcctgtagtcaccagtaaagtgtacaatgcagtagcaaacctctggaaaccatggctagatgaagtagctattagtactttaaggaaaggtggtttttatccacagaaagttacaactaatccaaaccttaggatcatcagtctaaacacaaacttgtactacggcccaaatataatgacactgaacaagactgacccagccaaccagtttgaatggctagaaagtacattgaacaactctcagcagaataaggagaaggtgtatatcatagcacatgttccagtggggtatctgccatcttcacagaacatcacagcaatgagagaatactataatgagaaattgatagatatttttcaaaaatacagtgatgtcattgcaggacaattttatggacacactcacagagacagcattatggttctttcagataaaaaaggaagtccagtaaattcttt

SEQ ID NO: 943 - DNA, 215 bp, Homo sapiens
ttgtaagttggtttcaggctctgttgaataaaagtgtttgaatctttttttctctattaatatttcttggtagtacatatggtcaaatgtttattaaagaggaaaaaactggtaggctttaaaatgctgttaaaagttttggaaacttccttgacagaaatttcatttttggtgttgttgaaggttaacttaaaaattatgtgtgtgtgtgtgtg

SEQ ID NO: 944 - DNA, 545 bp, Homo sapiens
aggcagggtttcaccatgtgggccaggtgggtctcaaactcctgacctcaggtgatccacctgcctcggcctcccaaagtgctacgattacaggtgtgagacacggcacctggctaataaatttctatcatctataaattacccatgtctaaggtattttgttaccacagcccaaacagacagcatttcatatcagcacatacagaactttctcatttttttctttcactgtgtttagggttgcccgataaaatacaagatgcctacttaaatttgaattatttgcatttccaatacagaaaaagaactttttagtgtaagtttgtcccatgcaatatttgggacatacttatgctagaaagttatttatttatctgaaattcaagccagctgttccgtatttgtatttgttaaatctgaccacccttgttaccttatatgggagctccttattttaaatcactgggggcttcaggaaccaggtgcctggacttggtgggtgtccattctctgactgtattctgaattaggctctagaggctcca

SEQ ID NO: 945 - DNA, 280 bp, Homo sapiens
agggttcatagggctggtgtgagctaagtgagagtcggttgcagcagatggtgctgaccagatatgtgacatcggccacgggccaagtaagtggcagcaacccaccaggcagccctaggcacacaagctcacagagaaccagagtgtgctgccttcccctcacccagtttctctatgaaatcaaaaggcaccttggtaccaattaattgcctaactagactccacaagaatataaaaccgagcacctttagtactgccacagtggccttcctcccactta

SEQ ID NO: 946 - DNA, 493 bp, Homo sapiens
tttacttgataaacatcttaacatgttaaagatgcttccaaatgaaacaacaggcaagattttacaagtcaacataaaaggaaaatatagaaaggctgataatactggcatcacataagatttaagaaattagcaaatgaaaattatagtactttggttaaaatataccaacagcaatactatattgagtggagaatattaacaaattattactacaatgccatattgaggaaacaaaaaataaggatataaacaatttgaacacaattcatgattaatacctacgccacaaaattacatgttaccatgctgttccctaaaaacagggaataaatctttacaagattccataaactacttacaaacactgacgaaacaacaggaattccaaagctcaatagtttctaaaaatcaaatgttgttacaatgcagtgtaattggaaattaaatataattttaaaatcaaatttttcttaaagacaactttttaaaa

SEQ ID NO: 947 - DNA, 497 bp, Homo sapiens
tctgtatatcaaacctacttgacttggtcagcccagagatgtttcttcactcccccatgaagccaccaatagccttgaggatattggagagcttctgaaagttgtcttcaaaattcgatgtgcgtatgagttctttgtagagaggatccattgtttcatttgattatccaggtggctcatgacccaaattaaatccaagataaaagttcctctctttggtagaattgaattttctatatcaggatgtttattagtttgctagagctgtttaaacaaaatactacaggctgggcacggtggctcataactgtaatcccagcactttgggaggccaaggtgggcagatcacttgagctcaggagttcaagaccagcttggccaacatggcaaaaccttgtctctaccataaacacaaaaattagtcagatgtagtggtaggcacctgtaatctcaactacttgtgaggctgaggcacaagaatcactggaacctgggag

SEQ ID NO: 948 - DNA, 291 bp, Homo sapiens
tctttttttttaaaaaatgattacccagttgttgggtatgtctttattagcagcatgattttattctctaaataaaaatatttagaaaagatacatttacttgatacattttattttcaatatgttggaagcatgcctcctttatgttttgctcatcattgactggatagttttgtactatatatcacacttttttcagcttctatatctgatactcaggcaatgcatgtgcaagagctctctacatcttgatgaggtaatactttctatcattaatatattaactagtat

SEQ ID NO: 949 - DNA, 439 bp, Homo sapiens
tctaacctccaccttccagtgattctcctgcctcagcctcccaagtagctgggattacaggcatgcaccaccacgcccggctagtttttttggatttttagtagatacgaggtttaccatgttggccaggctggtctcaaactcctgacctcaggtgatcctcctgcctcaacctctcaaagtgctggaattacaggcgtgagccactgtgcccggcctaaagtaccatttcacaggtgaggaatacagacacattgacatgatattggtaaaggtgatgaagtccactatgctgctagccagattgaactaactggtaggacatctactggtgaaatgtgacttaaggaattatccttaaagtataaatctaatgaggccaagtgccatggctaaccctgtaatcccagcacttcagaaggccgagtcaggcagattg

SEQ ID NO: 950 - DNA, 578 bp, Homo sapiens
ttggagttgacacagcagaaaagaaaaaaagaatgttcccagaagaatttataagaaaaacacatcttatactcaagtctcaaagtaatagagaagaggagaaatgtcaccagcagaattgacttttcatgatgtccttccaagagtcttatgttctcagaccacaggaaattcatatctgcagatctaacagtaacatgaaagagaagaacaacagcctcactcactctctcctgcaaaagtgcaaagatttctgtttgacacataataaacagtaaatcccaaatgttgaggttgagggtgtcactgggggaaaactactgctctaaaaattaataataataataatagtaatattggccatttttcattaaccatggcctgagtctcagccttaagtattcagaaactcatttattcattcattcattcaacatgtattgagagctgactgtgtaccagacactgtctgaggtgctaaggaaataaaaatagggcaggtgagttaacaatctctgctaccatggagtttatattctagtgggatagaaagccagcaatagttgaacaaagaaatg

SEQ ID NO: 951 - DNA, 398 bp, Homo sapiens
atcttgactctctgcaacctctgcctcccaggttcaagcgattctcctgcctcagcctcccaagtagctggaattacaggcgtgagccactgcactcggctaattttgtgtttttagtagaaatgggtttctccatgttggtcaagctggtctcgatcaccacctcaggtgatccacccgcctcagcctcccaaagtgcttgggattacaggcatgagccaccgtgcccggcccattctgaatctgtctaccctagcaaaacgatcctttattttactttcttgccccattcgtacactggcatgactgcactcatagggttcttcacattttatatcctatttaacatcttataataagtataaaataggattttgtcctaaagaatgtggtttaag

SEQ ID NO: 952 - DNA, 550 bp, Homo sapiens
aaggagggctgaaaaggtgggcacatagcctgggagtaatgaaaggggacagatctgggaagtcagggtcaaaggacaaccgagagggaggaaggagaggcctggcattctttgactcctacgttcccccaccccctaccgtcctcctaccgagtcactcaggagtcgcttgctggcatctccaactgccctcagggcattatccacatcgcgctggccaggtaggcagctgacacagcggttcagagcctgggtcactgctttagccacctggggtgagaaaggagacagggttgcccaagtgaaaagaatttgagagatcgcctccattcacgcgacatgggagatgactagctctactgcctctgaaagtgaaaaaagaaagggggcgttgtaggtgaacaggctgaggttagggtttcaagtgacagtaattaaacttccccaaacttggtgtttagctcagcccatgactgaatccaactgagacacttctacaagaccaagagggccgggcacagtggctcacgcctgtaatcccagcactatg

SEQ ID NO: 953 - DNA, 507 bp, Homo sapiens
aattcacacacacccaagcagacacacactacaaaatatacatgcacatatgtaatagaaaaccctgtcttacatattattaattcccccaatttgtgaaaagacagttttttaattgtgaataattcagagttgttcttatggacaagtccatgaaaattgcttctactttttgttaactttcatcagcttttcatttctgctcttaattttctatggtcttaaaaaatacataaataaaccacttcaaattgtttccaaacaggctgggagaggtggctcacaccagtaatcccagtactttggaaggccaagacaggtggatcatctgaggtcaggagatcaagaccagcctggccaacatagtgaaaccctgtctctaccaaaaatacacaaattagccgggtgtggtggtgtgtgcctgtaatcccagctactcaggaggctgaggcagaaataaattgtatcagaacagtgtaaacatgtagacagatactgacaggaata

SEQ ID NO: 954 - DNA, 549 bp, Homo sapiens
gctcgttttggatattgccttgactccacattgacctcaatcactcttacccttcacattgtgtttgctctttttgcctcccacgctttagtcacttctttctcactttcatttcttctttctagtcttcctttatccactcctaacactaatctcgtagctgtagacttatctttttcattgtcctcattttttaagcataggtgaaataccggaattgatatagatttaatttaattttatctcctatgttatgcattattgagaccagaaagtagataaatcaaattggtcatacccaatcctttcctacaagatagtaaatgttttgaagtcacagactattgccatctggaatagtccttcttttgtaacccagtataatctccacaaaaatgttatttttaaaaaatccctccactctataacattctgatgacctgtaagctttcaagaagtcttcagtgaaaacctgtctctactaaaaatacaaaaaattagccgggtgcgggtgtcgggcgcctgtaatcccagctactcaggaggctg

SEQ ID NO: 955 - DNA, 210 bp, Homo sapiens
acctaaatagacacaaattacataactgtcaagagactgtagacactgtccatcaacaagttcaaaattgaaaagaaaaattgaacactggtagtttatagaagcataccaagagaatgatattctaaatcagtaagtcaacattaggcaatcctgaacatttgatttactgtagaacttcttcagattaataactatgagcaagtgacc

SEQ ID NO: 956 - DNA, 529 bp, Homo sapiens
tccttaggctcaaggaagcgattcatgtacgacagaggttgggcagatccctgggagccgccatattttggaggccaggttggctcttgaccacatgagaaaaggggacttggactggaagagccccttgctgtagctgggtctgaggtccgtctgcctgtggctgctcccctcagctctcctacatcatggccagtgccacagatggccaggacttccatcaccagcagtgtgcatggagtgcagtggggcaataggtcccagcaaggtggggcaatgctggaaaaacatgcctccccgagtgccacggagaatcatgccctgcaccttcgtcagactctgcaccagtggacggagactcatgccctgcaccttcgtcagactctgcaccagtggacggagaatcatgccctgcaccttcgtcagactctgcaccagtggagaggctctttgggtaaatgtaaataaatgaagtgtgagatcattcaccaccaaactccgggctttttgtaagaaaatagcgcaattg

SEQ ID NO: 957 - DNA, 359 bp, Homo sapiens
gccagtgtatttgggttggtttagggagccctgtgatatctttcctctgttgatttcagacattatgtttttccataataacttcttaatacagttcttcagcactaggattgttttaatatactttaataaataagaatttcctaaaataacaggcatacttctctatgcaactaacttccctggaggaatgtcaaattaaagttaattaactccaaaataaatgtaaaatttggtagttgtattaaaaaaatgccagtaataaatctaggtcttcttctaggaatattctacatgtttctctatgttttatcagcataaaatatttttatgaaaaatatcaaaaaaatttaaaaatc

SEQ ID NO: 958 - DNA, 589 bp, Homo sapiens
atctaagatgctatggctcaatattattttaaaactggactcgctactagagggtgtcctgccctggaggccattagcaactgactttctccacccatgaggcttcactgtcattccaccacattcacatgggtgggtgccagcagcatcatgaccccagccacccagaacctaagcgagatggaaccactaaccttggtttttaaacccatgtggcacatcagaaaacctataaaatatagcttaaaatttccaaagtactgggagagatatgggcatccagatttaggaaactcaaaagtcttcaattagatttaacccaagaagatcctctctgaggcccaatataatcagactgtcaaaagtcaaagacgaagataaaattccaaaagatgtaagagaaaagtaacaagtcccatataaaataattcccattatattattagtagatttttcagcaaaaaccttgcaagtcaagagagaatgggataatatattgaaaatgctgaaagaaaaaaaaactggcatccaagaatactatctccaacaaatttatctttcagaaatgaaggataaacaaatacttttg

SEQ ID NO: 959 - DNA, 572 bp, Homo sapiens
ctggccaagagttaaattctagaagagaggtgaagtctggagtatctggtttgacatgtgtttttaaattccgtggctgacgctacaaccaaaggttctgctcatgtgaagcacaaaggggagatgaaatgtagacccagaaggatgacagcagcttcattgtgccccattgcaggatgccaggcaaacccagctgccctggaataacggcaccctgagggaggctctctgcacccctccacccacccttgtttcatcctgggttggagggagcatggctgcagcccctatccctgtatcaaccctggaaaataacagagccaacctctgatccttcttggacagcagaaaagctcaagaaccttcccctctcacatctgaaactccaaagttcatcacagatttcaatgtgaattgggaatctttcaaggcaggtattatcattctagccttaaaactagtcgttagcttactcaagaaatggttattaagcacctaccatgcgttgggtatggcttcatgcactaagaatacagcagtgagccaaaaagacaaaaatcacaggtctcatg

SEQ ID NO: 960 - DNA, 478 bp, Homo sapiens
gaccagtcctgggtagatgggacataggaacatagaggaggtgacacctgaacaatataaatagattagttggaattagccaagaaagatgtgggacggcggttacaagcagaaggaacaacaagaacagaggggatggaggcaaacgactatctggttgtggggtggaggtcctgtatgtaggttggtattgttggaacacagattgggactatcttgaggtgatgtgttaggagttgggacttttattctgaagacgttaataagtctgaagagttttaaccagtttagtaaaaaggtcagattggtgtttggaagctgggctagagtctgggaaagaattctggaaaaatggccaggtgtggtgtctcatgcctgtaatcccagcactttgggaggccgaggagggtggatcacgaggtcaggagttagagaccagcctgaccaacatggtgaaaccctatctctactaaaaata

SEQ ID NO: 961 - DNA, 242 bp, Homo sapiens
ataggcctgagccaccacacacaggaaccaagtgctagggagggattagaatccagatttgtctgcttctaggcctaagaactcaagtgctatatgtactacctccttaatcctaatgccaaatgaccccgtcagggtatttaatatgaatgcattacaattttaagaaattctcacgttctaaatcattcatttgcggtgaaaaaatcttgtttgggcttgtgtgtggtggctcaggccta

SEQ ID NO: 962 - DNA, 572 bp, Homo sapiens
tttattaaaatacataaaagaagaggaaaaaatctagagaaaggaagggctgggtgatagctcctgttcattagtgaaaagaatcaatattataaaatgaaaatccccctaaaccagtctataaagttaatataatttttatcaagaatagaattataataaaataatttttcatggaagttatatatgcaaaagcaaagacacaaaataatttttaaaaagaacaatatggggaggggattttctgcctggatatcaagatatcataaaattgtagtcatgaagacactgtgatatggactcagaaataaatcaactgactgaaataggatgctcagatttaatcctatatataatacataaatatataaaatgtataaatatataaaatataaaaacacatatataaatatatataataagttatttgtatttatatattacataggattaaatctgagcattctactttgggtcattgatccatttgtttatatataatatattacatatatatgaacttaatctatgatagtagattagatacctactagatagagattagatatcta

SEQ ID NO: 963 - DNA, 445 bp, Homo sapiens
  misc_feature 234: n = A,T,C or G
gcatgctatctcttacctcaggcctttgcaagcactgcctaccttctctactgacttttcttccctcccttacccatgtagcagactcctactcattttcatgattcaattcaaacactgtttcccagaaatcttccctgctccacccacgggtgctccaaatgtgggatgagcagacctcctctctgttgcaaagacgcactgcataatctgtcttgctgatcctcagctcangaggctggagtgggctggagagacatgcatcatgtgtttcccaaccccattctggagcacagggagcatatttcttcctttctctcttttatctccccaccaatctttatcatccaccagaatcacagccatcatgagcaactgtcactgataggagtgcattttcagatgagttagagctggaataaggagacctatagttgactgaaat

SEQ ID NO: 964 - DNA, 440 bp, Homo sapiens
tacggctgagtatctgcctggcactctttgcagaaggcagccacactctccactaccccaccaagaccactcgcctgcccaccattggattggaagtgtagggcttggttcagccaggaaggttctctcagtcccaggtgtctgaaaggagaggtaaccaggagtaacttaactaaccaaattgctagagattagtcatgcttgatctaaggcttcatgaaaaaacatcccacagggagactctggtggggtttaagcagcacaagaatgcttctatttccacataaaatttcgacaatatgtctgtttcaaatcaaaccctggttgggggtgaggaaatctgcagacagaaatagccaatctctttgcctcagcaccaagaaatggcaatgaccatccttttctttattctctgtgcagaacttttctggaatattctg

SEQ ID NO: 965 - DNA, 508 bp, Homo sapiens
gagtacaagggtcacagatggacccactgggataacttccggggaaaccctgatggttcctctcccactggcctctggctggtcccttggtccctccttcccagggtaatcaggcaagcacagcaataaggtcctcccttgtttcacagggttgtgggaccagttctccctcccggggcctcgggccagcctgcttgtcaccccgagaacccacagtgttgagcaattcacacacatcctcttctctcctgggcttcatggcagccctgagtagctgccttatcctggcctcaatgctgcctgtcctgacggccatgactgaccaccagtaatgacaccgacattgaggagtgagagtgcctgctgggaaagctgcaggcccaagctgatcaagcggggagaagccccacccagggtgccagaggtggagctggcttggggtcactggggccagggcaataggcttctcctttccccaccaccctcaccctggtggatactcaacatc

SEQ ID NO: 966 - DNA, 369 bp, Homo sapiens
ggacccaaagacaaataagttatggaccaaacctcgaagactctaagtgggtaagaagatacacttaaataattattctgtatgactgatcactcctcattatcttcatagcatttattcaaatagtaattataaattagtttgcttacatgtttactttctgccttctttactaggccatttgttcattgtggggaaggaccatggctattttgtgactgtgagctcagcgctagtacagaagcccatcatatgttagagacccaataaatgttttctaagtgagaatgtatgcatatataaaatttatagaaagcaatagttttcacgttatacaaacaacaacgtgtagaagatgtaatggaaaag

SEQ ID NO: 967 - DNA, 392 bp, Homo sapiens
aaaccctactcataacatcacacaaagtaaattgagttgaacagagttaacactgaatttctctcaaaatggcatagtgatgaagaaagtaaacaattagcacaagtgacgaaacattttattaccatctataattttgggaatttctttagtaattatccattctccaggctgtagcagagactgtccataatacatatcagactctgcacttgtgcttgaaaatgcagagctactggaaggtgtcaactcttcaagtttgaagaaatctaggccagttactgtgccaccaaagaatctgcagccaccgagacaaccacatttgtttctacacctcttattcttcaggatatcatctggccataaaaaccacaacctaaaccgaccccaaa

SEQ ID NO: 968 - DNA, 485 bp, Homo sapiens
aataataacaaatattggtgaggatgtggagaaatggaaacgtttgtacactcttagtgggaaggtacaatggggcagctattaaggaaacagtatggaggtttgtcaaaaaataaatacagaactatattttttaaaaaaattaatatcccatgttctaaaggatttatctaaaagtgaaaagtttattattatttggaatcttgggtattttgaaaataagactactcatttcacttcagcaaaagtataaataaataggtagactttcatgttttagtcatgcaaaatcctgtgtcgtgaaggaagagtacaaatgttttccaggtcagtttataaaacagccatcttacctggtagctattgccaaatattatacaagaaagtaaatctccaaatcttaaatctttccttttaacacgcccaattgagtttttactacactcagtgtaatttagtaaaaaacattttttatttattacgtg

SEQ ID NO: 969 - DNA, 358 bp, Homo sapiens
ggacattggttttattctgccttggaactttaactgaaacattagcccttccctggtgtccagcctgttggcctttggactggaaagataccagtggttctcttggttctccagcctacaggtcttgggacttatcagcctctgtaatcacatgagcaaattctttctaataaatttctttatatgtatacacacacacatacacacacacacacacacacacacacacacacacacacactctattggttctgcttctctggagagccacactaatacagtaacatgcgagtctaagcactaaaagacttacaacatttttgtttatgtatttggaaggctccttttttttaatccc

SEQ ID NO: 970 - DNA, 434 bp, Homo sapiens
tctcccattcatgtcctacgtacctgtgttgtcttaaacattgttgagggtaaacagttgttttcaacatcttcagtatggcgaatttttaaaaatattttttaattagttttctctgatgggtttttttatttttattttcaagacagtatgtgttgggaaaatttctggcctcaaaatataattccttgcacctctcatgaataaatattatgacagaaggatctctctctttcagcaatgaccatgtgtagccttaaaaatgctcagtagtaagactctaggctggtgtttctctatctgaaactgtaggttcatgggcatattttcagatctgtgtggtgtattaatagactgtgtgacctgggagctattgtacacatcaactttaacatattttagaaagagtcgatggatatttgtgtgccattttc

SEQ ID NO: 971 - DNA, 452 bp, Homo sapiens
aatttattataaacctgcttataagtatttacaataaagtaggaatatgtcatactatatttcctctttaaatttatgaaaatataaggctctatttcttaatgcctcacaaatattttctattttttttctcattcttcaggttcagcttaagttggggcttaaaaagaccaatatgcatattttctagcaaattgactaaactgaaatggttcttccaagaggatttggggacatttattaattcttatttcaaaatgttaaatgtttggcccactatcttaagctattaattccaaacagcacaataaactgaagacactaaacgttaaaaagggaaacatatcagttatatattttcctaagtattggttatattatagatgattgaaagttttagttaaattagcctgtaaacaccttcaacttgatagtcacccttatcatttaaa

SEQ ID NO: 972 - DNA, 396 bp, Homo sapiens
agaagatagattttttttaaagatttatgaactgcgagtttggaaaagcacatttaattctagcatgtgaaattgttcgatttattttcccaggatctttgtcagttggttaatgctgatgctccttattggctagtgggcatgacagaaatgactcggacgtttggcctcgaattacttgagtcagtcctcaatgattttccgcaggtctttttacaagtaagccatttatagtatcttgtgacaaagttaatctgaattgttttacagatatttttaaagaaagcaacgtgtattttttttccaccttaaaagtggcaaagaggccagagttggtggttcatgcctgtaattgcaacactttgggaggctgaggtgggaggattgcttgagccc

SEQ ID NO: 973 - DNA, 266 bp, Homo sapiens
atctgttataaatgaaggcatgcatttgcccagatcccttctgtgtttacacaacacctctgcatgccagggtctgtggcacagcctgctccggttgcatgatggtcttgctggtatattttgggcagggaagtcctttccagcacaacaactgagcaactttagttgtgtgaaaacagatgaacaggccgggcacggtggctcacgcctgtaatcccagcactttgggaggccgaggcaggcggatctcaaggtcaggagatcga

SEQ ID NO: 974 - DNA, 340 bp, Homo sapiens
aggctgagggaggagaattgcttgaacccaggaggcggaggctgtggtgagtcaaactcctgccattgcactctggcctgggcaacaagagcaaaactctgtctaaaaaaataagataaaataaaataaggatggcgggtagatataaaggagcacgtggatattcagtggacacaaaaggcttgtcataccatggtagaagagtgtgatccaaacctttccctcatactctgaattctgtagccatgtcccacttctgtcacctcctgtatgatctatgcttacacacatgattttgatgagagcacattgaagtgcccccaaccactcacacttaaca

SEQ ID NO: 975 - DNA, 453 bp, Homo sapiens
gttgacccagtctcataacattctggttaaagtgttttacaggaggtcaaaatacagaatttaaatagtaaatcagtcaagaatgggaaaatacctagccttgataacaattcatgccatgaaaactaaggattcattacatgctttttaaactagaaaaaaattaaaatgataagacagtattggaggggtactatttgtatttagctgatagtattacatgccattcactatttcaaaagagcaattcaggaaaatgttataaacaccaagtatcacttatattcttatgacctaataagattattgtcaatatatttaatgcctagtaattctacaaatacgataatgcctaaattaacatgatagaacactatctaactagtgaacatggtaaaataacatacaactatgaaaatagcaagaatgtagaacatggcaatacataaaaat

SEQ ID NO: 976 - DNA, 556 bp, Homo sapiens
ttattaagtggatgtggatcatcataaatgtagtcattcttattatcttcattttgagtaggctgaaaaggaggagaaagagaaggggtttgtctaggggtggcagaggtgggaggaaatccccttataagtggacccatgcagttcaaacctgtgttgctcaagattcaactgtatgtgaatactgctgtatgtgcaatttggtgtggatatgcagaataattttgtctatgccttagaattcctaattcccagggaagtcattggtaaatgcagctggacataaaataatgcctctaaatctacttaactgttttatttaccaattcagatactgtgaatggccttattcccttatggttgaacctctacaacatcagagaagtttctattggtggatacataccttgagtttctttttgtatctagcacatcttgtcatctcatttgataatatggtccagtcatgaaaagtttggttgagttcataataaatcccatagttctttatacttgatatttagcccgtaaaattccattaaataatttttagtca

SEQ ID NO: 977 - DNA, 509 bp, Homo sapiens
gttacttatttgctttacataaaacaatgtacataatgtatatctgaatttacttttattttaatgataaaatattgttaaaactttgtcactgttattttatatttctatggcatatggtctcatacatgtgcttatttgtccaaatacttgcataataatgaaagatgaacaattatttttgttctggaccaggagtcaacaacacacaagttacatcccacaggttatatccagccagcagcttgctttaaatctggcctaagaactaagaatggttttacatctttaaaccactgtaaaaacaatgaaagaaaacaaaattgaagaagaatatatgatagaattgtatgagttgaaaaacctgaaatatttgctacctgacccttcacaggaaaaaaaatgccagtttctacaataagtaattacaaatccatcacatctgaagctaaattatgttccaaaagtttacaaaaatctatttttatacgtactttgttattatcatt

SEQ ID NO: 978 - DNA, 378 bp, Homo sapiens
ggcttcccccagagcaagcaatccaagaacaaagtgaaagcttcaatgctttttataacttaccacaaaagtcacacaccagcacatctgcaggagtctgttggtcacaatagattcagtatagcttcttgattcagagtcaaaagggattgcacaaggacaggagacaagactcactggggtcatcttggagactgactaccacacccccatcatcgctataagtatacaatgatgcataataataacaaaggtagtaggtcagacagattatggactctcctacccatggcttttgagaaagatgccaaccaagaaccaacatctaaaacaattcagtgattcagctaaggagaacatgcactttggagacaaatg

SEQ ID NO: 979 - DNA, 436 bp, Homo sapiens
tatacatatacatcctattcattctgcttctttggagaaattgactaatatgttaatatattataagtacttggccaaacacttcataattatttaattattaaaattggcagtaaggtgtgtaatattttccaaatttatagatgagaaatctgaaatgtagggtttaagtaatttgtcccaagccacataattgatttttaactcatactcaatatgatatttatctttagcttgtacttgttaagtgacaaactctcttctgaatatggctcccctcaatatgcagtgattaagtctgtttcccaattagtgaacattttcaaatcctaaagcaattgatggcgtactgtttatagacaagaagtaagttaaacacacacacacacacacacacacacacacacccgaacccactagggctggtgaatgtgtc

SEQ ID NO: 980 - DNA, 421 bp, Homo sapiens
tgtacatctgtggacaaaaagaaacaatgaatgagccaaatacatacttggaaattcacaaaaatgttagttttatatagacataatctgataagtcgaataagctcagtgtttacaatagtcttgtttcttttacttgtcaaaggctctgctatctgaaaatattcaaaccatgagtttcatgggccctgcctgtgagaaaatgtgcattttccacataaatccatttccttgtcagataatttacaactcaccctgtttaaacagactctgtatttaaagctagaagatttatcacacagcaagttcaacctcaagaattccatataagtccacaagcacatgtgtctaaaaactgttgagtaagtaaattcaatgatgaaaactgtaatttatatcaaggatgagaaatactctcttt

SEQ ID NO: 981 - DNA, 507 bp, Homo sapiens
acctgtgaggcttgcgaaatttagttaacttacctaagatcaccaagcctgaaagtggtggagatgccaatacaggcaggttgatgcagagtccatgggattagcacaacatcctgtctccacccttctgctgtttacggtgctgtgaggaagcctctaatctatccaaagagaagtcactgaaacacttggcagaatggtgggtcccctgtgggataaataaagtatcttgaggacaaccaaagtacttcacagattcctgttaaatgattactttcccttaataaaagggatgggaaacaggttccataccttatgcttctctgttaggacagaacgagtcaggactttcagatctgcagatctggatgcccatccccattgcttcacttagaatctccatgattgaatcagtcaaactctcctcaactgtaacataaaagtgtctagctcttatgtatgagtggtatcttgctgcataacaaaacttagtttttaaagcaatta

SEQ ID NO: 982 - DNA, 499 bp, Homo sapiens
ctattgaatgataaatggaacacttcactaagaagatataatcattctagtttcctttaccttgtaatagcttctaatacataaagaaaagtaacagatacaaagaaacattgaaacctctataatcacagtagtataatttatcattcttttgttgataactgataggtgtaatagacccaaaaaatggtgtatctagaggagacttcaacaaaacatttatcagacttgatttaatggacatgcctcaagcattgtactcaacaattgaaaaaatgcacaatcttttcaggcatacatagaatatttataaaattgattatatacttggccaaagaattgataaaatacaaagcacattctaccaaacaatctaataaatcaaaaattaaaaatgtcatttatttggaatttaaaaattcacttgtaagtaacttagaagcaccacagcaataagaaagatcatggtagaaattagaaaacacttagaatagaatga

SEQ ID NO: 983 - DNA, 588 bp, Homo sapiens
ggatcaataatgactttgtttatagtttctgtatatttgactcttgttcctaaacttgcttacttaatcctcataatttcatcccacaagttcattgaacaactctgtttaaagcatttgcccactgctgggaacactgcctggaagatctggaaacatgggaagtcagatctcagaacagggtatagttacacggagtgggttgaaagggagcaacaaccagagtatgggtcaccagaaacaagatgagggtgccagatacatgctgtacctactccatacattctcattctagctatctgtagccctttcctaaatgagaatacccaaaagaacttgtttgggctattatatgcaaggtggctgaggggacttggcaaatatgaaattataaatgttaataaacagtgtggtaactgatgaattttatagctcactcgactggcatagaatacacacctttcagataaagagaatcatctgaacatttgcaagcctaggggaattagaaatggcacaaaaagagacagcagggtttggggctgtgccaccccctgccgtatctcatattctgtgtattgatttgga

SEQ ID NO: 984 - DNA, 331 bp, Homo sapiens
aataatggcctgttaaagacccagatgtgtgcactgtctcaggttggctctttaagttcctggactaagaatctccataaagccatacaaactttaaatgagtcacccactagcacacatggcatcactccttataaatggttggcaaggcctgtaagacatgtcccacaaactctcggggttacctcaaagacactgagccatgctcctgaggcagatggtgagacatgctcctgagaacaccagtggatctgccaagcagtgatggctacagggacctgaagctgagctggaatatgcctccatactggattagttttatagtactgga

SEQ ID NO: 985 - DNA, 470 bp, Homo sapiens
tgaggattgcaagtaagtgttaatagggcagacctccaaaatgagccagatacaaaggtatttggcagaggaaaaataattcactaacttgaaatagcagataagcaaccaatggagttagaatcaaatgccattatttgagaaaggcgttcagtaaaattccttcatacaaattaacaaatatttatgcagaaactcctatgtgaaaaacattgtgccaggctcagttatgggagtggggtggggaggggaacatgaagataaataagacaatttcttttctcaaggaaatgaccacataattggagatattggccaataaactataatgcaacacaaagaagttagttaagatagattaagaagagggagaaacatcatctgcatgaaaagtagggtggctatcagtgagaatggagagagaagatattcagatattcaagatattcaaatatatgaggcaaaataca

SEQ ID NO: 986 - DNA, 456 bp, Homo sapiens
atcaattaacattttaattggaattttgaattattaggcttttcatttaagtcatctacaaattgattgacaattgaactttatcatttgcttagttcactgctaaatcaaactgtttaatacttttttctaatagtaaaaacatactgaagattgagaagcactggtttagaaaaaatatgtaaatatataaaatgtaatagcctggaaatcaatcagaaaattggaactgattccatttgtaagaacagaaacataaaataagttttaaacttataaaacttttattttaaaattactacaaacctcaatgtaggttataaaagaagacttcaataaatggaaaaacacaccatacttcctgggatgaaaagactcaatgcggtgccttgcaggcatttgtatacatagaggaaactgttttcaaagctgagctgcacttttggtcccctcaag

SEQ ID NO: 987 - DNA, 514 bp, Homo sapiens
tgcttcgtgaggcccatatgtgggagctgggagcgctagactagaacccctctcagcctggacccccgggacctgcccttcacctctcagagcctcagtttcctcacctgtcaagcaggggtggcagtcatacccacagcagctgacaccagaccacgggtgggtcactcaccttgtgctggggacagggcttttaggctgctcggctctgctgcaggaataggatcctcaaagcagaggcggtttccccattttacagatgggcagagtgaggcttcaggaagcgtagttatctgcttggagtcttaggcagctgctcaggatgctacggcaaaatcccacagcccgggaagcttgtaaacccaggggcttctttcttgtagctccagagcctggaagcccagtgccagcgtggtcaggttccagtggcttctccttgtaccattacacagcagagatgtacccttacatccacagagagtagagagaagcagtcccttttggtactcttaaa

SEQ ID NO: 988 - DNA, 485 bp, Homo sapiens
aagaaaccacaaagacatatcaagccaagatcaaagtcagatgcaatcatttttctcattacatacctggggacctttacttcccacacctcctttttctcctttcacaccagcctctcctcttgggccctaagtacatagaattaaagcattattttttgcctaaaagagaacattgaatattaaattgaatattacaagtagaaatactaagtcagtaacatggacagaaatgggaaagagagctccaatcatgcctttccttccatcctggcctgtggagctcattctcatttgtgcaggaatatgaatgtccaatctgaaatttaggcagttgaggatctgcagtcaaactgactggggcttggaaaaaaatactgaatggttgagcttttccatattgctttctacatttccctacatttctcttgttagaaagaaaaatattccttacaaatatacatctgaaaccagaacatttaaat

SEQ ID NO: 989 - DNA, 282 bp, Homo sapiens
gtagcctttgtttttgtttttatacagtagctttttttaatgaatgatttatctctataggagaaacaaaaatttcaaatccaagcctgcccttccaaaggtgagtactatgaaaactttttttgtattggtattctgctacacaattattttttattactcatacaatcttcatacatcaaaaaacaagaaataaccttatttgtatccaagatagtgatcgtgcacttagttgaatccattttagaaataacactgttatgaaatggctgagcaatagct

SEQ ID NO: 990 - DNA, 480 bp, Homo sapiens
caggcaggaagataatgttacagaggtccacaacaaggggtaatgtgcagtagcatcccaggatacaatattcagaaaagtagtaacataactaatggaatccatgaaggctaatcaggtagtaagcccaatgagtgctcagtaacaactgtaatttaattctcacaatcacattatgagatggagactgttataatccccatctctgataaggatgctgaaacgcagaatgaatggttaagtgacttactcaaattcacacagctaataatggtggacatggaattaaaacgcatgcagattgtccccacagtccacacactcttaaccactctgttagaaatgatttctttggcttagttgtgccaccacaagcaagtgaatggcatcagactgtctttcagcatagaaagtgttccggggattgggctgaggatcatggtaaagaatggacagagcaactggagagactaccttgga

SEQ ID NO: 991 - DNA, 615 bp, Homo sapiens
agagggcttcttggaggccaggcatgaactgagcttttaaagataaatgggagttgcccaggtatggtagactgtcacatcaatggcctccagtgagtcatgcccccccccgcccggtgtccatgcttttgtgtaatcccttccgtgctgattctgggcttggccacgtgccttgctttggccaatgggccatcagcaaatgtgatgaaagcagaagcttgtgaaatgtttgtacgttggagcttgcttttttggagttcagttgccacttgagggagtctgaactatctcagtttacatcaatcaccatttgggatctgccagcccccagttgacctaccatgggaccacacaggcctgtgacctgccatgggaccacacaggcatgtgacctgtcatgggaccacaaaagcatgtgtaattccaagtgatgccatacagaagagaaatgagccacccagataaggctaccgtggtgattctaaaatgtggacacaaattctttgacattccttcatcaagaggtgacatctaggccgggcgcggtggctcatgcctgtaatctgagtactttaggaggctgaggtgggcggatcatgaggtcaggagatcgag

SEQ ID NO: 992 - DNA, 601 bp, Homo sapiens
ctttggaaggccaatatgtgtggatcatatgagcccaggaattgagaccagtctgtgcaacatggcaaaaccttgtctctgcaaaaaaataaataaaatacaaaaatacaaaaattagccaggcatggtggcgtgcacctgtagttccagctactcaggaagctgaggtgggaggatggcttcagcctgggaggttcaaggctgcagtgagccatgattgtgccactgcactccagcctggatcataaagtgagaccctgtctaaaaaaaaagaaataaaaagaaaatggacaagtagacttagtagacatgggaaagctaaaaataggaggatgggggggaaaacagagaagcaatctgatttgttctacagagctcccccaaaggctcaaaaatggataggagtaaaggttatagccatggtgagagtccaaaggtagtaagttagtaagagggagccgatgacaaatgtggcgaagatagaaataacagtacttgattaagcttcaagagggcaatgatcatataactgcttaattcgtggtccctagatgcgcctatttcaactaaacatattgttgggtggatagatagaaagaag

SEQ ID NO: 993 - DNA, 570 bp, Homo sapiens
aacagccataatgcataatgcactgctaaaaatatatgacatttaaagaaattctttgtttgacacaaacaattatgacacaaacataattgagtggaaaatttcactagcatgcccagtggtaaaatagttgacatttttaaaactcattctttgtgtcaacaacttctaacagatttctctgtaatcaccagagctgtactcaattaacccctaaaatgcttatcaaaaaaatactgttgctgatataagattctaatttccttaacacaaattaatctccaagtaaataagtatgtgccttcaatatgcagcaacaatttctcagatgctcatgtacctgaccagtaaaacaatacgtaaaagggttgtgagaaacaaataaggtaataatgcaacagtactttataaactacaaagtactatataatgagcttctcacaaaccatatccttggaacactaatatcatgaagaatctcaacatctgttctttgaataccaggctaggtagtttagtaggtgtatactctactttctttttgaggattcacaattcacttagtgtatc

SEQ ID NO: 994 - DNA, 623 bp, Homo sapiens
cactcaccacatatgctgcactgctttttcacttgtccagctctgcctctagaccagctctgtccactataatagttactagcacatgtgtcctctgagcacttggaatgtgtttagtggctcatgataaaatactatatcggatatcttaggttgcagaaattatcaataaaattaattttactgcttctttttagttttttttttatgctctactctaaggtcagcaactgatgttttttcattgtatccccaatgcctactagagatcttgccatagaacaggactcaagaagtagttaagtaaaggaatatgagcccaaaagacagacagggactcaaattccaggcaatggtgccacccagatgggagagggcagagctgtgcttgaaggttactcaggccactgggagagtaacagatcagggcagtaggaaaagcattcagggagaggctacccacagataaggaaaatggctggaacccatgcttcgaaagccattcgaggctaatgctggacagcagacactctggaaaagccaaccagggagatatgttctgcctttgccaaatttctgctatcctgcctctggtactcccataggtgacagagtgatcttgt

SEQ ID NO: 995 - DNA, 615 bp, Homo sapiens
tgcatgcatttgctaagcacttgtatataaattaccttattttatcttcatagtaagcccatacagtaattaatattaaaactcactgcacagataaggaaactgataaggaatcccagataagatccaaaaagattaagtaatttgcccaatatcccacagccagtaagtgttgtcatcagttctggactgacacagctacctctttgtcacaaaatcctcaaagatgcaggctttttccagctcgtggcattcccatcttaggaggtggctcttgtcctcattattcaacatggatggcagcatcatgttccaggcaggaggaaggaataagtaacaaatatgagagactaacacctaaagaaagatcatggaagatggcatgtgacacttagccaacatctttttggccataatgtggttacatgatgattggtcagtttgctgtcaagatactgatggagcacttcaacaagagaatttagtaaagaaacatgttcaaaggagtgggtacggttaaggaaaataaacaaggaacagtgtgcatgccagggctagcaatagtaaggaaccattataactgtgaccttgacgggcatggtagagatgattacc

SEQ ID NO: 996 - DNA, 615 bp, Homo sapiens
gtatttatcttagctaagtgcctgtttaattgagtagagtgatatgtgtgaaatgtgtgtagaagtgtgttatgcgtatacatgtggtttagtgacgtaagttgaaactgtgtttaacagagttctgtatgtgtgttaatgagtttattgtgtgtaaccaacattgtgatatatgtgtgggacattgggtttaacatgtggggtgcatgttctgcttggtttaataatatacgttggaacttgtttaatacaggtggttcatgtgatacagaaaataatatttgtgaaagagtatgttaaccatatggatgcacatccttcacactttagtgatatatactgaacctctgtgtttagtgatatatacgaaccactgctaagctagggaggtgtgtgtatgtgtgtgtgtgtgtgtgtgtgtgtgtgtgtgtttgtgtgtttatgggataaaaaatgtgggccgggtgcagtggctcatgcctgtaatcctagcactttgggaggctgaggcgggcggatcacctgaggtcaggagtttgagaccagcctgaccaacatcaggaaaccccatctctactaaaaatacaaaaattagccgggcatggtggtgtatgc

SEQ ID NO: 997 - DNA, 623 bp, Homo sapiens
gcctggctcagttacttagcttattaggtgactcaccttcttttcagcctttgttgctcatctattgaatggaaataatagttttcagggccagcgtccggtacaacgtcactactccagcccagcatatgtgagccatcatctggggagtaaaaggtttgagatggaggagctttatttggaatgtcagaattgacatcataggtcagtattgcccttctaaacatttttatttagaagctttataaatattcagtctttaccaaaacatttttgggaattgccttcaaagctattttacatctttcaagaaggattactctcatcagtttatggtgagacaaattcttcttgaaacctgattttttgatgcaagacaatattatacttcatggccagattagcttcagaatggcctgtggctgatccttattcattctcaaagggtaaagatttagtgtcagtacagatattcagagaaatgtgtgtgttccattgccctgtaggttagttctaaagagcttcaaaaccattttctatggcagtagtgatattggcattcatgagtagtattcccatgtacccaagtatctgaagagaggcagtggatccttcattctctc

SEQ ID NO: 998 - DNA, 647 bp, Homo sapiens
ggagaaggaatcactcagtgttatttgcttcatgctagttcattcatatctttcttcacgctagtgtgctgagataactgaaatgtttgggaggatggaaacataggctgctaattctgaaaccagtgatgaagacaataaattgctcaggtttcttagcttggttctgcccttagctcctccaaagaagaatccaatgaaagaaatgtgagacataggaatactaccactggagagaaaggtgtgaactgaactcaagatggagatggagttgtgagctcttttatgattccactctccaagagaggtgtggactatcctctatcagaatccccctgggttgggcctcacatctgaacactcttcttgattagtgtggaactgccgaagtcaggatttttaaggcataataatactatttaacagtactcaggccgtgtgcagtggctcacacctataatcctggcactttaggaagccgaggcaggcagatcacgaggtcagaagatcgagaccatcctggccaacatggtgaaaccctgtctctactaaaaatacaaaaaattagctgggtgtggtggctcgtgcctgtaatcccagctactctggaggctgaggcaggagaatcgcttgaacccaggagttag

SEQ ID NO: 999 - DNA, 640 bp, Homo sapiens
agagccagaggtgacggcaacacggtatcagcaggctacatgagtggccacgtgtgcagctgttcagagaaagcctgtgcgctggggtggtgctgtgaagctgatcgaccaaagggatcaaaacccagcgttggacgcagcatctaaggagagaggttccttggccacatcctccacccaggcgccaaacagtgaagagaagccacgcatctgagagtcaccaaaggagcagttaactcacgctcagcccttgatcatccacactgaggggaactggctggccatcatcaaaagcgcatctctgccgctttgcaacacgagaagtcatctgccttagcagcaggctctcctcctgaagtaaggccccaaagatttcctgtgatccaggaaaggaaaacagtaaataagccagcttccgtgtcctcactgacggggggcagcctcagaaagcatctcttttctccaaatctccagacacttctccactctgagccaagtgctaacccaaacagttcatgactcaacagctacgtagtctatccacccattcatgtgacattgtgaaggcgacactgccacaagccacaaccaagccttctacagggatgaaggccaaggggactctatgcagggagcgcat

SEQ ID NO: 1000 - DNA, 590 bp, Homo sapiens
ctgggtccctcccatgacacctggggattatgggagctacagctcaagatgagatttgggtggggacacagccaaaccatatcaagtagggacatgtggaaggattcatggatagcactaagatgtcatcgaaggttggagactacctttctgcaaaggccagtttctgagatgttgagttagatggtgtcatgggcaggaagcagtatcatacttgctcattacttgttatctagtccaactgcagagagatggcaggacaatttatcctagaaaacaggcagggccaaagcagcaatcagctgggatgggggaaggagtagcatagcttaagagctctactttgaccactatggaaaccaagagttttaagcttggccacacttgaattctaatcatatcatagagtgaacaagaactgtttcaatcatgatgtaatctgagaataaattcaccaacatgacctcattgcaaatggggtcagtttttatttttaacatgtttacgaaattgaggttcaggcttccaatagaaagagataaagggacagaggtcaataaagagggtgagaaaaatagctcaaaatgagc

SEQ ID NO: 1001 - DNA, 652 bp, Homo sapiens
tcccaacaggccccacttccaacactggggatcacatttcaacatgagatttggaggggaaaatacatccaaatcatgtcagaaatgaatcttaaacacttctaaaacaacagttactaaggaatcagttagatagaaggagtacgttctagtattcaatagtacagtagggaagtgatagtaaacaatgctgataatctgaagtggaacagtttcatgccaaaactatcccccaccagtctgtggaaaaattgacttccatgaaactgctccctggtgctaaaaaggttggggactgctggtttagaccacattattcagagttgttctagtaattattctggtaatttgtctcatgcaatagaaaatacatatgaacactaagaaatctagaaataattcttctcataataaaaaatataaaaacttggtaaaatataagcctacaatattttttctctatattcaggtataaagacagtgtcaaccatgtgacatttataatattcataatctatatttgcaaaaaaaatgtatcatggaatttgagaaggtttagattcttagaaatttcttataaatatttaaacatggtcaattaagggcattgtaattactctcttaatttgcattaattagtttagactctact

SEQ ID NO: 1002 - DNA, 619 bp, Homo sapiens
ggtcccttgccaacatgggagaattcaagatgagatttgggtggggacacagccaaaccataataccacccagctttcatgttgaattttaatccttgatgttggaggaagagcctaatgggtggtgattggatcatggggacagatttcccactttctcttctcatgatagtgagtgagtcttcataagatctggttgtttaaaagtgtgtagcacccacagttcctaacacagagaaatgacaaatgcttgagacaatggataccctaattatgctaatttgatcattacatattatattgctgtatgaaaacatcacatacaccctgtaaatatatacacctattatggactcataataattaaaaattaaatgaagaattaacttcaaaataagacactatacccaggtcattgaaatgtgaattattttagactttcaaaccaaatgaaaggtaagctctcactctatctaaacaactacagaacgtcaaaggaataaatgctgctcaatctcaatttttggtagtgaacaaagccaagtaaacacaataaagaaaatcagccaatgatagctaagagtggagatgaaaatataacacatgacactattatctc

SEQ ID NO: 1003 - DNA, 613 bp, Homo sapiens
tctgtagtgcataatgtttgtgtgtgaggtttaaatttatacatgttagatcacaaggaaaacatgaaaacatttactgtacaatttgttctccaatataactttgcttttggacaatggagactgaagaaaggcttttaaaatgataagacatctctttcacaaaattttcttccctggaattccagatcaataatgtttttagaaagctaaattaattaataggatatggtcttcactgagaatattataggtgaactatccataacaaaaaagataatgaattaatggttattgaaaaataaccactaaaatttaaccaattaatactttgcaagtattcctcatgtatgacatttaaatcaaaagctaagttacgctgtgatcatctagaatagctgggaatcatacaaatatcgaagccatttgaaaaatgattgttgaaccaaaaattaaagtgaacatggtagaatcagctggtattacaatagatgcccattagcattggttttagactctctttcttatcctcaagcaagtatattttccccaaaaaaagaaaatggaaaacacacacacacacacacacacacacacacgcacacacacacaa

SEQ ID NO: 1004 - DNA, 634 bp, Homo sapiens
gattttctttcatttactgcttaagtcttttctcttcggaaagctagtgttgtgccttttacatattagagcatcataaaatgttttgttcttgtgttttttatttaactctctgctcatagccattcatacctgactatagtctatttacttggatctcttttctatgtgcctgtattatctatttgtttgctttcttgcttttgagttgacttattgtactttaggattcaggaaagagaaatgagaaatgctgagagaattggagttttattatcagtggttctaggaagaagcctttttccaactcatcttccaccacggattaactggaatgctatgacactgctatttgttatttatgccattgtttaataattggtatgctgaaagtagtatctactgtgagtcatacactttagatattttcctagaagctactttttggtgggggaggtaaagagaatgtgaagggcctagatacgaaaaaatggaactagaaagaaaagtactaaagaagagtaaaaccaactctgttttggaattatttttatatctcagtcaagatacctacaggaagaaatggtacactgaacatgagtaattgaagaaagcataagaaagagaatattta

SEQ ID NO: 1005 - DNA, 608 bp, Homo sapiens
ggcttcttgggtaccagattcccacttagcaatctgccaaatagtcttctttctcggatgcaggtgatgccaagatccagtcccaagcagagagacctaaagctggcttttaattataaggcccatgatggtttgttgtgacttagactataagcattctgagacaggttccaagacctggggaaatcatcattaaacaaacaaagaggcaagacttgtgcaggactcatatcagaggacataaggagggagaagaagggatgagaatctttcctaaataatgcactgcttcttcaagacccatgcctgagacaaacaggattattaagttgggaaactagcctgtttcacctctctctaattagaactccctacacctcccaaacaagagaagggaaagcaactctgttttctgtccatgtctgcccagccagggaaagaatattaagtctcagagcaagggtcgggcacggtggctcacgcctgtaatcccagcactttgggaggccaaggcaggcagacgatctgaggtcaggagtttgagaccagcctgatcctaaaaatacaaaaattagccaggcatggtagcaggcgcctgtaatctcagc

SEQ ID NO: 1006 - DNA, 594 bp, Homo sapiens
tgttggccagtctggtctcaaactactgacctcaagtgatccgcccacctcagcctcccaaagtgccatgattatacacgtgagccaccacaccaggcctttgtctgattttagacagccactttctcactttgtaagaaacttgtaacagtggcagaaatgtcactgtagctgtgatctgtctgttcactgaacagatttcacctaggataacattctgaggcttttctctgggcacacatttagttgttacaccacattatttagctgttttatgagcttaagaacagtagttacaagcaaggtgaatccgcattgctgcactcaaagctttcagataggtgtgtgccacactaatataaacggttgctgtacacgtacagagaaacttctctagtaacgaactgtagaaatgatccctggaagtacagtcttcctgcctgtgggctttgtctaggtgctgctcttaaatacgtgtcttacaggtaaacaatctgactgtacattaagggcacgtaagtgacctgtaaagagagttttcactctaggccagtgcggtggctcgcacctgtagtcccagcactttgggagggc

SEQ ID NO: 1007 - DNA, 536 bp, Homo sapiens
aatatatcgtatcagttagggtggggcgggaacaaatcacaatggtagaatgtcatcaggtaagactattttcgcttcttttttggatcttcagttgcttcaggccatcttcatgtatatgtgcaggcccacaggggatatgatggcttagcttgggctcgtctagatggctatgctaaacccagcataatcagaggttccattttgttgagaaagaaagggacaacgaatattgggcaacaatttgtcatctctgccactgaaaccactgcttctctgtccactacattttatcaaaggcagagtgtcttgcaatcagcttgacttgcaagaggctcaaaggcctcttggaatgccttgcatcagcttgcttttgtggcataaaaagttaccccaggtgggcgcagtggctcacccctgcctgtaatcccagcactttgggaggctgaggcgggtggatcacttgaggccaggagttcaagaccagcctggtcagcatagtgaaaccccatctctactgaaaacacacaaaaagt

SEQ ID NO: 1008 - DNA, 575 bp, Homo sapiens
acaacctaaatgcccatgaagagtacactggttaaataaatgtggcacatcatgtatgtagcaacattgaaaggagtctcatatttaacacacagaatggttcatagcaggtaatgggcttacaatagatataaatgaatgaataagccgttaaaagtaacttacgatatggttggttctgttcatccattcgttcattcattcagccagtattctgtggggaaataatggtgagacaacagatccaggcacttcccttaccaaacatatagcctattagaaaagatagtcattaatgccgggcatgctggctgaagcctgtaattccagcactttgggaggtcaaggtgggcagatcacttgagatcaggagttcgagaccagcctggccaacatgatgaaaccctgtctctaaaaatacaaaaattagccgggcatgatgatgggtgcctgtaatcccagctacttgggaggctgaggcaagagaattgcttgaagctaggaggcagaggtcatagtaagccgagatcataccactgcactccagcctgggcgacggagcaagactcggtctc

SEQ ID NO: 1009 - DNA, 637 bp, Homo sapiens
caagcagaagtctgctgatggggcatctgagaaggctattgatttcctcataaaaaggaataaacatactggtacacactttttgcccttctgtcttcctgcctggaatgtgttcatgatgcctggagatgcaggagcgtgaggatgcacagcaggcaggtagagaagctgggtctttgaccactatcttgagcagctgtgccagccccaggctgcatccacttcttgttattgggaaggacaaagccctatttacagacaagtctctattccatgcagcttaatgcaatcctgactcataaagtacctccaaaccaccgctccccagttgttccatgtcaggtgccatagtatgaacttatttcacttgacaccctctggaaggtcctacctcttaaaagaacatgtagccatatgcattcagtgttttcagagaagacaccaccaccatcaccaccatcatcatcatcacccccaacaacaacaagaacaacaagcaagtagtaagtatttacaatgtgtcttaaggaactcttgattaattgacttcaagcagcactacttaattcaggaacacttaccaagagaaaagaagccaggggcagtggctcacacctgtaatcccaacactttggga

SEQ ID NO: 1010 - DNA, 574 bp, Homo sapiens
gggggacagagcgagactctcttgaaaaaaaaatacgtatatagaaaagtttaatcgtgggaagtgctgtaaaggaaggcacatgttactctaagagtaaagagcaggggaaacaggagggcttttcagaggaagtgccctttaacatgaggcctgaggagtaagtgggagccagccagcgaagggaagggcattccaggcggagggaacagcctaggcaaaggcctggaggcagagagagccatcagccttccctcctggactgcgagttctctgaggttccacacttttatgtctcccctgtgccctgcaaacaggtgccactgcattgatgcctggtggaatgaattgattccagaagggagggaaccgggagaaaccagctccctggattcctccccgctggggcggagcaggtttgcatgcccaaacttgcccccagatttaagcagctttccttggtcacgtaatcaggaggatgggatttgacaaatgtttgccagggtttccatgagatcaggcaaagccgcgggtaaccccgaggatgggcccctttttccaccctccgcaagtt

SEQ ID NO: 1011 - DNA, 342 bp, Homo sapiens
tgcctggccccctctctgtactgtgtccacatccatcatttcccccaggctttattgagcacctgctgtgtgcgtccatctctgtttcccagagcttagacttcaaggtataggaattgctttgttttcatttttttttataatcctccaagatcttccagtctacttgaagaaacaaaagccacatcctgttttttatcctgtctttttgtggcttgctcatggcatgaattttctagctgtcaacaaagggaggggcgcttttgggctggaggagtcaagaggccttcaggaaaaaggagggcttttgatacattttctttctttccttccttttttttt

SEQ ID NO: 1012 - DNA, 589 bp, Homo sapiens
ataaagccctttccttccacaacttggtgtctgaggggttcttgtctgcggctcatcctgctacagtttctgctaatttttttgacttttatttttcttgtccatctctgatgcttgctttgctactccactttgaggattttgggcagcttcaccctcagccattccaacagtccatccatttgcctcaagctctaggcagtttctcctggttcttctgttcctggcatctaagatttgtcagcagggcctggtttccaggaaccatgcatggctatggcctcctcccacctggagggctgctcctgcacctctgactggcaatggttccagctgcggcccagctgagcacagcaggaatggcagcagcaactggagcatccatgcccagggtcacctagcccagggacaccttagctacaacccagggttgatgtccagctccatgcaccaaaagccaaggccaaccagagcatttcctggacaagatctctcggtctgcagggccagttcctcctactggcttcctgctgccacctccctttccatcaaagggatgctcaggatggcacaggagcctggagacact

SEQ ID NO: 1013 - DNA, 546 bp, Homo sapiens
tcagtagagggtgctgcagggacacggtaggaggaaagggcttttctttccggtttggtgtacttttcttctttctcccaggcatgagtggcctgtagtgtgtgtgcaagacatccagtggtgctcgcttcccactgacttagtggcaactttctgggcagctttctagccagtttgcaccagctgacattccaatgactctttcgggtgcctcagtaggtgcctttccagtgagttccagcgacaccttagtgagtagtttcctagtgaattttgtcaggaccctactgtgctgccagttctagtttgtacctccatgaacttctcggccatccaatgtgccaaactcacatttccaaccaggtctgagtctcatgcttccggccctgttcaaaatgtgtttcttccttaggtactgttccttagccccagaggtagtagctgctctctgtacctgccatccatcattcatggtagagcttgctctgccccttagtaattaatctcctgttactaccgaacaattccttagattaaatttgccct

SEQ ID NO: 1014 - DNA, 519 bp, Homo sapiens
tccctacttgaacataggttccctcaactgttaaatgaaggtagagtaaaggggcaggctagctgagatattctggaaaaactctctagctttatgattcactgagttttagaataaagagaagaatcagcttttatttctaacgtcttggatagccacccaattattccatgcaatagcagacatctccctttgctaaccacaggaacttcactgcagtatgagcgcagcacttgaggtcaagtacagtttgagaagactggattcaacagcactttggctccctcttgcaggatgatggtctctctcctccaacaagccagccaggtatcacagtatcaaaaatgagctgtaaataggccaggcacagtggctctcacccgtaatcccggcactttgggatcacttgaggtcaggagtttgagaccagcctggccaacatggcaaaaccccgtctctgctaaaaatacaaaaattggcttgggtgtggtgggcgggagccagtaatcccagcgactc

SEQ ID NO: 1015 - DNA, 604 bp, Homo sapiens
acctcctacctgaagggggctgctggctgtggggtcccgcttgtgcccgccacctccttctctgtcttctatgtcatgtgaggctggcattcccacgcgtgattccaggcttgttgttcatctacacaaaacttttaatacgattttgacaaaaaacatagaaaaggatgacttgccctactgaatattgaaatgaaccgtggactaactatgaactttcaaacaatccattagcggctgagaaataaacagaaaaatcaatggcccaacacagacagtggagaaacaggctgaggagcatgtccaagtttgtatggtcaggagtgtgcctttcaagtctgtggggaaatacgtgtggaaaagcaagacaggagtgtatttcataccacagggcagaaggattccagacttatgtggaaggaataaagtcatcacaatgtgagcttacatgggcctgtggggcaaaaggctttctaagtatgacttctaagggagaaatcataaaggaaatgcatgaataataaaaaaggatacattttctatggtaaaataatatcacagaaggaaaattgcaaactgtgaaaatatatttgcatcatatgtc

SEQ ID NO: 1016 - DNA, 653 bp, Homo sapiens
cactaaagctcccagctctacctcatcccaatttcctcaaaatgctccaagtaaagctatgcctttggaaaacaccccatgaattcactgattcagttttatgcagctatccaaacactgagcttaattttgtttactttaagaagagggaaaatagcctccaaaggtagtaaatcaagtagaattatttcagttatcaagtccttctctgtgaaactcaaagtcagcagttgaaatgatcaacctcttaaaaataattaaaagcagacatctggaaaatactagtaactgcagcactcacagcgccagaaacatattccaggaataaccaaggcttcattttttcaaaaaaattatatttttattttattttaaacagaagcttatcacccatgaacataaaacacgaatgtctaataaaatttacttttaaaaaatttcagcaagttaatgtcaacacatgttattaatttttgctaggaagccattcttaatggggagtctagaagcatggccaaccagagtttaatgagctggtggctgttcaatagcacatgcatcacaatgagaccagatggaccattaaatttcatcctccacattcttttttggaatgtgaaaatattgtcccctatatctctggcacacctcta

SEQ ID NO: 1017 - DNA, 578 bp, Homo sapiens
cagaggatatagatcccacagctcctgtattcaagctgtctttttaaatattgtctctgcagaattaattctaataaccttctctccatggaagcactcctgaagaattaagtttgagccaaggcattagatgttgaggagtatgtaagtcttccaaatgtgccatatggttcagaatgctccttatctgatggggaagaaggcttcaagttttggcaaccaccatcccttagatttttctcttgtatgccaaaattatccttatttgccttccttaattgtattccattatctaatatgtttatgactacttctcatgattcttttccttttttgagaaaatgactactatcaaaggagctttctctgatcctgatgattgtatctgaaatggcacctccctcttttcaatctctacctgcttatcctgccttatcttttgttgttattaatagtgcaacacagtattttaaatagtatagttttatcaatatattagatgcacttatctctcttagcacatattatgatgccagggccattagattaggaaatttgttttattcactattatgtct

SEQ ID NO: 1018 - DNA, 531 bp, Homo sapiens
atatatgttttttgctgaacagtttgagattaatcagggtaaggagatgtcatgatgcttaccctctctctctatatatattttaaggcagggtctcactatgtcacccaggctggagggcagtggtgcaatcatagctcactgcagcctcgaacttctgggctcaactaatcctcccacctcagcctcccaagtagctggaactataggcacatgccaccacacctggctaattttaattttatttctatagagagaaatcttaccatgttgcccaggctggtctcagactcaagtgatcctcctgcctcagcctcccaagtattcagattataggcatgagccactgtgcctggcctaagttcttgagcatctgtttcctaatagtaagggcattctcgtacataaagacactaacatttcaaaatatgaaaaatgaacgataattttctcattatatctggtatccagtccatatttaaatttatctagttgtctccaaattgtcttttatggcgattttttcttcct

SEQ ID NO: 1019 - DNA, 544 bp, Homo sapiens
tttttttacctcttcataatgtctaacacaatgatggtcatatttggccagccacctgattattatttgttgatttatggacttttggaacttctagatgatccagatcttttgtagttaattactcactttggggaaactctaaaaaaaacaagtgtttattgagcatctattatgtataagccataatgctaggtgctagagaagctacaaagatgcaaaagacatgggagtgcctgcccttagggagttcacattctagttgggaagataggcttgaaaaatgagtagcaaggaaaggcttaagtgacaactacgtagaacaataaaagagacatcaaaaaggtaatgtcagtttaacggccaaatgatttttctacatgcattcagacaagagaaagatcccttctgttgggagcaatcaagaaaggttttgcagagaaggtgggatttgagccgaaagaaaattaggatatgaggagggtaagaaagagtgtattccaagtgagaaacaggctcacttggtgggaaagagtggtgggaa

SEQ ID NO: 1020 - DNA, 570 bp, Homo sapiens
caagagccaacattgaatcttttaatgatcaaatatcaactagcattttcttagacctctagaatgaggattgtagaaattttataaggcaaaccagcctggtatcttgaaaacatcatggccctgggaatcagaagaggcaaagcactaactcagtcacttaacctccttagagtccattccatttagtcaatatttattgagcatttcctgtgtcctgggcattttcttgagcaccagagacataaagacaaatgaaccctagccttgcctgcagagagcttataatttactgttagagacagtcgtgtaaaaaaacaactgcaaaactgagtgagccatacctcaacagaagtacacacaatgtgctagatgcactaatggaaccgaatgattcattccatcctggatgagctttagggcatgtttctcaaagaagttgacaccccagtacagcctctgtttttctcatctaaggaatgaagaggccaaagtgaaaaattcctatgtctctcccagccttacagctctgaaattcagtaagtgtgcagataaatccaagaaatcctg

SEQ ID NO: 1021 - DNA, 508 bp, Homo sapiens
gtcctatggttaaaagcaaataagtaaatagcttattgcttactctctaacataaatgctagttttgggttttattttcataaaagcccaagtaaatttagagcttcaaggttaactactcattatgttctcaaattcatttaatggtccagagtgacactacacagggaaatgtatttctgattaaaacttagtaaacataggccaggcgcggtagctcacgcctgtaatcccagcactttgggagacagacgggcagatggatcacttgaggtcagtagttcgtgagtactctggctaacgtggtgaaaccccatctgtactaaaaatacaaaaattagctgggggtgatggtgcatgcctgtattcccagctactcaggaggctgaggtgggaaaatcgcttcaaccaggaggtagagggtgcaatgagccgagatcgcgccattgcacttcggcctgggacagaccaagactccatctcaaaaaaaaaaaaaaaaaaaaaaaaa

SEQ ID NO: 1022 - DNA, 562 bp, Homo sapiens
ttttcactgcagatgtctttacaatttacagatggctttacaaatacagcttaactttggaacctgctgaatgtgtttactgccctagattctaaacacctgtatcttgaaagaagctgctgtgcaaggcacaacctactgagtcattttcaaaacactgagtacagggagcaggtgttcagttgtcagtaatggaataaaacaaagttacaaactgggttagttagtaatatgaggtgcacaaactatatttccagacctgtagataaatttctctatttaattttcaaaattattaaaatactctactctttaaagatgaacttcacctgaatataatagatgtctcactgcatatctgttaatctcaacgtatttctgatgcattaaaccatgacaggttacccattctctctttatctttgagataactaagattccataaacatttattccaagagaagattcaatgtggtcacttcataaatcatcaccttcaaagactagcacaactggtcaaaagaatttgtaaaggtgctatgtttgacatcactttaagcac

SEQ ID NO: 1023 - DNA, 606 bp, Homo sapiens
tggttcaaagccttaggcttacaaaagcactcatcaaataaaacacttcaggagctcagtttccaggagttaagtcaaaagccagccctgaaaacaggccttttttgggatatgcactttgagcaacctgggtctgcagagttgacatttcctgtgtattcacgtttttaaactgcccaaaattcttactgaacataattgtgtgtgcaatccaaaagaaagaagagaaaaactgaagacagaaaagatccagttcacccctaacctctgttttagaagcaaagtataggaaatcaggattaagacaccaatactaccccaaaacagcaaataatcccaagtaattacctccagctttgcaaataaaaggaaaataatttagcaaaattcagttcaaattttatttaaatgaaaatgcaaggcatctaatgtatacttggtactgactatcatttatgtgttcagcctatgcctcaatcatgacaaaacaggagttataaagtattatttcagcttcaatggatgctgtatttataacaccctaggccaatagcagaaggtgaattaagaaaagaagatggtaaatacactattatttttaagcat

SEQ ID NO: 1024 - DNA, 538 bp, Homo sapiens
atagtgagaccccatctctacaaaaaattagctgggtgtggtggtgtgcgcctgtagtcctagctactcggggagactgaggcgggaggatcactgaagctcaggaattggaggctgcagtgagctatgactgcaccattgcactccagtgcagcctggtgacagggcaagcaagacgctgtctctaaaaaagaagacaacattcctaccatcatgcttgtctaatttttaaatttttataaagataggatctcactatgttgcctgggttggtcttgaacggctaggctcaagtgatcctctcgcctcagcctcccaaagtggtaggattacagatgagagccattttacctggcccttatctctttcaaatttagttattctcatatctctgccaatgtcttccagatagataaattctatttactgccttacgtttgcttgttatattcttctgtcctcattttccttaccttgtatggtaaattaaaaagaaaaatgagggcttgggcgtggtggctcacgcctgtaatcctag

SEQ ID NO: 1025 - DNA, 203 bp, Homo sapiens
gaagggtgctgctctgggtccctgagaaagcagatgcaggagtccttctgatgccctgatgtgctgggttctggagaggagagaggactactctggggacatcattttggtgcccggaatagtggccagtccaggaactatatcccttactgcacttggtggtaacttgtctaggcaggctgtgtctctccgctattgaatcc

SEQ ID NO: 1026 - DNA, 574 bp, Homo sapiens
ggtggctagtgcctgtaatcccagcactttgggaggctgaggcgggcagataacctgaggttgggagtttgagaccagcctgaccaacatggagaaacccatctctactaaaaacacaaaattagctgttcatggtggcacatgcctgtaattccagctacttgggaggctgaggcagtagaatcgcttgaacccaggaggcagaggttgccatgagctgagatcacaccactgcacttcagactgggcaggaagagtgagactccatctcaaacaacaacaaccaccacaaccaccacaaccaccacaaaacccaaatgcatttccttggcacagtaaaactgaaacagaaaaagtgtaaagtaaatacaagtaactgaaagagtttatgtatattattttacttctcatttgataaaatttgtaaagtaatgagcagagtgtatttctccagggacccagatatatacatttattcattcaatagaaattcattcttataatggccactgatacctatatcctaaatatttctgaaaacatctcttcaggcctgcatcatctttgcaacatt

SEQ ID NO: 1027 - DNA, 569 bp, Homo sapiens
agacttttaactctattttttcttttgtgggcctgtctttctataatgctcttcagtccaatccctacaactttatggcaaaattctgttcaccatccaatatatttcagttaagattcttagcttgtatgttagtgctcccatggcaccttattagtagtttcattatagtatataatcacactatatttcagttgcatacataattatttgtcctttaaaattgtgaactctttttggtcaaggaatatgtctcattcatctttgtagtctaccagtactttagctacaacagagttagcgctattcaactcaatcaagcttaaccattagaaatggaagacaactggccaggcgtggtggctcatgcctgtaatcccagtactttgggaggccgaggtgggcagatcacctgagatcaggagtttgagaccagcctggccaacatggcgaaaccctgtccctactaaaaatacaaaaattagcttgtgtgtggtggcacgtgcctgtaatcccagctactcgggaggctgaggcaggagaatagcttgaatgaacccaggaggcag

SEQ ID NO: 1028 - DNA, 654 bp, Homo sapiens
ttagtagagacgggatttcacttgttagccaggatggttttgatctcctgacctcgtgacccacccgtctcagcctcccaaagtgctgggattacaggtgtgagccgccatagccagcccatacatctctctttaaagaaactccttagactcctgtgggcaatctggaaggcttagagaagattgtttctgtgaagctgaaggtagattccatgcaggaactctgtgaatttatagaaatcatgtaaaacctgattttccccaccccctatcatccccaaatgtgccaatggacagacccagcctcaagattccaggttttcagtctctttgatcacttgctcctaaatgaaatccagcaagagagaggaagaattttacttgctgttctgacatttcaccatcttcctcagatttagtttgctctgctatgcgggagtcaacagaaaatggcacacaaatatccatcgactctttctaaaatatgttaaagttgatgtgtacaatagctcccaggtcacacagtctattaatacaccacacagatctgaaaatatgcccatgaacctacagtttcagatagagaaacaccagcctagagtcttactactgagcatttttaaggctacacatggtcattgctgaaagagagag

SEQ ID NO: 1029 - DNA, 622 bp, Homo sapiens
tgactttattcagtatcttgatctaaaggttgactgaaggtggagaagaaaaaaatacgaatttatacaaatgacttaactgcatgtaatacaacacgaggcacaagcaagctcagcatacaccaggtgcatcgcagatgggggagtattccttattgctaataaattcaagtgcatgtcttcagtggaaaaagtaaaaatgcaggccccattagtattaatgtagttacttacctcacatctatacagactttttttttgcattatcccaaagctggtagtcatagcatgcacattttgcatcattttcatagaccctcttgtcttcccacacacatctatgaaatgtccactcactcagaatttaattattataatgcatttgtctcttaacaagtaatccagtacctataaatcaatgctgggcaccccaaactgatacaggatgtgctgttggagtcttgctctgcacatatggctgggataattcaagaacagaaagaagcaggctgtgattctggctgattagaaatatccccaccctacaaaaccaacatatatactatgttccagatacttttctaggtgcttatgttatttcatttagtccttgcaatgaccg

SEQ ID NO: 1030 - DNA, 601 bp, Homo sapiens
tgctctcaaactcctggcctctagcaattcacctgcctcgttcacggacttttctgatcttgcttgtctctgtttagggtttctggagtcagaactgctgtcaggatgagtgggaagggcatcccctcacctgtctgtgcctcagattcctcatcttcaaaatggagggaataaaactacttaccttgaagggctggtgaaaggttaaaatgagatgtaattagtttagacattacattcatacataattagtttagaatagaaactggcatgtgttaagtgttaaaataaatattggcagcttttgttgctttatctctatgaatcctttgcagaagttagagatcacggattatctagaggtaggccatggtggagaattgagaatgagatgtggagtggtgattggatgaggaagtcatataagctgcaggaagggcgagtgactgaggaagcttttgtggagtcctaattagagaaacagagttaggctggcaggaccaagggaaagcaaagagagaaagcagataaacggcccgggtgtggtggctcacgcctgtaattccagcacttcaggaagccgaggcagatggatcacctg

SEQ ID NO: 1031 - DNA, 622 bp, Homo sapiens
gtttttccctcaagaaaaagaaaaaaataaaacaaagcaaaaacctctgcctgagaaccatttaaaccatttgacaaatatttggttaaaacccccacctctgtcaaaaaggcaacagtactgtttattatccaggctggagtacttctgagaatgaaatggggtggtcttgatagttaagctgttttgggcaaatcagggcatttggtaatcctagtcataaagtatttctacatataatcatgctttccataacttttaaactgagccagtggtcacaaactcatttgtatcaaggggctaggaggcaacacaagagtttttaaatttttttttaattttttggagatggaatctcgctctgttgcccaggctggagtgcagtggggtgatcttggctcattgcaacctctgcctccccggttcaagtgattctcctgcctcagcctcctgagtagctgggattacaggcacctgccaccacctggctaattttttgtatttttagtagagacggggttttgccatgttggccaggctggtcttgaactcctgacctctagtgatccacccaccctggcctcccagagagctgggattacaggtgtgagccaccatgcct

SEQ ID NO: 1032 - DNA, 538 bp, Homo sapiens
tgtagtcctgagaatagcttgaacacggaaggcacatgttgcagtgagccgagattgtgccactgcactccagcctgaatgacagagcaacactccgtctcagaaaaataaagagaacaaaaaaagaaatatgttccacatctgctactccctgtccctcctgtgccaccacctggccatgccgccttggcccctccctggagtgttgctggcactgactggtctgcccaccgacttccgcgagcccttcaccttgtcgtaacacagcagccagactgatccttttaccaacatgtcttccttctccttggaagccctcggatgggttcacatcttggaacagaagccaggtgctcttcagtggcacacatatgctgcgtgtgtgtctgccctgcggggacgtcacccatgcaggcacatgagtgtacctcccgttttctgcccagcacactccctggtgcactccaggctcttacacacctgagtgacgggaaggccagcacatttcttctgtagttaacatctagctacttgagtt

SEQ ID NO: 1033 - DNA, 644 bp, Homo sapiens
acacacacacacacacacgcacacacacacacacccttacacatacaatacttcttggcattaaagaagtgcctaagacctaagacttggtaatgcttccattcatacacatctgtgtagcagataatttcctgccataaatacagtagagaacaaacaaaatggtcagcagagtagacagcaacctacttcttgtgatgggaaaactgagctgtccaatacacagacttgagagctcactgagagtttttacacactagccagtcattgggtacagttcaaatttgtgcctgagcaaaaagtacaaatgttttcatactgcagaccttcaggatctcatgtataactggggcggcaaatcttgaatctgtaactgccaagggcctactttccaactctctctctctatctatccatatattatctataatttttcagcttaggtgcagtcaccttttgttttttaaaattcgccatagtttagattaccttaaatggccaattaaagatgatgttttatagattttatgaattttgccaagcacatccctttgagaaaaaccattcttgacatgtgtgtagtcaagccattcacaatacattattttaattggtgggagaacttactgaacttcaaactataa

SEQ ID NO: 1034 - DNA, 633 bp, Homo sapiens
tactggaaattaggcaagcatttgagaacaactacagtaactaattttgaagtagcatttttcttacaagaatcatattctatcttacatatagtgtattatagcttttatagtttcttaacatacttattctttaataatcatttgctcaatggctaatagtttcaaggtgatgtttaaatcaatagttttaaatttaatgcatatttaaattcaacaagaagatttttaaagaatactttattacccagccaaaccaactaagttgaaatcttggagatgaaacgttgaggcattaagctgaaaaaaaaatcagatttaaaaaaggatttttaaactgtccagtggattctaatgcacaccagattaaacatggcacctcacacccaacactggaatgtataaaaatatatttggcaccagattttttcccaagttgctaataattaagtgggtaaaatatccatggtgtattataatgtttaaaagctggctatctgaacagaaagccttcatttgtagcatttgctgattttcatggtgtaaatgcgttcatcatgcccaatttaaagcttacaacatgactcactgtaaatgcagagttgggaagaaatgcaaaacagcacaccatta

SEQ ID NO: 1035 - DNA, 504 bp, Homo sapiens
gacatgtatggttctacatatccatgaacacagaccatctgtgaggttatacgggtcttcctgtaaatgttttataattttctctacaaaggtcttatacatctttgtgttttgtggtttgtagcttgtagtttttgttaccattgtgaatgagacatttaaaataacattttaaattaattataactgtggtgtactttaccttaaatgaatggcaattatattggcaaaggacttctcatgagccataatagaggccaggagacaatgaattcatacttgtagagtgctgacgttaaaaaaatgaccaacttagaatttaatatcctgctagactgtaattcaagggagaaagagaaagaaaaatagagagaaaaggagtaagaatttttaatatacaaaggctaagagagtttaccacctatagattactaagttaattcttcgaggaaaaaaataaagccagtgcaagatgtaggaagcaaaaaccaataggagatttgt

SEQ ID NO: 1036 - DNA, 570 bp, Homo sapiens
atacaagtaatcaatctgcttgtaacaattgttacaaaatcaatttataacaaaatatcaataaggatataaattgaaccacataattaacagaatgaacttaacaactgtaaaacacaaattattttaaacattcacaaagaatgtatcctcaaccaacaggaaggagaaagccatctgggacatatatgctcaactggtggatggggagctagagagagagagagagggacctgtgggccatggtctttattggggtcattacccaagcaggttttcccacaaggcgttctaactgatgggtttaaagcaagttggcaagagttccatggggtcacactgtgactgagaggggctactgtggcatatctgcgcagtccttgggggttaaggggatcagaggggtgagtgaagtaggttgtatctaaccattcatagggaggtggttgtataaggcagataactggatacactgcattaaggaactgtaaggaagtggacaactggaaagtgtgtcaaaggtgactatgtcctgcttctgatatctggtatgagaaagctaaatttata

SEQ ID NO: 1037 - DNA, 559 bp, Homo sapiens
gcaccccacccaggctgggatttcagcccaggcaggctcactgcagaggcctcgcccttcaccactacccaacaggcgaccctctcctgctacttctctcgtaggatctgaaacaaatacagcagaatgttcaggcactatcgcgaggctgggtgatgggggtgtgcgtctctgttatcattttatgaatgcctgggatgcttcggattggaaaaggagataaagggactggcatggaaggaggaggaaggaacaggagtggcgagtggctttctctcttcctctcaggtcccgatcccagaaagagctagaaagcagatgtcgcaagaccccggaacacaggattcttttcctctggaatgcgggtgccctgttcctgcctggcctgaaggtgtgcacgagctcccaagatgaagggttcacgtctgttcatgcctcctccctggctctggtaggtgtggcccaagctctgtgcacgacctacctaccagcagaattagagacaggaggggatgcaactcccgtgaggcttctgcaaaccagtcccgagggtgaattt

SEQ ID NO: 1038 - DNA, 575 bp, Homo sapiens
acgtgccaccacacccagctaatttttgtattttcagcagagacgggatttcaccatgttggccaggatggtctccatctcttgagctcgtgatctgcccacctcccaaagtgttgggattacaggcgtgagccactgcgcccggccaaaagaatcctgtgcctcagcctcctgagtagctgggattatagacacgagccaccacgcctggcccccaaaggtatttaaaggaaaaggtatttctgtcaggatttaaggattctgatcctgagtagtagcaattccatctgctacattccagcctaagtgagtgggcaaaaagagactacgcttaacatcagaatgaaagccaaagtccttacaatggcctacaaaagacctatataatcttactccactacctccttctgctccttaaatgtgatgagtatgctcccaactcgggcctttgtatttatcttccagcccagtggttcccaaactttacagtacattgaaattttcctggctgggcctggtggctcatgcttgtaatcccagcactttggggggctgggcggatcacgagatcaaga

SEQ ID NO: 1039 - DNA, 541 bp, Homo sapiens
aagtggtttctgaaggctgtcagtaggccttttctggattctgatatggtatgcgtctaaaatatgtttctgtaagtaaggattttttaaagtatatactttgcaaaaaaaatactccaatcaacaataagaacaactatagggtacttagagtttagaacataaaagtcattcatatgttttctaaccatttaaaaaatcagtttcctgtattttgattccattcatttatctagcacttatcaggaaattcaggtttccatgttacacagtttatatgggcccttataaatcagtataccactttgatggaaaaaatttccaaactaaatcatcaaattttaaagtcttggtaaaaagatttttgaatcttattttagtttttcttggcaactttggtgtaacagttggctataagaagggctataagatgttaggattgctattcctgctttaaatagttccagattggcaattttggggcaattctagcggtcacctattcccttatttcctaagctgggaagaatggaattttctt

SEQ ID NO: 1040 - DNA, 662 bp, Homo sapiens
ggacatggacaccctacaggggccattgaaaaggcagacaaaccagcaaaaagtcaatccttgaaagataaagttgtgctaagattaatagctgctttatatttacgtatgtatgtatgtatgtatgtatgtatgcatgcatgtattttgagtacattccctaacctcagaagtaggtatcagagtaaagagttttggattggccaggcacggtggctcactcctgtaatcccagcactttgggaggccgaggcaggtggatcacttgaggtcaggagttcgagaccagcgtggccaacatggtgaaaccctgtctctaataaaaatacaaaaattagccaggtgtggtggcacgcgcctgtagccccagctactctggcggctgaggcaggagaatcgcttgaacctgggaggtggaggctgcagtgagctgagatcgcaccactgcattccagcctgggcaacaaaagtgaaactccatctcaaataaagcaaaacagttttggattgatagagcagctggagaaataggggaaccttcagggtgggtatatccaaaaatctcagtataagctctccagttccttggctgactgctaagctccatgggcacaaaaggagaccaggctagaaaagcagcaactggaagttataaaaactga

SEQ ID NO: 1041 - DNA, 652 bp, Homo sapiens
catgttagtaattctaaatctcagcgatccctgttgttccataacagtaccactgctggaaactttagcttatagtattgggtcaaaaggagaatgctgggtgcttcaaaataaaagagaagtttgcagtgattgtcattttatagccaagatgagacttaaagacttcctcaaagtagatactcaataagcatactttatttttattactgcactcacattaggttttataatactgtgatatttacaatgtatatttccaaaaataattttatgtgttttatttcatatacttctgagaatttctctgaaatatagaggcagatattattaggttggtgcaaaggtaattgtggtttctgcttttaaaggtaatggcaaatattacatttacttttgcaccaacctaatacatattcttcttagattttcttagtcccttattcatcctcctttagtatagagccaaatcatagccatagacatatccttatcacttaatcacatgatcagttagattgtaatgaaaaactcaagtaaataaatgtaattgagtacactaactcatagaaagaaatgttttgattaaggtcacactattttttaagaactaaaaaagccagacgttgattccagaagtacagacaccagc

SEQ ID NO: 1042 - DNA, 538 bp, Homo sapiens
gatttcatgtttttgaaagatgaaggcaagatttcaatttctatcatggctcattctgctttctagggacatccatcttttaagccatcagatcatgctgtttctgtttgaagtccatctcaggtactgcttgacatgtacagatgctgaagcactgcccctttctaagggagggggaaagttcttatcaggtactctgccttagcagctccccttgccttcccaacctggaccatccttgccttattctcatcttcatgcttgtctcctggctaatctcaattccattttgtgttcatgttcgactggtgttatgatcctgatatttgcaagaaaagaagattaatctacactataaactctatgtgagtaggagcaaggtctgtttgtatttattattgtataccattaccattaccattaccattacctagcagtacctgttacatagttggtaagcaaaaaggtaaaaaaaaccagacaacaatgggccgggcacggtggctcacgcctgtgatcatgaggtcaggagatcgag

SEQ ID NO: 1043 - DNA, 655 bp, Homo sapiens
cactggtttcactagtagtctattcatcatttaatgagatttaccacttttaatgtctagaacagagactaatcacatagtatttaatggtcttcagaaaatatctattaaattattgaattttcatctaccaagccaactgttcttgaggtcattttctcaggaaataaaaacaaattacgcacaagaaaatacttaaagcatcagatggaatgtgggttcctcaaaaaagtccactctcctttttcatggcatgatacattcctttcactaagctctctggtactacctaagaacatgagcacacagagaaaattaaattcttatttaaactcaagaagcaaacatttctcaaaatgacactatttccctcctttacacttgagtcgtaaacatttctctacatgccagtgcccttttatttagttagaattttagcaagcagtattttgtttatttgttcaggatcgtgtatgttttttcactacatctacagtacacttcatcacctgaacacatgctgaaccaaacttgtcttgccagcaaaaaattttgaaattatgcaatctgcaattcagtccatgacaagcacctgggtagaatttcttctataccatttcaacatcaattaaagaactgcctgcatagaaatatt

SEQ ID NO: 1044 - DNA, 621 bp, Homo sapiens
agtttttctattagtagaaagtagaaataaaaaaaaattgaactaaacaataaaattccaaagccccaaaaagcccaaatacactcacaattgttttctctctttgtaggatatgttttataaccgaaattcttgcaatccttgtagaattttgtaaacagtacaatgagaattcctttgtgccaagactcttattgtgtataatactgccactgagcaagtgcagtgatattttaggctaaagcacatttgtgacatttgtgtgtgtgtgtgtgtgtatgtgggtgggtgggtaatatactcatgtttacctgcatcactccattttaaagtaaggtttgtaattagttgtttccagagctttgaaaaggagaaatattgcaatatagaccaacaaaccttattgaagaaatacatctgtgctctatacagtcagaaataaaaaaatctgaaagttctaaagtagatacattttatacttttgaaaaaaattatagctgaatgaatttttgtcacatgaagttttacttaagtgacacgtgggtgatttcaggtgactgaaaacgagtgcttatttgactttgtctaaaagaagtaggcattgtttaaaagcttgtcttt

SEQ ID NO: 1045 - DNA, 601 bp, Homo sapiens
ttaattaaatctctgtattaagtatgcagtaaaatgtgctgctttatcaaattaagtcatccgccagaaaaaaaggccatgttgacaatgttttatagattcaactaccatttaactattcattcatttaatgtgtttatttaaaaaaaaaaaatctgccagacatttggctcatgcctgtggccttagctacttatgacgtcgagatgagaggatctcttgagcctaacagttcaaggcgcagtgagccatgattgtacccctacgctccagcctaggtgtcagagtgacatttcatctctgaaaaaaaaaaactttttttcctaccttggcacaaggccagtgctacaagcagcagtcacacagtcccatgcctgacatgtgccctatgcacgccgaccccacccacttaggcaggctgcaggccctgtgctaattgaaaaagcaggtggagagctggtaacatcaagcacagggacagatttcattgtgacatcaccaacagacagcaccccgctgaggtggtactcacagccgatagccatccagctgtacattactcacaacaggtaacccacccacccaccaaaccaggccctac

SEQ ID NO: 1046 - DNA, 668 bp, Homo sapiens
gtggctcacgcctgtaatcccagcaccttgggaggctgaggcaggtggatcacttgaggtcaggagtttgagaccagcctggccaacatggtgaaaccccatctctactaaaaatacaaaaattagctgggtgtggtggcaggcgcctgtaatcccagctactcgggaggctgaggaaggagaattacttgaacccgggaggcagaggatgcagtgagccgagatcgtgccactgcactccagcctgggtgacagagtgagactccgcctaaaacaacaacaaaaaagaatgtgatgcctcagtatagagcatttgggaacccggttaggatggaaggcgagggctgggtaaagtctcttttgctgactgtgacaagtggccgttacaaatactggtgtattgcaaaacttcatgaggattgatttacagcatgtgccgtctttgtaaatggctttacatccgggttgtgctttcatgttccaagaaaacaacttaatctcttagttaatgaaaagtggaaggccgggcatggtggcaggcgcctgtaatcccagctactcaggaggctgaggcaggagaattgcttgaacctgggaggcggaggttgcagtgagccgagatcgcaccattgcactccagcctgggcaacagagtgagactccatctc

SEQ ID NO: 1047 - DNA, 665 bp, Homo sapiens
gaaaggcttgagcccaaggtacaataatggcagagggaaatctaacgttccaggttgtttgtattgctgctctctaaacaactctgctgcagacacatacaaacacacacacacacccctcacatacctcttctgtaaatattatttgtttttaatctaattattttttattttgtgggctttaaagaaaagggaggacttccatgtttccattactgcagggtggtgaagggtggagagtggacacagaactggcagaaaatgcctaagccaaatggcttcaaatgaagcaatgaccacaagagcattaaggaatttggaaattttttacaacccatggaattcatgtaacagctagacatgtgtgaatgttttatagtttcaaacttactctatcctaaaatgttcttgatttaatatattatcattttagtgccagtgcaacctcaatttaatatattatcattttattttatatattatcattgtattttaatgccagtgcaaactccctgtcaatttataaagatactcctcagcattcaataatttcctgataaattataatcgacatgctccaatttaatacatatactcttcctcagcatttcttaaaaaataaaccagcctggtgtggtggctcacagctgtaatcccaacatttc

SEQ ID NO: 1048 - DNA, 538 bp, Homo sapiens
cctgtaatcccaacactttgggaggccaaagcaggtggatcacttgaggtcaggagttcgagaccagcctggccgatatggtgaaaccccgtctctactaaaaatacaaaaattcgccgggtatagtggcgtgcaccggtagtcccagctactatggaggctgaggcaggagaatcgcttgaacccaggaggcggaggctgcagtaagctgagatcatgccattgcacaccaacctgggcaacgcagtgagactccatctcaaataaataaataaaatagcacatgtatcccacaaataattattaagtatcaatttttaaaagcagagatgtaaagataaatgattcttctaaaaaaagtataaataaatctttagtttaaatgatatatttgccatctgtgctagatgacaggacaatcaaacagatttacatctggctggacaccattgcctaaagaatattgatcaacccaagctaaacttttgtctctggcgaggtatctccactgaaatcctagcctactcaatagtgacct

SEQ ID NO: 1049 - DNA, 596 bp, Homo sapiens
ggctaaatcttcatcaacactattgacaaacatggagcttactttagtggcatcactcttttttgtgagacaagaattttctttgaatatacctctagtctattataataatcatgagctcatttgccctctctgagtgccaccctgaattatattctaaaccactggctttagtaaagctgtgggaatagctttaattatttcgtcagcaaatttttaagttttttttgtatcttggggaagatttaaatttaaatcatcagaaggattttttcatcttgctatttttgcccaatagcttgctcattgtagccctacaagcaaagctattagccagtataaatcagaaaatccagggacataagttatgcgcaccattgtgaattcctcagcaaatcttagggtttcctcagtcaccctgggaaattatttggctatcatgcccaactcgaaataaaactagaaggtgtaagataccacctaccaccggtaaattccctttgttgtttgagcagtatttaaaaagatatgcgagaattagagcaggagtaggaaaggccactgtgggggattgtcaatttaggggtttgtagaac

SEQ ID NO: 1050 - DNA, 578 bp, Homo sapiens
gatatcatttttttctgactctgatttaaaaatctctgtttaccaagatgtttcctggtatgtggtagtgaatataagtgtatttaaaatttcgaacagcgaacttacaaaagaataatcagaataaacttatttttgacttgcaaactttctgtttagtttttatagtaaatcagtaactctagctatttttagaagtcattccagtttgatccctatgttttatttccatttcttgtcattttttatgagttgttatgtttgtttttatagaagaagaataatatgtattatgtgaaagtaatagccaaactttaatttcattggtgtttcttaaaaatttctattaaatcgagtacagcatggattagaaaaataaagccagaaatcaatatcagaagtttaaagaagattgtaattagtaatttgcctgagttacagtcaaggataaagctaaaagtctcagagtaaatgcaatcacagtaagaaagataagggaaggccgggcgcggtggctcacgcctgtaatcccagcactttgggaggcggaggcaggcggatgacaaggtcaggagatc

SEQ ID NO: 1051 - DNA, 535 bp, Homo sapiens
taatcacaagacattaccattgacaggaccaggtgttgcatcaagaaatctgggggttaaagtaaattttgattttaatgtgtgtgtgtgtgtgtgtgtgtgtgtgtaagaaaaattactttcatctccttaaaaaaataataaagtggtaagtagagatgatctgtgcatgtgtgttatgtatatcaagtattaatcatagcatatataccagaatgcatgtgcttagtaaatgcttatacaaaagctgagtcatatatgatagcacctcaatcctagctttgttctttcaacaacgaaataacactatttctttgcttcattagctttctgagatgagtagtcttatacattaaatccctctaatagtccgaatggttttcaacagtttaatcactcattctattaaatgttaagcatacatccccaaatatgttcatagattttaaattattaactatgtacatatatcctgtagtgatcgaaggcaccaactctggagttagattgccttgatttaactcaagcttcagcc

SEQ ID NO: 1052 - DNA, 393 bp, Homo sapiens
gagatctgattaataaaattttaaagcaaattctaacacacaaacaaaaaactaacatagaagctaaataaatagtgatttatcacaccaagcactgtacctcattgtagtttataacataatataaccgtggagggcactgtcattggtcataccagacagactcactaccactcacaatcttctgggaatgtttaaaaaatgtcatatttacattaatattatcaaatctttaataaaaggtaatagaatgtaaaacttgcttggccaagggttctcccactagcactatgataccatggtccactcctacacgctgcatcagtgattaccctatgacttggcagctaaaaggcctatatgtttatagactttaccccagagatcatcctt

SEQ ID NO: 1053 - DNA, 602 bp, Homo sapiens
gaggcactaggttcagtgtacagaactgatattaataaacttccttatccagaacttgtgcaatagccgagcatagtggctcacgcctgtaattccaacactttgggaggccacggcaggcagattgcttgagcccaggagttcgagaccagcctgggcaacatggtgaaggcccatctctacagaactacaaaaattagccaggagtggtggtgcacgcctgtggtcccagctactaaggaggctgaggtgggaggatctcttcagtctaggaagtcgaggctgcagtgagccatgattgcaacactgcactccagcctgggcaaaagagtgagaccctgtctccaataaaaaaaaacaaaacaaaaaagagaacctgtgcattttaacattatctccaactatggaattcattcaatcaccaacttttattaaccatcaagcagggagggaagatatgaacagaaatacagtcagggctttacgacagggatacatctgggaaatgcatcattaggcagttttgttgtgtgaacatgatagagtgcactcacagaatcctagatggtacagcctacagcctacaacacaaacaggctacg

SEQ ID NO: 1054 - DNA, 480 bp, Homo sapiens
acagttggagaatatttgtcagaaatggggaggttgttgtaattgagttgccagaattacagagtttccattttcagatatcacagttgaatcacctctgtagattgttataaagagaggcattttaagatagtattttatttgctaggttgtgtctcagtctaagaattgggaaaagaagagctataggtttctctttcctagtctggatttcagtaaacacaagcctacctctgcttctttggttcacagcagtgtggatcatgaaatgaactgtttacccacattcatcaatattggtattttacaaatctacttggagcatttaatttcatctcaaagattgtgatccactttagataagcacaaatacagtattaggaaaagtaaatatgcaatcttactaaaatttcaacttgttaagctgtatatcttaaaagaaattatttggggctgggcatggtggctcacacctgtaat

SEQ ID NO: 1055 - DNA, 456 bp, Homo sapiens
gtgttaaagtcatatcatatgttcatttaaattacacaaatttatccagacattcagtcaaataaaagagagaaagaatatttagcaatagcaagtgcagtagtgctggcaattctgcttacactccgtttattgaatgtatgccccacagtgagcagtagtgagctgagaattgagaatccactatttctttagtcagtcttagtttctgcatgccttctgtgtgtctctttgaactgagggagactctagtgtgtgtgcgtgcgtgtgtgtgtgtgtgtgtaaaacactaccctaaattcaagccaacagcttcatctgtggtttaaccgaaaaactagtggtccactccaatgctggaggaatacctggctgtgtgggtgtgttgacagactgtgtgcctgtctctggctacctttttaaagacatttcaagagtaatcttgaaaaaaaaatt

SEQ ID NO: 1056 - DNA, 643 bp, Homo sapiens
tcagtggggctgcctctggggctctcagtctatgggggctgcatctgagagtcaatcaacaggggctacatctgaaacttaatcaatgggagctgcctctgagactctcaatcaatggggactgcatgtgaagctctcaatcagtggaggctgcacctggggatctcaaccaataggggctgcatctgagactcaatcaatggggctgcatctgagactcaatcagtggaggccgcatctgagactctaatcaatggaggccgcatctgagactcaaaacggtgtgggagtgcacggcaaatctggcctttggtgccctctggtgggcattgcatgccctgctgaccagtctgaggacagagatgagggaaagaaatcagggtagcgtggggctgtccagggttttccccaccgacatggatgacagggtgaccctgaagaagtcactcttttctcttagcctcggcttcctaatctgcaaagatggtgacagatacattccatttcaaaaggctgccagggtctaggcgtagctgctcatgcctgtaatatcaggtgcactttgggaggctgagggaggaggatcacttgagcccaggagtttaagaccagcctgggcaagatagtgagacccccatcgcta

SEQ ID NO: 1057 - DNA, 501 bp, Homo sapiens
attttaacatggaggaccgatccatatattgaaatccaattcttctactctttaaactcagctcaagcttcattccttctattaagtctgtaacccaaatgaatcagaccttttgctgcatcctcattgtacctgtgtgcacagaccacaactgcaccacctatatactacatacttgaggcatacatttatcatcactcctctgggtttcttccttatgagactgtaataatgtaggggaaaggcagacctggcccctgtctttatacccccagaacctagcacagaggctggtaggagtaaatgataagaaaattatactcaaggacgggtgcggtggctcatgcctataaacctaggactttgggaggccgaggtgggcagatcacctgaggtcgggagttccagaccagactgaccaacatggagaaagcccatctctactaaaaatacaaaattagccaggcatgggtggtgcacgcctgtaatcccagctactcg

SEQ ID NO: 1058 - DNA, 475 bp, Homo sapiens
atgataaagccccatctctgttaaaaatacaaaaattagccaggtatgatggcgcatgcctgtaatacaagctgcttgggaggctgaggcacaataatcgcttgaacccgggaagcagaggttgcagtgagccaatatcataccattgtaccacacctgggcacagattgagactctgtctcaaaaagaaatatgtgtgtgtgtgtgtgtgtgagtgtgtgtgtgtatatatatatatatagatagatagatatttcatatccttacctcactcttaagtgaaatctaaagtcttcaacatgatccgttaggcctatgtggtctggctctgcctcagtctacagccacccgcctttgctagataggtcgaggatccttaaccttaaaatccaaaatccaaaattcttcaaaattcaaaacattttgaatgctgacatgacatcataaatagaaaattccacacttgaccttatat

SEQ ID NO: 1059 - DNA, 431 bp, Homo sapiens
agtatgaaaaatgaaccctaaaggtgatcacatttcttacttgtaaatgtaacaggtattttcagccttagaaaagaaagtcaaaacagtttgtcagctccagttctgctctatgcctctccccttgagacttccttttctcctgggagcctttcatttaagtttaatattagagaaaagaaaaaaaaaactgtaggatgattcaaggaaattcaaataacaaacaaaattaaaggttcaactttgtttaacaactaaaagtcctcacacctgtaatcccagcactttgggaggctgaggtgggtggatcatgaggtcaggagtttgagaccaacctggccaatacggtgaaaccccgtctctactaaaaatacaaaaatcagccgggcgtggtggcacacacctgtagtcccagctacttgggaggctga

SEQ ID NO: 1060 - DNA, 481 bp, Homo sapiens
acatgtttgtgaggttcatctctggccaattcattttatatttgcaacaatattaagaacttcaaatactgaaatgctacatacatgaagttccacatgacagaaatcagaagctctcactataaactgtcaaaattcatttctagtttaatcccttcattatgtttaccaacacaactcttctggaggttaagtgacatttggaggcacagaaaatgaaggacaaagtttttcttctacagaaacaagtggtagcctctgttctaatatctgcaccctggggcaaaagcagtggggaagcctgtcggacttcaatctgcccacctcttcatatgacctcatgtttgagctgatctgacatgctagcagttctagagaagtcactcctgcaaagtaagccaggctagtactccaacctttcaacccttagatagttgttgctgccttcatccaactgaagttgaccacgtgtgagtgaaag

SEQ ID NO: 1061 - DNA, 442 bp, Homo sapiens
ggaggaggaggaaggtcaggggttatgggaggcaaccctctgactttggttggagctatttctccagcgcccagggaacccccagccttctcatggaggcattattcaggccactctcctttagccacacttctggccactgtgggttgccacaagtacctcaaagacagggactgggccctcaggaagatggccccagtgttcccagtctcactcagtcagggtctatttcacgaattaccatcatatcaggaaaccttttgtactgtactaatgcaatatacgtttttgttagctcactttgaactttaaatttacttaaaaggaaactttatttcactaccatcccaaggaactatatccatgaaatcactggtttgaccttctaattggggctttttctaatccttatgaaaataaaggtattttaaaaaaaaaaaaa

SEQ ID NO: 1062 - DNA, 299 bp, Homo sapiens
atagctgactgctagactattacgacatttagtagtgaatataaattaaatgtgtttaaaaattctatgaaacaccataaaacaatgcactttttaaagtcacaactgaaataaaacaatttgctacaaattttcatggagttgatacgtgatgtcttagcttcagaaattatcttagtgttcttataggccaaggaataagtaagttatgtttacacttgtctatacaatttaaatgtaaacctctttaaagtgacatttccatgtaatcgtctcaaaaaaaaaaaaaaaaaaaaaaa

SEQ ID NO: 1063 - DNA, 367 bp, Homo sapiens
ctttagcaactaacacacatagcagctgaggactggcttcaccagcctcctaaagagaatctgagcaagaaaccacagcatccaccaaacaggctgagtgtggaattaaaaggaaagaaatgaagaagaagaaaaagaaaggcatgatgtctaaacatggaagaaatgtgaggggaaaaaaagaaaatacaaggcagttttttatttccaagggctaacagaagatatccttaaagacaacatgcataatacatttagatgtgaaagaaacaaaatttaaatgaatgagaaaggaatagttaggttaagcttcttggtgaaagggatggtttagtcaccatggtttacaacgaccctgctgggcact

SEQ ID NO: 1064 - DNA, 446 bp, Homo sapiens
aaacattagagacaatcctattaaagttaggaataagataattatgcatgctattaatgttgttatttagcattgaactgaaaagctctagccagtgtaataagacaagaaatattaatattgaggagaaaaaaatatcattatttgcaaaattattgtctacctgaaaataaccctaataaataaaatgtacttacaaatcagtgaagaaatgaatacaccaatagaaaaatgagcaaaagacataattgagcaattcacaaaggaagaaaaacaaatggtcaaacaaaacaaaagtaaatagtccatattgggctgggcacagtggctcacgcctgtaatcccagcactttgggaggctgaggtgggcggatcatgaggtcaggagttcaagactagcctggccaacatggtgaaactctgtctctaataaaaatacaaaaatc

SEQ ID NO: 1065 - DNA, 220 bp, Homo sapiens
agatgtggctatcaagacttgaaaagtaacaattgcaccagaggaactgaaatttcaacctaattttaattaatttaaatgttaacttttagtagccacatctgactaatgccgatcacagctctgtactattcagtcattatgccttggagcttccttatctatacttagtcccttacaaattacattaattttcataccttttaagggacgaagtata

SEQ ID NO: 1066 - DNA, 298 bp, Homo sapiens
gagacggagtttctccatgttggtcaggctggtctcaaactcccgacctcaggtgatccacccacctcagcctcccaaagtgctgggattctgattatcattcttgaaattcagtaacttcaccaaaatatgtcttaaaggtgaagacatcactataagactataggacagaatgtactttcagtctaaagatacaaggttctctttattttagaatatatgtgtggtggtggaggtgattaaaaaactaaggagttggccgggcatggtggctcacatctgtaatcccagcactttg

SEQ ID NO: 1067 - DNA, 409 bp, Homo sapiens
tacgggaacatctggtcaggattcagacttcccagttactgctgcttctacagtggactttctcaaaataaaaaaatcatgtgaagaaaacgtatgcagatctttaaaagactgtgaaatggaaaagtgtccagactcttgtgcccatgagatggagtctgttgcagatcatgaaccaaataaaagaatattgggcagagtaaatttgtctttaaatgatagccattatggacagcaagataaaggaacatctctcagagaaacacaagaaatgactgaaggatcaagactagaaccaaactctgagtttggcaaagaaagtacctttggaatttcctcaaaagagtcgatgtcttgccatgatgaaagctctgtttccctaagaagcctgaaatccattgaaataatg

SEQ ID NO: 1068 - DNA, 467 bp, Homo sapiens
atttctcattctagctgaagatgcatttcagcatagcacgtgtgaaaaggaactgtgtaggtaggtagtcatcttttcagtagtcatcttattaacatttattgaatatctgctgtgtaggtaggctctgaggatattgagacaattaagaaacagttcctactcttgttgatttctcattctagcagaagatgcatttcagcatagcacgtgtgaaaaggaactatagcaggagcacgtacaaaggtctatgagtgctctggggaaggaataattaattctctctaagtgcatccagaagggcttttcaaacacattacacttcagcagcaccttggaaagtgcataggagtgtttcaggtattctgtcttcaagagacccatctcacatgcaatgacatccataggctcaaagtaaagggatggagaaagatctctcaagcaaacaggaaaaaaaaaaaaaaaaa

SEQ ID NO: 1069 - DNA, 559 bp, Homo sapiens
ctattcggttcagcttagggggtaacagggcaaattttttttcttctttgggacttgaagtatggtgttttataattcactgagtgattacagagtgcccagaactttatgtaaattatttttgtttctcataactcatctgtgtagtagatattagtgttcccattacatagatgaggaaatagaagctcagcaacaaaaagtaattcatagctggtaacagaatttgaactcatgtttttctgtctctaaaatctacaatcttttcgctactcaaaggtgctaaagctcccctgtttcctccatatttaactttctttaaatcattattttattctggtttaaagaattgggtcgggcctagtggctcacacttgtaatcccagcactttgggaggccgaggtgggtggatcacctgaggtcgggaattcgagaccagcctgaccaatatggtgaaaccccatctctactaaaagcacaaaaattagctgggcatgatgacatacacctgtaatcccagctacctgggaggctgagacaggagaattgcttgaatct

SEQ ID NO: 1070 - DNA, 312 bp, Homo sapiens
attccctcacacccggccccactctccttttttctcttcccacctacttggtgaataaaacgataaaagcatatttggaaaataatggtgacatgtcaaaaataatttgtttcttatttatctcctctcagacactgccaataagaaaccattgccactccatccccagcccactctgctgtaagttggaagcagatgatttgctctcctgaaagagcagcaaatccgttgcctgggtgatatctcattactaaggcaaccaatttggcgcatcagtgtgaatcccaaaaaaaaaaaaaaaaaaaaaaaaaa

SEQ ID NO: 1071 - DNA, 467 bp, Homo sapiens
atgtaggagacaggtattatctacattttggggatgagaaaaccgatgtatggaaagtaacacatctaaactacagtgtcctagcccgaattcaaatccagctgtgcctccagccacagctcatgcttttgaccactgcgctctgagtagcagcacatacacagcagagaaggcacttgatcggatgcttttgatgccagctctaagagcatccagttctacacagatcagaaatagacacacaggtcctctggttatttaactgaattcagtccatttggggcgtaatttttgtttggcttcattttactaagttcagccaaactgatttatatgaagcctccaattatcttttcagtacaccaatgccaaaaattttgttagggaaacattcttctcctttctccctctcagggagagatgattaagaaaaatcaagttctagtggcagctgggtcttagagaga

SEQ ID NO: 1072 - DNA, 540 bp, Homo sapiens
tacctggtggggatgtatatcctggaggcagtctctccccctgtcacactctgaggacttacaatttttcacctggctcacagtgggtgtaggctgcagcctgctgcttctttcaaagggtctatggtttctgtttttctgttcagttcctgcattgcttcttagaaaaaagttcacagtatgaatttctactcaccattttgtctttccaagtgggagagtcatgctgacactgtttccaatccaccatcttgggaagaaaaacaaaacaaaatgtgatttttcttagcctatccacatggtagtttagattgattgattttcaaatatttaaacagccatgcatgcctgtaataaaccctacttgtaatcatttattactttatttaaatgtgatctcttttctttgaaatatatttaaaatagtctttgctaaatctattgtttgggattactcaaagatgatttctgttgacttgtttcctaagtaaagaacacactgctggccaggtgcagtggctcatgcctataatcccagca

SEQ ID NO: 1073 - DNA, 579 bp, Homo sapiens
gagtgagggaagggaacttagagaatgggttaataggtgcagcaaaccaccatggcaccatatacctatgtaacaaacctgcatgttctgaacatgcatccaggtttgtttcctttttttttagaataaaaaaaaatcttttccccttccttcctcattttctcttccaccattctactcccctgccacaattattaacttccacatgacacatgtctagcacaatcctttaatatatcatcgagccatcaaaatcaaaatgattcctatttaaattacataaacaaaaatccatctgtataaacaagtgtgtttctgcttcttgcaggtggggatagcatctttttcgtctttatatttccaatcccatcacctagttgctcaataaacctttgttgagttcagctgactggcattattcattatacagaagggtttcttacgagtaatgttatctcttctagtgaacttataatttgtaaaaatgtatatagtcatattaactaatatcttatgaaaaaaagcttttacccataattttcttcacaccaataataaaagctcataatatctcgctag

SEQ ID NO: 1074 - DNA, 433 bp, Homo sapiens
gagactggagggaaggaggagtacatttaaaaaatcattttccgggctcccttcctgtggagtccccgtgggctggccacagcccttgacccagcctcagctccgtcagtaaatctctccaggtcccctgtctgcaccgcttcaaatttagggtggcaacagtccccagtgttcctagccccagggtactaaatcattccttccctgttgcttttcttaatccctgtttatacctttgtaaataatctcattgctaaactctcctcaattactcaacttgagtgtgtcatctgtttcctgctggtactggaatgatacctatggagtctggaaatacttctccacccagagaaaaaacaacagctcacatgcacctgcaaataggacttcagtgcgtctcagattcctgaggcggtagggaagggtagagagt

SEQ ID NO: 1075 - DNA, 163 bp, Homo sapiens
aaccaagagttttcagttttggacaaaatggtgaactaacacagactgctggttccccaaactaagcttggagaaaatgacagaggaagacatgaaatccatgaaatatgaaataataacttaaaaagaaactctcccctaaaactcctattgacggtggggg

SEQ ID NO: 1076 - DNA, 295 bp, Homo sapiens
agaacagttaatggagacgtactctactactttgttgttgaccactggctatttggggaacagtgtcaggtggatttggcatggctattaaaataatcaacttaaataaaaaaatacatcccaatataattcccttgtagttcttttagttggatttgaaactgttccacaactgaaatttggaaaatcaagttatattgaaggtggagggaggaatggttggctgaatttaaatgacagatttaattgttttgttttgttggagaatactgtctataaatgtctaagaatttgg

SEQ ID NO: 1077 - DNA, 114 bp, Homo sapiens
gtgggtgattaagatctgtaatataatatctatgtagactaaaaaccatacatacataaaacttgacatcttttcaaacctacatttatatatataaatatatcatgtatattt

SEQ ID NO: 1078 - DNA, 493 bp, Homo sapiens
tgccacctccgcctcccgggtttaagtgattctcccgcctccgcctccggagtagctgggatgcgccaccacgcccagctaatttttgtatttttagtacagactaattttagggcttcaccatgttggtcaggatggtctccatctctttaaaagtgaatgaggaacttccttgagaggagacgctgcactgattttatggagactcaactcctgaccactgggatgggccattcccttctagctggggctgttttaactgctcccttcgagggcaggcatcagctgagtttggtccggatttcctttctggtttttggttcttgcgaaagtgcttttcttgtgtaaatagttgttaaattggtgtccttgctggagagacgatctgtggagcattctgcgccgccatcttgctttgcctcccacctcagcattgcttttaatggcctcggtggcagctgggattttatccctgccacgtgagatggatatt

SEQ ID NO: 1079 - DNA, 655 bp, Homo sapiens
cacaacacctgaagaagggatgaagctggtcagaggcaaataagtgaagtggagtaaggatggggtagatacaaaaatggagtgggcaaaggaaacaatatttgcaaagacctgcaagtaagatagcaaggcaacagcagggcaagattgaggaattcaataaagctccaaattaagagtctggcactgacagagtagtttgtatcagaccaaccctcagcaagtaaaaattataaataaacaaaacacaaatacaaaagcaactatctaaatgtactggaaatgaccaaaagaagcagaaatcaggagactgagcccttaaaaagacagaacaacattaggtgagatccatatttaaatatggcttttcccttcaaacgcatgcccatgttgtgcacttctgggatagctagaactcaagtcaaatgctgcagtcttactgtcttgaagtaacatggagttctggcctatgagagcagctggaaattgaggagacatccccaaaaggagaaagccagatcccgaaaatctgggcataaatgttctcaaatcctcagctgatccctaaaatgtacatacacagggaagaatacaaacagaccagcagaaaacaaagctggaaggcagaaagagttaaatagatacctcagcaact

SEQ ID NO: 1080 - DNA, 653 bp, Homo sapiens
attgtaacacaatgctaagtgtccatcctgttatctggtgttcttattagcgtttgcatgatcatattaaattaaaaataaaaataaggaattctgggaagatggtggcagagctttctaccttttacaaatttgtaaacaaaatagagcactagtggccaaccaaaaacacatggatgacatttacaacaaaactaattacaaggtattcccagaaacctcaaaacaaaaatggcaaagacaaaccaacaacagccacaagacctttagagtatcagtgtctatgtggaagaatgcagagggaactaatggggtatttgacagactagagaataggagcatcctcaaagagcaaacaggtgttaactggaaagtgcagcagaccaatctgggaacagtcactgaaatcgggaggggttttgtcctctcttatcatggacgagcacaggctgcctggggtaaggtctcaagggcctggaggagactcccatggatgctctgaaattgtacctttcaggataggctcccacactgagaagcaactgctgggaatagaaattgaattgagcagagcagggccaataaagatgaaggaaggagaaggtccagatgaaaaagctggaggggcacagagccagcacatctcaaaaagc

SEQ ID NO: 1081 - DNA, 562 bp, Homo sapiens
agtgagccatgatggcgtcatcgcactccagcagcctgggagacagcaagaccctgtctcttgaaaaaaaaaggcataaaatatgtattgtttattgatacacaaaaaaatccaagactaagagcacttattactcacataacatgattctaagtactttccatgtttaaacaaatataaactttaaaaacagatcaaatgatacaagatatagtcagccctctgtatccatggtttctgcatctgtggattcaatcaaccttagattgaaaaatactggggccaggtatggtagctcaggcctgtaatcttagcactttgggagtcggagacaggtggatcacctgagatcaggagtttgagaccagcccggccaatatggtgaaaccccatgtctactaaaaatccaaaaattagccaggtgtggtggcagacgcctataatcccagctactcgggaggctgaggcaggagcatctcttgaacctgggaggtggaggttgcagtgagcctagacagcgctgtcgtactccagcctgggtgacagagtgagactccatctc

SEQ ID NO: 1082 - DNA, 522 bp, Homo sapiens
tttgagtagatgctgaaggagacggaaaagccaccgactaaaaatagtaaagcgaaggtgttctaatgttcctgagaagacttaatagtatccttcagagaatccttttgtaaagtgaatggccgctccctccttttatcagttttgagatctagattgggtgtgcttaaaatgaatccatattaattgctagattacaatgtgaattcctatgtctctatatgtctgatacaaatatcattgtcattcaaaatgatttataaccttcacttgtagctgcaattatctccataccatatattctatatataacagtgacctaaatatactgtctaaaaagataatatgatacgttctcctttaagcttagcatttaaatatactaacaaaattatattgcatattaaattaacacttaaaatttcagattcacattcaattctgtttttgaacataaagcaaagcccttatattttgaaagtttctaaatctcaatcttagaaactttcaaaacataagggc

SEQ ID NO: 1083 - DNA, 648 bp, Homo sapiens
acttgacaaatgaagatagggacctctttcattataagcctattttaggctaaaatagaagggaaggggacacagtgaatccaggccttctggcatggctcctcagccctttctgagctggcctgggacagccttcctacctcactgatgccacttcctactgagcgactttcctgcctacctcactgatgccacttcctactgagcgactttcctgggctccagacccagtaagcgactttgcctgcacccaccttattttgctctactccctgtgcttttatgcctttacccatctgccctggaaagctcttctaacctttgaatgggtaaaggcataaatgtatgctggagaaatcctcagctcagggccaggcacgctggctcacgcctgtaatcccagcactttgggaggccgaggtgggtagatcacctgaggtcgggagttggagaccagcctgaccaacatggagaaacccctgtctctactaaaaatacaaaattagctgggcgtgatggcacatgcctgtaatcccacagctactcgggaggctgaggcaggagaattgcttgaacctgggaggcggaggttgcagtgagccaagattgcgcctctgcactccagcctgggcgacagagctagactct

SEQ ID NO: 1084 - DNA, 199 bp, Homo sapiens
ctggttcttttctgcctggctactgggtctctaatgcagtacttttccctgctcctcagtttgcttgtatgcctatatccctgataaaagtgtatgaattattcaactagtcttttcctgccttcccacccactttatccccttctagagctgctagtaatcccagaacgaatggggtcctagtaggggaagacatatc

SEQ ID NO: 1085 - DNA, 517 bp, Homo sapiens
gagcttccaatggcatccctttagaatggggcctcctgagcccatgctgtgctcgtcagatagcaacatgggaaatacaacagcccagaatgcaggctgcagagttagatccccagaacaggatctcagctggctccatccttcctcagctgggcaaccgtggccaatgactagctttctgtgcctgagttgctccatctgggaattgaagattgtcatagtccctgcttcaaagagtcactgggaggattaactgagaaagtgcagggaaggtgcttggaactaaatgctcaaaaaaagtccatctggccaggtgcggtgtctcacaccagtaatcccagcactttgggagaccaaggcaggcggatcacttgaggtcaggaatttaagaccagcctgatcaacatggcaaaaccccgactctactaaaaatacaaaaattagccaggcacggtggcaggcacttgtaattccagctacttggaggctgaggcatgagaatcacttgaacctggga

SEQ ID NO: 1086 - DNA, 556 bp, Homo sapiens
tgagacagagcaccaaatagaacttatagtagtgtccggagaacaacagcacactctttactccaactcactcagagtgcgcaaaagaagcacaggaataaactgggaggaaggtgtctttggggaactttgtgtcatagccccatgcaagaggtgagaggtagggttactagagaggatcttaagtggaccagtatgagccaaatgtgagacacttgcattttgaagaaattttaattaatgatgtctgacttccatctgggaaatttggaagacctgaaatgaattagccactgctttcttggtagatggaccaaaagcagaaatgttttagatggacatgagattttatactccagagaaaagaatgcatgagtgattgcactggaccagatatgggcatgttttacacacacacacacacacacacacgtatatgtatgcacatatgatacaccatactaggaaaaaaaacaaatcttgataacagcaattgagattgatggggaagaatcttatgtcagattgagtggtcagagaaggccagtcctagtcg

SEQ ID NO: 1087 - DNA, 646 bp, Homo sapiens
gaagaggcatttaaactttgtgttaccattcgattttatcatcaaggaataggtttctcagatagcctggatcatcttgaagtctgttgttgcataagctatatttttgctagaaatccttctaaagggaatgagtagttacatatgaaaaaaactataaagactctgcaattgctttgtcccagaagaatgtatattcacatgattcacacaacttatcgttttaacatttgtctgcctccctggaagtaataggacataaagagaatgaaatcaatattcttttctacttgcctagcacaaattcatacttacttggggtcgatagtcctttttgagggttttatgtaatgttcaaaaatacctctgcacgaggtagggagaggccagaagatggaacgatgagggaaacatacagttagctgtggtcattaccaaggtcctgtcttttgtttggggctgtggatttgcagttgcctattacagtattcaaactaaccaaataaatagaacgaaaaattaaagtaggtcataaatagaccagtgatggagttaatcatggaccaactccttactcctgctaaatgctaaaagaaaaaaaaatccagagaaactactcctactttgatttgaatattggaaactg

SEQ ID NO: 1088 - DNA, 577 bp, Homo sapiens
gtaacatgggaccctgaagagaagttggccgttaggattaagacatagagtggtggtgtggttgaagatttgaattctacagctgggtaaacctgtgtttaaatcatggtccgatacttccaaaccatgtgaccttgggcaacttatttaactcctaagccttggtttcctcatttcgagaaggaaattaataaacctcattttatggagttttggtgaggaagatgtgatatgttaattgtaacaaaatcctaggttcacagtaggtacttaatgaatggtagtattattggctattatcatttaagtcatacagagagtagggatgtcaagcaaaagatgatgtgtgaaaaccctgattgcacatttactcagcatgaaactggggcacatgtttgtagtaattcaaatctctgcaagtaaggtatgtgtggcaacaaatcaatgaggcaattgaatttattttgcagaaaacagaaaatactgctgacagacggcaataattccatgttaagtaggtgtcagatgtttcctctctcctttctcttcttcttttccacctcagcagtggcacagt

SEQ ID NO: 1089 - DNA, 636 bp, Homo sapiens
gttgttgtgcctgtgtgtgtgtgtggtggggtcggtggggggataggaaagttagtttattcacatgattctcaacatagacataccttgcaaataattgtgcaattccctactttgctttgcagacagaatgtctttgaatcaatgtcttttataaatacactatacaaaaaacataattataaacctttaaagtatttatgcatactttaatattcagaactagaagagaaatttctgtaaggagaaatgctttggagattaaaacgtaaaggagataaccaaattttactaaacctctatccatcatgaccacatttcctttcattctaaaataacaatattttggaaatgttgaccccctgcccaccatttttgcctgagaagttttaaatgcgaagaacttgctcctcacttttgaagcacggtgctttctttaggaaccaatctgtatcacatgcattctattggtttgtattttattacatatcattctattacattttaaaatgcatttctgagcccatgtcattgatttcatgattcattaatgggttgcaagcagcagctggaataacactggcttaggtaatggcagtataaatcacatgttggtaaaatgaaagatgcctttct

SEQ ID NO: 1090 - DNA, 478 bp, Homo sapiens
cagcagtttctgttgtgctccaagaactgtgttatcaggacccaccactcagaatactccagttttatcacatactccgcctctgggccgtagtagaggaggcagtaattatctatcacatgcttgcacccagcatttgctcttcctatctgatcaacttagagcttaagaaaaaaattatatatatatgtatatataaaatttttgggccgggggcggtggctcacgcctgcaatcccagcactttgggaggctgatgcgggcggatcacgaggtcaggagatcgagaccatcccggctaaaacggtgaaaccccgtctctactaaaaatacaaaaaattagccgggcgtagtggcgggcgcctgtagtcccagctacttgggaggctgaggcaggagaatggcgtgaacccgggaggcggagcttgcagtgagccgagatcccgccactgtactccagcctgggcgacagagcaag

SEQ ID NO: 1091 - DNA, 441 bp, Homo sapiens
gcttacactgggcaccacacatgccgcgctgagcagtgagaatcaaagcacttctagttttagaaagtgtcctggcactagtagtaacccaggtttccaaagggatgcagaataggcatgatagtaggccagaatacacacacagtgccagactcctgcttcctatttctcaaaaactgtgcttccggctgggcatggtagctcacgcctgtaatcctagcactttgggaggccaagacaggcggatcccctgaggtcaggagctcgagaccagcctggccaacatggtgaaaccccatctctactaaaagtacaagaaattagccggggcatggtggcgcatgcctgtaatcccagctacttgggaggctgaggcaagagaattgcttgaacccaggaggcggaggttgcagtgagccaagattgcgccattgcctgggc

SEQ ID NO: 1092 - DNA, 616 bp, Homo sapiens
aaatacaaagtaaaccggcaaactactttcatttgatgaatatcagtgtgtacattctacatgaaagaataatgcagagaatcgggcaaaagaccaaaagaataattatccatgaataaatgatgtatattccaaaaatgcaaagatagtttgactctattaattggccatatcagatgaaaagagaacctccataaatatctatcagatattaaaacatattacaaagctatggcaattaatacattacggtaccaaatcaaaaataagtttatcaggctggacacagtggttcacgcctgtaatcccatcaatttgggaggctgaggtgggtggatcaactgaggtcaggagtttgagtccagcctggccaacatgatgaaaccgggtctctactaaaaatacaaaaattagctgggcatggtggcacatgccctataatcccagctacttgggaggctgaggtacgagaatcgcttgagcccagaaggcagagcttgcagtgagccgagattgtgtcactgcactccagcctgggcaaaagtgagactctgactcaaacaaacaaaaaagaataagtgtatcaataaaacagagtatagaatccacaaatata

SEQ ID NO: 1093 - DNA, 479 bp, Homo sapiens
ttacattaaacatatgatttatgaagagagtggtatagactaggagccaatatagttttaataaaaataagtcatgctaaaacaatctaatttctctttttgattctattggaggaatatgggcaagtgaatgatctagtctcagaggagcctgacaaagcctctcaaggcatctttacgttaagggtaaaatgatggctctctgaatacacagactgcatattacttttcttaatttacccccctcgtgccaggtacacagcagatgcttaaagaatgtgttggccacgcgcagtggctcacacctgtaatcccagcactttgggaggtcgaggcgggtggatcacgaggtcaggagttcaagaccaacctgaccaacatggtaaaaccccatctctactaaaaatacaaaaattagccagggggtgttggcacacgtctgtaatccccgctactcaggaggctgaggcaggagaact

SEQ ID NO: 1094 - DNA, 566 bp, Homo sapiens
agaagcgttaattttccgtaagacatttagtaaatgttgaaacactgaagacttacccctacatatattactaagcagcgctattagaatagcattactatgtacaagtcactgaacttactatggggaaaaaaatttggtcgatttataatataagcctataactggtccatttagtatttaacatattggcaaatgtaaagcccttttagaacaataaaaatgcttcagcaacaacttaacattgaagcaacagtacattccctcacacccggccccactctccttttttctcttcccacctacttggtgaataaaacgataaaagcatatttggaaaataatggtgacatgtcaaaaataatttgtttcttatttatctcctctcagacactgccaataagaaaccattgccactccatccccagcccactcttgctgtaagttggaagcagatgatttgctctcctgaaagagcagcaaatccgttgcctgggtgatatctcattactaaggcaaccaatttggcgccatcagtgtgaatctcaattttaaaatataattat

SEQ ID NO: 1095 - DNA, 657 bp, Homo sapiens
ctcatacctcagggcctttgcacttgctgttccctctgcctgaaatgtccttcctccatatggacaaggctcacttcttccaggccgctgctcacatgttgctttatcagatgggccttcccagcccacccacgtaaatagcatcttcatcgctctctgtcattcacagcacttatcaccacttgacgtagttatatttgttccatgtttattgtttctctcttccccagttgaatgtcaagttcatgagatcaggggctgtgtttcttttccgtggtgtattcccagagccttcagcataagttttgttgactgaattgggcatctgctgtatgtatacccctagactgagtgctgtgggtggtatgatcttcacatgccctgctacattggatttttataatatccccatgaacatggcaggtaaatagcaccatcactactttacagatgtagaaactgaggtccagagggggtggtttccaaagggctgacagctccacaaattgatagagccaacttaagtcctcaagcaacttaagcccaattagggagacatttacatctgaaaagttatcacaagaaggataaacattcccattcacagctcaccacatctaaagagatcaggcaatactaagccatcaggcaagaagt

SEQ ID NO: 1096 - DNA, 605 bp, Homo sapiens
ggacatcaggggtcaacgccagacctcaggggtcaacaggtggctcgtggagtcactgcaaatccttctccatgggctcagtgcccattccatattaatgtgttccaaatgtgtttcaagactatgaataattatcatggagaataagaaaaggcaggcaaatttacgtttatgtaataatggaaaagtctactgtaaataaagccaatttacatggaaacattttatttcctgattcatacatgttgtaatccaaacttaaaagtgtttaagtttaaactttaagtttaaacactttaaaaaggaaaatgtgagtttaagtttaaactttaagtttaaacactttaaaaaggaaaatctgaacctcacatgtgctgaagctctaagacatgaactgtttcactggatggaaacacactaaggcagcatttgtccatctgtgcgacctgtctgtgacgcacacgacacggagtcctctgtggtgacaccagacataaaaacgcaaaggaccccagtgctccgttctgactatactgtccaagaagacgcacatcacctccctgttcacaccccagatatgcaacaagaacaacggtcacgcacca

SEQ ID NO: 1097 - DNA, 536 bp, Homo sapiens
atcttaactaattacatctgcgagggtcctatttccaaataaggtcacctgaggttctgggttgatatggtttggctgtgtccccaccccaatctcatcttgaattgtactctcagaattcccacgtgttgtgggagggacccggtgggaggtaatcacaagatctgatggttttataaggggtttccccttttgcttggctctcattctctcttccctgccaccgtgtaagacgtgcctttcaccttacaccatgattgtgaggcctccccagccacgtggaactgtgaatccattaaacctctttttctttgtaaattacccagtctcaggtatgtctttatcagcagcatgaaaacagattaatacatggttagacatgacttttcgtgggatactattcagcccagtacaaggcatctttgtggactctgctacattctgcggggtttaaggttgcaattacggaataaaatagtggggagaactagttacaaagtgtggagaagacaggagatgggtcttcagaagtattt

SEQ ID NO: 1098 - DNA, 648 bp, Homo sapiens
tattgcactatcatactacaagatgttaacattttgttaaaataaatatctttgttatttctaaaaacggcatgtaaatctacaattatctcaaaataggttaatacaacgtttttgctttactggagaaaaattagcatgtaataacaaagttttcagtatgttcatattttaacataactcatgtttgaagtcaatatttagttaagatcagcaccaaacattatgatttttatactgcatttattttatttgtagttataaattaaacagatgttaagctttcaactttaaagctatgtttctgaaatactaatacaaatgctttttacctgaaagctatttacatttttacatttctactaaaatttcgggtttcttaaataaaatgtaggaaatgttttattcaatttcacatttaatacttgagtaatgatgaaagcaaatagacatatgtgtacttattgattaaattttaatggtaagcattttttctgaattcaaaaataataaaattggggacattatgtcatagttgtctctctcttttgaataaataccttctttactaataaaaacatattggtattaaaacgttagcttcctattctcctaatacagtaaaataatttctccattaattatatg

SEQ ID NO: 1099 - DNA, 573 bp, Homo sapiens
agaacagttaatggagacgtactctactactttgttgttgaccactggctatttggggaacagtgtcaggtggatttggcatggctattaaaataatcaacttaaataaaaaaatacatcccaatataattcccttgtagttcttttagttggatttgaaactgttccacaactgaaatttggaaaatcaagttatattgaaggtggagggaggaatggttggctgaatttaaatgacagatttaattgttttgttttgttggagaatactgtctataaatgtctaagaatttggtgttagaagtttgtacactattctaaaaagaaggaaatagaggatcaaacttacagttaacaaactatttgcaaagaaaatatctcttaacaccctagaaaggcaaagaaaattaatgtgaacacacctaagggcaattaacacttataaaatgaaagtacattatattgacagctttatcttttttgtttgctttttttaaaaaatgaacagaagcttgaagtgttaattttaaaaatcagggctgggcacagtggttcatgcctgtaatcccagca

SEQ ID NO: 1100 - DNA, 651 bp, Homo sapiens
atttaaaaagtagctttatttatctagaaagtttaaaatatgttgttataccacagaacaagcagattatttttaaaagctttttcttattcgattataaatctttcaagatagatctgtttgttttagtctctttaactccactgtgtctaatataatatcttgcacatagctcttcaccaagtacttatctaattgaatttctaatcatctagtttcacagccccttctcttattagaaatgacttgtgaaggatgtatatatggctggttcatgatacagctagatatattttatgatttctggggatttggctgggcacagtggctcacatcccagcactttcggaggctgaggtagaaggatcatttgaacccaggagttcgagaccagcctgggcaatatagtgtgttgtgggaagtcagggaccccaaacggagggaccggctgaagccatggcagaagaacatggattgtgaagattttacggacatttattagttccccaaattaatacttttataatttcttatgcctgtctttactgcaatctctaaacataagtttcgaagatttcatggacacttatcacttccccagtcaatacccttgtgatttcccatgcctgtctttactttaatctcttaatc

SEQ ID NO: 1101 - DNA, 570 bp, Homo sapiens
tgatactgctgttgctatccttgtatgttcatctctgagtcattccttaacataaatacttggaaggcttttgacatattgccacattgcacttcagaaaggttgtaccaagtgacacaacagatatgaaagtgactttttaactgagcattttgataattaggctaatcataatttgtgtacttgattgaaaatgtgtttcttcttttatgaactgttactagtaattttcccctatctttctcctgtttatcttattggtttatagaaactcttttcagattacagatattagctttttaatcttttgtttaaaaaaaaaaaactttagacaaattaaatttgacggtttaattagcaaagaatgatttgagaaccgagcaccccccagccctggcccccaaccagacaaaatggaagtgaggtacagaaacaggctggatgtggtggctcatgcctgtaatcccagcactttgggaggccgaggtgggtggatcacttgaggtcaggagtttgagaccagcctggccaatgtggcaaaaccctgtctctactaaaaatacaaaaatt

SEQ ID NO: 1102 - DNA, 612 bp, Homo sapiens
cagggtttatgggaggaaggcagttgactcaatctcagtaattgtaagttactaaagacacagatgtatttctctctctctctctctctctctctctctctctgtctctctctgtctgtcttctaattgagaatcttcatcaatgctctcacctctctctcggtcataatttttttaaattgaccttaaataaataacttgtgatgagtctttactaattctacatccaaaaagatcaaaagtcatagcaatgataaacttagcagaaaaaataaacaacctagtagaacacaatagcatgtacttgaagaaatactacatttatcccaaatactccaagtttgttatagctatcaataatgtagtgcgtcaagaagaaaactctgagtggtgtgtgaaagaattctctaattctcagatctgtcatctttctcaagagtagctagtttgctaaatgcttggcattgttctaagtgatgtgcttgtattaacttatttaaacttgacagggacttagagggaaggtaccattttcatctacattttgccactgaggaatcaggagaggcaagtaacctgcccaatgtcacacaacagtaaatggaatcactg

SEQ ID NO: 1103 - DNA, 584 bp, Homo sapiens
gttctattgtgcagccaagtttgagaaccatgcaataggtccaactcattcaggaggggtgaaagtctaaatgccaaatgtagctgctccatgtctctggctctctgaggtcatttgtttattcatccaacaggccactcactaatgggtttccactgaggtcacagaaacacaatcttttgagtattagtgtaaaaactcccaactaaaccagaaaggacatcattaattcatttattcatttgataaacactgacttagaccttcatctgccccagtcactgtgatatgcctgggaatactgagttgattaatgattaattctagtgatcgagaagctccagaccaataagaggaatggatttcaacataataatatttactccctttacttttactgagtattctatgctagaaactgcacttagcaatttgtccacattatttatttttatcttcataaagccttctgatgtaagcagcattgtgcctgttttacagatgatgagcctaaggcttcaagagtaactgatcaggccaggcacggtggctcacgcctgtaatcccagcactttgggaggccg

SEQ ID NO: 1104 - DNA, 635 bp, Homo sapiens
ctaaaacttggctgttagcatcaaaagttttgcatctgaatgttcttagcctcctcactcattcattcgttcattcatctattcaacaaatatttattaaggtcaagtacttaccatgttctgggtatccgtgagaaagaaagaagttatagctccctatgtcttagctaccgcccctacatcaaggctgtaggcaagccctccttagcatcccccttagcaactagcacagtgcaaggcatgcagtaacagctgtgtccactggggagcgcagaataccaacacagcttgtcacttcctttgacttgagaccactgaacagagtcatccttcagcatacgataatttaaacactggcccttataaggagttgatgcaaattatagatgacataggtaaagagcttagcatatgatctggcatgtagtaagtgttcaataaatgtgagctagtgttagggactcagtaattacttgtttatcagggctggattcaattctatctcattagaagcagccccatatctataactgaatagtgaactgtacaatatgcataattggaggcagaagccagcatggagtagagcaacgaaagattatagaactgtttgcttgataattgctgcttaagta

SEQ ID NO: 1105 - DNA, 530 bp, Homo sapiens
ttttctgagtgtgtagcagctaatgattgtcagtatttgtcttagggtagctgccctggaaaacagacctcaacacatagtttcacttgcaaataattcagtggggagtactcccagggagaacatcagtgaggtcctgaggaaagcagagtgaggccaaggaggtgttgaagtgtaatgcaggcacaacagagcctcaacctgttacacaggcagctctggagctctgatggccttcaagattgtcccaaattgaagtatggggattggacctttatatctcacatcaactaaaaatcattgatgaaactgctcccagagaggagatataaacttgcatgacgttgacagctttttctgaggtcaatttttaatctttgagcccttggctggcaatacccctggcagcaggggaaggagcatctcaggggatcttggtggcacctgatagcagtctgtaaagtccatttattacgctcctaagatccattgcttcatataaaacttctctcccattagagaaaaagctt

SEQ ID NO: 1106 - DNA, 519 bp, Homo sapiens
atttactatgggccacgttcttgctgtgctccttctccctgtggttttcaaaaaccagtcacctaacctgaagcctcaaactcttcatctgcaaaaatgagttgtggcaggtgcctctgaagcaaaaatcctgggctagaaggagtgtcgtcatctaaggcaaaaaagaaaaacaaaatcaagactaagagaggaggaattagaatgagactcatgtaccctccttccccactccaggggaaggagagactgtttgggaatgccctcccactacttccagggcagaggctgtgcagaggagccttggagaatctgcagcccactgatgactctgcttcagtcagtgtttctgactttctgatggagaggcctcccattgataagatttttgtcactgcagctaaatgggggcttcaaatacaaataagtttcagttacagaaaaaaaaattcttgcacgtttaagcttatcccttctacggtattatctgtgagaattatagaccaaccataaggcact

SEQ ID NO: 1107 - DNA, 601 bp, Homo sapiens
gatataaaggatctaagaaggcagccagcaggagccctggagaccatctgatctgtcctgcccatctttcagatggggagcctggggctcggaaatagggtaggacttgcccagggccgcacaatccaccattgggcaggccgggatgtgaacctcaggcctcaagcggtgcaggaccctggacagctcccaggctctgagagactccaggcctgggttcatggtgaagcttgggcctggagtccccaccccagaggggagggactgtacacgtttcccacctggccttctggtgaccagtcataggatgtgcagtagcggaacagcagaggtgacactctgagagccaagtcccttcccctgggagaagtggtaccaatggtcagactgtgaggaaagggatgtgacaccaaaccagagaggtcaggcgcggtggctcatgcctataatcacagtactttgggaggccgaggcgggtgagtcaactgaagtcaggggttcgagaccagcctgtccaacatggtgaaaccccttctctactaaaaatacaaaaattagccaggcatgggtgatgtgcacctgtaatcccagctgcttggga

SEQ ID NO: 1108 - DNA, 502 bp, Homo sapiens
acatgtttgcattgactgaattttaaaaaattcataataaaagagtcaattccaatgcctgtcaatgcataatagttctcactttagagtccttgatatttctcttcctgattagtgtcaccacatcattcctttaaacattttgataaaagagatatcaattaatggtgccctggtaaactgtaatcagaatagattcccaagatgaagttggttcttttacttggtcacaagaagcatttttctttctatttggttgtacctgtccctttaacaaccagctatttaggcgatcaatgtcagaaaactagaacaaatagaaacacattttccagtagagagacattcagttgactccattttggttttctttctcggtttaacttttgatttacccaagaaagaccaggaaatcagtgattgcctagagtgaaaactgctagaagaagagattatatacaaagaaggataaggaatattttggatatgatgaaaatagtct

SEQ ID NO: 1109 - DNA, 508 bp, Homo sapiens
ggtatcctcctgcctcagtctcctgagtatctgggacaacaggtggatgccattgtgcccagcaaattattttgacttataattcattctggatgacattttatataataggactacagttaatgttggttttattttgcttatcttggttgttattgtgattgactttttaaaactttttgttcatgtttctttagcatttctaatgtttttcagcatggtaactaaatacttttatataatataaatgctaaggttacatggtaggcattgttcatgggcaccatgctatacacctataaattaaaatcagtacaatcatatccaaatgaatacaattatatcaggtgacagagttgttaatagctcagaagataagcggtttcaccattgctcagtagataaatttcttctttccaaaatgtgatttaaatatcaatacttccccagcactttgggaggccgaggcaggcggatcacgaggtcaggagatcgagaccatcccggc

SEQ ID NO: 1110 - DNA, 590 bp, Homo sapiens
tcgtgaacaccctagacctgagaggaggaccagcccagatgaaagcttggaagaattcccaggggctggtggcagtctcagcctggctgctctgcccagggacatggcccacagggctctgctttccctgctgccagctcctcagctggagacagcatggccagtggaggcctcctgtggctgcttctctcagaccaaactcctttgagaaattttgacatgaatgagaatagggtagcctaattgaaatacaatggggtcttcctcctaaattcccacctctaagctagttttctcttgggagggactagtgctctctttttaagaggggtgtgtgtgagtgagtgagtgagtgtgtgtatgcgcacacataggttaacagtttggttctaatttagttgcctgtcccaactgcattgtttactggtagtggtaactttacttcatcatataacctgctcttcacagtggcttcaaaatgcattgtaactcatcactggtactaccatgccctcagacatcatgaagacagactgagggcagggctgggactatgtgtgtacacgtgcgtgcctgtgtgtgccctcaca

SEQ ID NO: 1111 - DNA, 645 bp, Homo sapiens
aaagatacaataaagaatttctcccaagcagaccctcaggaaaagaaatactaaagattattcttcaggtagaagagccatgatccctgatgaaagtttgcagttagaagaactattttttaatgaaagaaataaacatagagataaatttaattggatattgactgtataacagaatgctatctcataaagtttaaaatgtatcttccatacaacagcagaagcatataagttgtgagttggataaattaattttaaaatattgtcaagtattttttttctccaaatagacatatgtaccaattatattagactctgaattcaagaatgcacgttgtattaaaccaggtaaaacataaccagaccagattttttaaatgggctctcttaaagtttttataatttatattcatatttcacatatgttgaaagtaaataatggaaaagcatgcaatgcaaatattaaccaaaatatagctttagttgtacttatattcacattttaaaagttggacacagttaagtctcagtgattttcttacacaacggaggcaacctgtgcagttataactagtattatattatgctcttggcctgattacagaagggaaaggagagatcatacaagacaatggcagaatgaag

SEQ ID NO: 1112 - DNA, 281 bp, Homo sapiens
gtgctgggattgtaggcatgagccactgcgcctggcctcattattcatacttttctatctcccctctagattgtgtttctgtaacctattgtgcacacaataaccggcacgatgcatgcagaaaatgtttttgaatgacatgttggttgaataaaacttgttggatgaatggatagatgggtggatggatggggtaagtggacaatgatggaggatggatgggtggataaatggatggatggatggatttgatggctggatgcatggatgggtgagtgggg

SEQ ID NO: 1113 - DNA, 526 bp, Homo sapiens
aggcatgtaagcacaagcagccattggtgaacttgtgctgtgagaccaccaaagaaacagcttaggagctccagctaaacacttttctgattatgaccctgagatccttcacttctataaccaatgtggtctcaaagacacagaaatatataggaatatattgatcagcataatgtatggtctcagagtcaactctgggaatattttaagccagacatatcttggatttgaaaaagtataaaatggggccgggcgcggtggctcatgcctgtaatctcagcactttgagaggccaaggcaggtggatcacctgaggtcaggagttcgagatcagcctgaccaacgtggagaaactccgtttctactaaaaatgcaaaattagctggtgtgatggcacatgcctgtaatcccagctactcaggaagctgaggcaggagaatcatttgaactcgggaggcagaggttgtggtgagcctagatcgcaccattgcattccagtgtgggcaacaagagtgaaactccctct

SEQ ID NO: 1114 - DNA, 536 bp, Homo sapiens
tacgcctgcaagtgagaaagctgtggttgaaacagattcagtaacttacgcaagtttatattctctgtcaagtgacccagctgggatttaaacaggccttttgactctaattctagtattcctcccatgtgcagtattttattttatattgcacaatagataaaatataattttggtttctccttttttattctaaaagagtaaaagcagttatctcaatatgttatgttcattctagtgatgactttactatcatgtactaaatgtgttttgtttaaagtagaagttaacttcacgttatactgatttgtccccccataaaccaactgtatgtcatcatataacaaaagttgttaaaagtgctatataccatataatgttgcatctaaactgggacacttatctgagatgcttttgcgtgggacaaatgctatattagaaatgactaggactggccaggtgcagtggctcacacgggtaatcccagcactttgggagactgaggcacgtggatcatttgaggtcaggaattcaag

SEQ ID NO: 1115 - DNA, 635 bp, Homo sapiens
atctgaatatccctgacatcacttagcattctttagctttctgatgttttgcaagtccaacaagcatcaggtgatattgtattgccattttaattttcatctctttgattattaatgagtttgagcaatgtcaatgtgcctattaactttttaagaaattatctctataagcccaacagtgggcatttcctggcatataatggatccttagtggatgtatgattgaaagaaagacattatagcatgcaaaattcccaaattagtctcaggctttgatttttgatacttgttggttatctcgaaatctgaacactaagtaaatattggaattaagtttttgaggtaattaactatattaatcagttgtcctgattttacagtcgaagattgttggtaagtttgacatagggaaattaaacttaaaaaaatcataaaaataacattttttaaaagttaccatatgatgtaaggagtgactgtgagttatattttcccattttgtagatgagcaaatgagttcaggagagatttaaataccctatgaaaagcatgcagaattctggtagcactataaggataaataaaaagattgggccatttggctagggctggcatgagttaattataatcattat

SEQ ID NO: 1116 - DNA, 577 bp, Homo sapiens
gttaacaagtaacacacgtttgttcagttaaaggaatgcaaaagttaatgatgatactgcctagtgaggtggaaagtcaagggaacaggcgactacaaagctgtgtgttaatggttagaatgtgaaaagtatatggaagcacacatccatggtaactaacccatggagagagggggcgtccaaagaacccttccccaagaagcttgcttcagatctaagctgagacctgaaggacctgcaggatgaaggggatagaagtgaggacaagacggtgttctaggcagaggaacagcatgtgcaaaggcgtactgactagagagcgtagggccttcaaggaaagttaaataattggtaaggccaggcatggtggctcacgccacacctgtaatcccagcactttgggaggctgaggcaggtggatcacctgaggtcaggagtttgagaccagcctggccaacatggcgaaaacccgtctctactaaaaacacaaaaaattagccgggcgtggttgtgggcgcctgtagtcccagctactcgagaggctgaggcaggagaattgcttcaacccgggaagcgg

SEQ ID NO: 1117 - DNA, 641 bp, Homo sapiens
gagataggcaattaaaattttgcatttgctggtatcacaagtctttcgttaatgggtatacatagttacatgaaaacacatgtatattaatcaataatttaccttcaatcacagtcatctgtataatgcctttcctccaatacatcattggtagaggacaatttggcaatgagaaagcaacaattgttactgattttgcattgttttggcagagttgcaataattttcccataccgtgatccagcagagatatcagatagatttctagactgtacttgcatttgaaagttcttcctctgtttttattctgagtatttttttccatcagcttataacatcataatattgattagtgcaagtaatgtattattcatgccattctggtttcattccattagtgccatcggcattagtattcagtctgagagacacaattatgtcaagaaccctctggatcagctagtcttgttttgcatttgtttcacattcatagaagagacttctttgtagagtagatctttttttattttgttggtgccaactggaatgaaataagagattaatatgaggctgatgtaaatataaccttatatatttttattttacagataatcattatgtaaaatttgaaaatttggaat

SEQ ID NO: 1118 - DNA, 597 bp, Homo sapiens
aagaggaggttcttgaggctagttaattgtcccccagcttggccggggaatggtggctcacgcctgtaatcccagcactttgggaggccgaggtgggtggatcacgaggttaggagattgagaccatcctggctaacacggtgaaaccccatctctactaaaaatacaaaaaattagctgggcatggtggcgggcgcctgtagtcccagctgcttgggaggctgaggcaggagaatggtgtgaacccgggaggcggagcttgcagtgagccgagatcacgccactgcactccaagcccaggcgacagagcgagacaccgtctaaaaaaaaaacttgtcaccccacttacagtcagtgatataattttagaacaagtggagagtgagaaaggtataaaatgaaggctgccttcctgcagggtttggtcttggatggttatggattttaaaacttgaccacgtttcatgtttagtactttcttatttattttagagcttctgaaaattctatagaaaggaagacttttgagctaaaatgtttatttctatcttatagtcctttctccctcttaccagataaagcaaaaaaaatagaaat

SEQ ID NO: 1119 - DNA, 624 bp, Homo sapiens
taatttaattttcctgcaaactgggaaaatatttccagtattccattttactgtcatgtcactttggttctttaggtgcttaaaccacatattatgaactattagagaattatgaaattgatgtagtgagtcttggctggtattcttttcttaaagatagaatagagaatacatcacatatattttgcctcctgaaaagtttgtttcagttgtgtgtgtgtgtgtgtgtgtgtctcctaggacacaatgtaaaatgtgtttcttgccatgtaggagggtgttggttaaaagtttgaaaaacattgctgtagagaaaagttcctcaatcattaatatgtataaaattacaggggaaccttgttaaaatgcagtttcagacttctacttatctatcaatccatgggatagggtcttatattcttcatttcaataaaactcctaagtgattctgatgctgctattccaaaggatcacactttgagtagtgagggccaagaggaagagctatagccacaagcagaggatgactaaccctctggaggaatggcaaatgaaactctagaccctgaatatcctgctcaggataccacagccgcaagaggcatcttcagctacagcgtctga

SEQ ID NO: 1120 - DNA, 593 bp, Homo sapiens
caacttgtattaaaatgatcctcgttggctagtgccgtcagtcacctggaaaaagacatcacacccaaagcctctaattatttctataaacaatttttcaaataccatgtccagcacacaaacatatgaacaaagtaccatgagtaagaaccatgagaggcagttatagatccaaaggaactccaaatactggagatatcaggagactataaaagaattatatttagtatgttctaggaaataaaagcgaagtttgaaaaatttagcagggaacaggaatccataaaaaacaatgtagcagacttgaaaagaatcacaactgaaaaatacagtaagatattggtaagaactatccattgagttattaaattaaaagcagattaatcggctggcgcggtggctcatacttgtaattccagcactttgggaggctggggcaggtggctcacttgaggccaggagttgaagaccagcttggccatcatggtgaaactccatctctactaaaagtacaaaaattggccaggtgtaggggcacacacctgtggtcccagctactcgagaggttaaggcacaagaactgcttgaaccca

SEQ ID NO: 1121 - DNA, 488 bp, Homo sapiens
gaaaggaaagagagatatagaataggaattagggatggattcatgttcaaatgagatccatgggttctttcatatatgaaagaaaggtgaccctccccaaccccaaaaatataccactgagatccagaaaggaaagagaaaaagagaaaaaaatacactattgagatctagaaaggaaagagaaaaagagaaaaaatacacttttgagatcccgaaaggaaagagaaaaagagaaaaagaaaattgagcaatattccaagtatatagaataaatgaagatttgggtaataggatggactgctgcttcctctaggactgggaaaaggcaaaaatgatggaagatgtgagtaagtttgtagaaatttataacttataattaagtgcttctattttctgagataaatgacaagattatttactgagaagtaggaagtaagataaggtgatttgaggaatacaaggaataaagagaaagctttgaataacta

SEQ ID NO: 1122 - DNA, 119 bp, Homo sapiens
tggtgttcatgagcagcactgttattcattaatttatttgtttgcagtataagcatctaactccatggtcaaagaatacttaataatatacgtgagtacatggataaatatttctgact

SEQ ID NO: 1123 - DNA, 620 bp, Homo sapiens
gaaggaggccgtggggggcctggacttacccctggtcccacaggtgagttctgcggggcagcgagaactcgaggtactggcgctggcgggcctgggaggaagcacagtggggtaggagagggaatgtgtcagcctgtgttgggggcagtgggcccctgaacccccacgcagtcaggtctccacaggcctcaccaccttgtctgtaacaggggcagccgctggttaccgttcaggggcaacagcagcaagggtgccacccaaaagtgtcgctgtctatctagagccctggcatgcaccagcagccaggagagggggtacagctggcctcgtcctcactgttcttcctgggccagcaggtctcacagcttggggtgcttggagctccctaacacgcttctcctcactagtcatctttgcatcttccctgcccggaagagctggggtctgaggttgccccagtcttgcagctccctgactccggctgttttgttaaccgagaagctcctgagcagacactgccaacctggcttgcggcctcacgaacacccactaagcacaagctgtccgccaggtcctgctgaggattctccatgcaggcccggtaacactgggaggcgcac

SEQ ID NO: 1124 - DNA, 635 bp, Homo sapiens
aaatatactaaaaagagatacttaaaaagatgaattttcctttctatattaattacaatggatttttagataatatggaaatatataaaagtagtcagtgtttagacatttgaaaaattaatgggaatatatattttgctgtatggttctgaaagtactaattggtaattgaatcataaaatatcagagttgagattaaagagctaaaattaaataatatcttcagagacttaacagagatctttcatttgtgccaaatttagtaagatttgcctcaattcagttttacttatggtgtatattgattctttaaaatgtcacgtgtatggtggctcatgcctgtaatcccagcactttgggaggccaaggcgggcagatcatgaggtcaggagatatagaccatcctgcctaacatggtgaaaccctgtctctactaaaaatacaaaaaaaggcccggcacagtggctcatgcctgtaatcccagcactttgggaggccgaggtgggtggatcacctgaggtcaggagtttgagaccagcctggccaacatggcgaaaccccatctctactaaaaatacaaaaattagccagacatggtggcaagcacctataatcccagctacttgggaggctga

SEQ ID NO: 1125 - DNA, 586 bp, Homo sapiens
acagctggagagccctgtgcacacattctcaagccaggtcaacacagcctttgaggtcaggagtgttgtccctattttacagatggaaccaaggctctgtagctgggccaaggtcacactgagccagtaggttttttaattccaaagccaggcatctttccactggttttctcaccttcagatgaggaatgaagagaggccctccctggaggatggttagcctgatgctgtgagacctggagtgtggagctctgagatggacagggccagatacacaggctagtgggggtgggggtggaatagggcagggtgttggagccagaccacccctcccccagcggctccagtccagagctccgacccctcactctctgggaacataaacacaaccacatctggactcagggcctccctcagcctcacgcatctgccaaggccagagggccctggtctcagctgagggcaggagtcaggggagacctagaaggaggcgggctggaggaaagtgaagagcaaaaaggaagcctgtcccgaaagtcaggtctaacaccaggtgcaaggggagccacacagggctcaggtggag

SEQ ID NO: 1126 - DNA, 589 bp, Homo sapiens
tctctcctgtcttccagatatacttaccattctgaatatagtgacaatcatcctatgcatttgttatttctttttttaaatatagctgtctatccccaagcaatatatagtattgttttacagtttttaactctgcataaatagtgtgataaaatatgtgttctgaaacacacttttgttttgctcattgtacttgtgaaattcatttgatatgtgtagctctggttcattctttatcagtgacataatatttcactgtttggtctacattatcaaatggtggcctactcagaaaagaatgtggttaaaaaaaacccctaagttggacaatattctgattattatgattaatttcagatttattaaactaaagtttattttgaatcaactagcaatgaaaaaataaatattcatatttaatatgaccataaatcagcttttctattgcctttgcatcaataattaaaaaataagtaaataatgcactgattcaatagtcaggtgctatttatcccaattctacctaatttagaggtaatatattaggtaggaaacctaagagtatcagtactgattagtgatttgaggc

SEQ ID NO: 1127 - DNA, 459 bp, Homo sapiens
agatctcaactctcagtatcctcagagtcaagttgagggaccttataagactccaacagaaggaaccacacagtttcatgctgcaagggcaaggctactctatttttaattgatggctagacttcattaagactgaaatgaataacagtgaggaaaggcggggcagctactagagacagaagagtcattgtgatttagttgtttggtgaattgctcatactttcaagggtcatcggtagcataactgcaccttggtgcttggagaaagcagagtgcagcagctgggccagcccaggactctctgtgcctggagctcctggtaatggacctgccagcgtgtgaactgacgtgcccagcgctcccacggtgggaagctgtttactctctcccgggaggacacagggttagacatagttgaatctataatcattatcgaccagatcaacacgttctaactga

SEQ ID NO: 1128 - DNA, 619 bp, Homo sapiens
actgtatgcactattcagatcgttcaactattcatggttaagaacattttagatttttaaaatatcagtataacatttgacaagaatttataactgattacacttttctttgggaagcaaagtacactgtgagtgaattataaaaattagcattattttaaacaatatatgcaaaatatatcttatttataattctgaatgtatatttgagggagaatatccatcatggaatgaataataataactcctactaaattaaaaatattgaataagtgcagttgaaccacaaaaataaaagaatttaaataattaaacatatcaaaatccataaaaatctctgttgaaaatatatagaatgtaatatcattggggattaatgctctggtaatatgtacatcatatggcaaaaattaaaagactgaaaataagatgctagaagtaaagtttattctgctagattaaatatttaaaggaagaaacaaacatgaaaaaactcaccattagtatcacgaaatttaatttgataaattatagtacaaggaacagattcttgttaattttattttaatctatggagaatgatatcctaatataggccacattcataatacactgactc

SEQ ID NO: 1129 - DNA, 630 bp, Homo sapiens
ctgggatctcagctggagagaaggacatcagggtgaccatatccaccacgggccgggagctgcagggcagaaggcaaccaactctctccctccaacccaactgcacgtcccccctcagatgtggggctcccgccagcaaagccagagaactctccttccctaaagcagacctcaacatgtcactgtctcctcttaaggaaaataataatgatactttttatttatttattttgagagagggtctcaccctgttgcccaggctggagtgcagtggcatgataacagctcactacagcctcggcctcccaggctctagtaatcctcccacctcagcctcccaaggatctgggaccacaggcatgtgccaccacacctggctaactttaaataaatttttgtagagaagggaccttcctatgttgtccagggtggtcttgaactcctgagctcaagcaatcctcccagcttgggctcccaaagtgctgggattataggcatgagccaccatgcctggccaataatggtgataactaattagggctcccagttcattctagcagcctctgacccattttccatgaagaagagaaagctcttaggaagagaaatcatactgagttactttcatgc

SEQ ID NO: 1130 - DNA, 630 bp, Homo sapiens
cttccccagtttaatataagaataagcagtctctgttctctaaaagccagaaggcttatgggggagaccaacgcactaatttagggcttcagcagaaatttctgtaaagtgaggtgtgcctacctttttccctaaatgagatgtcccctaccctacagattgatatttgatgatgcaaaacaattaaacaaaagactctctttgctgacctgtgaaatctgaagtttttacggtgaaaagtgctaatacattttcaaagttgacatagtatatttatcactttacacctaacggtctttctatgacgaattgacttaagcgctttgtactggagaatcagcacaaattaccttttttaaataaggggaaggctgaagtgacaagcttgtctcccctggagttaacaaatacagttctcttttagaatagggcgctttaaagttggagaagttctgagagcttgagggtcattcaaactgcaaggtaccctgttcaccgagtaattcaggttcagaaaagtcaagcagagatatatgcagtgatgtgtgcaaggcttcacagctgggaggttgtactacatccccacaatgataagcctttgctgccttcttgatcacttttgctacatct

SEQ ID NO: 1131 - DNA, 550 bp, Homo sapiens
acaggatgtcaggacaagtgtatgctcccaaattgttgaaggaaatgttaatttctagagccttttaggaaaccaatctattaaaaccaaaaacatcttgtaactcagtaacttcatcactggggatttgtcccataatattaaaattccagtacacaagtacattttcaatgatatttactgcaacatttttcatggtagcaaaaaatggaaacaaagagaatatctaacaatagggaaaaggttatgtaattattgtgattcacaaatagaggattatgcagccattgaaaagaataaattacagctatactagttgatatgcagggattcctgcaaaggtattgagaaaagcaagttgcttaagtgtttatattatgatcatattatgatcctatttatataaaacaatgatgaaaatctctgttatatatatacacctacatgtatgcacatctgcaaaaaatatgaaaaattacattttctataatactagttcccttggttgggggtgagtaatgtgggttgagaaaaggaacagaggggagcg

SEQ ID NO: 1132 - DNA, 414 bp, Homo sapiens
ggtgggtggaggtggggtataggttggcaattatggatactgagtgccttgtttgaagaaaatcccccaacccctccaagcctgaaaactttaagtcatgaagaaagtagtagagaattggccgggcgtggtgcacagtggctcatgcctgtaatcccagcattctgggaggccgaggtgggaggatcacttgaggtcaggagttcgagaacagcctggccaacatggcaaaaccctatctttactaaaaatacaaaaattagccgggcatggtggtggcgtctgtagtcccagctactcaggaggctgaggtgggaggattacttgaacctgggaggcggaggttgcagtgaaccaagattgtgccactgcactccagcctgggtgacagagttagaccccctctaaaaaaaa

SEQ ID NO: 1133 - DNA, 407 bp, Homo sapiens
tggaattacaggagtgcaccaccaagcctggctaatttttgtattattagtagagatggagtttcaccatgtcagccaggctggtctcaaactcctgacctcaggtgatctgcccgcctcagcctcccaaagtgctgggattacaggcatgagccactgcgcccggcctatatccgtttttaagataaatatttagtggtgatgttccttaacatcatttcttctggtgatgacttggttctaacaagtgatgttaatgtcaatgtcagggaaaagagttacagaggtgctgggagaaactaaaaattgaaaaaaacaactggcagggcatgatggctcacactgtaatcccagcactttgggaggccgaggtgggtggatcacctgaggtcaggagctctacagca

SEQ ID NO: 1134 - DNA, 597 bp, Homo sapiens
cttccttccttctatttgctctggcaaagaggacgcatttccaggaccagtctcagctagcccagtgtctttattgtctgtttctttgttgtttgcattaataaaaataccattagtattttttaaactcatggaaattcataattcaaacaattttttgcttagggagttgattctttttgttcttttaatactatactatttttaacctttttgctcccttttaaactatacatgcagttataattaactgatattagtattacttctgtgcgaaaatacctttaggcattcaataggattataaatcctagtttattttctttacaataagccaaacactatgttcatacttgttatcaagctgtctaatacactatatagatgaagacactgagggcttgcttacagttgtatggatatgatgtgaaagagctgagtttttaaacagaacagaaagccttattctttccattcttacccccactgtcttttaagtttctaaagatggcgaggaatgttgaagtttaatacttataattttcttaatgaacttcattattatatatagggccacataagatactatgtttgaat

SEQ ID NO: 1135 - DNA, 571 bp, Homo sapiens
tgctcactttagaagtgcttgccctttcatcccttgcaggatggagagaaggaacactagtgatgagaactgactcatttctgggcacatgctgcctgccaggctccacactgcgtgttgtacagaaatgatctcatttagttcttccaactgctctctgaggtagatacgacttttatctctccacttaaagatgaggaaaattctccaaggtcagacagctagtaagaggcagtgcctgggtttgaacccaggtccacctgacttcgaatctgggcatatgtgaaccttggttacacactagaaagggcgcccgtgtgtgctcatgcaagccatcctctccttgggtcctggggaatcccgaagtcttctccattcaaaacgactcagtgttccctgggagagccagaaatgtctttagagagaagctagaacattctttagagataagtcctatctctcctgtttatttctaaaacatgtcatttgaaaatgggagaagggtcaccttttcccctgcagctgacatgctgaataccatctctaaccctatttgtttctgaagaaactt

SEQ ID NO: 1136 - DNA, 545 bp, Homo sapiens
atgccatggcctgtttttatgttcactcttctttataaatgagatgaaatagctttacaatgtgcctaacatcgttttaaaatgccacataaattcactcctgtttttatggggttgaaaaattttaacacagaaataatttgcctagcttgaagaatttgcataaaaccatcgtaggggtgtgttaaaaattactcttcttccttttaatgtaagagcgcaagacaggatggaggatagatttcattcttatggtgccccaggtgaatctcacatttgcatattaaagattcaatttaaaataaactcccaagtcacaatgggcatttaccctagaatatatatttcagcatcggcctgggaccatgcaaggaaaattcctagagggacagcagagtccacagttgttgtagctatgcacctcttgtatttacctttacaaatgttagcaggagaatatggtctgggtagcccacccctgatgccagaaagaaaatggtaaattatagaaacaaaatggtatagcagtttgacttttacttctc

SEQ ID NO: 1137 - DNA, 341 bp, Homo sapiens
cacagaacaaagtagcaaaaccctaaaaggagtttgttggtatactcctccaacttctgctaacagcagagcttctaactagcctgaattagggagttaaccgggctgacaaactacaatattcctctgttattgatggtttttctttccaaagtttcagttaactatggccaactgcagtctgaaaatattaaatggaaaattccagaaatagacagtttgtaagttttaaataactgttatcaccatatgttgttataattgttctattttataattagttattatgtttccttcattatcgtgcctaatttataaatgaaacttcatcataggtatgt

SEQ ID NO: 1138 - DNA, 568 bp, Homo sapiens
gggagaacttgagaaataaagaaaacttcaaatgcttttaccaactagtagcatgcacttcttcatgaacactcagattaaaacttgattcacattctgagagtgactcaggagaggttgacaaagatctctctgttatttcgcagagttaaactctatgacactgcacaatccaatagactggccattagatatgagctaaaggagaaggacacatcacttagagagtttgttgttgtttttaaattgtgtcttgtgtgtataaattttctaagtttcaggaaacttattctgagtgtctttgagattgcaatctaaaaattatatactgcagtgaggccatggaaattgatatttcaccagccaggatcactaacaactgttgggccttcagctggctggaaggataaggtaataaagaggatagataaaagtggggctagccaggcgcagtggctcacgcctgtactcccagcactttgggagtccaaggtgggtggatcacttgaggtcaggagttcgagaccagcctgaccaacatggtgaaaccttgtctctgctaaaaata

SEQ ID NO: 1139 - DNA, 554 bp, Homo sapiens
ctgaaataagtgagaacatattctaatttcaaagacttctgaagaaataaacatttccattgctcagatgtcttcaaaattttcatggagaaatatagacactttacctgaatatatgaagcaatatcatcatgtgtatattttgaaaacaggcaggaagaaattcctgtgatcaagacagcccatatacacttttcttattctaataaaaatcagtcccatgactgacacttgatatcttcttcactctcacagaattattcaagttgtttcccagagtgttgcaaaatttgatgcttctggttgtgattatttccaggaagaggaattgttcctaaaagagaatgtgccagcagtgatataggtcatgtggaattgtgcaaccccacacactagccagaatggaatatttgtctgcatattcagcagttaggatttatggggtcctgtgtgtcatatgtctgctcaaggtttagtgatgcaatgggatggggcaaacagaaaaaatcctgcgagtgatgggtgcaggaaacagagcagccataggtaccaga

SEQ ID NO: 1140 - DNA, 616 bp, Homo sapiens
ggttgccatgagctgagatcacaccattgcacttcagactgggcaggaagagtgaaattccatctcaaaaaaacaaaaacaaccacaaccacaaccacaacaaccaccacaaaacccaaatgcatttccttggcacagtaaaactgaaacagaaaaagggtaaagtaaatacaagtaactgaaagagtttatgtatattattttacttctcatttgattgataaaatttgtgaagtaatgagcagagtgtatttctccagggacccagatatatacatttatttattcaatagaaattcattcttataatggccactgatacctatatcctaaatatttctgaaaacatctcctcaggcctgcatcatctttgcaacattgccttatattttatctttgttcattgatttatatgcctcagaattttatgctcctcacagtatttagagtgaattatccctaatgcaaatagatccgtgaaccggtcctgaatacctaatgtccaagcatcttaaaggtttatataaggatttcagaaactgacttctgggtagggcacggtggctcatgtctgtgatcccagcactttgggaggctgaggcaagtggatcatttg

SEQ ID NO: 1141 - DNA, 549 bp, Homo sapiens
gtgatagaaatatatattgagaagataaagagaagaaaatacgttgattcaaatggaggctagtgtaaaggagctataacctcatttaataataataattcataagtcaagaagcagcaataaaatcatgttatttagaaacatggagataaatactagaagaaattgctaaaagatttaaagtagttgccctggagaacagaaatggaggttggattgaacagaaccagaacttctatttttcagggttgtagtgtagttttcactttttaaactatgagtgtgtttctttgataaaatagaaaaaatatataggttctaaagagttaaatgaagctggatgtgatagtgtgtgcctgtaatcctatctacttgggaggctaagacaggaggatcgcttgagcccaggaatttgagaccagtctgggcaacacaaagagacctcgtctcaaaaaattaaaaataaggccaggcgcagtggctcacacctgtaatcccagcattttgggaggctgaggtgggtggatcacctgaggtcaggagtttgag

SEQ ID NO: 1142 - DNA, 657 bp, Homo sapiens
agacagcgtctggctctgttgcggaggctggagtacagtggctcaatctcagctcactgcaacctccgcctcccaggttcaaacgagtctcctgcctcaacctcccatgtagctgggattacaggcgtgtgccaccacgcccagctaatttttttgtatttttagaagagacaggggtttgccatgttggccaagctggtctcaaattcctggcctcaagtgatctgcctgcttcggcctcgcaaagtgcttgcaattacaggtgtgagccactgcgccaggcccaatgacaagtttttatatctgaaaatccctagggatcaagggaaaaatttatacaaataatgtgagcattctgtaaagcagcacgttataaaatgagtaactaccatgaaaaaccaccatgtaatctaggaatgaaaaaactaacaatcttcatatattcaagaaaaacaagataaaatggaagagaaggcaccatttatgatagcaaaaaaaaatcaaatacataaagttaacaagaaatctacctgcagaaacaccacaatattcctaaaagacacaaaatagacttgaactaatggagagataaaccatgttctttgatgggaagactcagtattatacagataatgatgctcattaaattaattttta

SEQ ID NO: 1143 - DNA, 624 bp, Homo sapiens
ttccttattctgaccaggaggtcagatctcaagggtccttctgagtccacttttgattagccaaattgtcttttctttcagtttgactataggttagtcaaccttccctccacattcatcagggactgttagcaatatgtcatatttttttcttggtgtaccattaagcaatctaaagctatgctgttacctgtaaccacttggattaattattttagattagttggttatacttctagggctttatggctttatcttttcagtcagcattattaaccaagttttgatagctttttcaacttttgtaacccccatccagggagatcagtgtcctctcagacacttccaggtaagcatgatctcctggaagacatgagaagtctcttaaattgtctaattattacattggagctacataataactccaatatacctggagttattatgtgtatatgcaagttaggttctaatgaggcaaatataagtaaatatgttattgattcaggaggtaaaaattaggagagccacgtgtagttttaaaaacaaaagaggaattacttgtaacaaaagtaagtaagaaaggaattctcagttatctcttgggtagagataccttgcatagag

SEQ ID NO: 1144 - DNA, 567 bp, Homo sapiens
tatgaaacatgtcacaaatattaaggagctttctttgcccaggaaatgacatgcatctacaaactacaatacagatttctaactatgcatacacttgttaagaaattggttaattcaaataaaatgtagaatcatcattgatgtaatgaatcattaacaagctctggacaaaagaattccttgactacccgaggggcacagaccgctgataaaatctagaaagtgatttggtacgatcaggtgtatttttactctacagagattcattgatcggtccaaattttaaaacaggctacataataaatgcagttttaatgatctacatttcctcatattcacaggcacttttaatatatttaaatccaaactggaataaatccaaaaaggaatcataaatgcagctgaaatcagccccatgttctgccaagcagtaaagaccactttaaaacaattccaactatccatccatatttctagagccaaaaaaaagctccacatttgtataacttatataataatcacagcaaagattactcatctatatgtgtaataagaaatcactacatg

SEQ ID NO: 1145 - DNA, 636 bp, Homo sapiens
attctcatgcctcagcctcccaagcagctgagattacagacattcaccaccacaccgactaatttttgtatttttggtggagacagggtttcgccatgttggccagcctggtctcagactcctgacctcaagtgatctgcccgccttgatgtcccaaagtgctgtgattacaggcgtaagccaccacacccagcctaataaatgcttttttattgtgaaggtagtaagagacttatacccagatctcaatctggagtcttcagtgttcatttcagaaactgaaaagcaatgactatccatcaccactccccacttccatgactactgtacaatctcaacttcattgctcttggctctcctttccctcaattatatttattaataaaaataaccaggccgggtgcaatggctcacaacccgtaatgccagcactttgggaaactgaagcgagaggatcacttgagctcaggagtttgaaatcagccagggcaacatggcgaaacctcatctctacaaaaaaatacgaaaattagctgggcatggggcacacctgtagtcccagctacttggaaggctgaggtgggagggccgcttgagcctgggaggttgaggctgcagggagttgtgatctcacca

SEQ ID NO: 1146 - DNA, 530 bp, Homo sapiens
tggtgtgcagagtgcagcggcacgatcttggctcactgcaagctgcaagctccgtctcctgggttcacaccattctcctgcctcagcctcccgagtagctgggactacaggcacccaccaccacgcccggataatttttgtatttttagtagagacccaaagtgctgggattacaggcgtgagccaccgtgcccggctgccacaaaaaactcttaacagagaggctgcactaagggcttggccagctgaccccttcactgttctggtaaacagtcctgtgtcctggaagagtctcttccccatgaggcacgggtgcttccaaataccttgtgtctgacctgcttggccagctcatggtgaaaggtgcgggatgcagggaggaagtggggttttgattttgatatgtatttgggagtggggatttaccttgtgctcaacaccatggataacttaacctcctgaaaaatttaggcttaaaaaaaagtggaccaggcctggtggctcacacctgtaatctcagcactttggga

SEQ ID NO: 1147 - DNA, 472 bp, Homo sapiens
gtggaactctagttgtgccagtacagaaatgggcagacagtcattggaacagttttgagaagaaagatgcccatataggaaagagcccatagaatggttataaaatatgcctggatttgtggaaccagttctaaagctggcattactttcagattcttagtatcttagaggtgggtgtgatcttgtagatcctgtttcagtctcctcagaagcgggaaaaattggtatcatttggaggctattgtttaggttggggcaaaaaaatataatggggggagacattatatataaaggtgatatttacttcttagacttgagagaagctggctttcttaataatctctaactgattttgaacctctattagaataagccctggaaataatattggaaatgatataggcattctaagtagatatattctaagatgacagcctggtgtggtggctcatgcctgtaatccctgtacttt

SEQ ID NO: 1148 - DNA, 648 bp, Homo sapiens
tgccacaatctcagtatgactagaatttcttcacttgctatatttaattttgtaaactatgtggaattaattttgatgaataatgtgaactggaaatctaattttatttcttcattttttaaagcaattctactttttcttattaggaaacttgcatgtacatattgaagaaagcatacaatatagacaagcaaaaggaaacaaaataaaattttattataatcttcccacacagagagaatcattttaacagtttaatctatatgcttctaggagattcagtatcattatttatgaaacaggggaaataccacattttattgaatctaatatgcaatcaattgtaagaattaccttttgttaccatcaagagaaaaaaacacagctaattaaactaggcacactagcaaccaattttaggtatcttgatacatgcaaatctgttaatcttcaaatcaaatagaagttataataatgaccttacaggactgttatagagatcaaatgatataatgtatataaagtacaataaatgataactattatcattccatcatttgaatatactgaaatttatttatccaacctcctattgttgaacatctaggttatttccaactattagctactataaacattaataattta

SEQ ID NO: 1149 - DNA, 478 bp, Homo sapiens
tatcctgtggaggattttctcacctttatgtgtggtgaattaattctccctatggatgtacacttgcagtcctgaaccacccatgccccttctagaaaacattggatgctaacccatctggcagggaggaatggattttgccctttgtgtgtgtgtgtgtgtgtgtgtgtgtgtgtgtgtgttcatcctacagtagggttataaaggaaaacaatgactccctaattaaggcatattcttgacaaaacttggacccaacccttaaacccatgggtacttcaagattacactcccatagtggtaactccgctcaaggggcctaaggcactccatccgccagggtgtgcagctgccacaccactctctctgcatttgacaaggaaatggagtggggtcttcctcccagtgtcctctccccccagcacatgggtggctcaaggcatttattttgcatctctgacagtacttacttatgtac

SEQ ID NO: 1150 - DNA, 535 bp, Homo sapiens
tgtggccaatagggtgcctggaatgcactccagctccagtatagagaaggaagccagggaactgacctgacccagacagatgtatctgaagcaagggtgtttttatttttttctaatcctttttattgtggtaaaatacacgtaaaatttgcagtttagtggcgccaagtacatttgcatttttctgtagccatcaccaccatccatccccagaacgcttttcatatgcaaaaatgaaactgtacacatcaaacaactctccacttctcccttttcccctgagttcctggtacacaccaccctacttatgtctctctgatcttgacgactataggtacctcatataagaggaatcacatactatctatctttttgtgatgatgagcttattttactgagcataaagtccttaaggttcatccatgttgtatcatctgtcagaatttccttcctttttaaggctgagtaatattccattgtgtgtatagatagcagtttccttatccattcatccattgatagacatctggctggc

SEQ ID NO: 1151 - DNA, 641 bp, Homo sapiens
tggccaaggcaggtcgggggagtaggaggtagtggctaaggggtgcggatttctctatagagtaatgaaagtttctaaaagtgactgtggtgatcgatgtacagctctgggaatactctaaaacctactgaattgcagatttcaataaataaagtgaatggtatgtgaattatattttaataaagctattattttaaataataataatagggggctgggcacaggtagtcatgcctgcctgtaatcccagctctttgggaggctgaggcaggaggatcacttgaggtcagaagtttgagcccagtctgagcaacctagcaagatcccgtctctatgataaaaaaaataaaaaaattagctgggcatggtggcacatgtctgtagtcccagctacccgggaggctgacatgggaggattgcttgagcccaggagtttgaagctacagtgacccatgatcatgtcactgtactgcagcctgggtaacagagcaagactctgtctctaaaaaggaaagaaaagaaatgcaagtttttaccactttgtgagtgtagccaagttggtggagaaatagacaagaataaaagggcactgaataatgaaggtgagtggctggttaggctcagttgctagcttatcagct

SEQ ID NO: 1152 - DNA, 512 bp, Homo sapiens
  misc_feature 455: n = A,T,C or G
aagtgacatgatctcggctcactgcaacctctgcctcccaggttcaagcaattctcctgcctcagcctcccgagtagctgggattacagctgcttgccactgcgctcagctaacttatgtatttttagtagggatggggttttcccatgttggccaggctggtctcgaactcttgacctcaggtgatctgcctgccttggcctcccaaagtgctggtattacagtcgtgagccaccgcacccagccaacactgggaatttctgttcaagatatgctgtgaatatcatgctgtgaagcataatattgattctatacattgtcagttagatgactgttggatgctagagaggcaaatggtcttataataatatttaataaaatataattattgaaagtgtttaaaatcagctttattagtgacttgcatttaaatttggtattttatttaacaattntaaaagatatatttaatgatatctatttattatattttcttgaacagtttgtgtctc

SEQ ID NO: 1153 - DNA, 547 bp, Homo sapiens
agcaagaaaaataatcatctccacagtgaatggattaggtgacaagtgttccctttgccttgcctagccaatctagccaatatgccaacatgggcactaacaggataggtcagcttagccaaggccaggagcagaatccatctaggctggaggcttagacagcgagagattcagagggtgacttctggagtaaggctgctctggtcactgttttttccctgtcactctctagttttgtgaccttgggcaggtaactgagcatgtcctggtctgtctttgcagttgtagaaagcggggtagtgtctcctttgtagggctgctgtgagcctccaatgaactggtgctcttgcacagagcctggtacatggggagtgttggctgttagcgcaccaagagttcatggccagaaattcagtttgttgaaagcaagattaacaagaacactaatctaagcagcacagagggcctggggagtgtcacagaaatatattaatagtagcagagtttggccaggcatgatggctcacacctgcaatcccagcacttt

SEQ ID NO: 1154 - DNA, 610 bp, Homo sapiens
aaatctgtcacttaatggctaatattcgtaaactatcaacagagaaatgaagttcgtaattcagacagaaaacccatttgctcagtgtgttgctgataaaacatgcaacataagcaaattattaaaaacctaactgtagcaggtcgatagagagctctgcttctgtccccataatcccattattcaattaagcaatactacaggtagaacaggggacacaataattatcaccaacaacattgccattcatgcttctaccgtaggccaaactttcttcagatttttgtggaaggtatttgtatgtcataaatacataaaaagtcaagacacagataaattacctctattaccttttccaaggatgatccaaagaaaatgtcaaatctaagctgaaactcttagctgagtccggtaaagatatacttttatgtctttccttattataaatatctggctcatcattttcctcatggcactgacaaattaaatttatatcattgtcatcagttcacatccactttgcatgcactggaggcttggaattgtgattagccgaatcattatcaaaagagttacttaactcaatatcaaatggaactgactgaatagc

SEQ ID NO: 1155 - DNA, 627 bp, Homo sapiens
  misc_feature 520: n = A,T,C or G
ggatcaataatgactttgtccagagtttctgtatatttgactcttgttcctaaacttgcttacttaatcctcataatttcatcccacaagttcattgaacaactctgtttaaagcatttgcccactgctgggaacactgcctggaagatctggaaacatgggaagtcagatctcagaacagggtatagttacacggagtgggttgaaagggagcaacaaccagagtatgggtcaccagaaacaagatgagggtgccagatacatgctgtacctactccatacattctcattctagctatctgtagccctttcctaaatgagaatacccaaaagaacttgtttgggctattatatgcaaggtggctgaggggacttggcaaatatgaaattataaatgttaataaacagtgtggtaactgatgaattttatagctcactcgactggcatagaatacacacctttcagataaagagaatcatctgaacatttgcaagcctaggggaattagaaatggcacanaaagagacagcagggtttggggctgtgccaccccctgccgtatctcatattctgtgtattgatttggaagagacttctgaatctctccactcacttctctggatgga

SEQ ID NO: 1156 - DNA, 486 bp, Homo sapiens
tatatatgattaaccacgcgtggtggcatatgcctgtaatcccagctaccggggaggctgaggcaggagaatcgcttgaacctgggaggtggaggatgtggtgagccgagatcacaccattgcacttcagcctgggcaacaaaggcaaaactccgtctcagaaaaaaagaaaaagaaaaaaaaagaatgtacataaaacgtttatcacaataactagtattataggaagacttcagtatacaaccacccacaaattaaaaggaaactagcaaaataaaacagagaatatcacgtagaacccctggaagaagcagaataatttttaatgtttcaaaaattggaacagaggccaggtgcagtggttaatgcttgtaatccaacactttgggaggataaggtgggaggattgcttgagctcaggagtttgagaccagcctgggcaacaaagtgagaccttgtctctacaaaaaataaaaaaatcagccg

SEQ ID NO: 1157 - DNA, 425 bp, Homo sapiens
gtttcgccatgttggccaggctggtctgaaactcctggcctcaaatgatccggctgcctcggcctcccaaagtgctaaaattataggcttgagccactgcgcctggcctcatacaattttttactcaaactatttagtgttgtaaaactatattcctaaaatactgtcagatttcaataaacactggggcacactgttatcaccatttacacgaatctaacgcttaaccattgcaatgaatggttcattcaatcctggctcccaaatggacagaaataactccccccgaacctttccttgagaatgaaacttctataaggtgtgttcattgctagctacggtgaagttcattttagaatcacaagcccttggaacttcatgttaagagttctgcagtagatcacgaggtcatgagatcgagacca

SEQ ID NO: 1158 - DNA, 613 bp, Homo sapiens
tgcctacattgtggcaggtaagcaattattattatttcctattttcttgcttgcttgaaataaatgtccaagttcaagggaatggtgaaggtaaatggtgcatctgtgtgatgaaatatgtaactcttaaaagatgctgacgtactttttcatattttcacatctctgaagttggaatgcctcttaacagtcactgttagccaggcagcaccatcacttagttctcactatctgtgtatgtgaactatgtatcatggcagttcatgtcaaagtaggtgcactcttggtattactataagtgttgagtttaattgcttttaaaataaaaacaaagctaaacaagatgatgaagaaattactgggtcatggtcttaaacagaagaccaaattgtaaaaacacaaaatgtattagaccaggaataaaataagccatggaagatctggcagcacagagtaggaaattaacaagcttgatgttggacacaaacactatttctccagaaatgaacttctccccttaggattagcattggccttttccagaaccctgaatcctataccagattgaaaacctgtgtagacatgtgaaaagatgttcaacagcatttgcttt

SEQ ID NO: 1159 - DNA, 402 bp, Homo sapiens
aattttacagccagaatcagtttgattatttaacaccaaatagtgacctccgtataaattatatatttaaatcaattggtattaaaccaaaagatccaatttttaaaataaatttgatgtcctaaaattaagagactgacatcaattttatcatgaaaaattccattataatccctactacttgagaaattagctgctcaatattgacatggacactgagaagaaaaatacattttggcataaaattaggaagaataaaattattattatgggagaaaatataccatttacaataacaaaaagagagttaactgctcggatcccattgaagttcatgaagttgatatactgtagcaatcaaaattctcaagattaatatttcatgacagaatacctggattt

SEQ ID NO: 1160 - DNA, 438 bp, Homo sapiens
gatcacttgagcccaagaggtcaagactgcagtgagccatgttcacaacactgcactccagcctaaataacggagcaagacccagtctcaaaataaaaattatatttagtcatcttaacatagtcaaataagtttgagggatttttttaaaccttgggtgtgaatttctaacaaaatcatgttttgtgaataacaactgtagttttgcgctccatacacaaaacagttttttattaatcattaaataattaaaaagaattagaaaaagtccagacatagataatctcagaatctcttaataataaagtatatcccttatttttccaacttatctttatcttttaacaaggattgctgtatcagcacgtgcacacgtgcacacacacacacacacacacacacagaggcatgcttacattttcctttttttccttattc

SEQ ID NO: 1161 - DNA, 642 bp, Homo sapiens
ctagagagcaatgaatacaaacacacacaagaaaatctgtcacttaatggctaatattcgtaaactatcaacagagaaatgaagttcgtaattcagacagaaaacccatttgctcagtgtgttgctgataaaacatgcaacataagcaaattattaaaaacctaactgtagcaggtcgatagagagctctgcttctgtccccataatcccattattcaattaagcaatactacaggtagaacaggggacacaataattatcaccaacaacattgccattcatgcttctaccgtaggccaaactttcttcagatttttgtggaaggtatttgtatgtcataaatacataaaaagtcaagacacagataaattacctctattaccttttccaaggatgatccaaagaaaatgtcaaatctaagctgaaactcttagctgagtccggtaaagatatacttttatgtctttccttattataaatatctggctcatcattttcctcatggcactgacaaattaaatttatatcattgtcatcagttcacatccactttgcatgcactggaggcttggaattgtgattagccgaatcattatcaaaagagttacttaactcaatatcaaatggaactgactgaatagc

SEQ ID NO: 1162 - DNA, 492 bp, Homo sapiens
acagcatcaccagacaaaatacagaatgtccagttaaattagaatttcagaaaggcaacaactatttggtatggcccaggtaatatttgacgtcccacatttttatgcactagatcagccaaccctaggttcaaagttatcttgagctgtgctcccaaaccaccaccatggcctcagctgagggctggcgagatgagcccccagcgttctggagctgagaaaacagcgacacgggggcttcttcctgtccctccacacgtgctgtgtttgccgttccctcggcctggaaggcatctgcctaccccatgtatggggctcaccccttctttcctctgggtctctgctcacatgtcccctgctgagagaagtgtccctgaccacccacctaaaataggccctccctcactccatccctttccctgctttattttccccagatgtggatgccacctgccatggcacacacttactcctccattctttatcatctct

SEQ ID NO: 1163 - DNA, 589 bp, Homo sapiens
atcacaggtcaagcaatgcatggcagtgggctagattcagacaggggagcctcaatttaggacccccagatttatcatacaaggtggaggaagggttcagatagggacttggggattgccaactctgaccctctcttcagatgaagagattagccctgtggaggagtccaggatttgtattttagtcttggtactgggtgttctgggttgagttgctagaccattctgggacaagttgctagaccattctgggacttactttcttcctccataaagtcaaagggtaggtagatcacacatttttaaagtgtgctccttgaggtgtgtcaggggttccataagcatttgctttcagttttattaaaagcagcctgtactctcaaatttgagtatatttgaaattgtaatgagagcagttgctcaggatggagtgtggtggctcatgcctgccccacactttggaaacctgaggtggaggaaaccttcaggccaggagtttgagaccagccagggaagtatagggagaccccatttctacaaaaaacaaaaatattagctgggtatagtgggacacatgtgtagtttgaac

SEQ ID NO: 1164 - DNA, 576 bp, Homo sapiens
tgaaagaatgcaatttttaatttcagttgaatgatattttgtaccttattgatgtttggctcctccatcatagaatttttgatggtttcactgttgtcctctaatgacttcatcaagaaagaataaccacatgacaaagagtaaagatgagatgtaacatgcaaaatactggggattgtttcaatgctatattttaaaccaaatttactagaaaagaacattatatggaattactattctcaaaatttcatacaccttataagaagcatgtgtgagggtgcatggttaggaaatgagcaaaacttaatccctcagaactcattaactaccactataaattttattctaaccctaagaagtttttactcaatttcgaaatgttgacattaaagcacgattgaaaccaaaatactttatattaaaataatcagagctactggtgtcagagtactatgaacaaagtcgaattattctcttactcgctgctttgtcttatctccacatctgaaccttcaggaaaatctcttgattagaaaatttcaatttctacatgtatctaattctcttccactgatg

SEQ ID NO: 1165 - DNA, 553 bp, Homo sapiens
aagatttgcactgaacaatgatgcttcatttcaaaaactgtgattgaaccagttgattcatctggaaatctgatgagcatctcaaactccacatgaaaggggttaatagaatcaccctctatttggtcattgagcaagaaatcttagattccttttgaaacccgtcttttacatctcaaattgtttagtgggtcctattgattctacccctagacccctttaaaatctatccccttcctttcattttccaaatagagtcctttattgtctcagcacccagcccagtatctgacatgtacattgtaggcactcagtaaatgttcagcaaatgggtgaatggatgataaaattgatagtttaggtagttttttttaagttgtttttctttttccttcgtggaaaaccgcaatagttccctataagaagtctctattattaatcgttccactccccaatttgacctccaaacttacaagggttatttttctaagacatatccaaccatatcattccctgctcaaaacatttgatggctattattgcccacaatatg

SEQ ID NO: 1166 - DNA, 542 bp, Homo sapiens
aatttgtataaaatagtaagtggctggcaagtagaatcacaataagggattttacttttgttccaaatatatattccaggtcttgagtaaactaagtgataatactgattaataggagcatctattatacatgtgttatgtatgtgtattatccatagatatataatacatgtatatctggatttattatatgtgtatatatacagatacatacgtatgtatgcaaattaactttaatatctacaaaacacttaaaaatggatattagatcacaagtacagcctcaacaatgccaccaaaatatatatactgtgcaggtattattttattctccaactttccttgatttttgtttttccatcttattggtatccctactgtaataaaaaaaaaaggggggggagtttattttgtcaagtaattgcttaaaattcctttccatctcctcagatatttaaagaaaactcacagttttctttgtcccatcttttctccttggctacttccctacttttccctacaaatactatgtattattcaca

SEQ ID NO: 1167 - DNA, 536 bp, Homo sapiens
gttattggaaaagaaaatctatttgatttacataatgataaaacagtaaagaatgctgtgttcctctagttccctcatattgaggtatctaaaacccaaataaaaaatacatgaaaagcattttctcatcttttttaccttttaatcatttccctttagaacacctgtcatttctgtcaaaagatttttcataaacttagaattttattgcattattattttgagctttaagatggcaaattagaaatggcatatcttctttaaattattatcaaagcaaaagttcctacatatcagtaaggtaatgaataagaattatgttttttcctcatgatctccctattgtgcctattattatacagaacaaaaacaacaatgaaggctgggcgtggtggctcacgcttataatcccagcactttgggaggccaaggtgggcagatcgcttgaggtcaggagttcaagaccagcctggccaacaggtggtgagacccagtctctactaaaaatacaaaaaattagccgggcatggtggcgt

SEQ ID NO: 1168 - DNA, 530 bp, Homo sapiens
acactgtaatgttagaactaagttcaatgttagggccaggtgcagtggctcatgcctgtgatgccagcactttgggaggccaaggcgggtggatcacttgaggccagggattcgagactagcctggccaatgtggtgaagccctgtctctacttaaaaatacaaaaatgagccaggtgtggtggtgggctcctgtagtcccaggacttaggaggctgaggcaggagaattgcttgaacctgggaggcacaggttgcagtgagctgagattgtgccactgcactgcagcctgggcagcagagtgagactccacctcaaggaaaaacaaaaacctaagtttaatgttagaactaagttggagagaaactccattttcagtagaagcaggtttaggttattcagaccaatcttcctacagaaagcaacttttaaaacttgccaaaatatttaaaatcatcttaaaagcatcaaagatctaagaagatatgaagaaattgcctggccagtgagcccagcattggaagccacttt

SEQ ID NO: 1169 - DNA, 497 bp, Homo sapiens
acataatgttctagtaaatattcttgtgggcaattcattggacctgtcttagattacatgcccagagtaaattctagaaatgaaattcctggtcttctccgaagacggaattgagtggggaaaaaaaagaaaatgaaaaaaagaaataaacacaagatattcttggtcaaattgtgtctgccctttctcctccagtgagctacgatgaagccacagtaatccacattcccaggggaacacaggtggtctgcctctccatgtgctcagagtgccaattcttggtaaggagatatagggactggagtgaaacattggaataatgactcatattcatgttttataaacaaatttaaaatattggatcaggttatttatctggaaaccctgaagtttggctgtttaaagggctattttaaatataggcaacagaaaacaaaatacaaagtcttatttctgacactttaaaatgttggcaaagtgtcttccttgttagtatg

SEQ ID NO: 1170 - DNA, 565 bp, Homo sapiens
atgtggtgcccaagtattaaagtatctactatccctactttttcgtccttcatgagcagcccgagtgtactaaacacattactgttacttttgtcatacaaagtttcaaacaccagtgagaatagtggaatgaaccacccttgtgctcctctagctttaacaatgtatacctgtctacttcctctcccaaataattttgaaggaaatcctagacattttatctgtagatgcactatatagctctttaaagacatctaaactctctttaaatctagagtctctttgtccccttgcagtgtgtttattggagaagttaagtcattttcctggagagtttcccagtcttgattttgctgattgcaatctcatggcgtcattaagtgtattctcctgtatgctgcatttcctgtaaattaatagacctagagaaagcgggtgtgtgtgtgtgtgtgtgtgtgtgtgtgtgtgtgtgagaagggtctcactgtatcacccaggttagagttgcagtgttacaatcagctcacgcaacttctgtctcctgggctccagcgatcgtcccacc

SEQ ID NO: 1171 - DNA, 136 bp, Homo sapiens
tatattcttggaaaattttttctacattatgaaaatcttagtaagaaagacttggaaatttaaaaatcatgagttaccaaagaatatatcgagttgaagtcaagttataccaaagcataaaatccatgatgacatg

SEQ ID NO: 1172 - DNA, 459 bp, Homo sapiens
aataatcaaacccaaagagggggttgctttaccagtcagaaatttccatgtttgttcatttgtttctgcccactgcatacttcagcaaatggggacttacccagcttatttggtctgctgcaccactctagcccgcagctcctgggctggccctgctccgctgcctcttcctgtgacatgagtcagctgcttggtgccattggtgggtgggagggctactgtggtatagctcctttccacctgccatttggtgagtcccaactccttgtcccacatccaagaataagattatgcagacaactggagggtgagcaaggtggagaagagttttattgagcaccagaacagttctcagtagagaagggaccagaagcaggtagtcccccacccaaaagcaggtcatccccacccaaaggtgggtggtttcaaagtgtggctcagtctggggtttttataggc

SEQ ID NO: 1173 - DNA, 471 bp, Homo sapiens
agaatcaaaatgaaaaataaatttcatgtaaatgaaagttttgtttcaaagatttctatcacagagacacattgatattacatccatcttaagactggccaagaacaagagagaaatcttattaatgattctgaatgtcgtattaggagatactatgtattgccaaggtgaaatgttcaaatgactaagtagtggacttgcatgtgtgtcaagttattttataatcactttaggtaatttgcatttaagaaaaacttttaaaaacaagctttttccatatgaatgtttcatcatatctttacatcctttaaaagttgatttctaagattttcttgattgtagagatacgtttactggttctcatatccttgaagtgttaagtctgccaggtaagaaccttagcatcaacataagcaatgaagtataaaggaacaaataaatataaagtagaacatcagctgatctttgaac

SEQ ID NO: 1174 - DNA, 448 bp, Homo sapiens
tagagtagagtgcatcactgtcttaatattagagctgctgtcttctgtttcagcagcagtttggcagctttgaagctctgtatctcagggattctccatcccgaatttcaatatttatttccaccacagcatggcttctcactagtatttagtgaagggccaaagagctttcttaccatgtattttaaaacctccagccctattcatagcctcctgagccatttcagtctttgcacccaacccacaaccagattcatatccactggagcctcagcaaagtgtacctgtctttggttttcactccatgaggatgcagtcagggaggagtccaaggagactcctggagaaaggatacatgggcaggaaagatcaggttgttggagttagaaaaaaacatgcttcctaccatcacaacacttacacctttgtatctgctttcctgtcttgc

SEQ ID NO: 1175 - DNA, 440 bp, Homo sapiens
ggaggatcgctttgggcctaggagttcccggccagtctgggcaacatggcaagaccccatctctacaaaaactttttaagactcagccagggttgggtgtatgccagctacgcaggaggctgaggtgggaggatcagaggactgcttgagcccaggaggctgagactgcagtgagccatgttcataccactggacttcagcctgggtgacaaagtgagaccctgtcacaaacaaacaaacaaacaaacaaacaaaaaagaaaagtagtattcacgttttggacattcctatctaaactaggtggaaagagaaaatggagagtactgggttctaaggaggcaggtattctagggtaagtaatttggtattttaatttaagcagaaagacatggtcccctacttttccccttgggatatgccctggagaatgacaaaatgat

SEQ ID NO: 1176 - DNA, 467 bp, Homo sapiens
tgtcaccgtcaagactgactgctttccagttatcatggaatagattgaataagaccaagactggccagattgtttttgtaaatttactgaaaggcacaatgcagatgctgaggctagcaggacttagggcagggttccaaagaagagaaaccctggagaggtgggccagcattctgcagttgctcttgccttgggtcatttgccatttctaggtcaggaacatgatcctgggactctgagtagctaccttggcatacagttactgttatcagcagagaagccaaaacattttggggaagtcttgcagagctaaagagacaaaaattagagacatagagggttcagtttgtcacagaataagaggctgtggaaggagataagataaaaacagtgaatattcagtacgttttcaagaaacttggctgtcaaggagagagcagagacttgtagtagcttgaagggcattc

SEQ ID NO: 1177 - DNA, 603 bp, Homo sapiens
tttgatgtttaaattattttagaaaacttacattttatctttgtgggttttttttgtttgtttttgtttttttgcttaatacaaataaaatcattacaatagccttaattttgtgtaaaaattcaaagtgcaacatatcgactgcattccagcattccctttcaaatgtaccacattgcgtctagacccccaataccagtgccttctcttatcccaacccatggtacaccaggctactggatgatcctattccatggctgtgaatggttaaattaagtttaagctctgccattttatttgaaatcactttattgtatgtgaaattgtgcttttggatctgatttcaaaagtattgtttctaagctttaaattaaatatcattcagagctataaataataaggaaaagaatagaatttatttctaaaagctgcccttcttgccctcacaaaatatttatttcccttatgaaagtcccaagggttggacaggcctaattcaaggctaaaagatagcagggagtagcaagtttcccagttactgtgtgacctcagcctgacagattcacagtgaagaaaaatagataattagtaagggtataatct

SEQ ID NO: 1178 - DNA, 355 bp, Homo sapiens
aggatggccgggtgtggtggctcatgcttgtaatcccacctcagtcttctgagtagctaggactatgggtgcacaccactatgcttggctaatttttgtgtatttttgtggagatggggtctctctatgtagtccaggctggtctcaaacacctgggctcaagccatcctcctacctcggcctcctaaagtgctgggattataggtgtgccccaccacacctggccctcccttatatttttaagcaaagtttctagagataatggaggatttaaaattttagcttttctttaatcctgttcctttcttggcaagtggtacaaagaatagtataaaaagtaaggatctggcctggt

SEQ ID NO: 1179 - DNA, 355 bp, Homo sapiens
  misc_feature 204: n = A,T,C or G
cgacagaaggattaagccaggtttattctctcatcacaactgtatcttgactctgaaagtgtttagatctctactagaaaaatattattcatgtcttagaaaaaaatttattcatatagtttggatatttgtccccaccaaaatctcatcttaaaatgtagtgctcagtgttggaggtgaggcctggtgggaggtgactgaatncatggcggtggatttctcataaatggcttggcaccattcccttggtcatgtcctcaagacagtgagtgagttctcatgagaaccggtcatttaaaagtgtgtggcacctccaatcagcccctccttctgcttttgccatgtgacatgtgtg

SEQ ID NO: 1180 - DNA, 187 bp, Homo sapiens
agaaattgaactgaaccgtaaaggatagctgagaacagaaaatgcttgagaagaatattcccataaagaagtgataggaattaaaacagcaaatacagtttgataccaggtaatagagtggcttgaatccagtttagggaatttggtttgggtgtgtatatgtgtgtgtgtgtgtgtatgtgtgtgt

SEQ ID NO: 1181 - DNA, 478 bp, Homo sapiens
gccctacattacgaatgcaaaagttttcttagaaatccaataactgtaatattggccagaactgtaatcaaatggtcaccctctaggtacaagggaggctggaagaatgaacatttttggctgggcacaccactaaacaaatccagggttttgatggaaaggaaggggtggggatggattgcaggtgacagctggtggtgcctaccacaagctccaataccaagatgggcactgaattcacagggatcttttaaatttagtttctggatttgagtgaaagcaaattgggttgcctcatccttcgaaggaaaagtggatccatagtattctactgtcagaaagggaaatagagtcaccttgaagacaagaggtgagagagtgctgcaggtctggagggccaagtggatagaagctcagcatgacctccctctctctgtctcccctttgttcactttcattagtcccgttcacttgggct

SEQ ID NO: 1182 - DNA, 355 bp, Homo sapiens
acatcactgctatgtaatgtatccatgtaacaatattgcacttgtaccccttaaactataaaaataaactgaaaaaactagaaaaacatggattctggtcactagtggcaaaaagtttagcaccagtataatctgcagtaaaatggaaggtagaaaatgtacctagtgaaatgggtgatctaagaaggttttcaggatggatgtcaaaagcatttcctgattcttctggcttcttagagtaaaatatgagagaagggagataagctattgaaaagaccttatataaaacagtcttttttttaaaacaaaaaggagcaataattcgtgggtcaaaaaatgtctagcatctacagat

SEQ ID NO: 1183 - DNA, 599 bp, Homo sapiens
gcagctctatgtgcccggcctggaggggtccaaggtgtgtcattaagtgaggggaaaaccccaagatacagagtagcaggtgtgggtcaagcccatttccattaaaaaacaaacaaaaaaacccctaataaacatatcaattaacatagaccaggggtgagcaaaccacccttttcctggctaaatccacctgccacctggttaaccccaaaaagccacgcctcttcatttacatatcactcagggctgctcctgtcctatggtggcgggactgaatcatcgcaacagataacagagccagccagcaactgctaaaatatttactatctggcccctgggataaatacaaatatgaagaattgggaccaaatcgagatgtgtatgctttgcctctgcactgtttgaattttaataacccacatgcacagctctgtaaatggaaaaataagactgatttaaaatgacatctaggtcaggtgcggtggcttactcctgtaatcccaatactttgggaggctgaggtgggaggatcacttgagcacaggagttcacggccagcctgggcaacataataagactccatctctacaaaaaataaa

SEQ ID NO: 1184 - DNA, 608 bp, Homo sapiens
gaaggcctctcatttaattttatacagtgaactaaaattcacacttccagtgccaattcagatgttatcttctctgaaatgcctttctgaccctccagtggagaaaatctttccctccttggtgctatttctgtgcttgatgcatgcatccatgtttgcactaatggttagtcgtcattttgctgctgttgttttactcttcttaactgtgaacactttgaggttagaaactatctgagtacagaaccctgtactgtgtcttactcaaaataaacgttttatgacttggtgagtgatgaatggctggttgataggtaacaatattaaacagaatgcttgacattaaatgtgagaatactgtgttaagacatttcttatcagctcttccactatggcttcacttaattcccctttcccgtcaagtggcattaggaataattctgaataacacttctttaaaaagtttctttttccctccaagtggaattaagaataaggaaggattctgagtgacatttttaatgtttttttaaaaatacgtcacataaggcattattaaataactgaaaagatttcatgctcttgaaagtaaatctctgctgtgaaat

SEQ ID NO: 1185 - DNA, 594 bp, Homo sapiens
ctcaggagaaggttagaattcactataacaaaagtaatagggttattaatatgactagtattctaagactctcttaataggtgggagcaggtagctcagtttacgggtagacatttatgggtaagtaacaacattggtgaagtgcaaacacctctctcctagcacacacaacacacacatacgtacattctttttctttcacacagacacaaacacactcccatggacaaagaaatgctacgaagaatttccttctctcaaatatgctggatgactctgttaggttttcccacatagaatggagacttgagtgtttagtctgggccccacgcatgcagataagcaccaagttggacatatactttgaaagtccctttacctattcagactggcaaaagacaggctgatagatggaacattgggttcaattagcctctgttacacttttggctgaactacagaacatgacccctaaaaacaatagcagtgagatcaaagagggtgcccagttcaatttagcaaagcaaatggcatgggatttgtgaaaacttgttgatagaccaggcgcagtggctcacgcctgtaatcccagca

SEQ ID NO: 1186 - DNA, 527 bp, Homo sapiens
acaagggtccagaaatagtacttactggaattcttcatgataaatgtggtacgccaaatgcaggaggtaattcaaaaatgttctcaaaagtattgttgtaaatggagaatggatttcttcaactggtatgtcattattggctaaaataagaaaattggagaggatgcctgacatttgctagaaccttccattttatttgcgcctggtatacaattcgaagaactgaatatatgcgcttatttcaaaatgctctgaacgtgtgtataagcgtccaaccaaaaatttaaaactccgtgaaagccaggcacggtggctcacgcctgtaatcccacactttgggaggctgcagcagcaaattgcctgaggtcaggagtttgagaccagcctgggaaacatggcgaaaccctgtctctaccaaaaatacaaaaaattagcccaggtgtggtggcgggcacctgtaatctcagctgcttgggagactgaggcaggagaatcgctggaacccgtgaggtggtggctgcagtgag

SEQ ID NO: 1187 - DNA, 505 bp, Homo sapiens
gatggccaagctcccacgccctcgtggccgccacctgaccaccgatggggcagaggcctgaggccaagcagtcagtgctggggccctgcttccaaggtctacaaactgctccagtccggagggccaaagataattgggcacgtgagggcccaggaggtcagttccctacgtctgccatccttggcaggtgcatttcgtggtcagaaaaagtcaagaaaggtgacacctctcaggtgttattatgaaggactctcccaagacacatctttttttacatttatttttattgtacatattcatggtggacaacatggtgctgtggtaaacatgtacactactgaaatgatggctgcaattaatatctccaacaccttccatggctcctttttgtatgtgtgtgtataagtgtgtgtgcatgggtgtgtttggataagtgtgtgtatgagtgtgtatgcatgtgtatgagtgtgtgtgtttgtatgattatgtgtgtatgagtgtgtgt

SEQ ID NO: 1188 - DNA, 613 bp, Homo sapiens
tcatttggttgctcaaattatattaaaattataaaaagcatcaaaaaaacacctgactcagcagtctgcaaaagatgcagtggaagtatggtggcattgcctctctgttctgatatgcaatcagcccccatttaaattagggagaacagaatcatactattctccttgcagatacttcccaaattgatatctccaatccagactcctttcctgagtacgaagctcatatatccaactttctactcaatatctccacttggctacaccttaagatgtcaatctttatatgtctgaaatcaggtttttaacactcatttcacaaactgctcatttattgaagccatttccatcttaatccacgataactattcttttagatactaagatgaaaacctggaagccaggcttcactcattattttctctactattttgtcgaggaatgttttctccaccgttttcttagtcattcagtaaaacctgtccgtgcttcctttgaagattccttgcagaatctcaccacttcctatcacctcctttgttaccatgctagtctaagccaccaccatcttttacataaatggttgcaatacacttctaaaagtctcttctga

SEQ ID NO: 1189 - DNA, 578 bp, Homo sapiens
acataattcatcaaaaaataaaaaatattatacttagcacagtatgagccttaatacaataaaaaatcctcctacagacctagtctagttgttgtcaaattttactttaaaattacttcactatggcaatactgtcttctgcaaacacaagctagctttgaatctatgagatacaattatttacatagtcaaaataaaggtgctatcttgttttaattatacatagaaagagctttttaagactcatacaaacttatctaaaagtaatatttgcaaagaaagacctagtgaggaaaaaacaaaaattacttgaagttattcagcaataataaaggaaactcaagaataataaatacatttgttttgagctaaaataaacactgttaaaaaggacgactgtgccagccgggcgcagtggctcatgcctgtaatcccagcactttgggaggccgaggtgggtggatcatgaggtcaggagttcaagaccagcccgaccaacatggtgaaacctcgtctctattgaaaatacaaaaattagccaggcattggtggtgagtgcctgttatcccagctactca

SEQ ID NO: 1190 - DNA, 629 bp, Homo sapiens
aggatgccagaaatgagtttgacaccttgagtacaatcctttagtccagttttgaaaaaggctaggaactctgcaatagtaaaaatattaaaaagtcagtttaggttgagaaacccttgatttaaaagacttttatttgcaacaatggcctagtagaaaggaaagaaagatagaatataagaaaaaggaggaggaaagacaagtatatttgtaatcttgttcccatagttgtggcattaagttaccacggttgcaggaaaaagaaaattcatctctaaactgatctaaggtaggactggagtgtcatatctttaatacatatttctgttattactaataattataatgataataataggtatttacttattgactagtatatgacagatattctatgtggtgtttgtgtacataatttataatgcaagagaaatttttaaaaaggtatgtacatttcataggtaaggaagtcaaggtttaatgaataagtgacaaaatcagcatttgaaattttttctgcagaaaagtaaataccacatattctcacttataagtgggagctgaattatgagaacacatgaacacatggaggggaacaccacacactcgagcctgttggagttgggggg

SEQ ID NO: 1191 - DNA, 642 bp, Homo sapiens
ggcaaaccctcgcgcagtgcctgccacacagtagaagctcgataaataactgttcaaaggaggaaggaagggagaacaggtggcagggagaaaggaagggattctttgcctctttattggcgaaacttcttaaattcttggctgcagtgcaaggaaagcttggactcccagtcaggagacttgaattcaagtcccagctccacacttagatgtgtagcctgggcgcccccttgacctcccacttcccaccttacaccttacctgcccaggtgtaaaacaggaaaaaatgatacttcccatgtggtatacagattttgctctccttatttctaaattgtgttgtccactcattatcttaaaaagcaaactataaaaacatccgggccgggtgcagtggctcatgccagtaatcccagcactttaggaggccaaagggagcaaattgcttgagcccaggagttcaagaccagcccaggcaacatggtgaaaccctgtctctacaaaaaatgagccaggcttgaggaatgtgcctgtagtcccagctactcaggaggctgagatgggagtatcgattgagccctggagttcgaggctgcagttaaccaagattgcaccactgcactccagctggggcaacagagc

SEQ ID NO: 1192 - DNA, 516 bp, Homo sapiens
gttttatgtcagccctcccatgcatacttgcatttggaaagagatcttggaagtgtgggagataaagtaaagtgggggatttgaggtagggtgagacctgggagacagtgattgctctgggcaggagtgccttctttacgacacctgcctaaatgtcaggctgaacctgtctttggccttccaagtcagggaaaaccccagggaccaccccaggaaaatgggtggcaggagagtgtacctttattggaaatcccacctaccaggatccaaagagattctctgaggccttcatggaagaaagagtatttgtagccaggctgcgctggggacctggagagccacagaatgaccaagttgagacctgaagatgaccccgtccaactgctcactgaccaactgggggaacagaggcctagagaggggcaggtgcttagctaagttcctagggactcgagctaaccattaggctgtggagctccttcggctccagttggtgtagggtgggatgagatgtct

SEQ ID NO: 1193 - DNA, 615 bp, Homo sapiens
gcagtgatggacccaggcttttgctagtgatggcagagagtgggcttttatgagtgagaagtgagagaagagatcaaaaaaacttcctggaaatgatgtttttggagctaaatcttaagggattagtaaaaccagattatactcaaagggagggaaggccacagtaggtgtgtgggagagaacagttaacaagccgtaaaacagtatgttgactacaaaagtgaaggggaggcaggaaaatgacatgcacttgggcatgactggaagcgaggaagatcacagtgagggaaagaaagaaatcaagggctacgttcttgttttggactttgatgcctgacaggtgacactaagccagaattttaagctaaatctacttgattgcaaagtcagagatttccctgctctttcactctgcctcaactgtgattgggtattgatcaagtatatctaaagctgtgtccaagaaagcccatgacattgcattgtgtgcaagttatgtgtatatgtttgcatgttcatgtttttcaggagagaagaagaagcatgaccttcttgtgattctcaaagtttaagaatcatttgagccggccaggtgcagtagctcacgcctgtaat

SEQ ID NO: 1194 - DNA, 475 bp, Homo sapiens
ctaagctccaatgtgatgatatttggagatgggatctttgggaattaattaaggttagatgaggtcatgaggatgaggcccttatgatgggattagtgcccttataagaaaacacaccagagtgcctgcttgctctctctctgccatgtgaagacacagtatgaaggcagcttattgcaagcctaagagagaacccttgccagaattggacttccggtctccagaaccatgaaaacataaacttctgttgtttaagccacccagtctacggaattttgttctagaagcccaagctgactaatatggttggagtccagtgctttgcgtgaagaaggtacatctctaaaactaaacattttgctcattgaagcttgatctgaaataattaagactttggtcgtgaaaatcttagacagaatccattcagtgactacctttattctgaattggcaggcaggcagttctgatagatctg

SEQ ID NO: 1195 - DNA, 119 bp, Homo sapiens
tataatttggtttgaatgtgatgacataactgatagtcttaaagaaagctgcatatgaaatgaaacagaactttcaattgaacagacaatttttagtaaattatttccataaatttcta

SEQ ID NO: 1196 - DNA, 637 bp, Homo sapiens
atatctaatttgtttccctgtgtttataatacatatatatctctgcctcttaaaccaagaataatttttacagggacaagaataaacacaaggaaatgaattagaaaacaaagtgaaaggacaagaaggtggagaccttgttcaaaataatgaaatacatatttaatatatgtgcaagtttgaagaaaagagctactgatagggttttggtgtattagataagataaaatcaatgggaacaccagctgaagtaaacaaacaagcatacacacacaaactgggaagcagagaaaataacaaaactctacttaaaacattatgaatttcagttgtctataaaacaatccacatttgatattaagtaagtagatgactatgcaaagctctaactcagagaagataccaaaattggaaatattctgagatgctatcatgtaactggcctttaaactcatgaaaatgcttgagaacactcaggggaaaaagtgagtaagtagagaaaaaagaaagtactcagctaagtgggttgaagacagtacaggaaatattgaaggagactgtctattgtttgattgatttctttcaaagaaagaatacaaagtaagttgataactgaaggacaacggtaggtcaatgt

SEQ ID NO: 1197 - DNA, 510 bp, Homo sapiens
cttgtatacagagatgtcttaattcttgccttgggtcatggctgtgggacagcatgatcagactgacttctgggagtcctggggccagaaggaagtgctccaaactcctaggggctggttttgaacaacctctgcttggccagcagatgttgggtagggaaggaagtgggtttcctggcttgtttctgacagaaagaagcaggttctgctttgaggagacaaacagcagtctcacttcctaggttcccgtgacctctgacctcagcctaccttctacaccacactgacctgatgaggctgtatcctggcctcaggggataaaattgtcccctgagagaagcttggagccagagacaactttgcagactgcctgttccaaatacatttgtgtctcatctgaggaactcagagagtggaaagtgatcaggaggtcacagggcccgatggtcacaggccaggacagaagccagggtccgtgagccttccgaagctcctcatctaccccggggc

SEQ ID NO: 1198 - DNA, 475 bp, Homo sapiens
  misc_feature 195: n = A,T,C or G
catttaaaaaatgcaatggagcaatctgtaaacgatgtctaagatgaaaagttactacagggaactctcttgatctattgttttatactgttaaagaaagtacattaatgaaatgtgtcagggtaagatggcagtctcagcacatcaaatgatgcaggcaagaatatagcaaagtaatatctatcagcaggtcanctattcaaggtaatgtatcaaagaagtgtaaaaatatacattagaatgggtcagttattcttagatcagaaggaatgggataaagaaatgatctgagaacagaatataggaattatgtggcttggaagtagaaagagaaaagacatgaacatttatcaatgacaaaatgatcacaatacctttgaggtactggatttgagggaaaagattcttccaaataagtgatcactctgattaggactgaacaaaatgactgatttcactgctcagtcctcagact

SEQ ID NO: 1199 - DNA, 636 bp, Homo sapiens
gttggatattcctgtttcatttaaaaaatgaaaatgaaaagtttatcagctaaagattatagttaaaatcagcaggttctatatagcaagtctaagtattctaatggcgcttatattaatacccagacagaaatataagacacaaagcaagcctactaagcaaagcatctgactagataaagtagaaaaatttggcaggttccaaccctgaggtgtcagagtttattgctaataactcaagttgatttcttggctaaacagagggctttaaacaaagaaattttttggttctaattaaacaggaaccctaaactgttaacagtattcatactttattaatacaataattactaaaacatatcttagtaactagtattattgataactactgaacatgtgtcgaatgggaagaggagatcatcaccacatattctttaaatgtcagccgctttcataaaagaaagggttgatgttgttttctgtcaacagaatcaaatgaatcaattctggaaagtcttcctttcctctttggaatttatcttcattcatagaaactgtattcataggtcttaaattctttcttcttagactatagtactattacttggaatgattgagccactagactaaacacct

SEQ ID NO: 1200 - DNA, 583 bp, Homo sapiens
taggactaaaagcttttcctttgggatccagaataagtcaaggctgcttgctgtcactactctgttcagcactgtattagaggatctagtcagtagggtaagactagaaaaagaaacacagggcagaagaaacagaaaggaagaaacaaaactcattcatcacaatgatataatggtccaaaagactctacaaatacattttggaattattaagacagtttagcaaaatttagacttacaggatgtcaatcaatgtcatacgttccatagcaataaacaaaatgaaattttataaaaatataatttacaagcatttgaaaatgtttaccttagaataaatataataaaagatgaaagtgctccataaaaaagtatagaatcttattggctgggcacggtggctcacgcctgtaatcccagcactttgggaggcccaggtggacagatcacctgaggtcaggagttcaagatcagcctggccaacatggggaaaccccatctctactaaaaatacagaaattagctgggtgtggtggtacaggcctgtaatcccagctacttgggaggctgaggcaggagaatt

SEQ ID NO: 1201 - DNA, 531 bp, Homo sapiens
tgtagaaattagatatatggccaagaatcagagaagcaaataaacagatctcaaataaaatgtttagttttgaggttagaggtgggatatcagggtaaccaggcaaaataactgatacaataaataactacatgacaaatcacttctctcaacaacacatttcaaaaaaaatcactttattttataactgcaagattttcttcaaaccagtttcttgctattacaagctcaaaaacttatcctgctctggtggcaaacattttgtgactcatgctgtgtaacaaagacctgtgtagacattgagttgtatattgctgatgcttctgaacataaaggaaaagtacaaaattgccgcctttttcccaatgatttgtggaggagaattattactagactagctgatacctgtgcatgaaatgcaccactattgcttaataaatctggaccgggtgcggagattgcctgagctcaggagttcaagaccagcctggccaacatggtgaaactccatctctactaaaaatacaaaaa

SEQ ID NO: 1202 - DNA, 542 bp, Homo sapiens
gcagcggcgcggcgtccggggaggaaatggatgctgtgctggcctgccggctccgggggcggggaaatcgagtagctgcactcaggccccgcccgagacccggagggagcgccgggccgtccccttttgccctcctttgcgctgggctgagcccagagccgagagcaggagtcggctctgagttccctgcttggtttttgggtggcagcagccagaggaggaatatggcgctcttaggcagccgagcggagctggaagcggacgaggacgttttcgaagatgccttggaaaccatctcaatatcttctcactcagatatggcaacaagcagccttcactttgcatcatgtgatacacaacgggcgcccagacagcgcggagcgtctactgtcagcagttcatcatcaaccaaggtggatctcaagagtggcctcgaagaatgtgctgtggcattgaacttatttctaagcaacaaatttacagacgccttagaattgcttcgcccctgggctaaggagagtatgtaccatgccttgggctac

SEQ ID NO: 1203 - DNA, 577 bp, Homo sapiens
actccacattgacctcaatcactcttacccttcacattgtgtttgctctttttgcctcccacgctttagtcacttctttctcactttcatttcttctttctagtcttcctttatccactcctaacactaatctcgtagctgtagacttatctttttcattgtcctcattttttaagcataggtgaaataccggaattgatatagatttaatttaattttatctcctatgttatgcattattgagaccagaaagtagataaatcaaattggtcatacccaatcctttcctacaagatagtaaatgttttgaagtcacagactattgccatctggaatagtccttctttgtaacccagtataatctccacaaaaatgttatttttaaaaaatccctccactctttaacattctgatgacctgtaagctttcaagaagtcttcagtgaaaacctgtctctactaaaaatacaaaaaattagccgggtgccgggtgtcgggcgcctgtaatcccagctactcaggaggctgaggcgggagaatggcgtgaacccgggaggcggagcttgcagtgagccgag

SEQ ID NO: 1204 - DNA, 592 bp, Homo sapiens
ttaacatgctactctgatattttcatttagggtcctagtttaatatatgaaaacataaacagtaaattagcagtctaggtttctgccattttttgttggaaacctattagcaacctttatctaaaaatgggaggagagctttcacaaaatagctgaatttcaccaatccctaaatcagaggaatttacagcatctcttggatgtttcttctggattgtcacagactcatatacacacacacaaagctgcttcattcattcaacatacttgtgttaattgatcttggggagacaatattgaataagacaaagtcactaccttctttgcttaaggacattgccaagtaagcagataattaccatacagtaggacaatattacaattagggcataaatggagagcttaggtcagattgttaatgaaagctttattttagaatgaaatcaaacatcagtccaaatatcctaaatgagttaatattgaaagacaaaaatttgttacttttagaagcaacaaattcctacagaagagcaaacctaatactaagccatctgttatttgcaatacacttaataaagtcaacagacggatg

SEQ ID NO: 1205 - DNA, 562 bp, Homo sapiens
gatgcttgtatcaaatattatatgtaccccataaatgtgcactattaaatatccataatgattaaaaattatttttttaaaaaaattctgaatgaatgaactactttgaggaatcaaatacatgagtaaaagggggctgggtacagtgcttcacacccgtaatcccagtgctctgggaggtcaaggcaggaggattgctggaggtctagagtttgagaccagcctgggcaacagagcaagactccatctttatgaaaaaattttaaaaattagccaggtgtggtggcgcatgcctgtggtcctagccacttgggaggctgaggtgggaggactgcttgagcccaggaggttgaggttacagtgggctctgattatgccactgcactacagcctgggtgacagagtgaaaccctgtcttacaaaaagggggttggagaatttgaagtgatgagggtagacaaatggtgcatgattcaacataaaatagatgagaatttaagtgggtaactccaggcaaatagccttccagaaaatctgaaacattcccaaaaaaaaaaaaaaa

SEQ ID NO: 1206 - DNA, 589 bp, Homo sapiens
agttacttgctttttaaatagctcaaaagtttttcatccttttaaccaaagttgccaaatctaaagcattattccttttggtcatcaagtagaggaatggatgaatatatttcagtttgcttattactaaaatatgttagtaatagcatattttattcaaatcactgcataatagctctgtcttattttccattttcatgacaaacacacccaaagctcagctcactgtatttactttcttttcatgatactgtttgctaagttttttctgtttgcttcaccatattttgaacaattttctattaaactaggatattttaaaagtttgccttttcaggccgggtgtggtggctcacgcctgtaatcccagcactttgggaggccgaggcaggcggatcacgaggtcaggagatcgagaccatcctggctatcgagaccatcctggctaacacggtgaaacctcgtctctactaaaaaaaatacaaaaaattagccgggcatggtggcaggtgcctatagtcccagctactcggaggctgaggcaggagaatggcgtgaaccctggaggcggagcttgcggtgagccgag

SEQ ID NO: 1207 - DNA, 573 bp, Homo sapiens
cttctttgtcagacagtcagatagtggaacacagattagtgaatccactttttctagtacagaaagtatcataatgaaattttcgggtggctctttatattctgctgcagggaacggccacaaatctattcataaaaagatatttgagaaagacagagtattgctttcaataaagagaaaaatttcagtaacttgtgaaaatgttgaattttacctgagccctaggatcccagaaaacaagaaaggacagtgataagaaacccacccccacttttttgtttcaagaaaagacagcaaagaagcagccttccccacatgcttacataagacttctggataaccacttggtttatctatggcaaatccagacacaaacgtggaccctccaaattcccatgctatgcctcaaaaataattagctgaattgtttctctccactaaccaaatacctctgttaaaagaaaaaccttagacaaattaaattaaacagagtttagttgagtaaagaatgataggcaaattgggcagcccccaaccagaataggtttgcagattctctagcaataatacatg

SEQ ID NO: 1208 - DNA, 615 bp, Homo sapiens
attttcccaattatataactataaaacaattctggaacttgataaatgggagtggcctctcaatggccacttatagacttgttaagtatcacatatacaaccaaaagaatatcaagaggcacaaggcctctttatgttagccccaaaatgataaattcatcctaacgtgggtaaggaagaagcttcacttaaccatatgaacagagaaaaagcaatcaaaagaaacagaatgggccaggcgcggtggctcacgcatgtaatcccagcactttgggaggccgaggcgggtggatcacgaggtcaggagattgagaccatcctggctaacacagtgaaaccccgtctctactaaaaatacaaaaaattagcccaggcatagtggtgggcacctgtagtcccagctacccgggaggctgaggcaggagaatggcgtgaacccgggaggcggagcttgcagtgacgcgagatcgtgccactgcactccagcctgggcgacagagtgaagactcagtctccaaaacaaaacaaaaaaagcctaaaactttccattctctttgcagtgaccctaacactccttaagcttctttctgatagtcagccccaacttgggctact

SEQ ID NO: 1209 - DNA, 562 bp, Homo sapiens
ctagagagcaatgaatacaaacacacacaagaaaatctgtcacttaatggctaatattcgtaaactatcaacagagaaatgaagttcgtaattcagacagaaaacccatttgctcagtgtgttgctgataaaacatgcaacataagcaaattattaaaaacctaactgtagcaggtcgatagagagctctgcttctgtccccataatcccattattcaattaagcaatactacaggtagaacaggggacacaataattatcaccaacaacattgccattcatgcttctaccgtaggccaaactttcttcagatttttgtggaaggtatttgtatgtcataaatacataaaaagtcaagacacagataaattacctctattaccttttccaaggatgatccaaagaaaatgtcaaatctaagctgaaactcttagctgagtccggtaaagatatacttttatgtctttccttattataaatatctggctcatcattttcctcatggcactgacaaattaaatttatatcattgtcatcagttcacatccactttgcatgcact

SEQ ID NO: 1210 - DNA, 590 bp, Homo sapiens
ccatgtacaagtcaaggagaaatattataaaaatattgacagtgctctgaggatgggggttttcacaaagctcaaaacaggtcaaacttcttcactggctgccagctcttcacagctaccaccctggtactaggggttgggtacgtgggaatagttccaagttaaagcaccatagaccccactgttcttatgaagctcggcagttatatttgagtgaatgcttttcagtgtgttctgtgcctttggttaattttcatagttttaaaatggttggtttctattggtgttttgccagtatttttgttgcttttgtgggaagaggattcactgaggtcctcaccctgacattctgaaagtgttgtccctaaccttgtttttgaaatatatttatgttggttagacttttaggttgacaagtttgtttcctttcaagctgttgctccttaaaacattggaaggaaacaaataaacaatacagtcttttggcttgcattgcttggatgagaagtcagctgtcattctcatctctattcttctgcatgtaatggtgcgttttttcctagttgcttttaaaattttctatcactagt

SEQ ID NO: 1211 - DNA, 610 bp, Homo sapiens
tatatcaccaaataatgtctcatagtcattgtaacatagtagtgcaacactttaccttttccatgtttagatatgtttatatagacgaatatcattgtgttataattgcctatcatattcagtaccataatgtgttatacaggttggtagcctgggaacaatatcatatagcctaggtgtgtagtaggctatatcatctagctttgtgcaagtatactctatgccattcacacaatgacaatatttcttaacaacagagcatatctcagaacaatatacctgctgttatgttacaaatggctgaacttagtttgctcttcagaaaacaccaaacaagcctatcttctagatttatctctttcatctctttctgctgcttttctcgcatgattttatgtttttcttcttcattttgccccaacacacctgaatttcttttcttcattttttgtcatttttttccattccttcttcttgctgctcaatgtaatgcaatctttggggagttttcattataaaacttgacagattcaaaatggaatcacttgtgccaaactctggcaatttggaacctgagaagatgttgaagaaagggctcaccatgtgtgat

SEQ ID NO: 1212 - DNA, 576 bp, Homo sapiens
ttcacatctgttatggattgaattgtatttccccaaaagatccgttgaagtcctactgccagtacctgtgaatatgaccttctttggaaatagggtctttacggatgtaattaggttaaaatggtatccttataagaagaaaaatattggggctgggtgcagtggctcacacctgtaatctcagcactttgggaggctgaagcaggtggatcacttcaggtcaggagtttgagaccagcctggacaacatggcaaaatcctgtctctactaaaaatataaaaattagtcaggcatggtattgtgtgcctatcattccagctactcaggagactgagaaacaagaattgcttgaacctgggaggtggagtttgcagtgagccaagactgtgcaactgctctccagcttggctgatggagtatgtctccttaaaaaaaagagaaagagagaaagaaaaatttgggcacagacacagaaggaagatgggcatgtaaagattgagagattagagttatgctgccacacagtaaggaatatctgggactacaagaggcttcagagggaccatggtcctgct

SEQ ID NO: 1213 - DNA, 618 bp, Homo sapiens
aaggggagctttgaaaatatggcaaaaatatgagacatcatctttggaataaaggtgtggccttctaaggagatggcttgtcaatatgagttagagtgactttttataaacttcttgcttccctttgttgtaaacatttatatattacatattgacatacacacctacatatgctttagagactacatatgtactttcttaggcatacatattggagtctttttataagataaaaggcctatatttttatagatgaggctgctttgcaataagattcacttggaacttcactattacagaaaaagataacccttaaaacagaaaagatgatttctcctcctgctgcacatacaacacagtttggcaggggggactctattcatttcagtctctcaggaacccagaacctcatgatgctgccttctaaacaccaggcttcatagttcactgtggcaggatgaagaggaagcgaaaaacccaggactgactattcaattttctgcctagaagtgctgggtcatttctgcttactttttcattggcaaaagcaagcaccatggatcggtgggtgggggagtccaattatcttctgggcaaggaaggagaggcaagaagagc

SEQ ID NO: 1214 - DNA, 638 bp, Homo sapiens
ttccctggccctgcccaggtcctggcactggcctggccctgccctgccttggccctattctttcctggccctgccttgccggccctggccctgccttggccctaggctggctttggccctgccctggccctaccttggccttcaccctagccttacctgggcactgtgttggacctggccataacacagacctggttgtggccctggccctgccatgaccctgtcccagaccctagccctgccaggtacctgtcctggccctgctctgggcctggctttgtccctggttcttagatgaccgtggccctgcccctgcccttgcccttgccctggcactggccttgtacatgtccatggtcctaaccctggccctgccctggagctgccactgtcttggccctgccctgctctggccctgccccggccctggccctgccccggccccatccatagacctgccctggttggtcgtgccctaccttaaccctgtgctaccctgggcctgctccaccctgccctggccctgccctccctttggccctgccctgaccccgccttggccctcacactggccctaacacagacctggtcctatctgtggccttggcctggcattgacccctgctcctgacccctgt

SEQ ID NO: 1215 - DNA, 615 bp, Homo sapiens
ggcactgctggggctttctctgggtaccagtacccccatctccaaaggccactcatatctttgctgtgtttctaagacactcagtgagctgaatccaggggttccatgggatgtggagaaatgccccctcccccattatctggtcacctgcttatgcaaagtaactgttccaataacccagaaaccttgagtgaaaaaagctgggccttcaggttctgcctgaagatcagtagtttttctctatcagtgtcagttagggatttctggggccaggctgtagacagacatcactttgaccttctgatccccttttcccccagaagtccatgagcttctttctgtatcagtcagggttatatcacaaaatcaaaagcaaatctaggtatttctgagaagaaagaagattaatataggggactggaagattccacagacgttggaaggctagggaagcaaaagtcaggttggttactttcagaaaatccaggacatgacactgccaatgatcccagccatgtgcatcacaaagtgggtatttttcaggaggacaccccaaagtcacaggcagaaatcccatgtctaacatgactgatcctcacttatccacctgcagct

SEQ ID NO: 1216 - DNA, 546 bp, Homo sapiens
ggaggatacagaataaaaactaacagatttcagcaatgaattacaaaaatgaaaattatttcagtagtaaagaccgaactaaaagaaattatgaaacatttagggatgaaaaagtttctaaaatgaaaaacacactggaagagtttaacatcatattagacactcaagaagaagaaaaacacatagcaaattttaagtcatagtttttgaaacattccaaatgaagtacacagatgggaagtgactcaaattatcaagcagccccagaaaaacagaagagaacacagggaactagaaacaatgtatttctaaatttagtaactgcaactcttgatataagaagttcagtgaaaccaaagccaaagtaagattacaaaattacattcagaggtatcataataaaatggttaaaagggattgataggctgggtcgggtggctcatgcctataatcccagtactttgggaggccgaggagggcggaccaccagaggtaggagttcgataccagcctggccaacatggcgaaacccgtctctactaaaaa

SEQ ID NO: 1217 - DNA, 521 bp, Homo sapiens
  misc_feature 34, 35: n = A,T,C or G
gatgcccatgcagggactgtaaacgagttggggnnctggggctgggctgtgagctgaagacttaaaccaagccagccccctggccgcatatcccacccctccccgtcccagagaggcaagcgggcgcagcactgggaaggaggaggcggttctagctcacccctttccacaggccccaagggcacagctgggtcagggctgaggtggagaggggacaagcatggtatgtagcttgtctcaaaggcacgcttccccatgggcaggaagaactgccgggaggggcatctcccaagctacctagatatcctggcatccgccttcccagccaggagcagcaccttatccggatgcatttgctccccagcatcagcctccccgcagccacatgggacggtggcacagtctttggagctgacggacctgggtcagaagcctgactttgccccctgactagctgtgtgtccctgaagaagctgcccagattctctgagcctcagtctcctcacaggcaaagcagagac

SEQ ID NO: 1218 - DNA, 553 bp, Homo sapiens
ggagccagcagtaggcctaaaattgatctaaaaccaccactagatagagaaatttatcctaagtgcaaatctactataagagtgctagtagattggagttcttatgacaaggaaggggcttaaaggacagataaaatgacaaaaatcaacatccacaacttaattagaagatggacaatgcccaaactttatttaagttaccagtaaatagagtaaatttaagttatttattatttaagttaccagtaaatagaaaattcaacaaatcccagtgagctacctctcaagcactcctgtcacattccttcacagagaacaaggacaatctgggaaaaactacatggagaaagaagtggggaagcatcacacccaagatgaatctaaagtatttgtcacaaagactaagtcatactaagtgtgaaagtaccgaaaatgtcctagaagaccgaacattttactacaagaagagaatttaaaagtgccctaagaccaaaagtcgtcatttctggtagagaagaaggtgaaaaagatgggagaagtaccctttgaagac

SEQ ID NO: 1219 - DNA, 573 bp, Homo sapiens
gatatagaaaggggtgcagtggtttaatattagagactagaaaagcagacaatctaccttaaaatctaatgaacatatttattttaatgcattagtacaatgtatgaatggtatcttaaaatgacttttatttaaagcttccataaaggaatatattaagagtctggaatatacccatgattatctggaaacagctggttccgtttcaccatcgtttcaagtgaagccccagttttgtgcttttctgccagaaataacgtcagcccagaagccctgaatcccaacagcactgaactgccggagttccacccagtgtgggcacgtaagtggcttcctcaacccacagaaagatgtgttgctaagaccgtaaggtgaccttttaacttcttcagagatagtttcagtcatgcatatctttaaactgctacatctcacccttggttaagccattttttagaaaattatgagatctaatgttgtcacctagtctgaaatactgtaatactgtggcaaagtcctacaacaggcagtcattaataacaggtagaaagaaaagaccgaggagaatggcta

SEQ ID NO: 1220 - DNA, 544 bp, Homo sapiens
ttggggacagcctcctagagaaggtcgttgagctggtcttcatggatagaggagtggcatctagaaaggaaggagggatgcaccctcatcccaggcagaggaaggaggaaaggacaggagggaattgtaagagggaaagaaccatagctatttctaagtgaccagagcaaaaggtgggcagtgacaatagcaacagagaagactgagagctagaaggacccagtgtccggttttgttttgttttttaaattaaaaaaaaaaagtttttgggggccaagtgcggtggctcacgactgtaatcccagcactttgggaggccaaggcaggcagatcacctgaggttaggagttcaagaacagcctggccaacatggtgaaaccccatctctactataaatacaaaaattggctgggtgcagtggctcacacttgtaattccagcactttgggaggccgaggcgggtggatcacctgaggtcaggagtttgagaccagcctgaccaacatggagaaaccccatctctactaaaaatacaaaattagct

SEQ ID NO: 1221 - DNA, 571 bp, Homo sapiens
agtcttccatggatttaagtcttctgtatttgtgcctttctccccagctgtattctaagtcctgaaacacctagcgaatatgtaccacttatcattcatgccatttagttctcatcttttggtttatgagctgagtttaggctgtatgattgggaacttttttcctccaaaaacacaagcaagagcttttatatttgatcataccagtcagttggcaaatgaggtttggttacttcctctgaagttcagtgttgtttagcctcattatttcatcaggatcaaggcttcatatgccagttagtgtgttgatgtggaggagtggagtggaaagaatatgttgattggttaggaaaattctcagcagaaattatccttgggtagaatgttctatgtgatcatctacagggctgtgtacttgtgcattctgtgactctaaatactgctgctggaaaaagtctgtttacactaaataccaccatacgacagcctttgagcagtttaaaaagaaaccttccaatctcctactatggtggtttagctcaggctggttttgtggcatgtttgtgctttt

SEQ ID NO: 1222 - DNA, 650 bp, Homo sapiens
atttgctgatttttttttaagagataggatctccctctgtcacccaggctggagtgcaatggtgccatcctagctcactataacctcaaactcctgggttcaggcaatccctctgccccagcctcctgagtagctatgactacagctgcacaccaccatcctcagctatttttttttattttttgtagaagcagattctcactatgttgcccaggctagtcttgaactcctggcctcaagtgatcctcccacctcagcctcccaaagtgctgacattacaggtgtgagccttcacgcccagtctaatttgctgattttaatgaacagcagctggttctattaggttggtgcaaaagtaattgcagtttttgcaattataattatcactgtgacagataattccatttcctaaatgagttggagatgggattagaaataaatacactttctttgaatcctcttatatttgtgtggtttttgtggcccagaacctgagccagcagaaatgacctcttgggaaaagtgtcttctgtgcactttgctccctggcccaagatgacaactttcaacttccaccacgtctggcaaatttttaaattttttttatagggacaaggtctcactgtcgctacaaaaaaaaaaaaaaaaaa

SEQ ID NO: 1223 - DNA, 635 bp, Homo sapiens
ggaagtaagtaaaaatatttcctctggtggctgttacaattccacagacatccagaacaattcctgtgaacaaactcaaatgatttcacattgaaaatttacagctggatcaaggaacaagattacatttgtgctttcaatgtcaccaaaggtgctagagcaatgaaatgaaagttgccgtatgcatgacctacttatgataccccacactaagtctgtacttcataaatctacctggaagtttatgtagaaatggcctaacgtaacagtgcaattaggaaggaggaatacttacgtaaagttgtttcttttcaataatagaggaaaaacaaatcctttcagtttactaaacccgcggtcagaccctattcaaatgttcaaaatgtttccagaaaatgacaaacaagttagttccgggcttgcagataaaatatttaaatcagtgtgcttctaaatccatgcccatcaacctcagttgtacctccaacactgcttccagtctgattacattttcctagtaggttctggcccattgaccacaccaacaatttcaaaccttttctacagttcacctccaaacactgactcattttctcctccagctcccagcagataatcatgtctcataattcaca

SEQ ID NO: 1224 - DNA, 489 bp, Homo sapiens
  misc_feature 397: n = A,T,C or G
cctgaatgaggaacagccattcccctccagcagggcctcggcaggtgggcccggcaggtgctcccgtgactctgcctccgcctccagccctggtctctgggatgcgaagatggatggaaagaccatatgaagcagccccgatttcccggagctcccagctgaggtcgcattcatccacacaggcaacagaagcaagtgcagcactgcgcggttcacctgctgtgggaacggcaggccagaattccctgtggaaaagggaggatgggaagggccccgatccccagcccctggctcaggtaggtgccatcgcctcccagggccgttgtccagattcaccgcggtgcatgtgaaagcccgggcaaacagatggtgcccaattaacagaactattcttgcntccttggggccccaagcctagaatctgagtctctgactccctgccagaacctggtcgagaccttgaactctcctagctgcttcctcacccag

SEQ ID NO: 1225 - DNA, 608 bp, Homo sapiens
gacagtggagttatgtcaccaattgagcctaggagccgagaaggagaagagagttcaagatggaaatactctgttcttcttgctctacacaggtcatgtttgcaacacgagtagctatatctaaatggggtttggaaagttattctggagaggaagaagatatacgtaggtaagtaaagaagactgtgtaaaagttctcaagtacttacagaaggcacagttgcaaatacgctggctgaaattccatcaggcatagcaaagagtggctgctgggtgattagaagctgagtggagataccagaggtcattcactattaacagactttgaggttccagcctagccagggtagaaaaaaggattgaaaaagaaattgaagaaactaagaagcctgtgggaaagtaccaagtggtgaaatgaggatgaaattggagtctcagaatgagaggagttaaagaataggaaataaaaatttgggagggaataaaagcaaaaattttcgaaatttggtgacattttattaacccatatattcaagagtctcaataaacacttagcaggataattgcaatacacacacacacacacacaccacctacacatatcatag

SEQ ID NO: 1226 - DNA, 556 bp, Homo sapiens
aatcctacaatatacaaatgccatccactttttgcagataaggaaaaagaaacacaggatttaaatgttgagcctcgctgtaatacaaggatattcttccttaatacccttaagtatatctaatcctaatattttttagaactttctataagcaaagtcttattttaggtgcctcaagccatagacatgttaatgaggcaagtttctactctccataggttcaaaacacaaataaataagtatcaggtatcacagccctatccacagataatctgacactcagaagttcccatgcccaggagtctgctatagagtcctcagcttggtaacctccaccatcagcatcagtgggttcaggctctctgggtctccagctaatcctgcagaggcagtgagtacattaaaacatcacacctaattccactctccccttacccctttgttctaatgtagtttgagctagcctctcacatctgaactctgttaacactgctaggttcttgctacgcatcagagccaggtctgcctccagggattatctgtaagtattcacact

SEQ ID NO: 1227 - DNA, 510 bp, Homo sapiens
cttgctatgatagtcaaaccaggtactgtgattgctcacctgattttttgtttttccaaaaggtgctttattgtgtggatagttgctaaatttagtgttcctacggggacagtgattactggagagttctattccatctttctctgcctcctccctcttcagtgcccagctccttttaaattaaacattatattgtgaacattttccatgtctattaaaagtatatatatattttttgagacaggctggagagcagcagtgtgttcatggctcactgcagcctcaacctaagctcaaacaatcttcccacctcagcttctaagtagctgggaccgtaggtacatgctaccactcttggctaattttttgttgttattttttatagagatggggtctcactatgttgcccaggctggcctcaaatttctaggctccagcaagcctcttgcctcagcctccaaaagtactaggattacagttatgagccatggcacctggcccaaaagtcta

SEQ ID NO: 1228 - DNA, 513 bp, Homo sapiens
tctctggctgactttttggcaggcccctttgccattacttgagtgcctcagtttccctgctcttacgttagactagtgcgtcaaagccagtgtccctaggggcagggaaagagaaaagacattagctcgctaagtttaacagctgattcttgtatcttccagctgtctacgtttgttttcaaaacattcaatgagtcacagcaactcagagagggtttatgacagtttgccatttttaggagaactgtataacccaaatgatgaaggtcagatttgaaggagttggatctctaataggaatctgaagttttttttcttactgtcatgaagaaaggtcctgataacaggatggtaggattaggatttagatccagcccagtgtcggggtgaacagtgactaaaatgtgattccccaagagagcctcggcgatgacagtttctggtcctggagtctatgggttaacccctgtagcattagcccccgtcacagtgacatcagaataagaacaggct

SEQ ID NO: 1229 - DNA, 561 bp, Homo sapiens
agccaatcagtggaagattacctgaatgatagaccaaatatctctttgaaaaaacagcctctggaagctacccaggcaaacctaaatgtataaagtttatgtcaccataacaaaacttaaacttgatccatagctctgtggaaagtgactgagctgattcagtaaaaagggtatatacccaaaggattacaaatctataaagatacaggcacaggtatgtttattgcggcactgttcacaatagcgaggacttggaaccagcccaaatgtccatgaatgatagattggataaagaaaatgtggcacatatacaccatggaatactatgcagccataaaaaaggatgagttcatgttctttgccgggacatggatgaagctggagaccatcattctcagcaaactaacacaagatcagaaaaccaaacaccgcatgttctcactcctaagtgggagttgaacaatgagaacacatggacacagggaggggaacatcacacactggggcctgtcatggggtggggggctaggggagaaatagcattaggagaaatacctaatg

SEQ ID NO: 1230 - DNA, 530 bp, Homo sapiens
taacatgtttattgtctgaagaggatggatacttttacttttcctgttaaggtatgaaatataagtgccttacaatttccttccttgctataaacagtgaatttgagtgattttactggaatcttcaaaccctgggtattttctcattgaaaattaaatgcataaccttgactgggaaacagagacagcagactagtgacttgaaactaagaccaatcttgagccttcaaagagaggacattacaggcccagtggttcttgctgaggagcctcccctgcagtgtcccagctgctcacaactgactttgggtggagccctttatagtgagagaagctcagagccctggaaagctggggattcataggcagaggtggttgaggtgatgcctttctgagaatgtacttgctattatcttgggtctgtttgtagacgtttctaatgaaacaaatctggatttaggtaaggagtgatttattttatttttatttatttattttttttgtgtgtgacagggtctcactctgtctct

SEQ ID NO: 1231 - DNA, 271 bp, Homo sapiens
caagggtacagtgaactaaagatcatgccagccactgaactccagcctgggcaacagagcaagaccctgttttagggggaaaaaaaaatctatcttagctcctatgtgccataaatgttacaacactcatagtctggaggaatcacaaagtctttaagaaaatggagacaggacctatagtgatcactactcacaaatcactagaatcacatgctgaaacactgctgcagaatatcaatgtgtggtctgttcccactggccattaacccaa

SEQ ID NO: 1232 - DNA, 476 bp, Homo sapiens
tggtttggctgtgtccccatccagatctcatcttgaattcccaagtgttgggggagggacccagtgggaggtaattgaaacatgggggcaggtctttcctgtgctgttgttgtgatagtgaataaatctcaagagatctagtagttttacaagggggagtttccctgaacaagtctctctttgactgctgccatccacataagatgtgacttgctcctccttgccttccaccatgattgtgaggcctccccagccatgtagcgctgagtccattaaaccattttcctgaataaattaaaaataaattgcaaccaccaactgacccatcaaccaacctacaactaaaaggtcctgtgaatgacaaacagatacactgaatagtctttttttctttcaacagagaaaactgggtttaactttattttttattgtcaactgacaacttggaattgtataaatttatggcatacaaagtg

SEQ ID NO: 1233 - DNA, 538 bp, Homo sapiens
tcccaaagtgctgggattacaagcgtgagccaccgcgcccggcctagatcgattttaaacttttaaaatcttaagtaattcctttttttgcttgatggttttcttctacctcaaagcggggactatatcttacattttcttggtattcgatacagtgcccaggatagctatggaaatacagctgatggatggatgggtgaatgagtggatgaatgaacagttggatgaaagaaagacgaatgaaaagcagatggctgggttctacaacagctgctgatttactggatgtggggacagaaggggttaaaaattaaatcaacttgagggactcttcaacttgagcagctctttactctcaaagataaaattgggataattatcttaattctggtaatcattagtgcttaaggctcaacatttttattgtgcttcaaaccacagaaaatccacagataacaactgtgattcacttgtgactttccacaggagtcaacttgtcagacatggccctatagctacttgcgtagggctggagctg

SEQ ID NO: 1234 - DNA, 584 bp, Homo sapiens
agagtttcacactttaagggcactgaagatatagaatccaaaacaaaggcgggaagatgaaatgtgcagggtgtgtgctcagtgtacatttcacagccctgaaacttctcaattaaacaacttcagtttcgggccgggagccgtggctcacacctgtattcccagcactttgggaggctgaggcgggcggatcacgaggtcaagaaaccaagaccttcctggccaacatggtgaaaccccatctctaccaaaaatacaaaaaattagccgggcgtggtggcacccgcctgaagtcccagctactctggaggctgaggcaggagaattgcttgaacccagaagtcagaggttgcagtgagccaagatcgcgtcgctacactccagcctggcgacagagcaagactccatctcaaacaaacaaacaaacaaacaaaaaaccaacttcagttccaccactctaaacatagcaaggggaaacttcagttccaccactctaaacatagcaaggggaaacagtaatgcctataaaactttgcttaaaggccaggcacagtggcttatgcctgtaatcccagcactttggg

SEQ ID NO: 1235 - DNA, 520 bp, Homo sapiens
tttcaggggaatttccttatgttaatgtatctcttgtaatgtggctgaatgtacaaggaaatttggatttcctctacataaatttgataagaacattctatagctaacctgtgtttttgacaagttctataattaagctaattataataatagcttgatggtaatcactacaataatagctaacatttattgagtacttgctgtgtgtcagcactgtgttaaattactttaattgtgctctttcagggaaattaagagacttgcagaatgaaagagccacagcaggataaacaattgccagtctcccttgttggggactggctgactttataaagcaaacaaggcattctgtagtcactccaatgagtgggagattagaatgagaacggcattagaaagcacagatcacatctggtcatgagaaagcttctcaagacctgtgtcctctggaaggctaatttatttccatttattaaatgcagcttttctttctggagaggcagtgcaaggaatctctata

SEQ ID NO: 1236 - DNA, 545 bp, Homo sapiens
gtttattttgtagtatcttctacacataatattatacatataattacatgtaatttttaaaacatactaatgaaagaaatacctatatacctaaaatctaagaaaattactagaacattaccaacataattgaatctctacttttataattctcttcatccttaccttccaatgtctatctaacatatttttagtaaacatttccttgtttttatatggttttaaatatatgtatttttaaacaacatatgttttatttggtgaaaatagtattacaatttgtgtatgtatatgtatgagttttttttaatttaaaacttacttataacgttttttactttgttggtgtaatactggctcattttttcactagcatatattacactgtgtgaatacaccataacttatttgtacactatcttgacaatggattatctgggttgtttctaacatttttgctattttaaacaatactgtaagatatcccaggctcagccatgataatattttgtgcttggagattgaattaatctgctgagaatttg

SEQ ID NO: 1237 - DNA, 483 bp, Homo sapiens
ctgggcttttttctcctgtcaaagcagggctatgttttaaagaagagcagagcctaatgtgtactatagtttgagatgactttcctcagaaaccagaaaacaggagcaatataatatagatggttgtgcaatggaaagtcctccagcatgcaacacatacacacacacacacacacacgcatgcgtgcacacacacacacacacacacacacacacacacacacatcagtgtataccacacaccacacctaacttactaaatttttttaaagcagttccttagtaaatcatctggatagaatagaacagaattcatggatttgaacacacaagtcaataacattagtaaaatgacgtgctttctataacaaagacaacttttctatttatattggtggtgacattggtgttataacataagagaaaattctgcggacagcgttgtagagaagactgtctcatggctgggatatatacaatttt

SEQ ID NO: 1238 - DNA, 575 bp, Homo sapiens
ggttaacttccgtgattaaagaattaaagaattaaaagatttcccaaagaatggatacgaagcaggctaatgcacattaatccttggcaattcaagactctgaaattttattgtcaagcttacatataaattccaaatattggaaacaaggaagtgtaaaaagaaaaatcacatattaacagtgtggtgtagagattatattctctttttgcaatctcttttttttttgagacagagttttgctcttgttgcccaggctggagcgcagttgcgcaatctcagctcactgcaacctcggcctctggggttcaagcgattcttctgcctcagcctcctgagtagctgggattacaggcatgtgccaccatgcctggctaattttgtatttttagtaaagacagcattttgccatactggccaggctggtctcgaactcttgacctcaggtgatcacctgcctcggcctcccaaagtgctgggattacaggcgtaagccactgtgcccagcctctttcattaatgttttatacttttcagcatacagatcttgcacatactttgttagatttatacct

SEQ ID NO: 1239 - DNA, 506 bp, Homo sapiens
aaataattttctcctcccccaagtagtagtgtttctggttgctactttttaatggctgcatagttcaagcaagtgtaccgtaattttacttagcaagtatttgttaaacatttaggttgcttctagttaccttttaaattgtcgctattattgtgctgtggtgaccatattcatgcatatggcttttctcgtattttggtatataacctgataatttgtcagtttaaatattagagattcaaacatgttttttaaattattaatctacctaattacttccaagagattaacagttgctatcatggaagtggtgagaatatttggagttttggatttgactttattttacagataaccagacttgtagctagaggtgacactaagcacctgactcctcatctaatgttttgttttcgtcttttatataaggccgtgattttagtgcttttgaccgaccagttggtatgctgaagaatgctttgtgggccttcgtgaacccttatttt

SEQ ID NO: 1240 - DNA, 573 bp, Homo sapiens
aaacaaaacaaaacaacaaacaaaaaaagtcagatcataattttagatcaaagaaacttttcatttctttttccataaaaactttggtaaatatcaatcctcctgttccctgtaattaagtgggaaaataaattagtaaatgtttccaaacataagcattaaaaacaataaatatgcctctatggtaaagttttccttttggaggggaagaagtaacaaaatctaaattaaattaaagtggcgttctgggaaccaaagtgataccatagctcaataaactaatgtaattagataatgtaagatttttttttttctagactccaagtttaaaacatgggctttgtaaggactcaggatcattgttggaatccaattcagtattccagcttctcaaattcacaggcagaactctgcctttcaggtatcgcttgtctgattattgtgccagtctctctccatctcaaaatggttttgtgtaacttccaagtgcagcagccccctttggaaactgacaagtgttcattttaaaatggagtcatcaaatgcacgcagccttcaggaggctcctttttt

SEQ ID NO: 1241 - DNA, 541 bp, Homo sapiens
tggaggttgcagtgagctgagatcatgccactgcactccaacctgggtgacagagcaagactctatctcaaaaaataataataataccagacaagaaagtagattctatcaaagaaatagtaaaagtagttatatttatatctatacttgctacgactacctaacgaactctttgacagcagagactacaaaaaaactttatatgttgttcctagcagagtttgccccataataggatttaagaaaccttagtagtgaaggcggcaggtaagcaggcaaacaaatgtgccactggaatttactcagaagatatctgagataaaactcactgttacaggggagaataccagattaaactgccagatttcgaatatatttactgaatatcttaatgtgataaaagtgtactgggaagatctagtacaggacaagtgatcgattagaacaaaaaggtttggtagaatacacagtaaaatgaaatcagcttgagggccgggtgcagtggctcatgcctgtaatccctgcacttcgggaggctgag

SEQ ID NO: 1242 - DNA, 518 bp, Homo sapiens
ttatactcaaaagctgagttaactaattcaggaatataagtgatcaggtgtttccaggatttagtaacttagtatgttatatctagtaggtgtaactgtggcctacagtaggcactgttatattttttaaaatgaactcatccgagtctgttgcactggatgttctgtggtgaaaattatttgggttagagagcttttggcaacacaaaccatgctacttctgagtctctgaatgttgggattggaagtgtatggaaaacttgagtaagttcctggctctgccactaaatagatgagtgaacttgaacaacttatttaaactctctgagctcctgtttacttatctgtaaaatgaagatatttagagttaaaaacctaggatatttagacttaaatttagacttaaattggctgctgctttggtttcttgaaagaaatactttggtccttggcctccaaagcctctgcttagctgctttaccgattctatgtggtatgtcctcctttttaggttcttt

SEQ ID NO: 1243 - DNA, 621 bp, Homo sapiens
tatgaaacatgtcacaaatattaaggagctttctttgcccaggaaatgacattcatctacaaactacaatacagatttctaactatgcatacacttgttaagaaattggttaattcaaataaaatgtagaatcatcattgatgtaatgaatcattaacaagctctggacaaaagaattccttgactacccgaggggcacagaccgctgataaaatctagaaagtgatttggtacgatcaggtgtatttttactctacagagattcattgatcggtccaaattttaaaacaggctacataataaatgcagttttaatgatctacatttcctcatattcacaggcacttttaatatatttaaatccaaactggaataaatccaaaaaggaatcataaatgcagctgaaatcagccccatgttctgccaagcagtaaagaccactttaaaacaattccaactatccatccatatttctagagccaaaaaaaagctccacatttgtataacttatataataatcacagcaaagattactcatctatatgtgtaataagaaatcactacatggctatagtttcacttatttcttcagatgtggctgcctattacaatccatccact

SEQ ID NO: 1244 - DNA, 587 bp, Homo sapiens
aaatatttgttgaggaactaattataaagactattccaggtgctttagggttcagccacaacctattataagtaatacctattataagtgggtgcttgtaatagatattaccatattatctaagcactcactttaatactcattgttctgggctccacctgatattatgatatgaatctttttagctatactctgatccagaagatcacatgattagcatcaatttctaaggacagtaataaacttgatagttctgagcaaatacatacactacagaatagtcattcaacaaatatttattgcctgcctactatgtagtctatatatacctatatgtaacacacatgcaaagaacagtctagttagtagtttagaaggaaggaattggatgttaaacgggcctgggttcaagcactggtgccaccctttaaaagcagtgaaacattgaacaagtcttagattccttatcagtaaaatgggaataaaagtacctatctggaagaattgttgtgaggattacatacaataacactgatgaaatactagcccgggacctggcataattgccaatttaaaaagagcaactt

SEQ ID NO: 1245 - DNA, 281 bp, Homo sapiens
ccgggtacaagctattctcctgtctcagcctcctgagtagctgggattacaggtgcccaccaccatgcctggctcatttttgtgtttttagtaagcccaaagtgctgggactacaggcgtgtgccaccgcgcccagcgaattcttcattttataatctgtctcttccactgtgagggttgaaaggaacactgaatataacaggtgagttaattaaggggttaatgccaggaagagtcacgaaagttcaaagattctttaaaaaaacttgtctttttagggc

SEQ ID NO: 1246 - DNA, 569 bp, Homo sapiens
agggtctttccagtggccccagtggtcttcgttcctggctgatcctacaagccaatatcccccaccaatgtatccctcccagccttctcctcaccccacgggagggaagaagcatggccccctctgagaagctgatgcaagttatgagcaatttctgcaggaaaatacaacgtcagaaagttcacagaccccctggaggccattcccggcctccctggggtccaagggaaaaggaggactgatccagacagagggagcctaaatcacccagatctggatccctagctgggccctgaaccagagcgggagaggctacaaagaatgtcaaggagaaacgcaggcaacagtgtagcatcaaggttggtgcagtgggtgagagtgtagcatcaaggttggtgcggtgggtgagagtgtagcatcaaggttggtgcggtgggtgagagtgtagcatcaaggttggtgcggtgggtgagagtgtagcatcaaggttggtgcggtgggtgagagtgtagcatcaaggttggtgcggtgggtgagagtgtagcatcaaggtcaacacagggggtagc

SEQ ID NO: 1247 - DNA, 544 bp, Homo sapiens
gcatgtagtgcttttatatttagaaaaatgaaaatatataaagactatttcagttgaaatggacagaaatacaactctagttcaagccaaaaagagagagaaattgaagggagtagggagagagaaaaagaattatttcctggatgaatttggcttcaggcccagatggaaattaatcgtcaggtctctctctttccccctcccccaatatctcagctccgcttcctctgtgtggtgacctcattttcttccattttccaggctgccagacaagtaggttgcccacagctctaggcttacatcatctgctttaggaatcccagtggaaagagactgctctctcccaatgtctctatatcaattccagacaagaattcttagaggtgctgcttggcccacatgtccacccctaaactaatcacagtctctggggaatagagtattaagattgggcaggcttgtgacttatgcccacatctgtcccagagaagaagatatggcactggaagagagaactcacacctgcaatctcagcactttggga

SEQ ID NO: 1248 - DNA, 479 bp, Homo sapiens
gctggagggggtcactgggacttatacagcacagtgggtctgataggtatccacacgaatgtattaactatttttttgttttttgttttctattttttgagatggagtctcactctgtcaccagactgcagtgcagtggcatgatcttagctcactgcaacctctacctcctgggttcaagcaattctccggcctcagcttcctgagtagctgggattacaggcttgcgtcaccacgcccagctaatttttgtatttttagtagagacgggttttcaccatgttggctaggatggtctctatctcttgaccttgtttgtgatccacccacctcggcctcccaaagtactgggattacagacgtgaaccaccgcgccccggccgaatgtattaacttttagcatattgtattagttgggaatgttcactttgttgctataacaaaaacaaaaatatcaatgagtaataagaggtttattt

SEQ ID NO: 1249 - DNA, 360 bp, Homo sapiens
catggactgaaataacagaactgaagaaatgtattctgcaaggaaacatttaggctgagataaatcatttttaaaagatgaaagagtagggagaaaaaaaatagaggcatgaccattcgagtgtgagcttaagtcaaggaagaaaaggaaaggctttaagtatactaaggcacactgagaaacacagacctgtaacagacttttgttcataggatatccctgataatactgattagtatttacaaccagttttttaaaaaatacttctgtagtaaacagtttaattttaagtcatccaattagttaaaaatgatcatctactactacctgaaagctgtaacattcttactacagagagag

SEQ ID NO: 1250 - DNA, 469 bp, Homo sapiens
caatggtgagataccagcccctagaggagaagactccaaagtgcctctgtccctcacccatcaggtgccctgaacaagattaaagctattgcccggaagaccaaagaggtgattgaccgggtccgcaagttctttcggtcaatcatggatggtgtgaaacacataggtaagcacattagcatgtctatcccggggactcaaaatgcacccagtcctggccgggtgcggtggctcatgcctgtaatcccagcactttgcgaggccgaggtgggagaatcacttgagcccaggagtttgagaccagccttggcaacatggcgagaccctgtctctataaaaaataaaaaaatagaaaataaataaaactagccagatgtaatgacacatgtctgtagtcccagctactggggaggctatggtggaaggatctcttgaacccaggggtttgaggctgcagtgagctatgatc

SEQ ID NO: 1251 - DNA, 518 bp, Homo sapiens
atcctggaggctggagggggtcactgggacttatacagcacagtgggtctgataggtatccacacgaatgtattaactatttttttgttttttgttttctattttttgagatggagtctcactctgtcaccagactgcagtgcagtggcatgatcttagctcactgcaacctctacctcctgggttcaagcaattctccggcctcagcttcctgagtagctgggattacaggcttgcgtcaccacgcccagctaatttttgtatttttagtagagacgggttttcaccatgttggctaggatggtctctatctcttgaccttgtttgtgatccacccacctcggcctcccaaagtactgggattacagacgtgaaccaccgcgccccggccgaatgtattaacttttagcatattgtattagttgggaatgttcactttgttgctataacaaaaacaaaaatatcaatgagtaataagaggtttatttccaagtgccctaatagcatgggtgtgagca

SEQ ID NO: 1252 - DNA, 544 bp, Homo sapiens
tagcataccttccaaaaattccttttaagtaaaaaacagtcaaggaacaaaagtgtttaattgatttttttttttaatagagatgaagtctcgctttgttgcccaggctggtcttgaactcttggcctcaaatgagcctacctcagaggatctcaaaatgctgaaagtacaagagtgagctaccaggcccagccaaaagtgtttaagattaaaacataaaggaaaaaataacacattatagcatacaaagtagattttaatggaagtgactttctattgtcatagctttgtatacaagtctggtgtgaaaaaatagttatcttgctgattcataactaaaggtaagaaagaagctggcaaaacatagcacaggtataccacatcaaaaaagagagtggtagtcaacatggcacttgaaggaagtaaaaaatatatacttcaattctaaactccaagactttgccttgaccaacaaaccatttttctctataaggctttcctccttggtttttctcaactctcactccctgcagatacacacata

SEQ ID NO: 1253 - DNA, 620 bp, Homo sapiens
taccttttcatgactgattcaaaatcagtcattaatgtgaggcattgagcaaagctctcagtttttctggcctgtcagtcctcctagatgaatctctacatcactgcaaaggagttgacagtggcttcactagcactcacacatgccctacaagtctgcgctggggtaggtagggggatggtgtccccaggtgttttgtcttatcccttgagggatggaagatacagccagtgggaaacttgggcatagcaacactagacctcctgttccggagtggagagtctaccctatcagtggaggttgtatgtgcattttctaatccagtcctcacaattataagaaaaacatatttctctcataaacttataagaactgccaattaaactgaagcttaaattattggccatatttagaccaggcatggtggcttatgcctataattccagaactttgagaggctgaggtgggaggaccactttctcttataattgtgaggacagaatgatataatgcacttaaagttttattatccactgcctgtacctagtattccttctattaatgctagtcattttttataaatgaattttcatattttcatgaattattcttaaacttta

SEQ ID NO: 1254 - DNA, 583 bp, Homo sapiens
aaatcatatagaaaaattatatgaaaaacataaatttattttagaaaggaatatcagaaaacaatttaaatttaaaactttgtgtatgttgtgtgccaggcactgttttaagagctttacacatattgactcattattagttgtcataacaccatgagctagatattattatcattctcattttatagacaagaaaactcaggctcaaaaaggttaaataattttcccaagtctacacagctaagaaagcatggccagcatttgagtttaggcaatctggctctggaagttatgctcttaaacattccccatcttctcatacctccatgtctctgattatgttgttccctctgcttggaaggctctttggctcttccacctgattaactcttatttgtccttcaaaattggttcaatcctcactgtttcagaagtgtttcctgacaacaccactccatccaggtgagtgagagaccccttgtcactatatttctggaatacctgcccatatctctattaacaacatgtacgctgaatacagtatgtttccccaactagattgaattatttgcaatgactattt

SEQ ID NO: 1255 - DNA, 460 bp, Homo sapiens
ttgatacatttgaccctgggccttctgttaaccagtgctccctatatctacagcaatttatttgtctttaattcatacaggcaatattcttagcattgttttgtggtttaaagttagtctttaacacttttcaaatagcactcagaagagtagctttctacaagagagctcatggcctgtctgacttcctaaatataataactcatagatactagagttaatgcctatttgattttttactctattcttttacactatgtgtgtgaattagcttttgttgttggtggtggtggtggttgcttctttttttaacactcaaaaataatagtttttggttaaaattttaatttcaacgttttggggacagttgggaaaatctgatataataatcttacttccatggtgttatcattaggatcaaaagaaattataggctgggcgtggtggctcatgcctgtaa

SEQ ID NO: 1256 - DNA, 601 bp, Homo sapiens
tttagtatagaaaatacactaaacggtaaatatacaaatgttaaggatagttgtcctttggcagtgggatgatggatgattttaacttatattttcttttgcttatctgttttttcataatttattcaaatgactttttaaaaattagaaaataaaattattcacgcaaattatttgttaaactttatttcattttgttttgaaattaaaattacaagtaatgtatttgcatcttactttgcaaaatattagtgtctattttaacattgcttaatcagcaattaaatgatttctctaatattttgtttttcttagttgttgacagagataaacaattgaaaaaaatattgctttttcctcagccattagtcaatagttgtcatctactttaacacttgaatttttactgtagctgctagaaatggacacactgagtggtttggataaatatatatacctttgtcatgaacccactggcaaaagtattattaagtgccaaagagaacagaagtcaggtacagagaaaacctaaagagataaacaccctatatgttatttctatttaagggacaaaagtagttatatgtttgttcagtgacta

SEQ ID NO: 1257 - DNA, 636 bp, Homo sapiens
atatgatgcatataacacaaaaatacatgttttgcaactgtttatgttgtcagtaaggtttctggtcaatagcaggttattagtagtaaagcttttagggagtcaaaatttatacacagatttttgactacaaggttggcgcctctaacccctgcattgttcaagggtcaactgtagttggacatcagaaagtgagtatgaagggattatccttttatgttttttaaaccttcttggtaactgggcatatggatcaaataatttgtgtatataaatgtatatatatatacacacacacatatatacacatacatatatatatatgttttacatttagctttgttaatcactctcttggctttatttcagcagagctcaaacatagctcaatatagtgtaaaagatcattctttctgactttgtaataaaatctctgtcctgcagttattcgtaaaacaagaaattaagatttttcaaaataaatagaaataaaggagattaaatgtaacagatatcaattgtgtagagacaaagaaagtgtatgaatggatcattgatcagcgacaagatgagaaagaacatccagaacgtacttagagggcacagaaaacacacacacacacacacacacacaca

SEQ ID NO: 1258 - DNA, 629 bp, Homo sapiens
ttcaactgaagtctttgaccaaaggagcacaggtgacccctctctccttcattttctgacctgtagagttttggactcaatgactgattctctcttctagctccaaaatactgggctaaactccatggaactcccttctgagttaaaaatagtagacatgcctgcactatcaacatttttagaaaattatgaaatgcttagagtcactttgtaattgagtctaaggtttgaatgcatagagttcaaatgcaataactgtgttgataacacaacaaagacatgtacatttttatgtacctttatgttctatgcattagtccttcattccttggcatgaggagaagtgatggtttttcagtgaccttccagaactctaaggctgtgtttcaccaggcctcagggtttctacagtttgaacaaatttctgatattgtacccatgcacacctgagtctaagaactctgctgtaaggtgacattaaacagcacccgaagttatatttgagatgattattcagtaatcattgtacagttgattttcgtagtagggattcaaacactgaatagagtgcagttttaattaaatctgcatttctcagttgaaactttattttagcagtacatgatttc

SEQ ID NO: 1259 - DNA, 584 bp, Homo sapiens
ctaaagaagtcatatagtccaacctaacatatccaacagaaatataatacaagttacatatgtaatttaaaattttctagtgtctacatgtaaaaacaggtgaaatttattttaataatatattttatttaacaccatatattcaaaatatttatattccaacatgtaatcagtataaaaattattttctcataccaagtcttcaaaatccatgtgtgttttacatttatagcatatctcaatgtggatgctaaattttcaatggtcatagtaaaatgtattcctaccaaaacgataaatttgtcttaatagaaaaatgttacactacttctgtttctaaatttaaaacaattagaacttcagttccttagtcatattagccacatttgaagtccacagttgccacacgtggccggtggctagaccgcacaggtcccacctgatacgtagcaaggtgcccaattaatgtttattgaaatgaatgattgcataatctgcccaaattccacagattactggctgccactttcatacttttccttaaataattacttgagaggaattgaatatgggagaggaaaatg

SEQ ID NO: 1260 - DNA, 636 bp, Homo sapiens
tattatcagccaataacttacctgttaaccttctttgttgagtctttttaaattttccactaccagaggaaatctcaagcaaactttgtaagatttccaatcactttcaggtattaattaagtagtcttctcttcagataggaatgaaaggaagaaagagagagagacagaaagagagagagagagagagagaaggagggagggaggaacagaaagagaaagcaagcaagcaaaaagcaaatctggttctttttatagggtgacttcctcatatgacagcctccttcttgcctctctctcagcacagggctgacttctgcttggaagcctgcagcagagaaagaggagatcttgttagttttctctctctttttgcttcacttccttcccaacccattagctgctattttgggtccctaaagaaggagcaggggcaggacaagagggttaacaatgaaggataaagtctttcttaagaaggcagctacagtggggctggtgtcccttgagtgagtgccctgtcgcctgctgcctctctagcaacccttctgtagcttcttcagagactcatccacctgctgttccctgatgctatgatgcctctggccaactacttataatgcccctactgctcct

SEQ ID NO: 1261 - DNA, 577 bp, Homo sapiens
gtatcaggaattcacccatcaatagtgtcttatgcttttgccattgcttatagcgggcttgttgcccaggtgcagattactccttgtgggtgagggacgtcaggaagaaaagaagaaatagggcaaagactaaggaagacagtgtatcacacaggacaggttaagttatgctgcgctgattaaacatgcacacacacacacacacatacacacacacatacacacacgcacacacacaatcccaatggcttaaaacagtaaatgtccatttctgactcacactacattgaccttcctggatataggattttggctctgtttgcattatcaacatctgcattcagggatacagactgaaggcacagccactgtttatgacaatgcatttcaccattaccatgagaaaggagaacatgttgttgcatgctctagctattaatgctcccattgagagtgacaggtgtcagccatgctcacaggtcattaaccaaataataatcacataatcacacctaatgagcaaggaagtacaatcctaactatgtacccagaagggaagagttgaacacttattatt

SEQ ID NO: 1262 - DNA, 557 bp, Homo sapiens
tggggtgcatgtgcagaatgtgcaggtttgttacataagtatacacgtgctatggtggtttgctgcacccatcaacccatcatctacattagttgtttcttttaatgctattcctcgcctagctctccacctcccgacaggccccggtgtgtgatgttcccctccttgtgtccacgtcagaaccagtatcttaaatatgatctatcttagcataaaatcccttcttggtaagttaagtaagcatcaatcaggctctaagagagagtctatgaagtgctcagctttactgctggggccttcatacatccaggagcatttgttcatttacttcaaagttcatgactgggttctagtgggatgcgtttgcttgaacccagacctttaagtgaaggggcattgctggggaggaattcaattttttgggtatctaactttttttccttggaatcactggtcatttaaaatgagcatttattcttgcaagccgttaggatttagttttcctccaacgtgggcacttcagcataggtttcgggtgctactgtgacatacagctc

SEQ ID NO: 1263 - DNA, 286 bp, Homo sapiens
attccctcacacccggccccactctccttttttctcttcccacctacttggtgaataaaacgataaaagcatatttggaaaataatggtgacatgtcaaaaataatttgtttcttatttatctcctctcagacactgccaataagaaaccattgccactccatccccagcccactctgctgtaagttggaagcagatgatttgctctcctgaaagagcagcaaatccgttgcctgggtgatatctcattactaaggcaaccaatttggcgcatcagtgtgaatccc

SEQ ID NO: 1264 - DNA, 487 bp, Homo sapiens
tgtttactatctgtccctttatagaaaaggtttcccactccctgcagtaaacgaaacagaaattggaatggtgagagaaggggatgcagtgtagagcctctggcaggcctttaggagaaattatggcccagattcaggggtttatagtgaggccaggctctttctttctaggaataagagctgtttgtgggttcaatatcaaagaaattatctcacccagactgatctggatattggcactattaagtgccccaactgttaacctcaaagaccattaaagttgctcctaacttgtttccaagatccaaactccttaaagtagggcatgaagtgaaagtgtgacctaaactgtctatgataatatgggtgttacctaagttagcaaattataaagttgggcttgtgcatcagcatttcactgaaacctggagagaaagtgtatgaagacaaagaaaggctgaaagaaactagcacacaaacagaaagc

SEQ ID NO: 1265 - DNA, 480 bp, Homo sapiens
gggttcaagggattctcctgcctcagcctcccaggtagctgggattacaggtgcccaccaccatgcctgactaatttttgtatttttagtagagacgaggtttcaccttgttggtcaggctggtcttgaactcctgacctcaggtgatctgcccacctcagcctcccaaagtgctgggattacaggcgtgagccaccacgcccagctcctattcaccacctttctacccatccatccaccgatccaaccaccctcactccctccctacctcatgcactcattcactcagaggcaggctaacccttatgctcatctttattcctccccctgcctgctttgtgcccttgagccaggccctccctgtctctggcccttgctttcctcctctgcacagtgaggctgatgagagcacagacctccaagttttgcacagtggcctcaggccacacacagttgttatttgttgtgacagacagcaaa

SEQ ID NO: 1266 - DNA, 342 bp, Homo sapiens
tgtcctcctcagtagaatgtaagcttcttgaagtcaaaggcatattatggtatgtacttaccatgaatagtagatgagccaatggtatttccaaggtcacatgtgtataactcaagcttgcagctttttatagtgttttacttgttttcaaccatatcagaagagctttgatttcacatttttacattggcttcttccttctcaactgaggctttctttccactaaaagggacctgctaaataaagaaagaattcatggtctcattataattctccacatgccagaggaccttgtggtgaggtcctggatcacatgtgatgcttttgacctttactgactct

SEQ ID NO: 1267 - DNA, 498 bp, Homo sapiens
acatgattagataatttctccactattccaacatgatataacctagtcttaattgtagatcccagtattaaagtcgttttttaattaacagaaataacgtgctgctgattcattttcttagttgtacctactgtgtgatcttttgacttttttctcataaacgacttccatctttaatcattacttacgttatatttacagagttgctcttatttaggggcccgaagtggcactaattctagtaaactttcttccatttacagctgactatttttcagtatttacgataactttcagcattagaaaagaaaccccaaaagacgagcagggtgtggtggctcacgcctgtaatctcagcactctgggaggccgagacaggcagatcacttgaggtcaggagtttgagaccagtgtggccaacatggcaaaaccctgtctctactaaaaatacaaaaattagccaggcatggtggggcttgcctttaatcctagctacct

SEQ ID NO: 1268 - DNA, 537 bp, Homo sapiens
aatcagaaaagtaattacaacgccttttaaaaagagcaaatttaaaaataaaaagattaaagtcttcttttcaaaaataagattgatttaacaaaggggtcgcaggtagtaaaatactttatcctgccgagaggtagaataccgatgcattacagatagtagaagaaaaacagacattcaaatgcagtcatgcagtgcatggtaatattttggtcaacaatggatcacatatatgatgtcagttccataacattaaaatggagttgaaaatttcctatccctagtgatggcagcgccattgtaatgtagcacaatgcattattcacttgtttgtggtgatgctggtctaaacaaacctactgtgctggcagtcatttaaaagtatagcacataccattatgtacagtacatactatttgataatgttaatatacgactatgttactgggttatgtatttactataatgtactttttaattgttattttagcgtgtactccttctatgtattaaaaaatagttaactataaaacaacc

SEQ ID NO: 1269 - DNA, 552 bp, Homo sapiens
ggagctttctgatgcattcccatcatagacttcactgtgccttaaggatctgtatctctttccccctgaattgagcaggactgggaagtagcggagcgttgattccttttatcatctaaggctaacccaaacagagctaaagcaggttactgcagaaagcacaacaaaaaaaacaacaaattgacctggacttttctttctttcttttttaatacataatccatgatgctcatctttctagaggcaattaataacatatgtgacgggtctttcttttattagcacatgcttttgctacaagattatgtcttgctgtgcatcccacaatcatcaactaatatatgtggcattaacttgttcctttttaatgaggcactaaaaagtctcaatagattcaacagattttttttttaaaaaaaaacaaagaacaaattgaaaacctcagctcactgacattgtaacaatttaattttaaatatgtagaaaataaaccataattatgtccaaatagcttaatttactcaactagattcacattttaagttaacaaag

SEQ ID NO: 1270 - DNA, 515 bp, Homo sapiens
acccatccacccatctactcatccatccatccaaccatccatccatccatccacccatccacccattcatccatccatccacccaaccaaccatccaccttttcatctatccacccacttgtccacccacccattcctccattcatcattcaaccctctcttcctaccatcactgtttcatccatgaagatttataaagaagtgtaacatttggagtttataaaccagtatttgagacctaattctaattctttccgcctgtgcaatcttggacaaatagttaaaattatctacattttttgtttattctttggtaaaatgggagagagtgcttatctttacattatgaaactactatgagaagtagatgattcagctggttgggtgtggtggctcatgcctgtaatcccagcaatttgggaggccaaggcgggctgatcacctgaggccaggagttcaagaccagcctggcaaacatagtgaaacaccgtctctactaaaaaaaaatacaaaaa

SEQ ID NO: 1271 - DNA, 557 bp, Homo sapiens
ctttgtaacactggcagtatttaataagcgcttaccagaaacccaggtcctttattttatttaaggccatatatcatgtttaatagttagtcataatcaaggggaatgattatctagaaaagatatgaaaaatatacattccagagcagcttaaagtcacattttttaaaagtccaaaataaactcttgagggctgtggatagctttaagtatgatataatttatgaaatgagataaatctcaactgttaaaatatttagtggaactgagaataatgagtccagataggattagtttaattagtttactgaaatggagtcttcatagtggctaagtgtgatatattggcttttgtcacttgaaataaaaaagaggtaattagtccctactcaaatatattgttttctcagaataggttgaattttattttaggcagtaatccagaaccaacttccaactgatttataaatgctacaagaaaagatcatccttcagacaacttaagaatccaatcgcgtaaaagcaggattctcaaagggagaaacatttcatccccc

SEQ ID NO: 1272 - DNA, 347 bp, Homo sapiens
acactttccatttccctaagactcctcttttggtaccctgacaaacctagggctatagtaaccttgctctgcatgtacttcatgactatatctgtgtctggagcacagtgctaggaagaatgaaaaaaaaaaagctttcattaataatctaaagaacggcctgacaactcttggtactatagctccaccagagaggatggttcccctttctcagtattttggcttatgtgaattcttgatgttaccactaaggtcgggggttggggcagcagaaaataaaacaacaggaaaggggtggtgagcatttggcatattctgagtgttgagttcctttctcattcctcaaa

SEQ ID NO: 1273 - DNA, 522 bp, Homo sapiens
tgctgttcaatttttaaatttcagcaaccaattaagaataactatagaccaaataaaacctgaactatagactgaatctagcggagaagaggaaacacaataagagagactattccattcatttcatgttcaaataagtcaacaggcattaagtcatttttaaaactattgctgttttagcagtaaaatgacagagctaggtcatcttctttattgcactgatagttccaccagtcacgattcttagtgttgtctggttgacatactccaaagtctttctaagaaatttacatacaattttgtgagtttcttttagttgtattgtcttatctcaaacaagtccccctacccaactttttgctatgttactattattttaaattcaaattttattttagatacaggggatacatatgccataatcctaaataaattaacacaggaataggaaaccaaataccacatgttcccacatagaagtgggagctaaacatttagcacacatggatatcagcatgctat

SEQ ID NO: 1274 - DNA, 590 bp, Homo sapiens
agacagcccagatatctattaccgtaagtctgcaaatatattgtacctagagttaaaatgcaatctcatgctctataagctttattgcatataaggaaaatgcctaagaaaaggccagtacctgaagaaagagctatgggaagggtcagctaaccagaaggcacctttttttctgacacagtgagaccatctaagaactgcaatgaatcagggaaatgaggctctaaggtaaaaccaggaaggccaggcagtctgcaaataaggggaagggaactatcagcatgaagctgtgattcagacaccagacaaacagtcagaaagtagagaatacagggcaagccaaggtcaagacagtgatgcatgaaaagccaggtccaggtcagaagaacagatctaacagtgagacattggagacttggtctcacccattcatcagaacctaacacagactacctccaacagagagctttggaattcttcccactgaagacaactgagacaacccgaaaagtggcccaaaaatgtaactgatatgtaggcagctatctcaatcacatgctgatccttcccacatttatggcaaataccat

SEQ ID NO: 1275 - DNA, 577 bp, Homo sapiens
tcaccgtgttagccaggatggtctcgatctcctgacctcgtgatccgcctgcctcagcctcccaaagtgctcagattacaggcatgagccaccacacctggcctccctcatgtcatttttatccagttgtgaaaatttatttctcacatgttagtctgctggttaattaaaatgacttttattggatggtgatactttgatcgtacctgataatactatcttaaatgaaataaaaatatttattgatagttcttgctttttattgaatattaagtgcagtacagctcacacattaagtcaaataaactagtgattggataacaccttaaagggaggtacttaaatatttgctaccgaacgtcttgttaatttattgatattttcaaatggagtctctttcaatatcaatcaattgaaatgtgattttacttaacaaattttgattacataagatacggatatgtttctagtctctgatcacagcctcatgttgttggagtcttgctgttctgcagcccatcatctgctgaactaacatgccctgttagaaaatagttaatgcttatgggactcaact

SEQ ID NO: 1276 - DNA, 641 bp, Homo sapiens
gtattaaaaattaatggttgggctggtggcaggggttaacaccggtaatcccagcactttgggaaaccaaggcagggggatcacgaggtcaggagattgagaccatcctggccaacatggtgaaaccccatctctactaaaaatacaaaaattagctgggcgtggtggcaggtgcctgtaatcccagctgctcgggaggctgagacagtgagacaggagtatcgattgaaccagggagttggaggttgcagtgagccaagatcacaccactacactccagcctgatgacagagcgagactccacctcaaaaaaaaattaataataatcaaaatgggtttattgaagtaataaaaatatattttagcattagaaactctagattaaggaagaaaaatcacatgctcttttaaatatatttacataaataattgaataaaatccaacatgccatatccactttcacacagaatggagagtagacaactagaaaagccagataaaagactaaactcctctgtttaacagaatcagagagctgttgaatgtctaagtttaaatactaagagctagagtcttgagagagttgtaccacagaaatcaactgatatctgaactcacttttcccctggaagcattactt

SEQ ID NO: 1277 - DNA, 474 bp, Homo sapiens
tagaattttagtcatgaacaagagacatataatcttattacatttacacagtttgcagtagactttgaaattcatattagcattcctgaagggaagatagttctgtgactgagaaccgtgtagctagaagagaaatttcttactaccagttttacaaatgactgcattcaccaatttaaaaaaaattaccccacccacccatcttcacatccaacatcaattttatcaatgaaatatctactgggatgtgggtgcagtggaggtacaagaaagggttactctgttctttttatcatagcttattatgttaaaaatgggaggctggcacaggacagcatctctgaatctgcagttagttcatactgtgttactaaagcatcactgccttaggttgctcatctcttttaatatttatttttaatttatcatcaatttaaaaaagtgtgcacattctacctgaagcaaccataaaag

SEQ ID NO: 1278 - DNA, 580 bp, Homo sapiens
acatatcccagtcattcccaattaaatgtactcccagctctactgctctttagctggctcccaaaatgcccatgcacactaccatactccctggcaagggtgtgtgtgtgtgtgtgtgtgtgtgtttgaaggaggaaaagttggagtggaaggaagcaatcttaatggttgtggtaatagatttcattttctcaggatttagaaaaacataagtctatgtgaaaacattgctagggctcctcctatgttctcggaagaggcccttacaagtgtgggtcccaaggcttaagcttcattatctttacagtaaatttgtctttgctaacacgtattgaggattcatcaaattctccagagaaagggtatggcactttccctcaccaacaactccatctctcaggctcacattcagttgtcgtaagtcaagcatatgctttaaaatcctctgtttttaattggtgctgtcttaattctcccattagcaccatcatccccctcactacaaaagcctttcattttttttaagtgagcatttgcaaatattaggctgactctggacataaagtagagttaacatcca

SEQ ID NO: 1279 - DNA, 498 bp, Homo sapiens
tcttccatccacagttttcatgtagtttagggcaaattggaccccagagcaaaggcaagaagaatgttttgagaggcaatgatgagacgtctgtgtggaattcgagataacttctttttgttcataggaaaagttataaaaactaatttctagaaaatcagttgtaatgtcctcatttaatttctaatttttgttgagtcttctttttttcttaatctagctaaagtcttgtccacttagtttatctttctgaataacaaacttttggttttgttcattttctctactgttttatattttcacttcatttatccctgctgtaatcttcattatttcctaccatttgctagctttgaatttagtttgttcttctttttctagtttcttatggcataaagttaggtttttgagttgagatttttcttcttttataatgtaagcctttatagctataaatttctctcttagtgctgctttcttttcatcttgtaaattttg

SEQ ID NO: 1280 - DNA, 523 bp, Homo sapiens
agcaaaggcgatcttaggctgcagcaagaggagtgaatcttgcactgctcaggccaactgtatctggagctctgccttcagttctgggaaacatttgaggaggaacatggagaaactggaacacatttggagcatttcaaccaggagggtgaagagattaaaaagtattcaaatgaaggacagctaaagatgccaagtctccttcccttggagaagggaagcctcagagatacataaatgctgggtttcaacattttggagaattgtcttatggatgaggacccaagtgccaaggcagaaatggtacagagaaccagggctcagttcagtgttcccatacccttcaaacatgtgtctggttaggggaagggctgccccggatgaagttagctccctaaccccacccctaaagttagaaatgtgaaagcagtcgatgggtaacctttggccagggatagggtggagggaatgggtggccatcacagcaatgatggacacacctgagatggaatgcagaaagagt

SEQ ID NO: 1281 - DNA, 443 bp, Homo sapiens
gtttcaccttgttggtcaggctggtctcaaactcctgacctcgtgatccgcccccctcggcctcccaaagtgctgggattacaggcgtgagccacagcgcctggcctgtaccatgcattttctttgcgttctgctattccaaaagaaatattaaatattggcattttaaaacataaaataattagaattgaaattttaaaaactcttgtttaatctgtagcatcaacttaaatgaaccatcagtggtgtgcatcatcctttgatatgactgagtctgctttttgtatccagatatcaattatttatttgtttttgcttctacctaacttcttccttctctaacaattcaagactcacaattttctaggattcaaagaacattgttttttgagtgctttagaatcatttactcattcattctttcacttactaaaaaacattta

SEQ ID NO: 1282 - DNA, 525 bp, Homo sapiens
tatttgtacttagcagaaacgattgccttttgtagaggagtatcttcccaatgtagttaaatttgatttttattttccattcaaatatttagaaatttcaacttataccttacaatattaaacatttttgtagtcagtcaccacaaatctcagagaggtatttgcaagatttgtagtttgcttctattactttcggaatgtttagataattttataaaattgggacactgtcttcctagttgtttgcttaatctgcaggaaagtggattgaactctccaggggtcagtttagggtatgtggtctcttgacagatcgggaagccagatataccttgtaagaggtacttctaaagccataacaatttggtcttcaaaataaatttaaagtgctatgaaagagaataaaggaaaagtcttgaattgtatatgtaaagatagtgcatctctgtacgtgtttgcatgcatacaaatctacccaacaacattgtggacaatttcggtgctacccaagtacactagctcttt

SEQ ID NO: 1283 - DNA, 564 bp, Homo sapiens
taacatctttcctgatggaaaattttgaggttcaaaaatttttactttataaattacaaatgatccatcatagcttcaaaaatccccacattgtaatcacctttttagtatatatacttgaggattgatttattcagtcataaccacacattcagagacaatgacaaggccctgggctaggccattatgaattaagtctctcttcttggaacgactaacttgtgaccttacggtgcacaatactcaaacttatatctcagaaaaagctgccatgtcactgagcttcagagtaattaatgaagaggagacacagcagatgttaaattcccaaatgccaggagtcttttgcaatgaggacttcttgaagacaatgaccacacctcatactgtgctggataagagccttacacatagagcaggatgaataaaattgtgttcaatttaagcgtgatgcattcaattcaagtctatctgtacttttgtatttagaccaggaaaaaagataacccataaggctaagaatagaaatagtggttaaaatgtaatgaatgcatgccatgtctc

SEQ ID NO: 1284 - DNA, 478 bp, Homo sapiens
aacctagtgtgtaaacgtggttaatctccggcttctgtttaagcaatggcccatcttcctggaaacatccctgctctctgagccctgggatcttggaatagaaccacttgccggaagtggccattgctgctccaccactgtagaaaaatctcctgcccaggtgcccaggcttctctgttttatcagctgctgcaagattctccatcacctccccaagcagacccagcaggaatccaaccattgcaagcctatcacttttcaacaacgtggacacttacatggtaagactagatccacgttatgctggagtgaggagaggctcagtaaagcttcctatctcccagagaagctatgtgctgagaactgacccagccagttgtcctggacagtaagtgaatcaatcggtagaagcctctgctatgcgcctgggctctgtgttcagtactgtagtttatacgaaagaagccaagaaagatgt

SEQ ID NO: 1285 - DNA, 365 bp, Homo sapiens
cctgctcacctccccactgcttccctaactccaggtgcagcagctgcaaggcggccactgccaccagggacagcaagggggacacagtgagagcagagtggggagagttgggagtgggcaggtgacaaggaagctaagggaagggaggtgtgtaatggggaaaggtggctcacacctgtaatcatagcactttgggaggccgaggcagggggatcacttgaggtcaggagttcaagaccagcctggccaacatggtgaaacccccatctctaccaaaaatacaagattagctgggcatggtggcacatgcctgttaatctcagctactggggaggctgaggcaggagaatcgcttgaacccggga

SEQ ID NO: 1286 - DNA, 452 bp, Homo sapiens
acaagcaaccacaaaatctcagagtcacaaacatttatatttcactgggcacctgtaggttggctgtgatttagctcatctaagctgggctcagctgggctgggttccaggctctgcagtaggtccagtgtatacagcacccttgatgtaagtaactccatcttagaaaaatacttcaacttacttttcaaaaggcatcaagccagctgggctcagatgttctcctaatcaacagagataacacccaaaaagataagggcataaccttttactatcagtcctcagcagaggactccagggccataaaatgagcagaacatcaccagctaggaatggccttcttgacagactctgtcttgctgtcactcattattagcacctggcatctgctgctgaaggctctgcccacattaaggactgttcttgccagacattgatgactgtcggggtca

SEQ ID NO: 1287 - DNA, 489 bp, Homo sapiens
gtcatttatgagactcaactggctttgtctgctcagggcttcttcaggcctggtcttcactttaacacaactataagtgaatatagctataattctttaagactaaattcaaaaatataaataaagtgaataaattttttaggaaaatatagattaccaaatctaactgaagaagaggaagaaaatgtgaatataccaataatcatggacaaaattgaaaatatattccaagaattactcagcccagatggttttacaggcgagactatagactgtcagaaatagatgaattttatacaatttaaaattctagggcatagcaagagacggaattcctcaagtgctgttagtaagttagcaaaactttgatactaacacatggttttaccataaagtttcataaaaccgaaggtaaacatcacttgctaatatattaatagatataaaaagaccaaataaaacattaaaaaatatgagtatatatatcat

SEQ ID NO: 1288 - DNA, 457 bp, Homo sapiens
ggcagggcatggtggctctcgcctgtaatcccagcacttggggaagccgaggctggtctcaaactcctgggctccagcgatcctctcacctccgcctcccaaagtgttaaaattacaggtgtgagccactgctcccagccagtataaatgtttgtgtcagttttcagccccctgttccatgcccccccataccatgcgcacgcacacacacacggacttagattctccccatttgagcagctttcctccagctgtttgggcgagtgtgcagtgctgccatataaatgtgctcaataaagcccatggtgatgactcatctcggcactatctgagctccactttccccatccagagtcccgagtttctgcattaaacgtggtcgtcataacccagttctgtccggcaggaagcccttgctacagacctgggtccagtgtgtctcctctggacagttggg

SEQ ID NO: 1289 - DNA, 582 bp, Homo sapiens
aaaatattaggcttaaaattcctttgcatatccttattcctgtgattcctgacgaatgatgttttacagagttcagaaattctgaaaataaacagtggttgaaagtacacagcaaatgggacgttaacgcatgacatcatctcaagaagctcatcctcaaagactgaaagtcagattttaagcctttaaaaataaatgaatttacttggattcaaatcaaaccacagtaaaaaataaactttattttaggaaatacctttttaaatgttctaagcatagccacttaactttttaaaaatagtattagcagagagaacattttttttatatccaattaaggtatgactcattgttcacttggaaaagtgcggattttgaactattcccttttaaaatcattgtctacatttttccatcttaacatagaaatcatttcaaccagatataaaaagataaacatgcagaatatgtctcagactttcaaaaccatatttttttctgagaatgatatatttttagttcaggtttctttcaaatgcatacagaagcaacctgtagattcttattatgaatatcgaaaag

SEQ ID NO: 1290 - DNA, 477 bp, Homo sapiens
taatcccagcactttgggaggccaaggcgggcggatcacgaggtcaggagattgagaccatcctgcctaacacggtgaaaccccgtctctactaaaaaaatacaaaacattagcctgacgcggtggcgggtgcctgtagtcccagctactcggggggctgaggcaggagaatggcgtgaacccaggaggaggagcttgcagtgagccgagatagcgccagcgcactccggcctgggcgaaagagtgagactccgtctcaaaaaaacacaaacaagaaaagaagctagttagctctgtcataactgccagtgattcatagtcccacatgtttcagagcaggcaggttgtacagaaagccaactaaggatgatcaaaaactttcagatgatcttgactgttcagttgaggtttgaaattaaaaatctatatgagcacctgactgtataattatgtaattttttttttccagtaatataa

SEQ ID NO: 1291 - DNA, 627 bp, Homo sapiens
gttctatctgatggcgaactttggttctttcttgaatagtatgctagttgacaggttgtggtactggagaaattccttcatctatggctgaagagttatgaaacaaattgctataataattataacattttttaaagtttatgaaaacttctaaacagatgttgcctaaagagcaaaataaaataaaaattaatgtaaataaagaagaacagttgtagacaaatactctagggcattaggtaatagcacataaaatctataattttaaactactttttacttataaaaatggcaattttgtatggctcaactaaatagtaaaacctcaggataaacctgcttatcatattggcgtgtatattaaaatgctaccaatggcatgaacccttattaatatattaaaaatgcaacaaaaacaaaaaaattgacaaatgggacttaatcaaactaaataacttctgcatagcaaaagaaacaatcaacagagtaaacagacaacctacagaatggcagaaaatatttgcaaactatgtatctgacaaagagctaatatccagaatctataaggagcttaaacaaatatacaagtaaaccccatgtaaccccattaaaaagcaggcaaaggcc

SEQ ID NO: 1292 - DNA, 479 bp, Homo sapiens
agagaatcggcctgaagctccctggagctccctggagggttccaccccccttgctccagctcacccagagttctacgattcaaaacagctggaaatgtgtgccctgctctccccaacaagaaaacagaacagaacatggctgtttctgccaagcgaattctgaataagctgcattccatttcattaaaacaattacctgagctccagccaagaattacataaagcttcctcccagcatcaccccctcccccataaaacacacatcatgctgctttcaaataggcagagtgaagctctgagccctcgctagaagacctcatagtcctcgccaagtggccagcctcggcatctctgcacgctgacatagatgacatgaggctgaaagaagaccttggcatgaagccctcccctcatgagagcctgctggctgcccgaaatgtttctagtaggcaccagggccctcacctctgcctcagagc

SEQ ID NO: 1293 - DNA, 603 bp, Homo sapiens
gggctgctttcttacctcatcattgataggcacacttgcactaagccttacaatacctctgtccataatagctgacatgtgtatgcaaaaggtaaggaaactatttattattcatagatattttaggtgtgttattaaaacaaacctaatgaaagttgagatgtgattaaattataaggatacaaacataaataatacttgatgctttctctcccaaggtgctttactacatagaaatatagaaagtaccgaagaaatagataatttccatttttagcttttccatttttttccctaaatttctaagttaagggcatcatcttcatatgtagttctccagtttttgagctgattctgttccagatgttctttggtaagtcacattttatcatacaagcattttagtttctgcgataaaccctatcacaggctccttaacactgtgctgaatgagcagcacaggaatcatgctgtttgcagtaaaagttagccatctctctctggactcagcagagtgggtatcccatcccttttctctgaaggcctagtatggatgtggggattcttgtgataaatattggcaatgctaacaccacagaaaag

SEQ ID NO: 1294 - DNA, 603 bp, Homo sapiens
tctggcctgaggacactatacacacagagcgcagtctatgtggaggccagaaagtggaggtcaaacacatatgtctacttattatttgaatttatttcttattcttcctatttttttaaattttgtagagatagggtctcgtcgcattgccaagggtggtctctaacctctgggctcaagcagtcctcccacctagacctcccaaagttctgggattgcaggagtgagcgactgcacctgaccacagttttctttgttagcagtcaaaaaagacgaagaaagaacgtgttcagctgtaattcctaggaaaaaatatgttcgggccgggcacagtggctcacgcctgcaatcccagcactttgggaggctgaggggggcagatcaccaggtcaggagatcaagaccatcctggctaacacggtgagatcccgtctttactaaaaatacaaaaaaaaattagccaggcgtggtggcgggcgcctgtagtcccggctactcgggaggctgaggcaggggaatcgcttgaacccgggagccggaggttgcagtgagccaagattgcgccactgcactccagcctgggcgacagagcgagactccgtc

SEQ ID NO: 1295 - DNA, 623 bp, Homo sapiens
gatatagaaaggggtgcagtggtttaatattagagactagaaaagcagacaatctaccttaaaatctaatgaacatatttattttaatgcattagtacaatgtatgaatggtatcttaaaatgacttttatttaaagcttccataaaggaatatattaagagtctggaatatacccatgattatctggaaacagctggttccgtttcaccatcgtttcaagtgaagccccagttttgtgcttttctgccagaaataacgtcagcccagaagccctgaatcccaacagcactgaactgccggagttccacccagtgtgggcacgtaagtggcttcctcaacccacagaaagatgtgttgctaagaccgtaaggtgaccttttaacttcttcagagatagtttcagtcatgcatatctttaaactgctacatctcacccttggttaagccattttttagaaaattatgagatctaatgttgtcacctagtctgaaatactgtaatactgtggcaaagtcctacaacaggcagtcattaataacaggtagaaagaaaagaccgaggagaatggctagtaagacatggaagtaagtgattaaaaaaataaaattaatcttgacatct

SEQ ID NO: 1296 - DNA, 586 bp, Homo sapiens
gacaagcttccctgatagacaacacttcacacaagtttccataccttgttattcagaaaattaagtgcatcctatgtgactccacaaggagaatattctggggagtttgtatctgatttcccttgttcattttgctttctaccttttcagtctaccacatcttagccatgaatgtgactacctgctgaaccccatgaatccttctatccaatcgttgaacctgggagagctctgacaaaggctagcatgggaaaatacgttgtcttcctcattaacagacccttcttagttatatctcactttctaagttcctgccttccacttcctaggagagaaaaaactacacagcattacctgaacatcatcccagggtaatcacagaacagccatctccgcaaaagaaggaaaaatgaactgtgtaatgttgcaatatttttaactgcaaataattttgcatacaaggcttacctacaattgaccatttttgcactaaatgcttttttaaagtaacaagctaatatcttcttaatataataatatacatgtccaacaaaatttaacttgttctgctatcatgaaaagagga

SEQ ID NO: 1297 - DNA, 497 bp, Homo sapiens
ttaaaccgaatcatattgtttcatttcacaacttgggctagtgagaatatgattactgtttaagaaattcttctctgtgaaattgttccctaactcagttatcaccaccatcactatcctagtcatcttgtctagaagtgtagaagttatcttcgatcaatcttgattctatgactccaagaattagaagtatctaagataggcggtatctgaagggagagtaggctgctattaagtgactcaaatccaagtcttccgtctgctaagccacattctttccattatgctgtactagctcttcctcaataacttaaatctaaagcttttagagctagcagagtcagtatctcatttaatcttggtaatgaccctgagatgtaagctgaggcagacctaattatttctaacatacaggacactgggtatctaaaggataaaattctttgttcaaagatgttatatctaatgcctagtaatatctataagacataactatt

SEQ ID NO: 1298 - DNA, 598 bp, Homo sapiens
  misc_feature 335: n = A,T,C or G
aaagcaagcatcttcctatttgccttcaaataaaacaggtttagggattatctgctcttttcacatacttaaacacaccttgagtttctttttatagactttcctttctcctgacactgtgaaatcccagtgctgtttcttatttgaatgttttatcatctgacacctaataataaaaagtcattggcacaataacagagtttcatctttcttaaagtttaaaaatgtttagaaattatttcatttcttaaataaaaattgcagtagaattaagtatttccctagagagataaagattgaaatttgaaagtaaattgctactaactttgagccanattcattttttttaatgtagtgctaaaaccaaggagtatcatataaaacaggcccaaggcacgttttgtacctaagctaaaaattacttttgtggcctttgacatatcaaggaactttgctattataatgcaagcataagatgaaatttattcaaccttttgaaagtttaaacataaaaagtttaacataagaaactaaaaagtttaaacataaaaaacagttattgtctgtgcaaggactcaaattctttcactctcttctt

SEQ ID NO: 1299 - DNA, 612 bp, Homo sapiens
actccacgtggctggggaggcctcacaatcacggccgaaggcgaaagccacgtcttacatggcggcaggcaagagagaatgagagccaaatgaaaggggaaaccccttataaaatcatcagatctcatgagacttattcacaaccaagagaacaagggggaaaccatccctataattcaattatctcccactgtgtccctcccacaacacgtgggaattatgggagctacaattcaagataagatttgagttgggacacagccaaaccatatcatctgtatatttattttttgactacttgttttttttctctaccatttggagtccccagagcacaatctcttagagcctcttgtctgatggtttctttttccagtctactctattcaccattgcttatcagagaatggtcacccatgtatttttaagctttagagactggttgtataactaaataaattgtgggattttaagacattatgtgagatactgttatccacaccatgtgtcacaatagaattattttatccttcatttttaaataatgcccaactcattttctcccttcaatgcccataatttgtcttggatgttttccctacttcaattaaa

SEQ ID NO: 1300 - DNA, 591 bp, Homo sapiens
agatcggagacagttcctttaatgctagagatttaaaaaattgcattcaatgctgactacggaaaatattaagggcaatatttgtgatttgctccactacacatttattttcaggaaataaataaagagggtaacctgtcttgttagtaaagagatgcatcgtttgaagcattatgcacttcaagaagaaaacctaattcttaaatcaatgcttaaagtatatttggacaacaataggttttattcatgaacagtaaaacaagctgttaaagtgcatctgataaatataccaggctaaaaggaatcaaatatagtgggaaggagaatgctatttgaacagaataaaaatgcaatggcttatatgactgacaaaagctaaaaagaggctgggcatggtggcttacgcctgtaatcccagcagtttgggaggccgaggcaggtggatcacctgaggtcgggagttcgagaccagcctgaccaacacggagaaaccctgtctctactaaaaatacaaaattagccagggcgtggtggcacacgcctgtaatcccagctactcggaaggctaaggcaggagactcgcttgaaccc

SEQ ID NO: 1301 - DNA, 654 bp, Homo sapiens
tttattactgtccctgtctctcaataactgcgtgacttaacaagttttttaaacatttttgagcctcattttttatgtatgttaataacatttgttctacagagttttgttttaaataatagatgcaacaacaatgacaaagtacttttaagctatataaagttaggattttcagaattattttgatatcaaaatgttactgtgacacaattcaaatttcagattaagaaaattaataactgtctcacctgaattatatggaacaatacacaagtattctatatacacacaagatagaaagctaagaataagaagtaaacaaaaaccatcttgtatttatagaatactttctttaaaacaacctataactcagccagaatttactggttacaaggcatatagttatctataaatacaaagaagccctcaaggaaggaaatactgaatcatatttttatgctgctactcatgcatttttattaagaatttcaaaaccaacacttgaaatgaaactgagacattgtaaaacatcggttttacaactctccatttctgcctactccaagtccaagaaacgtttgataaattttgaagatactatatcctgagttatttctaattgctcatttactcatttatgcattcatccaatca

SEQ ID NO: 1302 - DNA, 627 bp, Homo sapiens
gaatcgcttgaacctgggaagtggaggttgcagtgagccaagatcacaccattgcagtccagcctgggcaacaagagcaaaactgtctctcaaaaataataaataaataataaacatagaaggtgtatctatgcaatgagcaactctgctggccactttgtctattctgtcagcccactaacaatgatacacatcaaccattctcacatccatcctctgcttctagaatgtcagctgggctgaagagcatcttgcactggtttaccaacaagcccacatgaacattccatttcaggctcaagtaccacaggatattatacatagatgctgagactttaaattagatttctgtacctgagggaatttgtaaagagtctttgtttcttaacttcttgtatttgacttcattttaagctccccccctggaagaagggccttggagaatgaaagttgtgtctctttgggaggcacacaaagcttttcctatgtggtaattgattaaagaatggaagaatgcaggcttttaggaatataaggcttgggaaactgagtcctgctgggtagagagatgatctcaagatatcaggaaagggccgggcgcggtggcttacgcctgtaatcccagca

SEQ ID NO: 1303 - DNA, 86 bp, Homo sapiens
agcacctgtcctcgttttgccagaatgcaggatgcagatgccagtccccactcccacacccaaggcagactctgctaacagactat

SEQ ID NO: 1304 - DNA, 649 bp, Homo sapiens
cattccttgtattctggggagagggacctcctgtgctagatgctggattgattgtgaatgggaaagtgttcacatgtatagaatgccatccctggtgggcgtaagataggaatcttcactgagaaaaaaccaacaacaactaagagttaagtagtagggaagcctcactgaggtgccatttaaagtcagcaatcttgagagagtacagtgtcacactgcagtagagaaacagctcagaatccatcagtgacagcaagctgtactggtagtttattatattctttgtgattactttctcatttgttgtcctttagcataaagactttcagaagttctacactgctttaactgcagagagcgtcaaagaaaagagtgtccacaatggaagagaaagaagaagaggtgaagttagggtatgtctgaggtcaagcacagtattgtggaaaggatgtgagaatccccccaggaggggaaccctcagaattcaagttccagcctcacagtctagtcatctacacctgcaagattctccttcctaaaaccagaggtttgaagttcttctcttaagggcaacagtattctcttttagttgttcccactaactcttaagaatggggcaacaaaattacctacttattaaaaagagaat

SEQ ID NO: 1305 - DNA, 653 bp, Homo sapiens
gtagctagtacaatagtgatgcaaattaaacttcataagctcataggccacctgaccattagatgccatacaagatttttgggtgtggtggtaatttcagtttcttcttagaagttaaattctcataatattggaatcttgaaaataaacatatatttttaaatttttctgtgtcaatcttcagcaagatacacagctatttaatataaagaacaactttctcattttggtagatagacacaaaagtatattcagatgctggagaggatgtggggaaataggaacgctttttcactgttggtgggagtgtaaattagttcaaccattgcggaagacattgtgctaattcctcaaggatctagaaccagaaataccatttgacccagcaatctcattactgggtatatacccaaagaattataaatcattccactataaagacacatgcacacatatgtttattgcagtgctgttcacaatagcaaagacttggaaccaacccaaatgcccatcaatggtaaactggataaagaaaatgtggcacatatacaccatggaatactatgcagccataaaaaatatgagttcatgtcctttgcagagacatggatgaagctagaaaccatcattctcagcaaactaacacaagaaca

SEQ ID NO: 1306 - DNA, 457 bp, Homo sapiens
aaattagataataaagtgcttttagtaacatgcctggcacagttcattgattcaaacattgaaaaaaaatttttttaattatcatagtagtgtgtacctttggaaaaattagaacttaacagataaggctaagtttgagccttccagtcctttccttctctgcatactcttcaggggtaactgggatcatgttctgggagcatgtcattccaagtctgtttctttgcttttataaacacatctgtttccatagaaatgctgtagtgtttgcagagggggcggggcgtggtatcatcctggatttgttattctgcgcttttttgcttgacctaccttggatggctctctagtcgttacagcttttaccttttaactattactcagtattcttactaaggtaagactatgctgatgatgtttatatttctctagtaaaaggctgggcatggtggctcac

SEQ ID NO: 1307 - DNA, 639 bp, Homo sapiens
cgacagaaggggctcttcaggccacacgcagcctcttaagcccaggggcagcctgggaacccagccactggctcagggccgccgcggctgaggcccccgctgtgactccaaggccggtgaggtgagaaaagcgcctcctgtggtagtcccaaatcactcagagtcctctccctgcaggcagcccggccctcccacctagaatagcagcccaggaaaccgatctgtccacccgccctccctcttggcagatctcagaggggcccagggtttgagttacactcaggggagggagtgggcagcagttacatcatctcaggactctccaggtcactggcagccactctgggtcccaggccagctcaggggaaagccagggacaggagaaggtagggccacagtatagggtggaggccaaccttgggcagtcaacacccaacagatggcacccccaggctatttgggggagggtcccctgtcactccttaaatttggtcacaagtcttccttccagtttctgccccaaagtgtcctgtgcccttgtcagggcccagctcccacctcgagcctgtctccccatggcccctcctctgtcctttgagggatctaacccacagacctgaccacgagccccaagtcctc

SEQ ID NO: 1308 - DNA, 649 bp, Homo sapiens
actcaaaccagggctgtctggatggttgcaaaggccgtactattttctgcagaacaccaactatgggaaagcatgttccggagatggtcccagagattgctggattcaatacaggaaatgttttattgagtgtggggaacctgaaagggaccagcttttccagtccagggcccccttaggccagtcccccaattcatccatcaaatacacatgtccagtttctgcagcattggaaaatgcctgggaaattatttcacaaagaatttcaagcaaacagaaaaggtatgtgggataatatcatgttccactgccaagcttaagaatgaatgttacggctgggtgtggtggctcatgcctgtaatcccagcactttgagaggctgaggcgggtgggtcacttgagatcaggagttggagaccatcctggccaacatggtgaaaccgcatctctgctaaaaatacaaaaattagccctggtgtggtggctcacacctgtaatcccagcactttaggaggctgaagcgggtggatcacctgagatcaagagttcgagaccagcctgaccaacatgatgaaaacttgtctctactaaatacagaaaaattagcttgggcgtggtggcgcatgcctataatcccagctacttggga

SEQ ID NO: 1309 - DNA, 545 bp, Homo sapiens
taaccaaatcacccaaaataaaaaagatttttaagtagaaaactaatactacacagcagaacttctctatatgttcaaaatcctaacgtttttcttaaggagttgggatggagtcaacaagtcccaaatcagtcattctatattaaaaagagacaaaagggagaatctaatgagcttaaactcagagccacagagataatgagagcaagagaccttggtctgtaagcagcaactccctttgtttcacattgaataccctcatctagttattagttcttcctccagtaatctgtcaaacaatgagggactagaattttaaaaggtgcattgccacagaaagcaagccagtgctgagctagtgaaaaggtgagataatgagattgacattgctgacactggaaatctggtaatataaagattagtttacaatcaaattactctcatattcacttatagccaaataagtaaagaggccacctgtaaagtattttccccacgagcaatggtatggagactgttatataaacacatgttttaggcagcaa

SEQ ID NO: 1310 - DNA, 487 bp, Homo sapiens
gctcccgctgagctccagctgtgccagaggcacccgagccctgagagtccgccgccaacgcgcaggtgctagcggccccttcgccctgcagatattcccactctggccactgcccaaaggggctcttatctgaggaatactgctgacttcgtgtacctagttttacagagccatctttctgaagcataaattagattacattattctacagcttaaatccctccatgaacttcccatcacccaagagtggatctgaaacgccttagagtgtcattactttatttccagccttgcaatgtacatacatccatctctgtcccacgccctctgcagggctttttggttccagaacgtgccatgtgcttttctcctttggagctctttgaataggatgcccttcctcccttgtctgcctgtagatagaaaaatcctgtgcattggtgagttggccctgaccaccattttcttagcatgctgaattacttct

SEQ ID NO: 1311 - DNA, 568 bp, Homo sapiens
tttctaagactatgttctctcgtcacgtcatgctacatgtgcccttaataccatggttcaacgttcttcagttctcttactgtcatcatttataattgccttttgagagatctcatccattcttaagatttgaatgtccacttctgcatggatggcatgcaacatctccagtactggcattttccatatattgcagtaccactttggaaatgcactgactctttaaaagccacataaatgttcagccattaaattcaaagttattatgtcttaataaaaatgatttcctcccatctcaaatcattattttctttcaactatcaatacaataacctgttacacaaatccgtacgttgtttatggtattttgaaaccatatttttatcttcattcttgtttgtaaaagataatctattattgaattctttcacacatcactctaaactcctttgcatttttctcttatccacttttactttcaagatttttatctaaccgctttatcccctacattgtgattcatacgcagcccctgggaagggaggagtgcctctgcccaaccacgatg

SEQ ID NO: 1312 - DNA, 594 bp, Homo sapiens
actaaattaaaacttcaactgtatttttcaatgacttgcttcttcagttagaagagttttatatttttcacagtgaagctgtaaacgcttacgggcacgtggactctgcgaaacatctcagcacccttgtgtgcatccatcaatgcgatgtcctggggcgtggagacaatcacagcacctagccaaagataaacaaaatactattatcttttaattctctatggagaaattacttccagcattatgttgcttacatacgcaaatagtctattacgttaactatttaggtcattcatatacattttacacacatgaatgagaaagacaagaaaatgtcgactttgttttggcctacctttgaatcctcgcttctaaaatcacaactgggccgggcacggtggctcacacctataatcccagcattttgggaggccgaggtgggcagatcgtttggggtcaggagttcaagaccagcctggctaacatggtgaaaccctgtaactactaaaaatacaaaaattagccgggcatggtgggctcgtgcctgtaatcccagctacttgggaggctgcggcaggagaatcacttgaacct

SEQ ID NO: 1313 - DNA, 493 bp, Homo sapiens
tgaaatatgaatagtagtttattatttcaaacttttaaaagttgggaaaagaggaatttcaaattaaaatctataaagtattggaagaatctatagaaaagagcaactaaagccgggcgcggtggctcacttctgtaatcccagcgctttgggaagccgaggcgggactatcctggccaacatggtgaaaccccgtctctactaaaaatacaaaaattagctgggcatggtggcgcgcctgtagtcccagctactcgggaggctgaggcagaatcgcttgaacccgggaggtggaggttgcagtgagccgagatcgcaccactgcattccagcctgggcgacagagtaagaccccgtctcgaaaaaaaaaaagagcaactaaaatgcttaataaatatctctctttcaaagccctctgatatgattcattacacagatttaaagataacaatgttataaaccgttcaggagagtagttttgaagacttaactt

SEQ ID NO: 1314 - DNA, 614 bp, Homo sapiens
gtacaactgtgcctggctaaatgtatattttataagataaattgataagtaagtttatatccatgattttcaagagaaagcagaaacaaatgtatcattgaagaatttagataaaatcctataatcttaaattggaatttgaaacatcattatgtgttatgatttttttcccctcttaaaaatcacatttcctaattctatttactaaaaagacctagaaagtcacaatccagtggtccagactgtgatctctaaatgctatttcatactaaaaggaacaagggctccttggagaaatgattgactccaggtctgggcaggaaatgaacccgtcaagtctgggacatcttaggagtgtcctccctgccagtgggtaacaagacttcacctccccccaaatctgtcagtaaagcccatgtagggagcctggacttccacgtccatctggtggtaaagaaatgcccctcctcccctctgctggggtggtgtcagctgaggtctagtgggagtcagaacttttgtcattacccagtggtcctgggtagtacggctacccctctatttttccatgcagagtcagtggagtccgtgtggagagtagtaacaaggcactc

SEQ ID NO: 1315 - DNA, 605 bp, Homo sapiens
ctgggaatacaactgttccagcaaaagggcccctgtcttgggaaggcccaggctgaggaggggaggatggcccgaccttaggggacatagtcagagactatgctttcaagcctccatggcctcccttgcacggcagagaagtgggtatagaaagtatggtcagggagcccagtggagacggagctggccagccaggaaggacctaggtattctgggcaggagggtgagaagggctccctcctccaggcctgcccaggccgcctcctgctccaggctccgctagctgccccgggctccgctagctgccctgttccccgcaccaccacgtcccctcacgcctgcggcagggaaacaggagatgctgtggttttgtgacgtctgccctcatgtccccagctggaggccctctgcgggtcagcctgtctgtctctcacccactcctggttgtccctgtctgtaggtgctggctgtgctggacaaagggctgtgccttggctggcagtcctctaggccattggtctgtggctgtctgtctgtggtggtcaacctgcccagggcagacagtgagctatgccagccaggccctggctcccactgctcagctc

SEQ ID NO: 1316 - DNA, 539 bp, Homo sapiens
tttacagacagctctgaaaagtgaatgagtgtttgataattttacttaccagagctcactgaagcagatacttgtgaagccactggggggtgaatcatctacaaatcaacaggttaattttggagatctgagagatatttttggctcactgcagaaaagtaaccatcactaaaaacaacatctacttacatgatttctttaaatgaagcttattcattcccccaaatcccttgcatctaacaaataactagtgtctttctgaatggtagattatattcaggcataataataataaagtgcttgctcttccatgtgctttatgcacagttaagccatcatattcttgcaacaactgtatcaagtacgcactaatgtcagcgatagcaatggatgcagcatttcacatcaaggaaaccaaggcaaagagagattaagcagcttgtctgaatccaccatttacaaagtggcagagctggattgggcagactctgccccatagtctgcctgagttcagtgcttcagcttgccacactgagcgc

SEQ ID NO: 1317 - DNA, 612 bp, Homo sapiens
tctacaatgagcatatttattgatggttctgttcttaagcaactggtgacatttattactagagcattcttagcacttcagaatggtgctttcttttatttggtaaaattaccaattttacttgtattttaccgttttaaatgttcctaatgctgttggtgattaatttctcagtatttagaaatgttaatatacatagcaattgtcagagtatatatacttcattatatataggcagcttgtgatgtacagagatccagtttacagatttgtcccacctactctcacttcttaccagagcacccaatagcatgagacctgttgtaaaaaagtgtgacacttccaacaaacccgtgggtcacaaaaggggagttgggcagtgtctgtaagaatacatatctgggccgggcactgtggctcacgcctgtaatcccagcaccttgggaggcacgaggcgggtggatcacgaggtcaggagatcaagaccatcctggccaacatggtgaaaccccggctctactaataatacaaaaatcagctggacatggtggcgtatgcctgtaatcctagctactcaggaggctgaggcaggagaatcacctgaaccgggga

SEQ ID NO: 1318 - DNA, 644 bp, Homo sapiens
ttcatcactctccccaaaattttcaaccttcacaaagatccaaaccactctgcagctggtcaataaagccagatgtaatccttctgtggaagtcttggaactatacctcaatgcccctttgaggtttttgggttgttttttaattatttttttcttttgtagagacagggtctcactatgttgcccaggcttgtctcgaattcctgggctcaagcaatctgaccgcctcagcctccccaagtgctgggattacaggtgtgagccattgcacctggctggttttatttttgtttgagacagggtctcactctgttgcccaggctggagtgcaacggcgtgatcatagctcactgcaatatcaaactcctgggctcaagcgatcctcctgcctcagcttcctatgttaccaggtggaccacagatgtgcaccaccacgcctggctaattttttgattattttgtttcccaggctggtctcaaactcctgggctcaagcaatcctcctgtcttggcctctcaaagtgctgggattataggcatgagccactgcacccagctcaaggttttttcttgtttgtttgattggcttttacatagatggggtctcaccatgttgcccaggctggtcttgaactcctgggctc

SEQ ID NO: 1319 - DNA, 518 bp, Homo sapiens
gacagaagggatttggcaataataatacaaaggaggtacatggaaacaaagctatatcgtgcaaaggaagttactaggagatagtaatagtgaatccacaggaaaactgagcatctttaaaagccataaaattataggaagtaataagtataacaatatattgttgggttttaacatctgtagatgtaatatatataacaacaagactacaaaaaggacaaaaaggaaaagagttgtataggagcaatctttttgtatctcactggtattaagttggcacaaatctgaagttgatcttgataagtcaaaataagtatatggtaaaccccagagcaaacactaaggaaaaactaaaacagtgtcatgggaaaacataaagaaatcaaaatgctacattaggaaatatgcacttaatataagagaaagtagtgaagcaagaatataaggacagtggtgacaaaaaaaaacccataaacccacagaaccatataaaacatatgggaaataaaaagtaaact

SEQ ID NO: 1320 - DNA, 575 bp, Homo sapiens
ctctccggactcacacgccctatctttgatcgctcaggtaatggcctggcctgctctctgtggagacagggaatagagttagcacccacgctctgggagccctgacagcccgtttaacaaggtgtccaacatcccatttcctctgcacttcctctcgctttaatccttttatgtgaaacccactcaggagcaagccctgtgaaattgatgcctctctgtacacatggcctggctcgctccctgtttctcacggagcacagacccctcccattccagacactaggaatagccgggcctggcgtggggggagcctggtgccccagagggtcacccccaagctctggagggtggggtgctgatgaggcacctcagaaatggcttagagttgctggccccgggttggggcttcttggagctgcagctcaggactgacacccaggccaccaatggactcccctcctccctagttcactgcccctcctggactagaaagaaagaagggaagctcctggtggctccaaggaaacctgtgaccccatgcctgccccccagacctatcccctccaaaaaaaaaa

SEQ ID NO: 1321 - DNA, 656 bp, Homo sapiens
tggccatgctggtcttcaactcctgatctcaggtgatccacctgcctcagcctcccaaagtgctgagattacaggcattagccactgcatctggtaaagggccccagctctaaccgactgcttcctaagtttttacagcagctgacaggtgatccagaaagttagcaagtgccctgggattcttatgctcatttgataggagaaatgatctgataggaaaaaggacatttgggaagtatcatagggctaacgggaaggaggacaagccagtgagaaccacagctggcttctgtgatctttaaaatgggaacaaccaggactaccttgattgcctaaaagcaaaagccttgaacaaatggcttcttggggttcctttcagctttggaccagagcagagaaatgaggaagattttagcaactggaattttagccccaggaaactcccttagggaaagagatggcagttaaggcagaggaagcaggtatccccatctttcccctaggtgctgagacacatctgaggagttggtgtcttggggccctctagagccccccggggcttcccacccactcagtagccttggcagaagaaaatgtgtcagctgggcttggcagctctcccagcaccagcccaagatgctctgaacagaaataaa

SEQ ID NO: 1322 - DNA, 590 bp, Homo sapiens
taaactgctatgctaggggtcatggtcaaggacacaaagttcatagaaatatttctcacttctacagctggaaaatcaccttacacaaaatcactgagccacagtacttatgttcaaatttgcagcctcttgttctagatgtcccatatgacttcaagctttttttcctatatttaattagaaacctaccttgtccttagtgaatcctctgttcacagactgtttccccaaggcatctgtctgaaatatataagacaagatattaatctacactttactcataagaaaaaaaggtaactaagctaggtgaagtacccaatctcattaaataattttgcatgtgagaactcacttctctccactttttataataattgttctaaaattttaacactattttaaaaattattgttggctgggcgcagtggctcacacctgtaatcccagcactttgggaagccgaggcgagagaatcataaggtcaggagttcgagaccagcctggccaacatggtgaaaccccgtctctactaaaaatacaaaaaattagctgggcatagtggcgggtgcctgtgatcccagatacttggg

SEQ ID NO: 1323 - DNA, 597 bp, Homo sapiens
ggagagccctgtggcactcctgaaaaatctcccctcccagttcacattgacttattaaccaacactcaggatcatgtgaaactctagaactggatctgggtgcctggcaggatgacatggtgtgaggctcaagcagcactgtgggaattcaagcatctgtttatttctgagagaaaaagtgtaaagcaaaataatatcttttaacaaacgtttgtatttgactaaagaggaagcaagcacttaaggtatgaatttgctaattgctcttctgagctgagaatatctgtgttggatattagtcattatccatatttggcacagaataatcccgagggttaaatgacattgttcctacagtgggcacctgaagactggctataaaagcaatcctggccaggggcggtggctcacgcctgtaatcccagcactttgggaggccaacgtgggtggatcatgaggtcaggggtttgagaccagcctggccaacatagtgaaacctcatctctactaaaaatacaaaaaaattagctaggcacggtggcagacacctgtaatcccagctacttgggcggctgaggcaggagaatcacttgaacc

SEQ ID NO: 1324 - DNA, 382 bp, Homo sapiens
ttagtgaacacaatggtaattcacttactctgtatcatagaagaataaggtgtttgatataagtaaatttcaaagttagcctaaaagttatccaaacacctttgctaaaaaaacaaaaacaaaaacaaacaaacaaaaaaagaaacctatgacaattctggtataaatatttctaaatctatgttatagttatattttcctttcttattaaagactgttcttctttccataaataaatctttgttgtacagcatgctttaacagatttaaaaggatgaaaggtgaatcaaaacagtattccaacctcaagtggcttacaattgaaggaggtaggatggataattagacatgtacacagatgattctagtggtaagaatcaca

SEQ ID NO: 1325 - DNA, 594 bp, Homo sapiens
gcatgtgagaaatagatttctaattattgcacagagcaattaaatatccaaacctgtgatgaatcaggcctacgagtggtcttagtatgtgaaatagtagtgtttcctgatggccagaagtacaacatctctattaggaatttagtatcttgtttgttacatgtagaacaaaatcttttatatgtaatataattcattatgtatcagtgaagtcactttagatgcaggagctattcagttttcaggccttgggccatgttcagttgttcaccagaagctctcaaaagaaattcacaatgcctactttcacccaaatgtgtattagatcacccaaatgactaacgagatgttatatttccaccaagaaaaataagtaaaacctggccctgcacggtggctcacacctgtaatgccagcactttgggaggccaaggcaggcagatcacttgaggtcaggagttcgagaccagcctggccatcatggtgaaaccccatctctactgaaaatacaaaaattagcccgggcgtgatgatgcacgtctgtaatcccagctacttgggagaccgaggcaagagaataacttaacccgggag

SEQ ID NO: 1326 - DNA, 596 bp, Homo sapiens
ggactctgcctgctgtttgttcttggtgatgtaactaggtctcttccccgagagaggggtggagatctttccctgttgtggactttggggttgagaacccttagatcccaagcattttaaaattgactcagtagattccaatggctcagtttaaataataattttctttaatagtgtggctcgtttaagacagttggaggagttttgcctattaaaatgatttgatttaatttaagcccagtcttggaattctgaattagggattccaacaataacattgttttgattattctgtaaacaactacaaaaatgttgtcttctcgtgctccttttgactgcagtgcaaaggaatttttttgtgggggactggcccttctttggaagcagcagccaccctgcaaaccttattgtttaatgacctttgtcatcaggaatgccccaggaaacagcttcataattgtttttcttaagcctcaggtgaagtttgtgataacgtcctttcaagttacttttggttagtttcttaagtttactttgtttttaattggaagctccacctttttaactttgtcatgaattgtcagtgctgagttcct

SEQ ID NO: 1327 - DNA, 205 bp, Homo sapiens
aaaaatcatttctcagctggcattgtcttccccagagaatgtgttgttctcaaagctagtgcatcatgttaagtaccatctttttctcaatactgtgctggtcatgaagatggaagaagaggtgagttaaatattctagaagaacacatctgcaaaactatcagcagatttatctgccagaaagggctttcccatgcacctttcc

SEQ ID NO: 1328 - DNA, 536 bp, Homo sapiens
ggagtagtggctcctacctgtaatcccagcaccttgggagtccaagtgggtggatcacctgaggccaggagtttgagaccagcctggccaacatggagaaactctgtctctactaaaattacaaaaattagcttggcatggtggtggatgcctgtaatcccagctacttgggaggctgaggcaagagaatcatttgaatcttggaggcggaggttgcagtgagccaagatcatgccactgcactccagcctgagtgacagagcaagactccatctcaaaaataaaaataaaatagccttcaagactccatatgtataccagcagaaacggactttatagatttacagaaacctgtcagatctgaaatatgcaccctggaaaatggacaagaaaatactcccagaggatagagcaaatatccataaagaacaagggacaacgatgtttcttccaaagagcagaaacaggatttaattaggaaatgcacctgctttcttcagggtggatgaccttcataaagcctgttcagtgggaca

SEQ ID NO: 1329 - DNA, 559 bp, Homo sapiens
gttccttacactctgcttcaggctccagtgcaggggcgtagtgggatatggccaactcgggctgcaaggacgtcacgggtccagatgaggagagttttctgtactttgcctacggcagcaacctgctgacagagaggatccacctccgaaacccctcggcggcgttcttctgtgtggcccgcctgcaggattttaagcttgactttggcaattcccaaggcaaaacaagtcaaacttggcatggagggatagccaccatttttcagagtcctggcgatgaagtgtggggagtagtatggaaaatgaacaaaagcaatttaaattctctggatgagcaagaaggggttaaaagtggaatgtatgttgtaatagaagttaaagttgcaactcaagaaggaaaagaaataacctgtcgaagttatctgatgacaaattacgaaagtgctcccccatccccacagtataaaaagattatttgcatgggtgcaaaagaaaatggtttgccgctggagtatcaagagaagttaaaagcaatagaaccaaaaaaaaaaaaaaaaaa

SEQ ID NO: 1330 - DNA, 646 bp, Homo sapiens
gagagccctaatattgaagaggaagtatcaggtgttttggatgagttgccctgaagtgatatgatgatgttgccagggctgggaacactgtctgctcctggttggagttagctggactggtgattatgactgaacccaggttgtgcggtggctccagcaggagcagctacggaggaggttactcccaagctgctcccctagataactgcagcctttagagagtaaaacttgtctcggcacagagtcaagtaaagaaagccaacatacagtggagcccctggggagcagtccctgctgtcatcagatggacgtgcaaacagattccccaagcctttcggtaactgcaggaaaggaccacatggaggagctgctctgcagcgctgaagccacgttagcgctccacacccagtcctccgagacagcagggagcccgtctgggccagactcttctgaggatgcttgtgaggatgacagtcgcttgcggctggctcaaacagaggcctgccaggatgtggccagaatagagggcattgctgaagacctaaggtgtttctttccagcaagtcaaagacagagccgttgatttcaccaggctgtgaccgtatacctcctgcattgatttctgagggtaaatattcacaggctc

SEQ ID NO: 1331 - DNA, 608 bp, Homo sapiens
actttatgtaattctagcattggatttgtaattcccatcatcttttgacaccacataagtcctgggaatacaagtttgatcatgaagcaaaaactgttatagtgacagacaaacttattgcatgttatcctatacttggctaatacaatattcattctcttataaacgtcccagagctgagaaagaaaattttctgtaaggtaggctaatgatgttttccatacattagagagtgcatttgtccctatctgcatccgcttttacgtgagaaaatttgaaaacccagtgagcacattcaactatctctaacagaaaaattatataactttgacatcttacatacaaattcaaatgtttaatgccaaggcaaatgtatttgaatttcatatgtgaaagagatgaatacattgtgttcacaagttcttttatgtttttaaagaataaagaggctcataaatctatccacataccttaactcttacaaaagggattattggtaaagataaaggcctctattttgtctcagaagtgacacattcatttgattgtaaactattaccaaatgtttcagggtactttctaaacacagggcactaaatgagataaag

SEQ ID NO: 1332 - DNA, 438 bp, Homo sapiens
gccaccatgcccagcctagcttttcaagtttacaaaagtcttgctaggattttgaccggaattgcattgcatctgtaaggtgaaattgagagctgatattttaaaaatattaagtcaggcaattcacgagcctgggctttatcaccatttatttgggtcttgtttaatgtctcacaaaaacactgtataattttccccatgaagatcctccatatgttctgttgggtttactccaagttactttatgcctttgatgttgtgaatggtgtctttccattttcattttcattttgaccatcagaactggcttctgacgaccctaaagtagaatcctcacccctagttaggacccacgggtcccagagccctcacatcctcctctctggcttcccagaagaccagctcgacaggggcctccttgggcacccagcagccatt

SEQ ID NO: 1333 - DNA, 578 bp, Homo sapiens
acttttctaaaattatgattttattttccggtttaaagaaaattataatgcaaacaatttggaattgggagagacaaaaagtaaaataatatcttccaaatgatttccagaaataaacaatagttacaaactaaaacttctgaagcatgcttctgacttaaaaatctctggttctctgtcttcaattctgcattgacagcatcaacagcaccaattgtgggttgaagaccatggtcaccaggctatgggcttgtgggacatggatgctgtaaagacactagagtgcggcatttcttttgagaaattgaaacagaccatctcttatttcttcatcttcagagcatattttatgtttcacttaaataccactttctggcttatcctagtggaagattttccctactgctcacaatagatgagatgggattactgcctgtaatcccagcactttgggaggccaaggtgggtggatcacctgaggtcaggagttggccaggtcagcctggccaacatggtgaaacctcgtctctactaaaaatacaggccaggcacagtggctcatgcctgtaatcctagca

SEQ ID NO: 1334 - DNA, 620 bp, Homo sapiens
ttggccatgcatactttaattcttataaatgaaaaccacatatacaatgtaacccagtgagttaggcatggatatgataaccatgagatcaactaaccctgggaagtggcaggacccgacctatgcaaatgccatgtcttcctgaaaccctgttccagaattgctttcatgtgactctctttctactctttcacactatctctttgtttacatacttcccccaacttacatattcccaaccacaccattttaatctcagtgcatgactgatttacagctttgccactctatgtgagcactgaccccaaaagggacttccaatctgtttagttactagattataatacagaagagaaaaataaacgtaacattgaattcctatacccatattagctttttacaaatcagatcaaccatggcagtgaagactcaccattcatcttttcgttcattaatattataaggaaatctattcctgtgggcagacattaaacatgagagaaattaacacagttgcactaatgcaaacacaatgtcaataatttataatctgggaaaagcaactggtaaaccacattttaattatacaggctcatcgtgacacatcacttatgtgacat

SEQ ID NO: 1335 - DNA, 568 bp, Homo sapiens
gtgtgtgtgtatgtgtgtctgtgtgtagagagaatgcttggtcaagttgcacatggcagctgtctaatgcaaatgaaagccatttaaaaactagtgttagatttcagatagattttgataaactggatacgttgtgagaattactgaatgtatttaaatagtagccagatacctaatgcaggaaattgtacatagaaaatatttgttatatacaagatttagagactatagtagataaaaaactgattaagtaagacactgtttttaaaatgaaaactcactgggttagttattataacatgtgacaaccatgaggtaatctttccatcctgttcagcacaagtcttaacctacctaaggtcactgtttaattttgggctttacaaattgaatagacatttggaaatttaagataatgtttatttatttaagggttaaaaatttaaagcaactgaaatagtctgagagaagaaagatacaggcacttaataatggttattttcaagtgtacctaaaggctagccagagactaaatgaccaagagtattttctttttgtttaggacagc

SEQ ID NO: 1336 - DNA, 657 bp, Homo sapiens
actttgtgaactaaaaactactgaattgtatgttttcaaattgttaaagtcatgaattttatgtcatgtgaatttcagctcaatttttaaaaaaatgttatatgtgctcattgtgaaattttttaaaaatacagttatataaattaaaagtgaacattcctgtcttcttccattactcagaaataaacattatgttttgctctgtgtccttccagatgtttctgtcatataaacacactatgattagatttgaggttttgtaaaatggcatgacaatcataatccgtctgtaatcttctctattcatttaatgtgagcacctttcctcatcagcgcagatgacaaatgctttacattctgtttttaacaactacttaagtttctgtagaatagagaaactaccatttttataaccactgtcctctagatagatgtttagaatgcatacaactttttgctattattaacaatgctgcaactatggccgggcgcggtggctcatgcccgtaatcccagcactttgggagtctgaggcgggcagatcacgaggtcaggagatcgagaccatcctggctaacacggtgaaaccctgtctctactaaaaatacaaaaaattagcccgggcgtggtggcagatacctgtagtcccagctactc

SEQ ID NO: 1337 - DNA, 555 bp, Homo sapiens
ttcttgtcaaaatggagaagatataaaagaaaagagagacttacttgatcatataagaatttaaaacattttgttaaaagaaagattccacaacaaggtcagtagactaatgataggtttggaaatatttgtggcatcagcaacagctgggttttttgtgtttttttgttttgttttgcaaattgacaaaagcaaagacaatgaataacggaaaaaaaggataaagaattcaaataggatatttacatagggcaatgaccaacaagcaaatgaaaatattctcacattaaatcatagtcggggaaatgtaaattaaagttacaatgatatatatatttttatgtccatcagactggcaaaaattgaaatgatcaataacctctattagtggtaggtatatggaaaaatggatgttcatacatgctgagaaaaatttaactgtaaaaactgttttggaaagccatttcgcagcagacataaaaaaactgaagatacatgcaccatttaaccctgcaatctctctccttggcaactctcccagaccaatattacata

SEQ ID NO: 1338 - DNA, 578 bp, Homo sapiens
catctgaactagagattgcctcctggttctcaatgattatcatgtcctttagtcttgctttcttcatcaaaataaacggcctaagcatacaatgatctggaaagtagcaatcagaaatctgtgctcaatagtccctgagaccccactctccatcccgggcttctgaatgtggctccttgtatgactcaaccaccagagaggttatgacattcttcatgcttagttgttcatggtttctgaaaccacggttattcatcattgctgagaaactgaaccagaacaaccacctaagggagatccttttttcaccatcacattgtcaggtgtgatgtcaggacccaatcagccggggtccagttctcctataagtctttggtaacagtatcccagacctacgccagcttgccccactaccattctacctgttttgtttccattctcaggattcagaaatataacatacacatctcctaagaacgactttatatccatacagtagaatattattcagtcttaaaaggaaatgaaatcctggccgggcacggtggcttatgcctataatcccaatactttgggag

SEQ ID NO: 1339 - DNA, 627 bp, Homo sapiens
acagaacttaaagtataatttttttaaaatgtgaatacgatggaagttccctcaccgtatcccaagtagactgattgaatggctacaatgattaatgactgatggaaaatataccttatgtgggatgaagggaaggaagcttgatatttaggcagaagaaaaggcatagggatatgtaatataattcaaaaaaataaagaattaagccataagaaagatgaagaagaatatcttgcttatgttatactttccatagttctccttatgtgtattatcttctcttatacttagagtattcctgagcatgagtccctctttatagaaggcacagagctcttcaaataagaaaaaacaaaacaaaccgtcaattgccatacataacaaaacaatcaaacgttattttcttttcgattgacctaaaagaggtattaaaatatgagtatttttcagattgctaatgtctcatactaccgatgctaagtttgttgaaaagattattatattctttattgttaaatgtaccaaaacaatacaataatgtcagattagatagaaactattctagctatagctacatgatagcctcaaaccattttaaaatgggaaaaaagaacttatgaatttatg

SEQ ID NO: 1340 - DNA, 459 bp, Homo sapiens
gccggcccttcccaggctccccaagcctccctcctgtcctctgccaggcctgcagattcctcagcaggccctgaaagtcagaggaggggctctgatggggaactcagaagccctgccccagccagtgaaggagcccgaggccctgttctcacccaacacccagccctcctggccctaacccagggtccaaggctgtgaatgtaagcatgtgctccctggtgagggcaggcaggcattttggatggtgtgctgggaaaatcatgggccctggacctgggttcaaatcctaactccatcctttttgatctcaagtacctttttacctttttctgtgcctcagtttccttagctttaaaatggcataacagggccgggcacaggagctcacgcctgtaatcccagcactttgggaggcagaggcaggttgatcacctgaggtcaggagtttgagaccagcct

SEQ ID NO: 1341 - DNA, 186 bp, Homo sapiens
tgaatgttgttcatcaaaacaagcagttagagagctgcaatggtgaatagcctccttgtctggagattctaacaaatgggtttggcagtgttggaaactgtaaatcctcagggaacagatgatctggacaatgtagctgattcaaagggacggaagcctcttagcactcatagcactgagtataat

SEQ ID NO: 1342 - DNA, 641 bp, Homo sapiens
gaaatttgataggttaatcattatttcagcaaacaaatctgtgttgtttaaaatacttttccttccatatttcatttctaagcattttccccttgatatgatttatcttttctaaagtgactagatcattcaaagcaaaggaacaatcaaagctaactttgcctcaggctatttgcagtcgatgtcacttgagtttaaaccacaaagacatttcaaaaagaaaacatttctatctcttaatatgtaagccaggagatatgaaatcatggcatccccagagaaacacctttccctgatgtcaacttggcaacttgcatctgcttttctgatgaacaaagaaaagtatttggctatgacagttcaaaaactgtgtatccttaaactttttaccttcaatgctgcattaatgaagcatctctgctcttctaaaggccattaaaggcttttagctctctctcaattgtattagcaagggaaaagtaagatgcattgtgaccctgtatctaagacacatgcctagattccctgttatgtaaagtaaaaaccatcctgaaaatgctttctgttctcaacattttatatctaccttctctgaacagataagcaccacatataatcagcaagatcagcaagttcacagc

SEQ ID NO: 1343 - DNA, 647 bp, Homo sapiens
aggtaacgttacaaggttattgcaggaggcatttattaactaaacaaatttgtgttttcaacacatgtgggtgctctgctctcatgaacggagatgtaagaaagttaagttaggtccacatgataaacatatcaaatgaattaaaatatttctgtgtagagttttcccctaggtataggaacaatttactgtgggctataataaccccaggatgtgtagacagaagacacatggtgtctgtgtatactaaactctaatgaggttacaaaccacttctactctattccagatctattgaggctcctacttatcttggttggtatttgacccagtggacctcagatgcatggagagtcaacatttgtcatgtttttggtatggaaattagataaaattattacaacataaagtgtagcttcataaaaactaagaaaggacaaatacgtttcttcacatttcagacgctcacatctaggtgtgacattactttaatcaattagataataccagttacaattctctgtacctagaagatagtaatggctgacttcattcctctgtttgaatttcaggctttcacttaatcagacctgagtacttagatggtcacagctgggtattagatcctaatatcaaaatctgctatg

SEQ ID NO: 1344 - DNA, 642 bp, Homo sapiens
cctccatttcctctcttcttggataaaatgaggataccgtgtctggcacttaatagatgctagcttctgagatactgaagcaacaatataggaaaatatcgtgattataggcaacaaagccatgatgtgcctaaggccacagatccggggccaggcttctggaatttaagccctgactcctctgcttaatagctgaggcaaactactaactgtgactcagtatccccatttgcaaaatgggagtaataatagtgccaccttcaaagtgcagctatgaggatgggcaagttattattttctagtgtttaggtcagtggttcacacatagtaagtgctatgtgagggtttgttacatcaatgataagtactggctggacgcggtggctcacgcctgtaatcccagcactttgggaggctgcggtgggtggatcacctggaggtcaggagttggagatcagtctgaccaacatggagaaaccccgtctctactaaaaacacaaaaattagctgggcgtggtggcacatgcctgtaatcccggctactcgggaggctgaggcaggataattgcttgaacccgggaggcggaggttgcagtgagctgagatcgcgccactgcactccagcctgggcgacagagcgag

SEQ ID NO: 1345 - DNA, 673 bp, Homo sapiens
ccccaagttgagctgaagattgatgagccccgtgcttccctggagtgcaaactagcccagcacaccaccttcacagtagcagtgctagtggccagtaagtcccataatgcttctgagtgcagaccagccagggccttgctcctatgggatcaccaaccaagctgaggcaccagctcaccagaccctcacttccccagagtgtgaaccagcctctgaaccagtgtctgagccgagcctcaggccaaccatctctaggcttcttccccagagagcaatctagccatgcactccataaccatagaacacagccagagcaagtttgctagccaatcagctctgtgcttccctggagcagggttcagcctggtgtcttgctcccaaggggagcagagctcaagtaggtggaccagtgacacaaatctctgcagtataagccactgaggcacttgcaggaattgctggcttggtaataactgaagaaactgcagagactacaccattgcacacacccagaacaaaaccaacacacacaaaccagctgacatcataagacacatctgcaggcgaaaacctttccctatgaaaaccactctacaaaattggaagaggtgaatggttcaccagatgaataggtgaacaggatgaacaggttcaccagatgaatagggataca

SEQ ID NO: 1346 - DNA, 616 bp, Homo sapiens
gtaaagtaggatcctatggttgttttgaggcttgttagagtcagtataaatagtgctacctgcagaactgaaggacaaaatataccatggaattgaagagagggaccgcatctttgataattcttccaggggttctggagcagctttggcacctgaaggctttggaaccaagggcagaggaccccctgtgctcagtgcaaaaatgagacaaacaaaatcagtctacagaggaatagttccataaatgagaactgacatatagatggagaaattgtgctaagcagtttcttgtgcacaaatttgcggagaaaagggaaacttggaaaaacttcgtaataactaaccattagactgggtcatgagacgtcctctgaaactcccaacagttctccaatacctttccatacacttaaattaattgccaacatctagcagtgacccatacatttctgcctaatatgtcatctgccttccttaccaacctcatctgttacctgctcaactgcactttttctaatacatctttgcctgatgcattgaaagttgtctactcttgctgcacccatgtctttctttgttaatataattcattgtcattattcaattttcatttcac

SEQ ID NO: 1347 - DNA, 594 bp, Homo sapiens
atcactgtgagacattatatagaaggtaatggtaagaatgtcatgggacacatatataggtcacaatttccatgcatcagtcactgtgttaaccacttcctagggattatgcagttcttctcatttgaatatgtattagcttacaagtgtacaatacaagatcccattagaatcccattcaacagatgagggtattaagacagaaattttgtgatttgctcaaggcctaacagctggggtcagtgtttagaaatccatccctgtttggcctgactgtacagcaggacttctcaaccctggcactgttgacatttggggctgggtcattctttgtcctatacattgtaggatgtttcatgcaaaacatccttacttttacccactagatgctagtgggacagccaaaactatctctgtacaccgccaaatatgctctgttgggcaaaatcacctgggttgagacctgctttgtctttcattcattcattgaatactcattgactgcatggcctgtatcaggcactgtgcgtgtaccagacattgatggacaaaacagacatgatccttgacctcgtagtctttctagtgagagct

SEQ ID NO: 1348 - DNA, 570 bp, Homo sapiens
agacctctgtatatctaccataaaaaaagctaaaaatcacatctcaaaaagtttaaattggtctgcaaataatttgcctactttaaagaaacaaagatcctttaaagtaatgtttgattgaattttatgctctgatggaaatattatttttcactgtctaaacatgaacatgtagttattaagcacttaaaatgtcactagagtcactgaaaaatacaatttttaatttaatttaattttaaaaatataaattcaaattttaatgttcagtaatcaaatgtggcttatggttaccaaaataaactttgtagctttaaagaaagagaataaatttcagaagctcaaaagatgcagcatctaataattaatcacatgtaaaatgccacaaaataggaatcatagtaagaagagaaactcatcaatagaaaaccatagaaatgacagagatcataaaataaaggtaactgtaaaataatgaggaaagaattggaagatatttttaaaatagtattttttcttgacttacttggtttgttctgtatgccagtcaatgagtcaataatcattggt

SEQ ID NO: 1349 - DNA, 550 bp, Homo sapiens
gcttaggtatgtagtgggctataccatccaggtttgtgtaagtacactctagatgtttgcacaaagatgaaatcaccacaccattggttctgttggatcataagggaaaaaaaaaagatgaaattgcctaacaacacatttctcaaaatgtaaacctgttgttaagtgatgaatgactgtacttggccatttttatgtcttcttttgagaaaaatctattcgggtcttctgcacatttttagaaaatcaggttgttttcttactattgagttgtttgagtccttctgtgtttcggatattaaccccttatcagatgtatagtttgcaaatattttctcccattctgtaggtcccttcttcaccctgtggaatgtttcctttgctgtggggaagctttatagtttgacgtaatactgtttgtccatttttgcttttgttgcctgtgcttttaaggttgtatcaaaagactcatcggccagactaatgtcaaggagtttcctgtttccttgtagtagtttcatagtttttggtcttatatttaatccatttt

SEQ ID NO: 1350 - DNA, 565 bp, Homo sapiens
attattactctttccatccagctatggcatatttctttgttttctctagttgtcctttgtatcgctcaataaaatttgcggctctggtatatttcataataatcatacattatatttcattatttctattattataatggatcgcatatacatttactatgtaccacatattatgcaatatattcattatctcaattcataaaacaatcatgtgatttagttggtgttattactagattaccattgtacaagtaaagaaaataaagacaaaagaaaaaagaaaagagactcagcaaatccaaaccaataaagacttaattagaattgttgggcatataacaaaaatttaatacaactcaatgaaagcaaaaaacattttaaaaaatgaccaggcagatttgagaaggagccaaatagaaattccagaaataaaaacataattgttgaaattgaagacagattcgacagcagattacatataattgaaaaggaaaatgtaaactggaagacaggctgaagaaattgctcagaatgaagcccaaaaaaaaaaaaaaaaaaaaaaaaa

SEQ ID NO: 1351 - DNA, 580 bp, Homo sapiens
gcataaacctgtgcccaagcaagttgagacttcaaagagcagcaagactcaagaccacgtttacagagattatagttagttggaaggcgtaacatccaagacttgccattgttgacttactttggacacttgcactgttttacctgttaaatggagtctcttgctaagccctctgtccttatgccatcacttgcccaggtgcttacaacttggcactgaatctgtaatagttttctagctgagttatttgtccagtctctcccagtatgggagagactgaaacgtatgagacccagttctttttatctttgggcacagagataaaccacatttcctaggcaccttgcatctaggtggaaccatgcgacaaattctttccaaaggaatgtgagtgtattgataggtcacttctggtccaaggcaggtaagagcaaggacgacttctctatgaacacactctccttcactttccatgcctaccttggtagctacatattaaagacagtggcttaggccaggcatcatggcttacacccataatcccagcattttgggaggccaagaagggcgaatcacttga

SEQ ID NO: 1352 - DNA, 529 bp, Homo sapiens
tcactgcaacctccaactcccgggttcaagtgattctcctgccttagcctcccgagtagttgagattataggtgcatgccaccatgcccaactatttttttgtatttttagtagagacagggtttcactatgttgcccgggctggtctcgagctcctggccttaagcaatcctctcacctcagcctcccagagtgctgggattacaggtgtgagccaccatgcctggccagaatatcctaataattttacattgattgcatcttgaaataggatttttgctatgtaggttaattattaaaattaatttcacctgttgctttttacctttttaatgtggatactagaaaaatttaaattatacagatggcttgtattgtatttcccctggagaactctgttctagagttgataaaggagaaaacctgaagaattgtagacataagggccgaagtcaaagccgacagaggagaaggccccaggagagggtacagggtaagaaggcagaccaggccgggtgcagtggctcat

SEQ ID NO: 1353 - DNA, 614 bp, Homo sapiens
atctcatctgaaatatggggcagtttcttggttctcagttgtttcttttctgatatgttgctgacctctgatttctcatatcagtgctcttcccttagttcagagatgtttccccagttgtagatgggggttggaaaaggaaggtgcttgtgatttaaaagccctgtcacttactgtgtccataatatagtgagtccacctgtggactgagcaaggctgctgtcacatctttcaaggttttcctcattgatcctacatcggtttagcaaaattcttctgtaaaaggctagatagtaaatattttaggctttgtggaccatacagtctctgtcacagctactcaactctgccattgtagcatgaaatcacgtggctgtcttctaataaaacttggtttacaaaaacaatcagactgggcgtcgtggctcacacctgtaatctcagcactgtgggaggacgacacaggaggattgcttgagcccaggagttcgagagcagcatgggcaacgtagggagactccatctccgcagatttttaaaaagttagcttgggcgtgatggtgcatgcctgtggtcccagctacctgcaggggctgaggcaggaggatcgtctg

SEQ ID NO: 1354 - DNA, 250 bp, Homo sapiens
tgctttctgcatcaccttactctccccttggcctcagtatccatatgaactcttctcattaattcttttgaccttcctgtcttttgatttcgaccttcctgcctttcttctcacttccagcagaacacctcatctcctattttgcaaagaaaatagaaactgatggaactgggtttctctcacctcaatttcttgcgatccaaagcaacctgtatttccactctttctatcttccgccctcagtcaggaa

SEQ ID NO: 1355 - DNA, 132 bp, Homo sapiens
gttcttgggtaaattttatatgttatatctatttttgtgcaactgtttgtaactttcctaagatacagacagtggtttattttgaatcagaactacttataaacacacaatgcaactaattatttgtgcttc

SEQ ID NO: 1356 - DNA, 103 bp, Homo sapiens
gattatgggccctgatctactgaacttggcatctgaatattgttaatgtttcccttttacttggtataattattttcctctacctgtagcataacttttatgt

SEQ ID NO: 1357 - DNA, 258 bp, Homo sapiens
tctaacgggtaggacaggtcttaaataaataattatgaaggtgattaaatgctatgaaggggaagtacaagatgctgtgaaagggtgttaacagaggagcctcatcttgtttggaggtgaaaaggctgtcaagacaggcttccagaagtagtgataagtgccaataaataaattccgcacagcatcccaccttcctaatttatacttaaaaccccatatcccacctgctgggcaaagaaacttgcctcattcgcctcc

SEQ ID NO: 1358 - DNA, 627 bp, Homo sapiens
tccaccaaaataaaataagaatgtaaataaagaaaaaagataaatggcatatttgtcaaactgagatcttacactcatggagatcttacaaactgggtgaaaaggtaagtttgataaaggaataatagggtagcctgaggctagcaactgtgtgaagctattacaatcattagtcctaaaaaacaggaacaggagcaattaccaaatacgtgagttttccagtaaagtctaccgggcaagagatgtggcctttagcattggacacagtcaacctgtagtcacttctcagggcacaagctagaagaataagtgcctcaaacttactcttttcgaagctgccagcttccagcagcatccatcattgacataacccaacaagaaaccatagaagtcagtaccctgggcaaaaggaagggtgagaaaagtttgaaaatagacccaaggggacaaacagaaaatatctcatatataccaagaaacagtgaatcacgcaataaagacttcccaggaaatggtgaagaacagtcccaggcaggttcactttaaaatgtgtgtggtctgagacgaaagtacatttaacctccacagctgcaccccaactcacaagtccaatattcctccaatatt

SEQ ID NO: 1359 - DNA, 679 bp, Homo sapiens
tctttacactgctgattcactgctttgagaacaagcccacataagaccaagtatgccctgaacctacgggggcctgtcttcccatctgcacatggctctgggtgtgaccttgcatgggggaggcctggggatttggctgtcgtgggacgtgcaggtggacaactctctatgtaaaccccgtgagtccactaccatggcttacagtgatgttttatgttaaaggattttatggggagataacaacaataacattttggaaacaggaaagcaaacaaatgaggaatatttgactgaaagccaagtctcgagcttgaattgcggaaggccaaacccattgttgacacacacagacttctcaaaccacagacttggggctgggtgccgtggctcaaacctgtaatcccagcactttgggaggctgagacgggtggatcacctgaggtcaggagttcgagaccagcctggccaacatggtgaaaccccacctgtactaaaaatacaaaaaaaatagccaggtgtggtagtgggtgcctataatcccagctacttgggaggctgaggcagaagaattgcttgagccgggaagacagaggttgaagtgagccgagatcattgcaaccagccaaggtaacaagagcaaaactctgtcccccaccccaaaaaaaaaaaaaaaaaaaaa

SEQ ID NO: 1360 - DNA, 78 bp, Homo sapiens
ggggttgaacctcagaaagaggtgagaaatccccatgacgggcatttgaaactcagaaagacgtgagaaatccccacg

SEQ ID NO: 1361 - DNA, 315 bp, Homo sapiens
agctaaacatactcttactgtatgatccagcaagtgcacacctagaaatatatccaaaagaattgtgtgcttacacacacaacagtatataaatatgattacacagaacagaaaattttataatagtcaatactagcaagtgacttaattgtctaacaaactagaatgagcgcttaaattgtgaaatatttacagaatggataatgaggagtcaataaactctatgcaacacgaataaatgccatatcaagtatttagtgtaaaaagcaaaacagtctaacgtgttgtagatttcttttaaaatgaagtctgaaa

SEQ ID NO: 1362 - DNA, 375 bp, Homo sapiens
gaatatgtcagaaagagccagaggttagagacccaaacaccacagtttctaatccttaatcaatcatttttttcgctctctggagtaaccagtttatttcattccaattcaagatgactcttagggggcacaattgttccttatacttgaagagaagcccatcatttcccaagagcttaataaccacaccatggcaatagcctttcaaagtattatatgacccttcttaaagcatttgcctccatttctgaggtaatgaaagacatctgaaaagaatttttctcgggctaacaagaaataggtaactctgtttagtctttgtgttttactcctttctgtagacataggatgttcttggtacattctgagccccat

SEQ ID NO: 1363 - DNA, 229 bp, Homo sapiens
ggcttgaaatcctagcataagtacatgagttctatatcatgtagtgtggatgtgctcacatggataagtgtgtgtgtgtgtgtgtgtgtgtgtttctgtgtgtgttggagggagggaagggtgtaacagtttttgaacactcctatccattatctttaaataaagaacctcatttactcttcatgccaagccttttcagatggcattattattcccagttgcagttggg

SEQ ID NO: 1364 - DNA, 563 bp, Homo sapiens
gctggctgattctctatccagaatgttactcttgatgcaggagtaattcagatttttttaacagtgtataagctgtataatgttcattatgtttatccattttttaaaatatagatgattacattgtttaagatttttcaccagtaccagccatttaaaaatgaatattttagacattatttattgacttttgtctaagaaattaggatcaggattaagcccttcatgcctaccctagtctgtcaaaattgcaccccaacagggttgctcatgaaagtttctactgtcaatgaaaatttgcactggacatattaaaccggcaagaagatttttttcaagactattgcaatacgggcaatacattgaacttgactcctccaaaacaaaaggcaggggagtttttaagcactccggtgagctggtagaaaaataccagaggaagttaggagggaggtgagcaaatctggtcaggctatctgtgtttgctaattgtgtttatcaaattcaattttacctgcaaatttttatttgtcaaagttaggcttctaccttgtcacaaagac

SEQ ID NO: 1365 - DNA, 82 bp, Homo sapiens
cacatgacctgaatttagaagcaggtgggatacttatacttttctcagtctgtgggcaccacaccattgaagtatatgtcta

SEQ ID NO: 1366 - DNA, 411 bp, Homo sapiens
  misc_feature 38, 341: n = A,T,C or G
gttttattaaagaagaagagagaaattaatttgaggtncaagtaaccactggaagcctttatattttccattggtgaaatatttgaaggtcttttaaagttttgttcaaaataaaaatgaaaccagtgacaatgtggaaatgtctatagtaaggtgagtaactaccaggcagccttctccttgttattatagtttgtatcttgttgttttaatgaggagtgatgagacaaaatagagcaaagagaaaccaaggcagaatgttagcaactcttgcgtaatagtgagatctgttagactgtggatgggtctccatggggagcttcttcacctgagttacttanatccgaactggacagagaacatgccatgtgtacaatctcgcaatacagctggacatactagattacctag

SEQ ID NO: 1367 - DNA, 454 bp, Homo sapiens
cttaaccctgtcagctaatctttaacttaggctctggcttttgccacaagaggatacagctctctccaaggtcctgaagcactacttaagcatagttaaatctagtcactttttattagctttcattctcttcctacttctgattgtatttacatagcttttcagtctctaagatggggaataataatgattcctattttccagaggtgaggattaaatgatataatgtgtgtaaactgttgagattcatgccagacacacagtaggtgttaacttgtgctggttcctctcttccccactccccttatcatcttgtgcctatgttctgtctctccaatgagactttatattataaatatcaccatgtcaccccactgcctacagctttcaatagcttttcagtttactcagaataaattcttctctaaggctctaaattattcagcccccacat

SEQ ID NO: 1368 - DNA, 310 bp, Homo sapiens
gcagagcttgccctgtagaaaaagcacatcccaggtagagagggtagcacattaaaaaatgaaagcataaaaaaatacggagaacttaaaaagattaagttctacaaactgataaaagtgagttaggaccaagttgatgggccttagagaccaaataatactttccgtgtgcatagtatttttcagattctgagatgcaccctatctcatttgattctcacaaccgcttgtaatgtgtaagagcatgaggtctttcagaaaagctggctggcctagcagggcgcggtggctcacgcctgtgtggatcatg

SEQ ID NO: 1369 - DNA, 368 bp, Homo sapiens
cctaccacctgtcattcagattttcccaaaattgaatatttttgtttggaattttatcatacttgatttttatatgcagagagcaatgagcaaaatctgaaaaatcattcttataaatgtagttgtctttcactagtaaaaaatacgtagtttagaatttttaaggagaatttatcaaaaataaccgaaataaaaaataatttggcatcttttccctactatgtggttattcgttcagtgaaaccaatacttactgagttaatgagagtaaacaaataagcagttgtttatcatgttcctggcactgattttggtggttttttgtttttttataatcaatatttgttatatgtggagaatattttagt

SEQ ID NO: 1370 - DNA, 421 bp, Homo sapiens
tgtagagacaaggtctcactacactgcccagactggtctcgaactcctgtcctcaagcgatcctcccacctcagcctcccaaagggctaggattacaggtgtaagctattgcacccagcctcgttacttttctttgaatattctaggtcttcaagatctcatagtaggctgactctttggaagttacatcaaaaacagccttttatcttttctcaaactggactcgcacatagaggctggagaactagatcaatttatattccatcatctcactaccacctccttccccagcctttctaggcacctacactactctccttggcctcaaataatctcacgactatatacagccctggccagccgtggtgtctcacacctgtaatcccagcactttgggaagctgaggcgggcagatcacttg

SEQ ID NO: 1371 - DNA, 471 bp, Homo sapiens
tgttaaacttccttcagacatggaattaaattttgattcaattttatccaactgtcttgggaaaaggggaatgcttcacctactggatggtttaaattattttgttgtaatcattataaaaatgtgtacatctgtggacaaaaagaaacaatgaatgagccaaatacatacttggaaattcgcaaaaatgttagttttatatagacataatctgatcgaataagctcagtgtttacaatagtcttgtttcttttacttgtcaaaggctctgctatctgaaaatattcaaaccatgagtttcatgggccctgcctgtgagaaaatgtgcattttccacataaaatccatttccttgtcagataatttacaactcaccctgtttaaacagactctgtatttaaagctagaagatttatcacacagcaagttcaacctcaggaattccatataagtccacaagcacatgtgtct

SEQ ID NO: 1372 - DNA, 349 bp, Homo sapiens
ctgtcgagatagcagagacacatgagcatcaacatgaaaaacagtgataatgatagtgtgcaccaggattcaggtatcttcccaggagtgttttccctctttatgcctaattaaccatttgtaaagataaaatagagaatgaaggtggtgtcggtgagattggacatcaaaagacacaaaaggaatgtgacatggtgacctgagaaaggaatagagagagaaattaaaatagacaaaaaggggaatcagcaaggagatggaggaggcagaatagaagaggggactcaacaaacaggagcagttggtgcaacagagggtgcatcgcatacttgtacgacgcttctttcat

SEQ ID NO: 1373 - DNA, 620 bp, Homo sapiens
gtctcaggttctgcttcctggagaacccaaattgtgtcatcaggaatcaatttggcattatcccttgggtttttaatcgatacccagtacaaaaaaaggtcaaaatgcttctgtcttttttttaactcattgatgaaccacagcagttttctcaaggcaagatagacaggggcaagactagcatctaagaggataaactctggcaggagggtttctgtaaagagacctagaacccctcatagttcaggcaaataaacagtcaccataaggagccaagaatagaaatatatctaataagctatattcgccagggatgacaagtatggggcagaaatccatggggatgtcagcccaaagataatagggtccacgaagagctagaattctggaactgggctgtaggcctagagtgaggaaaagcaaaagtaagacaaggcctggccttcggatagatttggatttggaagagtaactagggtgccaatgtagaaactcagaaagagtggaaaaaggagaaggccaattatgctactgagacaggattcagatatatcaacacaggtaccaagcaagggcaccacaaagcaggtggcagctgggactcaagccccatgcacact

SEQ ID NO: 1374 - DNA, 547 bp, Homo sapiens
ctgagagaagtgtccctgaccacccacctaaaataggccctccctcactccatccctttccctgctttattttccccagatgtggatgccacctgccatggcacacacttactcctccattctttatcatctctgcctaggacccagctccagagggacagagactttatctggttcactgtgaatcttagacctgatttgtgcctagaacatagcaggtgcaaaataaatacctgcgagcagaagaaagtcatctgtccctctgttttggcacactgccccggggagccactccgaaaggggccagtgcacctctttggctctgcaaagctcagaaactagagggcacgtttctgacttttccaagtgcaggaaagtggagtggctggaggggtgcaggttgcatttgagtgggcagaagccagtctgccattctgggaagctatattttcacaaatgccacgtgtaggggagccacggaccaccccccaaaacacactcctgtcctcggggtcatactgcagagaacccccggcacatccatgac

SEQ ID NO: 1375 - DNA, 618 bp, Homo sapiens
  misc_feature 560: n = A,T,C or G
acagaggtggaaataataccttcagaggagagaggaggagaaataggaagcttgagtgtacagattgctataggcttggtggcaagaaacttaagttcacttcttgcggcttctctgttataggagagaaaatcatctgctataaaagaggggcaggtgataagattggatgttttaggagaatgaaggctatgggtgtatgggagtctgtattaactatggacacagggaggatgatctaataatgtgtaggtcccacttgacaatggaatccagggatgtcctgtagcactaacctaggtagttttattattttcacaggcaatacaaggcatctctggaggaataaaaagaatatatccatttggattaattgagaggttcacttacatacacctgggagatgctcctagtgtttaaacctgtaaaatattgcaattgtttaaagaattcaaaactgcattccaatgcacactctgcctgggaacaaaagcactctcttaccaggttatatcaaaagattaaagggacataaagctcatagtcattatgtttcctanaggcaggaactatggaaaaacatttgacgtaagttgaacctatgatcaaaagtgaatt

SEQ ID NO: 1376 - DNA, 584 bp, Homo sapiens
taactattccactatcaccaaacatttaagatgtttcatttcttcatggtcatacataatgctgaaatgagggtctttgtatataaatatttttttctttcatatttaggaaaaatttcttgtgtagtgtttttataagctacaccactgaggcagagtattactacatttaaagttcttgatatctgttgctaaactgccttcaaaaaaggtggtgtcaatttgcactttcaatggctgtatatgagaatgtctgttttgccatacttctagcagcagtgagaattgtcaaaactattttctagttattttgagaaaaatattaatactatctccttattgctttaatttgtatttctttggttattagcaatgctgataatttcctcaagtttgttaacttgctttcttctgtgatttggctgggcatactttaaaaagcatcttataataaagctatttataatgtacagtgatatcatatagatagtattgtgataatatattacacattgtgtattgatataactcacacaccataccattcacccgtttaaagcaaacagttgagtgacttttgagta

SEQ ID NO: 1377 - DNA, 672 bp, Homo sapiens
aaatgtttatttaggattaccagcataatgatgttttctaatatttgttaagtacttttagatgtttagcaccatgctggggaaatactataaaaactttcttataattaacctcctactcaaaaggttatacatgatccgaactttttccttttcctgccaacactgaggaatgtcatacaaagaagtcttgaggtgagtagaagtgataaagacaaaaaatttaaaagaaagggaaaaagttttctgcaaacttgttgccacacattagtcttacatgaatttatccattaattatgttaatgctgaatggaccacattacctaaagttgtacaagtgattgccccaaaacttaacttccccaagaaactggaataaacaaaagcgaactctctttgaaggaagtcacatctatcttagaccttgatgaacctcgaaaataattttctctaggcaatgactagcaagcagcagaagataacatgctcacaaagaagtaagacaatgtgaaagacgccagaagagaaaaataacagaaacaaatctgcaaagacatcaaatattagacttatcagacaaaaatattaaaaacaactatgcttttatgcaatgtacccatgtaacaaacctgcacaggtaccccaaaaaaaaaaaaaaaaaaaaaaaaaaaa

SEQ ID NO: 1378 - DNA, 410 bp, Homo sapiens
gcatgtgtaatcagttgaggattgacgcatgcaactattaaaaacaagattctaaccttcacgtcaactcttccctgaataaaaagatgatcatctttcagtgactacggacttcataaagtgttttttattttttttgttgtttttaatattagagttggttcatcagtgcttggaaatatgttgccataaaggatcaggagacagcacaagtgacgcctgaattttgcactgtttttcacctttagagtcagatattagattgaattatagcaaatagctgcagctgacttgtatattttttagtattaaaattatataagccactgaagacagtggaatcaatatttgcaaaagctgacctataacaaagtaaaaggtttttaaatgatactataaataatatttac

SEQ ID NO: 1379 - DNA, 334 bp, Homo sapiens
actcactgaataagtgagtaaatgcgtgttcctgtagtacccagggatcttcctcactgtatcacagatgatttacaagaaggcatcacctcccgcctgccattgtactgtcatagtggcagagggtagagacggcaggcagcgtggaggggtgcaaagagtgtgggctgggagatcagctggtctgagttcaagctccaacaactgtttttcttagaaagaaaaaggagcaaatggagaaggaattattaagcagtatatttgacattgtctttttatataaatgttccactgaatttataataaatccatggagtgagcattactatatcat

SEQ ID NO: 1380 - DNA, 585 bp, Homo sapiens
aatgttttgccatgctctggcatttttttaaataaaacataaaaacagcagcattgtcagagattggggtagaaccaccttgtttggccctttcattactaatccaggagaggcaaagcacagggaagcccacgaggttttaggcaacattaagcttttacaggccaggcaatttcaaactaacaggaagtaatgcatggtgagaaaaaccatagaatgaagatgtcatcaacatgcaagagagtgggaaatactggccagctgcctcactgtaagaaaaggaataaaatgcttctgggggtaaataatacaaataatactctaagtgtagagatagattctgagctctgacttacactcctagaaagtaacctaactgagccggatgtggtggctcacgcctgtaatcccagcactttgggaggctgacgcaagcagatcacctgaggtcgggagttcaagaccagcctgaccaacatggagaaaccctgtctctactaaaaatacaaaattagctgggcgtggtggcacatgcctgtaatcccagctacttggggggctggggcggaagaatcacttgaacct

SEQ ID NO: 1381 - DNA, 483 bp, Homo sapiens
  misc_feature 398: n = A,T,C or G
aagggtgaccccacaatcgcctgaggggatgctgggaagcattcctgtgccttcctaggggacaagtcagctggaaccaacaggatatatcttatattttaagatgtgcagttaggctgggcatggtggctcatgcctgcaatccaagcactttgggaggccgaggtgggtggatcatctgaagtcaggagttcgagatcagcctggccaacatggtgaaaccccatcgctactaaaaatacaaaaattagctgagcatggtggcaggcacctgtaatcccagcttctctggaggcttaggaaggaaaattgcttgaacccaggaggcagaggctgcagtgagccgagactgtgccactgcactccagcctgggcaatagagcgagactctgtctcanaaaaataaataagtaaaaaatacagatgtgcagtaagcattttatttttatttcttattttttacagacagggtctcactatgtt

SEQ ID NO: 1382 - DNA, 600 bp, Homo sapiens
ttctagagcacgcaacctagatccctcacatgtgcagttcacaatagggttcacactcctatgacaacctaatgctgccgctgatctcacaggaggcggaactcaggtgggtaatgctcgctggcccaccgttcgcatcctgttgcacagtccagttcctaacaggccacggaccagctgaggacccctgctctagagaatcgccaaatgtgagggtggtcatgaaagtttcaaacaggtgttaaaggcaaagtgatataaaagaatcatcactgcagttttaaagagtcctataaggaagaactctcatctttttctcttgatcaaattcactttcagaccaaagagacatgcatatagaatttaagcagaatactgtgattcatgtaagaaaaaataaactacagagatccagaaaacaggctgggcgcaatggctcatgcctgtaatcccagcacttcgggaggccaaggtgggcagattccttgagcccaggagttcaagaaaagcctgggcaacatggtgaaaccccatctctacaaaaaatataaaaattggccaggggtgggggtgcacacctgcagtcccagctatttggga

SEQ ID NO: 1383 - DNA, 595 bp, Homo sapiens
  misc_feature 291: n = A,T,C or G
tgtgtgtgtgtgtgtgtgtgtgtgtgtgttcacagattatagagattcacagctgacaaaaaataacttctgggagataattttctagtgggaaagaaacatcaacaattcattacaaaccaataaggtcactgtcaagataagtgtgtggggacctccaaggaagctctctattttactaaagtccagagagtctgtccgggaaggcttacagactgcatctcattggtttattcagccagtgtgtactgaatgctttatataagctttgtcctcattgaggttctgganataaatattgtcaataaagcatggcccctgccttccatgaggcaactcacaatctctgctaaaccccagggaaagggtggttcagctactttataggaagaattctggaagaactgagaatgtttacctcttctaacagtcttctctcattcacgtttaatttaattagaaatggtctaaattgaacttcggcagagcaaagcaacaaaacaacctgagaaactctatttgttaatagggtagatttaagtcgatgttctctaacacagtaagcataagcttaaatgttccctaattagagata

SEQ ID NO: 1384 - DNA, 609 bp, Homo sapiens
gacaaagatcagagaagggcagcggaacaaagaacagagctaataaccctggaattatttcaccccctccagagccctaccgttatgtgaggctgactgcctttgcccatacccactctcacatgggatggagcccttgcttgaggcctccagctacttggccgcaactcttgggcgggagagacaactaggatgggtgaaaagtgaggaggtgattggaggtgatagagaatgaggaactcaaatgggattataagaagggagactcaggaactaaatttgaactagaattaaatgctctccaaaaatgctgttacaccttgaggtgtagatacccttacttaatctgcatgcatcgctatggtcacagcctaaaatgctcactgttggcatatgaaacctcatttctaataaaaagacaaatgccatcccaggtcaatttagtgatatacatacatgtggataataaaagtgtaactggggaatgacacatagactaactgtagctatttgttgcaaaacattagaattacgcattgggcctgactctgaccatatttgtcctttagtcctgatccgactgacctggcgggagtcatcattgagctc

SEQ ID NO: 1385 - DNA, 411 bp, Homo sapiens
actggcccattactacggaggagcgagagttggcaggttttaaaatcatcatcataatcaccatcagcaacggtgtcatcattgtcatcgttgacactatcatcactcagataattatcatcatcattactatctttatcataccatcatcctcatcgttttggcctctatgatgtacaaagaatccaaaagctaatgctgacccagcctatgaagttcatgaggatgtatggcatgaatatgtgcaaagataactaacagtaaaaaataatgaagattaagtccacctctttatatgttacagatgattagaaaactattaaagtgtggctctaggaggaaaataatcaggaatgactgtgagaaagaataaaaaaataacaaacatgagtggagtttacctaaatatac

SEQ ID NO: 1386 - DNA, 386 bp, Homo sapiens
tagggaaggtggcatgaatcgtaagatgaacactgaagctgtgctacaaagaccaggagctttcaaaacatccagaccctctgacccagaaagtattccccttctaggaatctgtcctaataaagtcatcagggaggtgtacagagagatgcacaaagatttatgtttatagtttgattcctggaatggtaactagaaaaggaaaaaacataaataactctacttaatacagctgggaagcggttaagcaaacatggaggtggtgtaactaggtggttacatccacatcacgcagtgtttttacagctgttaaaattgatcatttgtgttctttctcctttttttcccttcctgattgagtctaaaagccatcatgtgtggctgag

SEQ ID NO: 1387 - DNA, 533 bp, Homo sapiens
agaagaaagaagaaggaggaagaaggaaggaggaggaagaagacagtcccaaacaagaactgtgcgactcaggatgtcaacatgactaccactgaaaaacactgtaaatacatgatgtgaaaagaaaaaaatatttagaaacactggtttcagaaccacaggctcaaaaatcatgataggaacatataataccttctaattacaaaacggaaacaattatcacaagctccttatttagaataaaacttaagtagatataatatatgcacacaggtaacaagtgtgtgtgtgcatatattttttgctgtcttatcctaatctctatccgttacatagtatattcagtaactacgcaagataggtacaagtattaccatttgacagatgaaaaaactgagggacagagaagtaaagtaacctgcacaaggtcatacgactattgagtatcatgacactgagatttacccagagggttgatcccccgagtccatgctcttaaacattacaaaatactagtttagtaaaataaatgc

SEQ ID NO: 1388 - DNA, 176 bp, Homo sapiens
aatacagatcagtacatgggtgtgggaaaactaaccaaggccagagaaaggatcatttggaaagactgaaaagaacgatgcctgatatttacacaccattaatcctatggaaaataggaaaaaaaagagccaggcacggtggctcatgcatgtaatcccagccctttgagaagctg

SEQ ID NO: 1389 - DNA, 497 bp, Homo sapiens
ctatcacaagttactaacacagttaatactatctgtttctttcctgagacaggtcaagttcactactgcagcacaataggaaaaaaaataggctcaagatgcaatgtttttctgtttaaaccaaactaatagctactgtaataaacagtgcttacactataaagttatcattaatgtacaagtaggcaacagatagttacattttatatgcattgcaatgatctcgcagacgcttattaaaactgagatcaaatattgtaacaactcactgtccagtgcacttcgatggaagaggaagaaaggacggtggggttgtggaggtgcagaacagcatttcccagctctctctggacctgcttgtggtccaccccctgacttgttggtaggacatctacaacaagtcaagaaaactgtgtcagggtctgcacaacgttactgaacggaatgaaagcatggtgaaacaaactgttcattcatagcaactctcagtaaagaag

SEQ ID NO: 1390 - DNA, 580 bp, Homo sapiens
atagccaaatttcatagttggctatagtgcaataattttagaagatattttgttttaaggatgagtatagtggaatgcaacaggcctcagatgaacttttcagagagaaaaggtacaaaaaggtgtatctcagaaaacatttttttatttcctctatacattgtgactatttaatggaacagagcattcttttgaccacttttttgtacataattaaacctagtcaattttaaagtgaggcactgtaattactgaccaagatgtatctactcaatgccaaaaaagttgttttggattatgttgatgtcatagtgtttaaaaattacaacttttctgggtcaggcgcggtggctcatgcttgtaatcccagcactttgggaggccaaggtgggcagatcacgaggtcaggagatcgagaccatcctggctaacacagtgaaaccccgtctctactaaaaatacaaaaaattagccaggtgtggtggtgggtgcctgtagtcccagctacttgggaggctgaggcaggagaatggcgtgaatccaggaggcggagcttgcagtgagcctagatcgcgccact

SEQ ID NO: 1391 - DNA, 611 bp, Homo sapiens
catagatcttaaaatagttcatgctcctactactcagagtaaaaagaactcatagtacatgaggacttgagtagagttcttgaaagggcaacaccttaacagtaacgttaaattagctctcgcctaaaggctgctctagatctgccttaacaaagcttaaaggtaagcctcaaaataagccaaatgaagccaagtaacagctgtgcaccagaacaaaatccatcgtagttacagagataaaacaaaatccagcaacaaacaaggtaagtacacaatgtctggcatccaattaaaaaattgtcaaacatgtagacagggcttctggctatagcagaattaagaggtaggtaagtcctcttttcacaaaacaagtataatctggacaaaattgtcaaaaacaactatttcaggaccctgaaaaatgaccaaagagaaataaattatgaggcatttattgattttttttttaattgctgggacctcagatcagaacctcaggaatctgtggccttcctgcctgggtccactcctattctcccattcccagtttagttgctgagaatgataaccttaaaaaggtgaggcagattgtaaaaatcagaagctttgct

SEQ ID NO: 1392 - DNA, 157 bp, Homo sapiens
aaaaaaagatgaaggaagaggattaaatatagtgcagattaaacaacatgaacaacttgtcccctgaagtatgttaatatgtaattagattttattatttaggcaaggattcccctaatggagcacatttctgaaatgatgaaaagtattaggatat

SEQ ID NO: 1393 - DNA, 598 bp, Homo sapiens
gttccactcagggccaatgggacccttgggaatacacagaatggggtcccttccccacccaggagcactaggtatacctagtccagcccttggacagagaagcagcatggacattagaagaatcactaaaccaggagagggaaaattaggttctagtctcagctctgccacttacccgctgtgcgacccaacgtacgttgcttaacctttctgagcttcagtgtactcttaataaaatgaagatggaatagagaaataggcaaaggattcaaacaggtagtttaacagaaaaggaacacaaatggccttaaaagcattaaaatgggatgcttaaccacactcataattaaataaatacaagttaaaacaagatgtatttcagcccatcaaactggcaaagtgaaaaatgtcaagaatgttcaatactggaggtgtggagaaacagagcttcttgtatactgtgaagatggaacagcttttctaaacagcaactaggcaataggcatcataatgtaaaatgcatcttttctttgacttaccacctccatttctaggagtgggtcctactgatcttgccatatgagaacacagagtcaga

SEQ ID NO: 1394 - DNA, 537 bp, Homo sapiens
atactgctatatagaaatccttgtgaatcaataaatctcattacacatgcagatatatctaagctgacagctacagagagacagcactttattgtggaaaatacataaaaggtctctgagtccgaatcctagatgtggaacatgtaagacttttaatagttgcagcctcagtctactttcctttaaataggaaaaaatataaacaacatattttacaaattagttatgatgattaaatgaaatacttgaaggatatttgaaagttatttcagtaaagaaataaaaggttactattaaaattaattctgtataactagttatttaacacgtaggaagatggtataagattctgtttcttcaccaaacaatctgtccccaagaagaaagtctaaggttatctcaatcatatctccttgagcttagtttcttacattaaaaataatgaataactatctaaaaattacataatgctgatacatcaaaagaataacaatagacttaattcaataatcactaaaattgtcattaatatcaagc

SEQ ID NO: 1395 - DNA, 260 bp, Homo sapiens
agacagccataaaaacacaatagttcacaaaggtaaaaatatgtggaaagtatttccctcatagaaatcccttttgccttttcagtttttaattttgttttgttttgtttttgagatggagtttcactcttgttacccaggctggagtgcaatggcgcaacctcggctcaccgcaacctccgtctcccgggttcaagtgattctcctgcctcagcctcctgagtagttgggattacaggcacccaccaacacgcccagct

SEQ ID NO: 1396 - DNA, 204 bp, Homo sapiens
gaagatggggaacgacttttaatgggtttggagttctagggagagggttaatgaaaatgttcttagacttagataaatgttctagacttacgaaaaatgatgaccaatttctccactaaaaggataaatgaattattggttaaggaaaaaagaatgcattaacagtctgggtgcggtggctcatgccagtaatcccagcacttc

SEQ ID NO: 1397 - DNA, 409 bp, Homo sapiens
gaaatcaaacaaaagaaaacatgatggattcaatcatcatagagtatggtaaacttaaaaataagtcatgtgtgatttatattcaatattgaatatcaaaactatctgcatgtcttttaacttgacaaagtctacggtaggagaaaatagtcaatgttagaagttatttagtaactctcagtgaaagcaagaccatgttaaaaaagggaagagatgattatgttaagcaggataagagataagattaagatgaatattgccaacagaaataaaattcaaacaggtttcatgaaactttaatttctagaatttaacaattatattatcaaatgaatattcatgtcttctctgctgccagtatcagctacaaagagttctggttctgcaaacaaaacctttgggtcttcat

SEQ ID NO: 1398 - DNA, 400 bp, Homo sapiens
caacggcacctacctggtcagcttcactctgttctgggagggccaggtctctctgtctctgctgctcatccaccccagtgaaggggtgtcagctctctggagtgcaaggaaccaaggctatgacagggtgatcttcactggccagtttgtcaatggcacttcccaagtccactctgaatgtggcctgatcctaaacacaaatgctgaattgtgccagtacctggacaacagagaccaagaaggcttctactgtgtgaggcctcaacacatgccctgtgctgcactcactcacatgtattctaagaacaagaaagtttcttatcttagcaaacaagaaaagagcctctttgaaaggtcaaatgtgggtgtagagattatggaaaaattcaatacaattagt

SEQ ID NO: 1399 - DNA, 543 bp, Homo sapiens
ttcatgcgatcctcccaccacagccttccaaaatgctgggattataggcatgagccaccagtgactggccacaaaaggagacatcttagtgacagatggtgatgaaagagaagatgggtttgggggaggaactccacgtgatagggatccttcactgagggcccgggctgcaggaggctctatgaaacaccagaactctttgtaaaacttcctgtttgtacatgacctgctcatttctcagcaggggctcctcctgtgcacatggacctctccccacctaaacccacagttcctgtggtcagaaggccagtcactgaataagggcacctaaggctctggtctgaatatctccccttggttctcagtctgaaatcccaaaaggaagacagttgactgcaaaataggctggagttgtcctgatggccagtagaggtggctgttgatagaattgaaagcttagggccaggcatggtggctcacacctgcagtcccagcaccttgggaggctgaggcgggtggatcacctgaggtcaggagttcgag

SEQ ID NO: 1400 - DNA, 508 bp, Homo sapiens
atttgtctcaacttatatagtccagacttttcatttattagctgtgcaatgtctggcatgttactcaacctctctgtgttcattttctaatgtgtaaattaggggtaataccattacctatttccttgagtaattgtgaaaattaaatgaaataataaatgtaaagctcttagaattgtccttacagtaaatgttagctgcttcaactatttctgctactaccaccaccactactgcttccaccacactaccaccagtctttccaacatcaatagtgaatgcattttgtctaaatactacgatgaatacaaaaaatatggagctcagtgtctgccctctagaaacttaaaatgtagttagggctaacagacaaaaacaaatgcataaataagtcaactatatgaggctgtctaatttgaattgaggcttaagtgatgggtagtatagaaacttagtgcaaggaaaaagtatttttgaattgacactaccatggaaaacttcatggata

SEQ ID NO: 1401 - DNA, 148 bp, Homo sapiens
aggggagctttgttccaaaagtttatctataaatcatagtttgtggactgctgtagagaaactactataaattgtgattgaataggtttccagtcaccccacaacatctatttcatttcacaatgtggatgaatttagtttatacttc

SEQ ID NO: 1402 - DNA, 589 bp, Homo sapiens
catacaacagcagcatacttattaccttgaattggtgatttaatagaggcacagctggtagcacaatacatattgtttaaactatttgagcacatctggtcatatcctattaaatcatttaaatccaggtaaaattggggacctccccacgtccatgggaattatgacagaaaactttccgaacagcaaaacacatgcaaggagacacagtaatacctacagaaaaaccttactagtattcaagttaaattaggtatttgttggaccctgggataaatgtggaaattgacaaacacaattaaaagacttactttggccaggcgcggtggctcaggcctgtaatcccagcactttgggaggccgaggcgggtggatcacaaggtcaggagatcgagaccatcctggctaacacggtgaaaccccatctctactaaaaaatacaaaaaatcagccaggtgtggtggcaggcgcctgtagtcccagctactcgagaggctgaggcaggagaatggcgtgaacccaggaggcagagcttgtagtgagcggagatcgcgccactacactccagcctggacgacagagcgagact

SEQ ID NO: 1403 - DNA, 436 bp, Homo sapiens
taccactcataaggaaattgtacagagttttgcagtttgttttcacttctttttctacttcccccaaacctcccactgttactatgggatgggaaggtgtaaggcagggaaagattgctatttggttttgtaattgtgttttaaaagtaggtaagtggcactttaatgaaaatttaacttattaaaatgaaagggaaatctgtgtcagaaaggaagaaataaagacaaagagggggacgtatgagtgaattttctatttatatttattactttgtaattctatctcatttttaaaaatatatttttcattccctttcatggaaaatgacttagagagctgaatttcaatttagtcttctcaagctggctgattctctatccagaatgttactcttgatgcaggagtaattcagatttttttaacagtgtataagct

SEQ ID NO: 1404 - DNA, 432 bp, Homo sapiens
ttttggcattaatctatgtataataagatacaattattaatatgtgaaagcacataaaatgcctaatctgatacatcaataatgaaaaattcacaggaaattcgttgcaggaagagacatttgttgacttaaaaacacaataagggcctggtgcagtggctcactcctgtaatcccagcacttcgggaggccgaggtgggtggatcatctgaggttaggagttcgacaccagcctggccaacacggcaaaaccccatctctaccaaaaataacaaaaattagctgggcatggtggcaggcgcctgtaaccccagcgactcgggaggctggggcaggagcatcacttgaacccaggaggcgcagcttgcagtgagccgagatcgcaccattcattgcactccagcctgggcaacaagagcggaactacgtctc

SEQ ID NO: 1405 - DNA, 358 bp, Homo sapiens
ctgagagaagtgtccctgaccacccacctaaaataggccctccctcactccatccctttccctgctttattttccccagatgtggatgccacctgccatggcacacacttactcctccattctttatcatctctgcctaggacccagctccagagggacagagactttatctggttcactgtgaatcttagacctgatttgtgcctagaacatagcaggtgcaaaataaatacctgcgagcagaagaaagtcatctgtccctctgttttggcacactgccccggggagccactccgaaaggggccagtgcacctctttggctctgcaaagctcagaaactagagggcacgtttctgac

SEQ ID NO: 1406 - DNA, 606 bp, Homo sapiens
aattgccccaggctgtagatgagagtatggagattgcaatgtgtgccccatctgcagcctgggacattggcacaactagccacttgctctggtcttcaggattgctggacgatgaatagcactatgtggagtcatattctgtttcattctagtccattatttcagatgagctcaggagcaagtggattgaatacatgaaggtcagccagcatcatggcagggtgagagagatgagagagctgaacttccagctcccagcactagttaatggaaataataggaccagaagggattggtaacagtttgcaatgaatgacctccctctacaaactaatatatacatgtttccatttctttcattttaactactactattaataggatactttgcatgaatccctcaatccattaatctgctttttttagaaccaaaacatgcataggagaaggttaatctgtcttctctctctctcctttctctccctgaaaacagaaaacagcaccagcaagagcagcagtagaaagacaagggaaatctggcccagaataaattgggttgtgctgaaacatttgtaattaagcatgataaccaattacggaaatacc

SEQ ID NO: 1407 - DNA, 586 bp, Homo sapiens
ggagatccagcctcttcagctctgggcaggcaagaactaggcaaccaggccatgggtaccagggcctctgcccccagcccgggagcccctgtgttggggccaggatactatctgaacatgctgacagtctggactttggaaggggaaaatggtgcttccctgtatgggcttctgtgtttgagctgaggaaactgaggccagagagatgccgtaatttatccagggacccagaaggggctcatagctgagctgaagagtgtcccacatcctccccagtactccacactggtccctgagtggcagccttgctaggatggcaggaatcagctgaccacttattcctgggccatcagacccttagaatagggaccaggtgggcagtgctgcctctgtgtctgaaagtggacccaccgtgaccagtgcccagtgcccaccaaggctcagccaggggtttcaccagggcatggggcactggctgagcataccacgccctctgtgtcctctgcaacactagagccctgagactagaggggcagaaagatgccagctgtcaaaagccagtgatatccaccagaacacactgacc

SEQ ID NO: 1408 - DNA, 378 bp, Homo sapiens
aatgggtttactaaatatttttagacaatttcttaagtatctacttttatttgcatacagtaagttaggaaagacatttaatgttcctcatacacctgctgtgttattttgtgtgtgtgagacagagtctcgctctgtagccgagccaacctccacctcccaggttcaagctattctcctgcctcagcctctcaaatagctgggattacaggcgtgcaacaccatgcccggctaatttttgtatttttagtaaagatggagtttcaccgtgttggccagactggtctggaacatttaatgttccagaggcggaggctgcagtgagccgagatcgcaccactgcactccagcctagacgacagagcgagactctgtctt

SEQ ID NO: 1409 - DNA, 119 bp, Homo sapiens
tatacacacatactcaacatatatctatccacatatttatgcatatttatagtcattaatatgtaatatttccacatatctaactaagtatctgtttcttagataaaggaaattatatg

SEQ ID NO: 1410 - DNA, 635 bp, Homo sapiens
  misc_feature 502: n = A,T,C or G
acaatgaatttttattatatatgttgtgatgaaggaaacacaagaggctgtgggactgtagaaaagcaaacaaagaaattgtgacatttaacctgagtctttaagcaccactttttcaaagaaacaaggaattattgcaaggagaaataaatagcaagattaaagctaagaggttcagaaaaactggagagtgagtggaagtcctagtagctcagtaagatctgtcattgtatctactccttcacaaacacgttaaaccctttgacttgctttctttctattatactcatttggtaaatatccctacctagaatgcacctcatgactgcactaagcaatgattttccctgcagagaagcacaagtgtgatagtctttctttaattttgtgatcataaatgccaaatgaatacaatatcgctcagcaatccgactatacacttctattattttttcccatccccctctccttaattacttcaaacatttccatcactcctcanaactcctacaccaatcttcttatcctaactctcagctaaccatttaagtcataatccactaataaaatagagacaaagagaaatttccttctatttgcaccccataaacaaccaacatgttctgtactggagt

SEQ ID NO: 1411 - DNA, 461 bp, Homo sapiens
  misc_feature 94, 95: n = A,T,C or G
tatatagccatctgtaaagtttacttcacatagtaaatgagttaacgatatttaatttcccatatttcttaaccatatctttttctttcatatnnagtgaacacagggactttcaggcatatactaatggtgttcctaaaatgattcaatttgatcttacgcttcagtatttcttttcaaggtaaattaagtttgtgctgttgaaaaaatgttaaattgttgtttgcatcttctaatgagtatagtagctgagagaagatagctatttgcattcagaggcatgtccaagtagggagttccttcttctaactcttatagttcaggaacataaccaagtaataaagtgagtaataaacaaatagtgaacagtggccaggcatggtggctcatgcctgtaatctcagcactttgggagtccaaggtgggcagattacttaagaccaggacttcgagactagcct

SEQ ID NO: 1412 - DNA, 547 bp, Homo sapiens
caggggatccaggatcatcaccaaggtcattttcccagacagatgtgctgaggctgtagaaagtgctttttatttggttgggagcttgtgcataaatgcgagaggggctgcacatctgacggactagaggtgactcatggctgaaccggaacaggacatcggggagaagccagcagagcttgtgtttaaagtcagaattcagaaccccaaagaaaatgacttcattgaaattgaactgaagagacaagaactgagttaccaaaacctactaaacgtgagttgctgtgaactggggattaaaccagaacgagtggagaagatcagaaagctaccaaacacactgctcagaaaggacaaagacattcgaagactgcgggactttcaggaagtggaactcattttaatgaaaaatggaagctccagattgacagaatatgtgccatctctgacagaaaggccctgctatgatagcaaagctgcaaaaatgacttattaaatactcccaggaatggccgcgcatggtggctcaccccctgtaatcccagca

SEQ ID NO: 1413 - DNA, 545 bp, Homo sapiens
tcctgcctcagcctcccgagtagctgaggtgcccgccaccacacctggctaatttttgtatttttagtagagacgaggtctcaccatgttagccagggtagtctcaaacttctgacttcaaatgctctgcccgcctcagcctcccaaagtgctgggattacaggtgtgagccaccatgctccgcctgccctgttgtttatttacaaccgctgcctgttttctccagaactctagcccccaccccatttgctataagactctgggagagagaggaaggggaacagaccagagggcaagaagccctctgtggttgggggtggagacaggggcactggatacaggttcagacaggtggtcacttgaaaccagtcattcacggtcaccaaattgtcacagacgtcaaacgcatgtggccactcagtatgtgtgacccagccttggccccagagtctggacatgtcagccaaattcagtgtgcagtatgagtcccagatgtggctatacaaggtcatggacatgcatacatgcacatccagcttccacac

SEQ ID NO: 1414 - DNA, 536 bp, Homo sapiens
gagctgaggtcacatcactgcactccagcctgggtgccaaagtgagactctgtctcaaaaaatagagaaagaaaggattctgtatggaagagtttagtgagggatatttccagagatcccttctaatatcatgaaacttgaagaaataaatcaaaatacttctattttgagcagttctataaagaaaactgaaacaagacaagacaagacaaaacaaaacaaacaaacaatcaaaaagacaggcagctatgagaccagaaagctgccctaaaatatggaataacaacaaaaaaactatccagccactaaatatttctgcagtctaccatttaaccgttaagattgggattgtaaaaagttcctagagaaaaaggtaggaaggaaacataccaattgttgataaaatcactagtctagcttgaaaaccctgtgctggaacagccaggggttgacacagcgtggacactggctaccaaaattagggcttacaaaattgacaaatgggatctagttaaactaaagagcttccgcacagc

SEQ ID NO: 1415 - DNA, 445 bp, Homo sapiens
gtttacatataaatctccaccccacctaaaaccattaaatccttgaaatgaaatacctttagcacttaacatatgcctgtcatctgggagttggtgagcctgtgggatgaatgaatgtattctataaaattgcaacacttacaatagttaggcttatctaaaaaaataaaataaaaaccaagacttttctagcattccaattcctaagtcttcattctgtctcttttggaatggacttctccagtgactttttctttctctaatcatgcaaatgacaactttgtagcatcttatttaatctatttatttatctttatatagatagtggaccagatttctgtgttctacaattccaggagagtataatgggaaataatattacatagatgaaaagagacaattacttgggaatgttccaagagaagatggaattaagctccctcag

SEQ ID NO: 1416 - DNA, 112 bp, Homo sapiens
tatgaaagaatactttctgacctttggtccttctccctaaaccccaccacattcataaccaagggctgctaaaacaggagaattagtggggaaaaagaatgtggatatgggt

SEQ ID NO: 1417 - DNA, 487 bp, Homo sapiens
cttccactcccttgcaaatgactgattttttgtctcgaactcccgacttcaggtgatctgcctgcctcggcctcccaaagtgctgggattacagggttgagccaccacacctggccacatgtttcatttgtttataaaggaactcccctctaagaacaaatcctttttactcttcttcatcatggttaatttttgtgaatttttgttaaagtttgcaacttgcttgagtcaatgattggggaaagaattttttaaaaaatatattttatcctaagtcatgtaaatttctataaaaaaaggatattctagcactgtgctaaaagcagtttgtagctcttttaaattgtatttggagcaagttcacttgagaaaattagatgtggattctggtcacattctatttttggtttatcgtagtgttactgggttgattgtgcacttcatgtatcatattttggttttgagtgttccaaaaaaaaaaaaaaaa

SEQ ID NO: 1418 - DNA, 436 bp, Homo sapiens
tgctgcattagcacccaaccgccagctagacccagtagagtaaagtgagggataaaacggaaggtgtgcaagaagcatcggggtcgtaggttgtctaatcttttgctttcaggaaaaaaaaaggcatcagaaatagctgaatttccacagggaaaacaatggagctggaccctaccccacacgatatacaaaaaccaacctgcacggatcagagccccaaacatgaaaccagaaccgaaaagcttccagaagaaaatgtgtcagaatgtctttgctaccttcagataggcagagatttcctggaggaatgcaaaaagcactaatcccagaagaaaagaaaatgacaaatttggcttcatcaaaataaaatatgaatgttcataaaaagacactccctgggctgggcgcagtggctcacgtctgtaatcccagtagt

SEQ ID NO: 1419 - DNA, 476 bp, Homo sapiens
taaatgtcatctttaccagatagcatgagatggcctagtcctcaaatgagagagtagttcctaacgacacaatctttgggttatttccacaaaaagaattaatataggaaacagagagatgtgttattctaaaatacaaatttcctctacaatatgctttagaagcaagcagaatggcctgtagcatgaggacagagatgatccacagttgacaggccctagaccgtctcctttgtacttgcatatgaccagcctgcacaattcccagtggttttgcccttctcagagaatattcaggagccagcaagtctacatgagaccagtgggcaaaacagctcccttgtgggatttcccacactggggtaaaggaatttcctcaatcatcgctgtgctcaagacaactttgttaaatggggctttgttcccagtggatttttaattgacacatcattggcaatatacaatatgctttacag

SEQ ID NO: 1420 - DNA, 386 bp, Homo sapiens
gcatctaaataaagcagcagagtgaacacagggactttcaggcatatactaatggtgttcctaaaatgattcaatttgatcttacgcttcagtatttcttttcaaggtaaattaagtttgtgctgttgaaaaaatgttaaattgttgtttgcatcttctaatgagtatagtagctgagagaagatagctatttgcattcagaggcatgtccaagtagggagttccttcttctaactcttatagttcaggaacataaccaagtaataaagtgagtaataaacaattagtgaacagtggccaggcatggtggctcatgcctgtaatctcagcactttgggagtccaaggtgggcagattacttaagaccaggacttcgagactagcct

SEQ ID NO: 1421 - DNA, 77 bp, Homo sapiens
ttctaaatgcacattatattaggcatgccattattttaaaacaaccatgccattattttaaaatctccatggtagag

SEQ ID NO: 1422 - DNA, 470 bp, Homo sapiens
tggagctggttcctctcgtctttatgacccgtgaaaagcgcaccaacacgaagacacgcgtgaaaggaccccatctcctaaccagactgacaagcaagggattttttccactcaccgtcagtgggatggttctaagcaccgaggccaacccatttcacacgattatttcacaaaaagaaactttctgtgggacgtgcctgggcgactgaaaagacagccagcaaaactgagaaccttgttcgcaaatccgtaccctctcccaaggcagcctcagaggcccgagggctgaggatccagacccgaaagccactgtaccttctgtaggatcaggctcaaggactaagggggtaaaaggtgccctttcccttcctaagcagaaaattctgtaacccaaccttatgtgtgatcatttaaaaaaaaaaaatcagctgggtacactggctcacgcctgtaatcccagcactttggga

SEQ ID NO: 1423 - DNA, 441 bp, Homo sapiens
atccacccgcctcagcctcccaaagtgctgggattacaggcttgagccactgcgcctggccgccacaggcccactcttaaaaagataatgcataatataagattttgtttttcttttcttttgtttctttctgctctgacaggtaactttgattgtcattgacagttttaagaattcagtaccaaccactgaaagggtatgaatatccttgcttaaagaaagttaaaaagaccaggtgtagtggctcacgcctgtaatctcagtactttgggaggctgaggcaggtggatcacttgaggtcaggagtttgagaccagccaggccaacatgatgaaaccccatctgtactaaaaatacaaaaaattagccgggcgtggtggtgggtgcctgtaattccagctacttgggaggctgaggtaggagaatctcttgaacatggga

SEQ ID NO: 1424 - DNA, 593 bp, Homo sapiens
acattcatcaatgctctggaccatagcatggtgaggaaagggtagagcagctcagtgccccaaggcccagagcctgccaggccaggataggagagcatcccatggctggaggagccctggggcagccactgccctctgcctcccatagctccagacacaaatcaacagggctggcgggcctcccagtgtatagcctagggcaggataggggagtcactggcagccaggctttctaagccagagggcccttggagatctttcactgttgtttcccatttacagtcagagaaactgaggcccagagagggaaagtaactttcccaaggaaacacagcaactgagtggcagggctgggattgctaactcccagtccagtgctctgttcaccacatcccagtgcttctcagaggtacataaatgatggtgctgttcagtacaggagaaactgggatctagagagtggtaagatctaggtggcccacaggcccaggggtcagcacccgggtactcaggaactgggccccaatcactgatccacatatttcatacataacaaacacttatctgacacatgacagcactgctctaagcac

SEQ ID NO: 1425 - DNA, 369 bp, Homo sapiens
atgtgtttttggtgaggaaggttgcaaggaatgcatgaagatatggattttgtttaaggaaaattaattttgtctagtgtagagtatgcttaaatattgtttcaaaatgaacaagtggagaaaaattgttataggcaaaacaaatgaatataaaaagttggaaaaataaaagacagtaaaagaaaatcttatatggttaaacgaactcaagctaaataaatgtattaaagggttctaatattgagccttaatatcaaaagtacattgaaacaaaactggaatttgggtttctctttctttaaaaaaaattgagcactcactctcctgtgatatttcttccttgcctgttagatcaattttgtatgcctt

SEQ ID NO: 1426 - DNA, 520 bp, Homo sapiens
agaccgtgtgaagtcttgaccctcaaagtgctgtgggattgctgagtaattggccaagttcttctttcatttgcggttatgcagcatggagtgcagaagggatatgtcttggtgccttaacaagggagtacggcttgtcagctagtctatttcctgatcacaagggctgaaagtgtctgccccatcccttaactcataggatttccactgcttaaggtggatttgggtttcaaatcgaagaaagtcttgtgcatgcaatgaaaaatgttgattgagcagccgaagagataaatgaaactcaatatcccagatacgcagtttctactgaaatggaacctttggaggttctattacaacctgacaataaataattagtcaaacaaatgcatttaaggagaatcagttgtagcaagatatttttctggaagacatttgctatctctctctctctctctctctctctcacacacacacacacacacacacacatgtgacaaaggattcatatccagaatatatt

SEQ ID NO: 1427 - DNA, 601 bp, Homo sapiens
gcatgccacatggtactataccgttgcttaacacgggctgaaatataggctttaagatttctagtgatccaaacaaagtgtgaaacaatatcccttacaagattttatgtctctggatttaaaacaaaccagcaagtggagcatgaatagatagaccattagaacggatacagagtccagaagtgaactgctcaataaatgactgtgtagccacctggacaaaaaaattaatttggatctatacctcaccctatatattaaatcgattccaaatggatcaacttttaattccataagacttaaagtctaaatgtccatcaatagagaattggtaaattatggtatggatatacctgcaataatatgttaagggggttgaaaaaacagcaaggagctctctatgtgttactataaacatgccccccggatacattaagtaaaaaacacaaggtggagtaaatatgtatggcatgccggcatttttctaaacaaggaacacaaagggcatatcttggctcatatatacataaacattttgaagaatgagcaggaaacagtggtcacctatttgtgacactaggacaggtgtgagggacatctt

SEQ ID NO: 1428 - DNA, 531 bp, Homo sapiens
gtgacacatgcctgtattcccagctacttgggcagctgagttgggaggattgtttgagcccaggagttcaaggctgcggtgagccaagatcacaccattgtactccagcttgggtgatatggtaagactctgtcttagaagaagaaaaaaaaggaggcaagttttaccccttactctttacgtctgtctacctgaaacgttccctcttgcaacaatgaatccacaagtgtatggtaaagatggttgagggtggccttccctgaggcattgtagtgccagactagcccgggagcaactgggtttggactcctgattcatgagaaaaataaaccccttattattttagccactattattagtatttctgcattacatacagccaaacatatttcctcattctttttttctccctccattcttctccatggatgctgtgtgtgcccgactgaaccctcaatcctttcatttaaggtttcctatagagtcaggcatggtggctcacacttgtaatcccagcagtttgggggactg

SEQ ID NO: 1429 - DNA, 417 bp, Homo sapiens
aaaaatccaggtatcaatcagagatgttgattgacacgtggtgaattcattactaggttactaggaagagaaagtgtgagagtgcagctaggacaagagtctgataggacaagattactggtaaaagtgatagttcctattctcacatacacacacacacacacacacacacacacgtacccacgtgcatacataggtgtacaggtttaatcaaaataaacttctttaagtgataattttgttgtttcaaagagctcatattggagataaaaatgatagctctaactttttttgttgatatatgcttatacttgccttattattagaatactgagtctcagcaaaagcaaaatcaaaaacaaaacaaagagaatattgattccatgttatctttggaagaatcctaagctactgtgt

SEQ ID NO: 1430 - DNA, 449 bp, Homo sapiens
tggccaggctggtctcgaacccctgacctcaggtgatccatctgcctcagcctcccaaagtgctgggattacagtcctgaggcactgtgcccggcccctccctcccacttttaatatcttgcaagtatttcccacaagcccaacccagctaactttcattttgccagggagtctgggggaaatacaattttcaatcttccaacacgtgtgatactgagaagagcacagaaaggtcagaatggtctctataccaacagacaatatctggcacactcaactaaatcttcctaaaaagaaaaagtgagatgctgaaaagcatgtaaggctaatttgagtaatataaaaactgctatgagaatgacatgagaattaggccattcttgcatcactataaagaatacctcagggctgggcacagtggctaacacctgtaatcctagcattttggg

SEQ ID NO: 1431 - DNA, 358 bp, Homo sapiens
agatggggtttcaccatgttgtccaggctggtctcgaactcctgacctcaggtgatcctcccgcctcagtctcccaaagtgctgggattacaagcatgagccactgcacctggcccttattttttttagttatgctttttaacatttatttataatgcatttgctatgtggaatgcatgttcaaagaaaaacagtatcccaaatggtggttatgacttcaggcaaacacatttaatctgtaaaatagttgaagcactgcaaatacataataaaaacaagtaaaaacaatattgttagttatctttccttttgagcaatggtgtggtgtcccacacctgtaattccagcactttgggag

SEQ ID NO: 1432 - DNA, 335 bp, Homo sapiens
cctgcctgactgatctgagggttaggaatgcttacaacaaagaagaaaccagaaatcaggaaaatgggaattgaaagccaatgttcacctccttacacagctcttaaggttggccctgccatcctaagctcaaggatctctacaggaagaatgagatatcatatgaaatgcacttcagaaattctattgagaagtattataattaaggagagttctctgagaggtagcatctttgaataggctcaaaacaggaaaataaactatttaatgcaagaattaagataacatagtggccaggcacggtggctcacacctgtaatcccagcactttggga

SEQ ID NO: 1433 - DNA, 139 bp, Homo sapiens
agagaaaccaaggcagaatgttagcaactcttgcgtaatagtgagatctgttagactgtggatgggtctccatggggagcttcttcacctgagttacttaaatccgaactggacagagaacatgccatgtgtacaatct

SEQ ID NO: 1434 - DNA, 436 bp, Homo sapiens
cgctttatttggtgaacagaaagtgagagctttcaggagactgtttttgttggatatgagagtcaaagatcaaaaatgcaaagatttcacaataagtggaaataaaacaggtgcaaaaagagtagctcattctgagaattttagtaatgaaagaaaatgtttcaaaacaaggacaagaaatcaaagctggtgaaaggacattagacttacgagcaagtctaagaaaaagaagctaattaatggaggcaatatcaagaaatggacaaaaatgaacagtacagctgctaagatgatcctttgaaagaaagatggctatttctcctttagagatggatttccaaccttaaaagattcagcatgctatgcttctttaggaactttttaatacagtgcatgtgctaagggtaaatattagcatcaaagtatttaataacat

SEQ ID NO: 1435 - DNA, 577 bp, Homo sapiens
tttgctacctctaggcaagataacatcatgaaaaatccgctggtgtagactgcagggcttgacttccagtgggcatgtgacatgtgagctgccaccctctttggcttccttttgcttccttttgcaattcatcggagttatccccttgagcccacagtacttctaaccctggatgcctgagttttacttcctcttttatcctgtgaccttgatcatgatcacttaacagtattctggattccaaagatggatttagagtataattctctaagtcctctgagggagtcccctcttaaactttctgggaccttgacgttaggctagagatttattcatttctttctttctttcattagttcaattatttataactggtgagttttatatgctcaggagctgttttttaaggacattttatctttaaattttgtgtaactgctggggaaaatgacatgtgctaacaataaccttttttattgcaggttagcatcttgcaaggaggtagtaacatatccagtcgtgaaactgggaaagaccagagctcttgcatcagggaaacatgtcccgtcggaaacag

SEQ ID NO: 1436 - DNA, 534 bp, Homo sapiens
acttattagtcatttattttccaaaaacggtgttataaatctgctagatatgcttgaggaatatatttatgtaacttgaaatgttgtcatatcttgaactcagttgatgaaaaataaattacctacaggagaaaatttgggttgttattttatactatatcccaagaactttttgcatcacttgtgaatcaggatatgtttttccacttgatttataagatgtattaatatcatataagatttatgttattaatatatcatatcatatactgatatccaagaaggatagggtaaattgtaagtttacactgttttttttccctcatttgatccattctcagaaactgattaaaatgactaaaaagaacaaattagagaagaaaagttcatcaatgctaaaaatatgaacaacagattaatatcttaaattttgagaactatctggtagagagtatttcaatctaaagtgtaataagatggtggaatctgacattcaactatccttcttcagaacagtacaatgacacaggaact

SEQ ID NO: 1437 - DNA, 520 bp, Homo sapiens
acctctggggctgctgtcccagtgcccactgctttttatttgcctccgaaggctggtgctggcaggggcaggagtaggctttgcactccattttttcccaataaagagtccctcgagtcctctttcagctcaactgagagtgggtcgatggagccacttcctaaagaatcctgaggggcacggagcaggggacacagcacctgccaaatatgagagaaggcggtggggcctgcccttgtggctcattcctagaggccccaccccagtcggcccaggaacgcaccctctacccggtgactctgaccctccatccctccttcactgtttcctgcataccacgctatttaaaaagaaggggcctacgctgtggcacacgtctgtggtcccagctacttgggaggctgaagcgggaggattgcctgggcccaggagtcgggggctgtagtcagccttaattgcccactgcactccagcctgggaaaaaaaaaaaaaaaaaaaaaaaaaaaaaggggcccttttt

SEQ ID NO: 1438 - DNA, 453 bp, Homo sapiens
ttcccatagagtctccagagagcaacacagcccagctgacaccttcattgtagatgtgagatttctaatctatttactgaacataataaacacgtgttggtttaagtcattgtatttgtgttaatttgttatggtggcatgagaaagcaaatctcttgttgagatgtatacattaaatatgtatagcttttatatgtcaaccatatctccataaagtggcttaaaaagaccaaaacagaaatacggcctgttaatcagaatgatctagaatgatcctgaggaaaaggacagaaaacaaaatatggtacaatgtgacacaattcctatctattcataaccttactgaatccaggcagtttaaaccgtttataaaacaaccagtgactgaagatctaccgctgttggagtgaggtttcctggaagtcttctacagctgttagccacacttctttt

SEQ ID NO: 1439 - DNA, 478 bp, Homo sapiens
agggatttcaaagaaaggtcattgacagaatgtctctattttttaagccctcttcctgaacaaattttctaaatcccaaactggagaacagcttcagaagggcaaagatctttacttactcctacttgccctacagtgcctcactcaaagcaaaacacttgtcaggtactcaataaatatctgttgaataagctgccatgaactcacctttgggaataggtcatgattacagggtttttagattgagaatactctgaaatcaacgctaccagctctggaattccttcttccttggttctctccccttcattcttcccaaaattccaaccagtgtcctcaacctaatttatgccaaatacccgaagtgttggacttcaagaccccaaatatctcttttgaagaatgtcccagaagaacgtataggaggaaagaatggataagaattgacctgtctggtaaatcacttatgtacttataa

SEQ ID NO: 1440 - DNA, 520 bp, Homo sapiens
aactgtgctggactcacctgaaagcatggcatcttcaacctaaagtacagcggaaatttgtctcaatgagataaatattctgctactgtatataatagacagctagtaagtataacttttttttctttgagacggagtcttgctctgtcacccaggctggaatgcagtggcataataatctcagcttactgcaacctctgccctcttggttcaacctattctcctgcctcagcctcccgagtagctgagactacagttgggtaccacctggccaggctgatttttgtatttttagtagagatagggtttcatcatgttgtccagtctggtcttgaactcctgacctcaagcaatccgcccaccttagcctcccaaagtgctggaaatacagaagtgagccaccgcgcctggcctaataagtatagatagtatttcacttttatattcctagagcccagcaaaatgcttggtaatttgtaggtgaagaaaaatgtttaacttaatagaaatctaaaatttt

SEQ ID NO: 1441 - DNA, 644 bp, Homo sapiens
tccctggtgcctggacacactgcgtatcttgtgtgcttggggaaggagctggcctgcaaaagtgtatatttcagattacagaagtctcctttgttagacttgcacatactttctggatctcctttgaaaagatggattgcttcctccctgcttcctaaaacagcagccaggacaccattttacctagggtatctcatccctgggcctcagttttcccatctgtaaaatgaagccgttactccacgtggtgcctccatagctctaaattctctcgatctttaggagaacctattttcttgtagggctataatatagtgacaccttccagcatgaaacggtgccaattagctcttatcctaaactattcctgttggctcctccttctcagtgctgctccttttagtgatacccattgtctgtggacttaaaattactaactagccctgggatcaggaaaaaacatcctaggcatctttatttttaaacttgattttaggtcacagggaaggacatgaaggtggtactacctcttctctttttttgagacagagcgagactctgtcactaaataaataaataaataaataaataaataaataaataaataagttccacatgtattgactactttctagtagcattgc

SEQ ID NO: 1442 - DNA, 578 bp, Homo sapiens
ttaacacagtgaaaccccgtgtctactaaaaatacaaaaaattagccaggtgtggtggtgggcgcctgtagtcccagctacttgggaggctgaggcaggagaatggcgtgaacctgggaggcggagcttgcagtgagccgagattgcgccactgcactccagcctgggtgacagagcaagagtccgtctcaaaacaaaacaaaacaaaaaagaaaaaagaaaccaccaccaaccaaccaaacaaaacccaaaaaacccaaagtaacggaggtggccgagggagctggggatggggagggagtccaaacacctgggagctagaagtttctgaaaactgtaagtcttttggtgtcactaaaagatacaggatgaatgagcggggattaactgaagaagatagggttgatttataaagtttgaattcgaggccaggcacagtggctcatgcctgtaatcccagcactttagaaggccgaggtgggcgaatcatctgaatcacctgagatcaggagttcgagactacacctggccaacatggtgaaaccctatctctacaaaaaaaaaaaaaaaaaaaaaaa

SEQ ID NO: 1443 - DNA, 534 bp, Homo sapiens
cctactcttataagtctggcattcatcaaaaagtgtgttttgtcaagaatctgagtgcttctcagagcacctaattcatcctgtgtcagctataaaagccccttattttttagaggataaaaaaaatgtcaataagaattcatagtcacagttatccaggcaaaaaaatacacatgaatgttgggaggttgtcatccactggacaacttttccaacagaaactttagaaccccaagtttccatttatctctattggaatctgtttctccctgctggctgcatgcctgcttcatttcttcctttaatcagggccaacttattcattaggcacaggagacaaagtgcttagagcccctggcacttttaaggaaccataaattttttttaatggaccacaatgttttagtttattttaaaatcagaaggaaaaaaatgagttgttaggggttgaagaaaagtttatttttaatacagcttggattatatttgcccttatatcaatgtagttgcaaaatataactttgtatatatttt

SEQ ID NO: 1444 - DNA, 525 bp, Homo sapiens
ctcatgtaaggaatgaaccaatcttaaaagaagaaaacataattctacaaaacttttcaaaatctagactttaaaactcttttatgtcatcgtggtgctatcactattctaatagtttccttgagctaaaaatctggacagaattcatattttcttggaagaatcattttacttgtaattcaactgtctacctacaaatttagatttgccctgttgctcttcttcctttaattaacaaaattgagtagctttttatgttggagatatgttgcataccaatggggaaaaaataaaataattatatctccggccgggcctggtggctcctgcctgtagtggatcatgaggtcaggagaccatcctggctaacacggtgaaaccttgtctctactaaaaatacaaaaaattagccaggcatggtggcgggtgcctgtagtcccagctactctggaggctgaggcaggagaatggcgtgaaccctggaggtagagcttgcagtgagcagagaccgtgccactgcacact

SEQ ID NO: 1445 - DNA, 515 bp, Homo sapiens
tgctgcattagcacccaaccgccagctagacccagtagagtaaagtgagggataaaacggaaggtgtgcaagaagcatcggggtcgtaggttgtctaatcttttgctttcaggaaaaaaaaaggcatcagaaatagctgaatttccacagggaaaacaatggagctggaccctaccccacacgatatacaaaaaccaacctgcacggatcagagccccaaacatgaaaccagaaccgaaaagcttccagaagaaaatgtgtcagaatgtctttgctaccttcagataggcagagatttcctggaggaatgcaaaaagcactaatcccagaagaaaagaaaatgacaaatttggcttcatcaaaataaaatatgaatgttcataaaaagacactcccagatcgcctgaggtcaggagttcaagaccagcctggtcaacatggtgaaaccccatctctactaaaaatacaagaattagctgggcatggtggcagtcgcctgtaatcccagctactcg

SEQ ID NO: 1446 - DNA, 527 bp, Homo sapiens
tttcttctatcaaggaattgccttagcctaaaggcaaagcaattagctgtatgccaaagcccgggcaatccaggccacatctcccatatctagcctcatgtcccactttctttctgacttctaattctctttccatttcatcaggactgggatccctgttctaaagaaggtaagatataagttaaggcaaacacatctacggagatctggccatatatggtacaaagtggctaattgggacttgtgtctccaattccaacatacctctaaatctctagaaagagagagaaaagaggccgagcgtggtggctcacacctgtaatcccagcactttgggaggccaaggcgggcagatcacgaggtcaggagatcgaggccatcctggctaacacggtgaaaccccgtctctactaaaaatacaaaaaattagccaggcgaggtggcggccacctgtagtcccagctactcaggaggctgaggcaggagaatggcgtgaacctgggaggtggagcttgcagtgagccgag

SEQ ID NO: 1447 - DNA, 541 bp, Homo sapiens
gagacatgatgaagtgctctgagggctgaggaaggtgtggcccgtgggcattcctgtccagcaagaacccctctggcttgtctgtattcattgccacccacatggacctctctatggttgcttgccaaagccgggagggagaagggtctccccttcctccaagcccaggatcaccgggaaatgcccttcccacctactggacttgactaatgctgcttgtcaagaagggaactcttcagacacataaaaatcctaaaggtagctgaggtttgaaagaattcgtgctggacgtgcttccctgcagggtcaggcattggggaggagggagaagaggaaggaggagctggttgtaagtgacagctgcagataaatctgtgtggagctgtccagggagctgttgaactcaggtagtgccctccctagcctggggcaggtcagagtctccccgaaccacccaaacctttctgctgcgtgtgctctggggcatgtctctctttgcctccttggatcttgagccaatgaggaaatataggctagtccc

SEQ ID NO: 1448 - DNA, 395 bp, Homo sapiens
agagacggggtttcactgtgttagccgggatggtctcgatctcctgacctcgtgatccgcctgcctcggcctcccaaagtgctgggattacaggcgtgagccaccgagcctggtcagagacaggaatgttataaagacgtggatgacagtgacctcccgtttcccgggtatgtcgcatgggccagacggttgcttcacgcacatcctacccttcctcctcctgtagctcccaaagaacattattcacatcacccccattgtggagatgaagaaactgaggcttagagaagttaagtgatgtgccccaggttacacagcacacagagctagacacgggcagggctgggatctgaacccaggtctctccaatgcctgaatctgacctcttaatccta

SEQ ID NO: 1449 - DNA, 81 bp, Homo sapiens
accttttctatcagtcgagcaagtaccatctgtcacctattatcaggggtagaagtctgagtacttccactcactgcatat

SEQ ID NO: 1450 - DNA, 433 bp, Homo sapiens
ctactcgggaggctgaggagaatcacttgaacccgggaggcggaggttgcagtgagctgagattgtgccactgcactctaacctgggtaacagagcaagactccgtctcaaaaaaacaaacaaacaaaaacaaaaataaatatacttgcaattcatggtggtttagaacgtttgcatcttatacttcattcttgtgatttatttagttgttttaaaaacaaactttgtgcttggtttctaaatgaagagataagagagaagatatcacctcctcaaacaacccatttcagctatgaatagctgctatttccaaaagatgaaaagctaaaatgactacattttctcttaaaatgttcatttttgaagttctagattttttttttggtcgggtgcggtggctcattcctgtaatcccagcactttgggaggctga

SEQ ID NO: 1451 - DNA, 575 bp, Homo sapiens
actcttataaatactgtatatcttttcaaacttgtgtgaatttttgagggtaaaagaccaattcattggcatactgcttattttataattcgggtaacacagtgttatcaacatttacatattctgctatttaattccccaaatattcactcagcagtgaaagcgcagcgttagatgttatggggatttcaaggtggggcaatgcatcctccttacctacaagaggtcactctctgatagggggattaggcatgcacattgactatagtatctttagttttatttatattcccctttgtttcaaacaggatttgggattttttacaaagatgcatatgatatgacaagataaagtatatttagtataaagaaggaaaagaagatggaagtataagtgaggctggttagtgtatttcgaagtcctgttctttccttactaaaagttctggctataagctttccagcagcaaagagaagaggcaaatgatctataacaagcttcagggtgtccagaagagaaaccaaatcagagaagcacacctattcctgattccagaaggcgagaaaaattttct

SEQ ID NO: 1452 - DNA, 409 bp, Homo sapiens
gagtttgaggctgcagtgagctatgtttgcaccactgcactccagcctgggcaacagagaaagaccctgcctcaaacaaacaaacaacaaaaacaaaacaaaacaaaaaaactatctcatgggaggttctggtgagacgagtaagatcatggtggaaaatgccttcggcccactcaggaaatattcttcggcctactgaggtgcagagactcaaagagagagccctgtatggagatactcaggcctgtggcaagctgagacctggagctgtccctcactaaactggagaaacggctgcttcccagtgcccagcagtaattcagccaaaagactttcagatgtacaaatttttacacttctaaaaaattaattttctcccaatattttatgttaactttctttttttttt

SEQ ID NO: 1453 - DNA, 609 bp, Homo sapiens
gacaagcttccctgatagacaacacttcacacaagtttccataccttgttattcagaaaattaagtgcatcctatgtgactccacaaggagaatattctggggagtttgtatctgatttcccttgttcattttgctttctaccttttcagtctaccacatcttagccatgaatgtgactacctgctgaaccccatgaatccttctatccaatcgttgaacctgggagagctctgacaaaggctagcatgggaaaatacgttgtcttcctcattaacagacccttcttagttatatctcactttctaagttcctgccttccacttcctaggagagaaaaaactacacagcattacctgaacatcatcccagggtaatcacagaacagccatctccgcaaaagaaggaaaaatgaactgtgtaatgttgcaatatttttaactgcaaataattttgcatacaaggcttacctacaattgaccatttttgcactaaatgcttttttaaagtaacaagctaatatcttcttaatataataatatacatgtccaacaaaatttaacttgttctgctatcatgaaaagaggaattccagacaaatgtctcataat

SEQ ID NO: 1454 - DNA, 436 bp, Homo sapiens
aaagatgtagatgcagacatgaaaatgcatgcaaatacatacacatgtagataaatatagataaagctatcaaaggcatcttcctttcaatcttcttttgagtataattcggaatttatcctgagaaatactgataaaatatagggctaggcaaatataatttgggatgctgtagagtgttattagtagaaacgacttctcttttctgagccttgtgaaatagctttcaaggggcagctggtagtgatttaagggcagtcacagagacagccaattagagttaatcagtcattatatttacagcatcagactatcatgcaatacaaaacggatgccgacttgaccttttcatcccctatatttccttccccatctcaaacagcagccaatcttatgcaattggcttcattatgaataatgggaagcatcttacatt

SEQ ID NO: 1455 - DNA, 550 bp, Homo sapiens
tgtgaccttgggcaagtcacttcacctctttgcacctgttcctcatctttcaattggggataatcctattccccatgcagacggctgctttgaggactccatgaagccctgaggactttgtcggtgctaagatactctcctgaccccaggaccaatccctgtcaccatcttgatgaagaggcagcgccacctgcccactcaccttcagaagcaccgtgcttctcgcggccgggggacctggcctcgctgaagagagcagtgggacttgcctccatgtctaggacagaggagccagtgaggctggacctctcccctcccttcctcgcctcccatcccctcaggagagcaatggtctaattcacggtgtctgcaggtgggttggggaacaaggctagggtttccacccctgctcggatgggccttcatctttcacagatataaccgttgccccaccataaggttagacaggcctgggttcaaatcctgacccccgccaccactaccaccaccactgaccagctgtggggacttggcaaaattactttataca

SEQ ID NO: 1456 - DNA, 429 bp, Homo sapiens
aggataactaaagattcataattggtatgatccaagtgagtgactgagatatcaactataacatttaactgaattttaaactgataaataaaatatctctgacatctcttctgcaatattttctccatctacctttagtcatatattctactgttttttcttaagcccttatatagttccatggctactaacctgcaaacatcatttaaattcttttaatctgtgacacatcaatttttctgtagagttaaggagatagaccaaatctcagaaaaatgtcctaaaaatatagcgtcttgggaaatagaaaaaatagggtctaatggagataatcctatgggtaataaaaataagtcaaatcaattattcttttccacaattcagtacattcaaatcattcacgcttcattcagcatgcatgtatagaat

SEQ ID NO: 1457 - DNA, 506 bp, Homo sapiens
taagttaatagaaaaaaactgttatggtcaagtttatgtagaaaaagctttgaagatatttcatgataaaaagtgccacatatttttccaaacaaaaaaaagcttcaggatataaacattttcatgaattcaagcttttcccctcttcttctttatgctttcaaaatactatttataaacactagaatgtaatcttgatgccataaaaacacctagtttaagcaattccacttacaaattacgagaagtaaagacacttgcacagatactcttttttaaagtgaatttcaagccaaacaattttcaattataaaagctccttcagtaaccattctaggctctctacaatcaaaggcttcacaatagtcattgcttccagatacataatagtgaatggacagttacactagacttgcctttaattcactaatatgataataaaaggataactgaataaaggcctttacacaggtaaacaggtatagatcattgtgaaaaaaaagtag

SEQ ID NO: 1458 - DNA, 457 bp, Homo sapiens
tataaaaagtctcacagaagaatgtaccccttcagcaagaagtaaaatgaacctaactgaatacaactcaggactctcaaccaagtgggaggtcagagactcaggagagagtcacctcagtcacctgtaaccatggaggagccgtgggggctcaagtggcctgtgctggtaccggggtgctgggtccccgcagtgttccagacgtccctgagcagtccactctgagtcctatctgggtcactgtgattttcatctaaggaaaaaattaaacttttgatcacgaggtcaggagatcgagaccatcctggctaacacagtgaaaccccgtctctactaaaaatacaaaaaattagccgggagaggtggcaggcacctgtactcccagctattcgggaggctgaggcaggagaattgtgtgaacgcgggaggcggaccttgcagtgagccgagatcgcgc

SEQ ID NO: 1459 - DNA, 408 bp, Homo sapiens
gctttgctgtatactcactgctggctacatgtctgtcactttaatttgcactggactacaaaaacatccacaaatatataatatatacctacaaattatatggtatctatatcacatgtatgacccatgaaagacagatgcatattctatgagagactaaatcattcttcataattggtagcttggcattcatttcttgagaatatcagagctgcttaaacatgaatcacatgtgacatcatgcgcacctctcacctcaccttctagataccacgcaccgcccattttcctctaggctttattatagactacctgcaaccagaaaagagctttatagagcatctcatcttactgtaaactgaggacaaataatcaatattataataatttctagaaaaggaataaatg

SEQ ID NO: 1460 - DNA, 107 bp, Homo sapiens
atagataaaaccaaattttcatggacaatgtttacaacaaaactacatgacaaggttgctctataggctccaaaagaagttggtagagataaaccaccatcaacaca

SEQ ID NO: 1461 - DNA, 497 bp, Homo sapiens
tgctgaatctaggactctggcagtagggaatttgctttcccatggaagcacctgggttaagaaacgttttctccagtgtccaaacacttggcccttctatgtctttcactcattttcctatgtctctagttaatggcacgtagtaactaaacatttaataagttaattaaacaattaataagttactgagttgattttactcagtgactcagtgctgcatgaataatgactgacacctcatgtctgaaatgcttttctgactatctatcctccaatatcaaaagtaacctattccatttacattttaatttaacaaacatttctctcctgaatacctaccctattttagtcactatgctagatattgagtgggataatcaatgacaataatacaacatgtttattgagaatttacttagtgtcaggtaccatgctaagcactgaacatgtatgatcccatttacccttcataataaccatgtaagacaggaattact

SEQ ID NO: 1462 - DNA, 391 bp, Homo sapiens
cagttttgctgagggcattacaaggtgcgaagaactgtcagctgaaaaaagatctattggttctctggctttctagcatctgggaaagaaccgagaggccagttgaaacctcatacgatccaaaattatgttggattattcatggttagctcattccccctccttttttgaatggagaactcctacaggggcctttccccactctctctctacattcagcctaatgggtcatctaaaactctcttagggcacttcctcaagaattacacaaagaaatattatgcatgtaaaaatgctagaagggaaccatacaaatatctgcattcattttgtaacttaaatatccagagaaagcctctttatagatttgagtcttcaggtaaggctgatt

SEQ ID NO: 1463 - DNA, 531 bp, Homo sapiens
atagctcatatttttgtgaccacctattgaccatctgttgactattttctatgacaacaaccaaattttttttttaagtcttaaatgtttaacttattttaaaatgcaacaaaatgaaacaaagaaacaaccctctaggaaagtgagcccaggagaagggagaagatgtgtattgtgctctaggcttagcttattcaaccatttagaacaatactaaagatttcaggccaggcacggtggctcacgcttgtgaccctggccctttgggaggccaaggtgggcggatcacttgaggtcaggagttcaagaccagcctggccaaaatggtgaaacccctgtctctactaaaattacgaaaataagcctggcgtggtggcacgtacctgtagtcccagctactcgggaggctgaggcaggagaattgcttgaacctgggagacggagggtgaagtgagctgagatctcaccattgcactccagcctggcaacagagcgagactctgtccaaaaaaaaaaaaaaaaaaaaaaaaa

SEQ ID NO: 1464 - DNA, 573 bp, Homo sapiens
tactaggcatgagatttgaaatatcccatgtagatattggtagctggaatttcaaatctgtaaaaatagaaatggcaacaaaacaatgaatctggaagactactgtgttgtcattaattcctttaaaaaactgcaggctaacaattttttagtgaaaagtttggggtgtaaatattaggagctttctataaatcacctaatatttaccaaaaaaataaaacctatgagataggtgctactactgatctgtttcttagtaaggatacttaaagaggttaaaactggccaggcatggtggctcacacctgtaatctcagcactttgggaggttgaggtgggtggataatgaggtcaggagttcaagaccaccctggccaagatggtgaaaccccatctctactaaaaatacaaaaattagccaggcatggtggcgggcacctgtaatcccagctactcgggaggctgagacagagaattgcttgaatctgggaggtggagattgcagtgagctgaaatcacgcaactgtactccagcctgggtgacagagtgagactctgtctcaagaaagaaaa

SEQ ID NO: 1465 - DNA, 84 bp, Homo sapiens
agtcttggccaaacaacagatggaacaactacgctatacgtataaaagccggcacaggcaaaggacagataagacaaatattag

SEQ ID NO: 1466 - DNA, 538 bp, Homo sapiens
tcgtggcagagacgcctagaggctggcgcccagggcaggcaggacccaggtgcctcccattcttgtgcttggctgcccttggtgacagctccaggcagtggctcttgaggaaagaggggtgggaaaaggggaaccctcctgcccaaatcaggctctttaaggaggcttctggaagtctccactacttccagtggtgtagccatgaccagctgtccatgtctcagcctgtttgcctcccaaataaaacaggggccttggctgggcacggtggctcatgcctgtaatcccagcactttgggaggttgagacaggtagatcatttgaggtcaggagttcgagaccagcctggcccacatggtgaaaccctgtctctactaaaaatacaaaaattagccaggccataatggtgtgcacctgtaatctcagctacttgggaggctgaggcaggagaatctcttgagcctgggaggcagaggttgcggtgagccgagatcatgccactgcactccagtctgggcgagagagtgagaccctgtct

SEQ ID NO: 1467 - DNA, 491 bp, Homo sapiens
aaactggtacaccccttctggagggcaacctgacaattataccaaacatatgtatatccttcgagccagcaatttcatttggagatattcactcaaaaaagataaatataacgctgcatatcagcattatgtagcataaacctggctgtatatcataagtacctaaataatctcactcatcactattaataagctaaaggttttactttgaacaaactgatagagggaattgtttagccttcagaaatttttaattaaatcatatggaaatgaaagtttgagaataaaaggaaagcagcgtaatagctaaatggagcaaaaggatcattaaaaatttttctcaaaggtagaggaaatcaaatttgataaagggaataaaaatagagtcagtgaaaaggaaaatactcaaaatgataggaagaaggaggatgcaatatcctagagcagtggttacttacataggtgagttattagggaggcttttttttttt

SEQ ID NO: 1468 - DNA, 616 bp, Homo sapiens
ggagcggagcccggagcgtcgtggaaagcattggacacatttccaccatgctaatggcattttaaatatatttggcaattttcccaattttttactgaagaaaactgtaagtttatacttgaggactgaagtgtgactctgccgattatcaggctttcaagatgaatctggaaaaactcagcaagcctgaactcctgacactatttagtattcttgaaggagagcttgaagcaagggaccttgttatagaagccttaaaggcccaacacagagatactttcattgaagaacgctatggaaaatataacatcagtgatcctttaatggctctacagagagattttgaaacactgaaggagaaaaatgatggcgaaaagcagccagtctgcacaaatccactctctattcttaaggttgtgatgaagcagtgcaagaacatgcaggagcgcatgctgtcccagctggctgctgctgagagcaggcaccgaaaggtgatcctagaccttgaggaagaaaggcagcggcatgcacaggatacggctgaaggagatgatgtcacctacatgctagagaaggaaagagagaggctgactcaacagttggaatttgaaaatcc

SEQ ID NO: 1469 - DNA, 506 bp, Homo sapiens
cgcttagagaattagcaaggaaataagatgggtagttagagaatgtaaatggcctggaagagagtagtgagtgaaccaagtcaaatgtagttgggagtggaggaagacacttggaggctgaaggaataacatgtgcaaatacttcagagcaataaggaattatagtcacaaaactgaaagaagtacattataggtagaatttagaggtctaaggagagaatagggaaaggagataaaaagtagaaaaagatgaaactcggctgtgatgggtttttccttaatttttcttttttaacaagtgacatcagatttacaattctaccagcatcacttggtgattgattggatgatggagtggtggtttgggtggagtcaaaagagatgaaagaaccaaagaggatgcaaaactaatgcctaggtttctgatttggtcaatggcatgaatgataataccattcactaagagaccacaagagtggttttggatgggaaagatggtggatttc

SEQ ID NO: 1470 - DNA, 497 bp, Homo sapiens
atttatactcaagaaggatcttagaaaatatctagccagagttttattttataaatgtcgaattctaggcccagagaggtaatgtaacttatccccaggtaaacagtttacctacttagctggtaaagcgtccaggaccactgattctcagtccagcccagtaaagtatgtatttcccaaagaattataaggaaaagagaaaagttttcataatccaatgctggatttaacaaacttaatttagtttaatttctataagacttctcagaaactttattatatgcattgggaatttgctaagaaatgggtttgctattcagagtcttctcaattcataaggtgacataatcctttacttagggagcatttctcagcactggccttctctagacactttggaaaagctggtagggtggaaagtgcataggcttgggaatcagatagcttcggatttcagctaagtctctaccaggtagtagctgggaagactttggcat

SEQ ID NO: 1471 - DNA, 605 bp, Homo sapiens
tcttttaaaatcttattggtcccatgactctcaatgaaaacaacttcatataacaaaatcaaactgtaatatatttcctcagttgaccgaaatgatttagtaatagatgatttggctattgtaatagtgtatatcctggaagtttctcagaataccttcttagtttcaacttttgttgacagatctttctgaaaagatccatgtacagtgttttaaaatctcctcaggatagacattctgagtaaggattcttatgtggtgtagataaattgtatcttctacatatacaaagtggctgggctcagaaattccttttctttgtttttgagacagggtcttgctctatcgcataggctggagtgcagttgggtaatcactgctcgctgcagcctctaccctcctggcacaatccatctgcccaccttagcctccagagtagctgggactagaggtgcctgcctccatgcccagctgatttttaaaaattttttgcagaaataaggttttaccatgttgcccaggctggtcttgatctcctgggcttaaacaatctgcccaccttggccccacaaggtgctgggattacaggtgtgagccaccgtgcc

SEQ ID NO: 1472 - DNA, 548 bp, Homo sapiens
agacgtcgaggggtgggcagtggatccgaccagagctgaactttagaaaagatctgttgcttggataaggaacagattcggttgctcaacccaacctgcccctatcgccaatgacccagctcaacgttctctctggtttagaggaaaacaacaggacgttaggaagtaaccagatcagatggtcagaggtggatctagggggagccgggacactctctaacgctcctccagcaggagatgtcctgggcggtgcctagaggaatgtgatggcttcacgcatgtggaagagcctagcgagtgaggctccctgcagctatggatgtccactgcagcctcatgtcctggcctcgccctcccagtatgagcttggaattttcttaaacaagaaatttccagtgttggccaggcgcagtcccagcacctttggaggctgaggcgggtgggtcacctgaggtcaggagttcgagaccagcctggctaacatggtgaaattctgtctgtactaaaaaatacaaaaattagctgggcctggtggcgtgtgcctgtag

SEQ ID NO: 1473 - DNA, 384 bp, Homo sapiens
gctggagagacgacagagggactgcaaatataatccaatataatggtcgaattgaagagaattacttttcaggggcttattaagtatttttagctatttctttaataagatatgtatgaaaacctgaaagctctataacaatttgttaacttctaattggaggtggagtaaatcaaacttcctgttgaacactgataagaaaaataatcactaatttggctactgatgaataaaaatatgtaggcaccacagcatagaaatgactgtgtccttattaaataagaaagcgaataaaaatccacctatctaagaatgttagtaattgctaagggcttttgcaaacagagatttccatactatacttgccctcccttattccacata

SEQ ID NO: 1474 - DNA, 508 bp, Homo sapiens
acgacagagggcttgtccccaaaacataatttccctgctgtatttatctcaatggaatttagaagtagcgtggattatgtcaccctgagagttatttcttgtgtccactaaaagagaaaatgcacagaagaacgtgtctatcttaccgagaccactcatacagtgttggcaagaggacagtccccagagtctcaccatataatgaagctaatcactctatgaattatcttaattgaatttgaatgtattgctactgagtactatgggaagagcggccagtaaggacgcggtattttcccacagcattcagttagcaatgcattcaaatttaattaagatcattcatacagtgattagcttcactggggatgtccgtgctacagttgcctgcttttggtctgcctaagataggcatatctactttcacaggttgtctcttgtattgagtacaggattgtttgatccatccttaagtattatcctgagatgtgcttttcattttggaatc

SEQ ID NO: 1475 - DNA, 571 bp, Homo sapiens
gtatccatgtaataggatgttttctgtcaccttgaatggtttttgccctaatactttttcttaaattaatagagtccaacctttaattttacttattttctttttacatattttcccattcttatgccttaaaacatctttgccaatttgttttagatatgttttagggagtagcaaataatttgtattttttattattaatcatttcaatgcatcctaattttctttccattttaatagaagtaaaatactgatataagttgttatcattgatatgattcatattatttatttgttttttcatcattttattttgcttacctgctgtgttttacatttcttgtaatatgattgttttgtttgagttttttggggggttattggtttcctatttgttttccgtataaataagtgatttatacactagctacatagaaataggacattctcttttagtttcataagctttgtttattattatttatcctagttactttcccatacatttactgttgacttttccatgccctgagatacattgtaaagaattatagtgtatatatttaaccta

SEQ ID NO: 1476 - DNA, 470 bp, Homo sapiens
  misc_feature 254: n = A,T,C or G
cctgaatgcatttctactacctgttgactaacaagtccttaaccagcaaaagaatcttattcactgtgtatctccctattctgagctacaattctaaaactgtcccgaatagatgtctttattttcctctggtcaatttcatatttgaacttaaggctaaatgtctatacgtgtgtgagtgtgtgtctgttggtatgcaacaatgaaatgtgtatgactatttaccaatatcgaggtcctattccaggtatcanggatgatcagactttactctttaagttagctttcgctgcaagacttgctctggccaataaaactgagcaaaaatgatgtgtgtctcatttttgctatagtgttgaagaatccatgtgtgggcctccatggttttccccactgttactgaattctatgacattctaaatggaagaggcttcatcagcttgggtctcagagtagaaatgacatgaatc

SEQ ID NO: 1477 - DNA, 449 bp, Homo sapiens
gtataaagcgtcttttctgactgtaatgaaataaaactagaaatcaataagaagaagaactttggaaactatacaaacacatgaaaattaaataatatgctcctgaacaatcactgatcaatgaaaaaactgaaaagaaaattttaaaatttcttgaaataaatgaaaatagaaacacaatataccaaacatatgagacacagcaaaagcagtattaagagagctcacagcaataaatacctacatcaaaaaagtagaacaacttcaaataaacaacaatgcctctgaaaacactagaaaagcaagagcaaacaaaacctaaaattggtagaagtaaggaaagaaattctctcacatcagcggccctcctagggaaccctcaaaataaactaatatctggcccttaaagataacaacaagctttgtgccagaactcttgatgatggcag

SEQ ID NO: 1478 - DNA, 538 bp, Homo sapiens
cagaagtttaatttttataatgatggatgaagacagtaatatctaccttgagtggcttgtcataagtattaaataataaaaactagcattaaaaatatctagcatacctagatatatgttatatgttatagttatatgtttaaaaatttgtgtttatttcatgccttatttatctttaagaaactttatagcctgatcggtgctgattctttttccaaaaagtcacgtaaaattttatcaggacaatgttttctgtaacaaccattatttcttgtctttctgccataagtggagaaaaaagatgtgaaggatcttgagttttcatactttctaaatgggctaagagtacagatgtcagaagctatgccatgctacactatgaaacatgtttgttgaaaaagtttccacttcaacatgattttggaatgaggtgcagacttttccatacaatatctatgaataaaaatattcatttggtatttgattactaattaatcagatattaattgcattctctattataaaagccatattgtgc

SEQ ID NO: 1479 - DNA, 544 bp, Homo sapiens
acgacagaggggtctcactgaaacctccgcctcccaggttcaagaaattctcctacctcagcctgccgagtagctgagattacaggtgcccaccaccatgcccagctaatttttgtagttttagtagaaatggggttttaccatgttggtaggctggtcgctattcaaacatttttttaaagacagcatcttgaaaataaaaaaggtctcacctcccagagtaagtgagatatactttaattggtattcagaacctaccaaagaaaaaatcatgaacacattctctccaagacactgtttaaattggtaaaggaaaacaaagatttaaaattaaaatcttcagaagaaagtccaccttcaacatccttcttatggccctctttggcagtactcctgtttgcagactcaaaaatttctcccctctctcctctacagctacctaagcagctgaacctaaacttgttctacaaacccctaaattgacaatcccccacagtggcctttcctactcctgctctaattctcgcatatccttttaaatact

SEQ ID NO: 1480 - DNA, 394 bp, Homo sapiens
accacataaaacagcagtcttcaaaaaacggaaactgcaggataggtaggaataaaaaaacacattcataaaggttaacattgccactctgaatccaagacaggttaagaggccaaaatgaaattatctagaagccttcagtttctcatggatatgataccaagcattgcgcttcaataacagagaaaacacctttccaacctcccttgaaacgtttatggaaacttgccacatattaagacacaaaggaaacttcagtaattcccaaagcagagagaatctaaacatattctctaatcacagtacagtaaaactagaaattaaagactcaaaaattaatttgttcaaaatggtaacaccttgtatcagaatccatgatgcaattaaagcaatg

SEQ ID NO: 1481 - DNA, 341 bp, Homo sapiens
ctctcccttcttggtgcttttaattctgacttaatgtctataggtacagaagtatcttgtttctataacctacatgctgcaggtggcagagtggaaagagaaaaaaggataccaagaacagcgggatccactgcatccacctagacttgtgatgtgaggaaaatacccgctttttgtttaaactactattagctgcttgtatctgaaagcatttctaaacgacatagcaatgaaagagtagatgatctcaaatgtacagcttgggtctaatattaaagttctaattttaaataatctcattgtccagagaaggatatctttccacagcatctttgacacat

SEQ ID NO: 1482 - DNA, 336 bp, Homo sapiens
agacagcccagatatctattaccgtaagtctgcaaatatattgtacctagagttaaaatgcaatctcatgctctataagctttattgcatataaggaaaatgcctaagaaaaggccagtacctgaagaaagagctatgggaagggtcagctaaccagaaggcacctttttttctgacacagtgagaccatctaagaactgcaatgaatcagggaaatgaggctctaaggtaaaaccaggaaggccaggcagtctgcaaataaggggaagggaactatcagcatgaagctgtgattcagacaccagacaaacagtcagaaagtagagaatacagggc

SEQ ID NO: 1483 - DNA, 545 bp, Homo sapiens
acaccacaaacgctgggccaaaaaacaccaaagaaagatcacttgaggtcaggagtcacagaccagcctggccaacatggcaaaaccctgtctctactaaaaatacaaaaattagctgggcgtgatggtgggcgcctgtaatcccagctacttgggaggctgaggcaggagaatcgcttgaaccaggaggcggaggtttcagtgagccaagattgtgccactgcactccagccttggtgacaagagtgagactctgtctcaaaaacaaaaacaaaaaaacgctgaagagcatcaagagcgagggaagagcctgacctgggggctgagtagcaccaagtcaacgctgttggccgacagcccttgccccgctagcaggtttggcctcaagcttcccagcctacccagagtgaggaatccaggagacccccacagggccacatcttagaagtcagggccagaagcaagcctgtcccaaccaacttgccccgaagactgcaggggaaatggctgaacagaatgagaaaaaagcagaatggagcccgacg

SEQ ID NO: 1484 - DNA, 644 bp, Homo sapiens
  misc_feature 406: n = A,T,C or G
ttcatgcatttgacttattaaaacacttctgaacaagatatatgatttctggtaggttttagttacatttacatgtgtttatgttgtgtgtgcatgtgtgtgtgtgtgtgtgtgtatgtatttttggtgttactggcataagttgtgctatgcaatctaggagattgaaactaattatagcagtgaggctaacaaagtgtgaaaagtgtgaaagccatgaatctgaatgaaactttccacttctgtctatgagtttttataaaaactctgatgatattttcacccaaaatatgtgtttttcttattttaaattgttagcaagctaaataaatcatcctgattatttttatattacatgggttaattaatacatttttgcaaatgacatcaattcctttcttctcgngtctcttcttgtcctttttgcttccctctacaaacactcaatgcatattatatgtttttatatacacacatatggaccatggttctaggtgttaaacacacagaggcaaattaaacttcaatcctgacctcagtgaaattacaactcaatttgtaagcatcatgataaggataagtaaaagattatgtgaagtaattcccaagattgtttatggttttatgctacacagcacaataag

SEQ ID NO: 1485 - DNA, 615 bp, Homo sapiens
caatcaaataataatcactatcagaagggcaggtgaatcttgttgaaaatcccagatctagatttctttgctaacatactgcacccgcaagatttatttattaatttattcactattcatccagtaattactttttaaatatttgctcaatgaattgcattgagtaaggagctgggtgaatacagaagtgtctatacatggagatttataagctattttctgtgcagaatatacacataaaaactatgcatcaaaaccagatagtaaacgtaagacttgggcttcagcacaagaagaaaggaacaatcccatgggttagattggccttggagggcttcattaaaagttcattatttagataggtaggctttcaatagacaaagtgaaaaaaagatggcatatcaaatagaaagaactttgtgatccggagggaatgttcatgatatgtgtgaatgaagcaaggggtggtaagaaaagagaagtctattaaatagaccagtaccagtgaagtcgaagttttaccaagggaggatgagagataaagttggagaacaaagtcaaaatttagagtggagaaagcagtctaagcaatataatagtattctctaagtaata

SEQ ID NO: 1486 - DNA, 517 bp, Homo sapiens
gtatttttagtagagacggggtttcaccgtgttagcccaaagtgctgggattacaggcgtgagccactgcgcccgaccggttcacattattaaaataaacttaaatgttatatagatgttattaatgaaagcccaatttaaaataagaagcatgagccaggcagagtagcttacacctgtaatcccagctacttgggaggctgagatgggaggaatgtttgatgccagaaatttgagatcagcttgggcaacatggtgagatcctgtctctcaaaaaatgatataaaataagaagtatgagttgaatatataccattagtatgggaatgctaagggaaggttctgactacttactacactatagcgtaaactattacagtcagactaacaggagcaggaattctgactagttttggttagttgatttttaaaaatttatttatagcaaagaatgaaaaatttatttagatactataaacacttactttttaaaaaaatatataaataggcattaatt

SEQ ID NO: 1487 - DNA, 224 bp, Homo sapiens
taggaagaatgattaagcaaatgatggaatattaactcaatgtgatatcatgtagccattaaaataactgtatttactaggagaactagggaaaatgtctgacaatattaactaaacaaaaacaaaataccaaaaaagtttaaatagagtacaaccatgaaaacatacatgcatagaaaaaactaaatgaaaattctttaaatactggaattataagtaaatat

SEQ ID NO: 1488 - DNA, 656 bp, Homo sapiens
gtatctgtctcctgccaagaaactatatttcccaagggtgagaatctctccacaccaagcataatatgtgtttatcacagatgtccaaggatgttattgaaagaaacatggaaggaaattgcactaatttttgctgttataggaaaatccaccagttatctctagcaatcaaatgtaacaggcaatgtttgcctctaatttgaccaattccaaagattttccctgaagtcttctcccaaaccaaggtcatattccaacaacaaattactctgataaattcaagatacatgactttcacctggaagtctggcacttgagggtagaagattgctaactgagtgaacctgtggtccagattagtctttttactactgaatttcgttgaaaaaaattaccagctttactttgtgctacacacagtcttctaaggcaggctaaagagtaaaactaaaggactctgctcccttctgcagcacgtagagaaaatattttgtaccagcctaatactgcaggcctgatggtcaaattttccctttctttatcaaaaagaagagaaaaatgaacattgatattatttgagaaaaaagtagagaacccacaagccatttgcccagttagtgacatttcatttatcagcacaaaatgtcacataaatc

SEQ ID NO: 1489 - DNA, 343 bp, Homo sapiens
catctaaaagatctctggttggatggaaatcaactgtcagaattacctcaggtaagtggtaatttcacagtgtctccccaaaacataaaacagcaacaataagctttgtgtatttcctgctgccacataaggtttgctataaaaggatcttgaaaaccaaaaacattgattgaaaaggcacatttggaaaaaacatattgagcatgcatcattctccattgccatataaaaactgaaaacctcaacccaccatttgtaaatatagtaaatatttcctttagtttgtaaaatctgtattttattgtgtccttgctacccatatagcttacttcaagcccagcag

SEQ ID NO: 1490 - DNA, 349 bp, Homo sapiens
aaatattgtaagattccacctccatgtactcttgcagctggaggcttgtcccagagctcacccagatggttttggcataaggctgcttgctcactgttcaaaaatatgacctaaaactgacagctaacaaagacattcagatctcactgctgctcagggctgtctcatccggcttctcccctgccccctcctttgcttccttgctggcctttgaccctgctgacccctcagctactgccctatttattgctccttcatctgagttcaccgccggagtattcgaacatgcctgcatttcctctcaacctacactgcctctgattccctagtatctggcttcatctttcta

SEQ ID NO: 1491 - DNA, 629 bp, Homo sapiens
tcagatattcaatgcagcccctcagtctacctgaagaaattttaaaatattctactttgattttacatctaagagatatcccttagtggtcaaactgtggtgtatgtatatgtatacggccacgttaggaaaaataaaaatttgtaaactattcaatatattgtgattcaactatttaataacaccacaaaatgtataagacaggtaaatttgcttttatttagtaattgggccatgcagtacataattctttctctttccaggatattcatgattccctaccttgaatcaatgccgccatcttccttttaactcaggtaagcaacaaatgccaagctccattattcattatcataaaaattccctcattcactgacttaatgaatccatactaagtacatactgtgtttgatgtagatatctatatagtctcagatgttcctgcccatcactttcattttcagaagatgagcttgacttctttgcaatgaacattgacgatagcaagaacttctgttattttttttatccacatgctgccataaattgtagtacaattatttctgatttcaaactgtgaatttgttctaatgcaactcatatatccaggaaccttttaagcataacac

SEQ ID NO: 1492 - DNA, 600 bp, Homo sapiens
cacagttccgtgtggctggggaggcctcataatcatggcaggaggcaaggaggagcaagtcacatcttacatggatgacagcaggcaaagaaagagcttgtgcggggaaactccccttataaaatcatcagatttcgtgagacttattcactatcatgagaacaacatgggaaagacctgcccccatgattcaattacctcccaccaggtccttcctgcaacaagtgggaatttaagatgagatccgggtggggacacagccaaactgcatcaccatttcacccacgttttatgtgttggtgctagtgggagtactaaaaaactgttcccagatcaataaactgggaaacaaaagtgagaagtggtagaaagctgtgaagaaggcccagaacagcagcagtttgtacacaagagaggtgatgctgagaaagtgaaaaacctgaaggttttaagagccgaaaaagtgctaatgtgaaaacacgccacatggttttatgtaggggcccctttactttaatgctttttccaacaggaaaatttgacttaagttatttgagtgcagaattacacaagaacttcaagaaaagttataaaatgtaa

SEQ ID NO: 1493 - DNA, 421 bp, Homo sapiens
ttctcagtgttctttcctaccaccctccattcagatcaaatgcaaaagcagaaggaacagccatgttaacccttcatttcttctaagatccaaatgagggcttcatatgatcactgtctttagatacgctgggattcatacgtccatcacccaaaggacaagtctaactcagtgttctattccttttttggttcttttctttgcaagggaagtgaaaagtaggcaaatgttagtgagtgtcctgtagaaataactcaactgagatttaaccccattgcgcactccaaaatggctaaggtgcttaaaaatggctttcagcgtgaaaattctattcctgcatccttgttttcaccattaaagacaaaacactgctggccaggcgcggtggctcacgcgtggatcacaaggtcaagagatcgag

SEQ ID NO: 1494 - DNA, 441 bp, Homo sapiens
taatcaaaattttgtgatatagagatcaaacaaatatgaaaataagacatgaaaggtcaacaaagcaaaaaacaaaaaataaggatatttatatagttttaaaatctttaaaattttatgactaggcaataggaggatacagaataaaaactaacagatttcagcaatgaattacaaaaatgaaaattatttcagtagtaaagaccgaactaaaagaaattatgaaacatttagggatgaaaaagtttctaaaatgaaaaacacactggaagagtttaacatcatattagacactcaagaagaagaaaaacacatagcaaattttaagtcatagtaattatcaagcagccccagaaaaacagaagagaacacagggaactagaaacaatgtatttctaaatttagtaactgcaactcttgatataagaagttcagtgaaac

SEQ ID NO: 1495 - DNA, 388 bp, Homo sapiens
gggattttaggtctgagccaccatgcccggccataaaacaaaattaaatgccaaaagcaatcccccaaaataaaaaataacatggcataaagaaatccaaatgtgtaggccggatgcggtggctcatgcctgtaatcctagcactttgggatgccgaggcaggtggatcaactgaggtcagaagttcgagaccagcctggccaacgtggggaaatcccgtctctattaaaaatacaaaaaaattagccaggcgtggcggtgggtgcctgtagtcccagctacttgggaggctgaggcaggagaatggtgtgaacccgggaggcggagcttgcagtgagccgagatcacgccactgcactccagcctgggtgacagagtgaaattctgt

SEQ ID NO: 1496 - DNA, 378 bp, Homo sapiens
cacacaataaaagcagggactgcaaccctaaaaaaaatagctgggagcaaatgggttatactattgaccaaaatcctggaaaaaggaatcaacacggggaagcatgaagcaggaatcagctcaaagaggcctggctcccaggagtggatgacggggtagccagtggcatggtctccagccagccccttcacctggggccagcttcctcatagcctgagatcttccaaagatcccagactatagttcaagaccagcctggccaacactgtgaaaccctgtctctactaaaaatacaaaaatttgctgcacatggtggtgcatgcctgtgatcccagctacttggggaggctgaggcaggagaatcacttgaacctggga

SEQ ID NO: 1497 - DNA, 123 bp, Homo sapiens
aagagaggctgaagggttcagaatcaatgattacagccttcgcttaggaaaacagtaaaaggaggaaataatccaaagtcagtgggaggaaggatataataaaaataaggtccaaattaataa

SEQ ID NO: 1498 - DNA, 467 bp, Homo sapiens
atgctctgtgaggacctggctcatgccactgagcagctgaacatgctcacagaggcctcaaaaaaacactcggggctgctgcagtctgcccaggaagaactgaccaagaaggaagccctgattcaggaacttcagcacaaggtgagaaacacacaggtgtcactcaagatgggagacaagagaccaagtgtagtggctcactcctgtaatcccagcactttgagaggccaagcgggtggaccacttgaagtcaggagttcaagagcagtctggccaacatggtgaactgaaaccctgtctctactaaaaatagaaaagttagccgggcgtggtggcgctcacctgtaatcccagctacttgggaggctgaggcacaagaattgcttgaacctgggaggtggaggttgcaatgagccaagattgcaccactgcactccagcctgggtgacagagtgagaccctgtctc

SEQ ID NO: 1499 - DNA, 459 bp, Homo sapiens
ttgatgatatcaaagcctcattctcctacattaaacattctcctacatttagcttcttgaatcttctatgtccactgtctagaaaacctaaacacatgaagtaccacaaactagaaataaatacctcaataggcaccaatcataaaagtaaatccaagaaggaacagaatatatgaatacatatataacaagtaaagggattcaattaattaaaaatcatcacacacaaaaaagcccagagtcatgtggcttaactgataaattctactaaacatttagtgaagaattaatgccaactcttcacaaggccttccagaaaatagaagacagttattgggaacacttcccaatttgttctatcaggccagtattaccctgatactaaagccagacaaaagcatcacaagtaaatatgaacatagatgaatttccctgataaatacacaaacagaaaatctc

SEQ ID NO: 1500 - DNA, 553 bp, Homo sapiens
gtattcaccccacagcttgaggccttaagagtaatatttaaaaggtcacatctcgagttcattcatgggcatgccccgtgccagtgttgctgggagcataactgcatagaagtataaagatttggatgtcaaaggccatctaccagatgtgggggacgaagctgcagggcaggaacagaaggccagtaaaagcatcattggaaatcactgtcacattgtttataattacagggaacaactgcagagttctgactactcaatcacagtgcaatgagtaatggaaggctacgtagtggcaagaattgaaaagaagaccaggcgcagtggctcacgcctggaatccgagcactttgggaagccaaagcaggaggattgcttgagctcaggaattcgagagcttgagactagcctaagcaacatagtaagaccttgtctctaataaaaattgaaaaaattagctgggtatgatggtgcacacctgtagtcccagctacatgggaggctgaagtgggagactcgcttgagctcaggagttcaaggctgcagtgagccg

SEQ ID NO: 1501 - DNA, 97 bp, Homo sapiens
atggtaaaggagatttgattatatgaatattgaattattacatatgccctgaaattatgtacatctaatatgtatcaataaaaataaataaatggga

SEQ ID NO: 1502 - DNA, 401 bp, Homo sapiens
gttaagtcctattctccccactacttatccttgttgggaaacactgttgtacacagttagtaaactgatatgcagtagtagtaataaacatagtaataatactgctcataaaatttgatcttacttataataatgtcttttatttatagatttgtcaaaagacctttgcttatatcatctcactgaaaaatcacaaaagcttcaatgaccagccaggtgcagtggctcacgtctgtaatcccagcactttgggaggccaaggtgggcagatctctgaggttgagagttcgagaccagcctggccaacacagtgaaatcctatctctactaaaaataggaaaaaaattagctgggcatggtggctaatgcctgtaaccccagctactcaggaggctgagata

SEQ ID NO: 1503 - DNA, 320 bp, Homo sapiens
agctggcctgggagatcacatggccagagactggcagggctggagggaaggggcaggcagggcgcctggtaaattacgccagcaggatcaagagttttccgggaatcaaagaatgtggaactcagtgagcttttccctggatttaatgggattctcagaatctgaaacctgcactttggacatgacgacttttatgctgtttgtagtttctataattatttcctttttgtttttccccaaattctttttgaaatggtcagcctaactcagctggaccttaaggacaaggaaaggaactggttcattcttaggcgaagatg

SEQ ID NO: 1504 - DNA, 398 bp, Homo sapiens
aaatgataatttatcattcctgcccaatcacacatacatacatttatgtatgcaagcaccaacatgtacacacacgagagagatatatcatcatgcaagtggaaaattatcctagaagatgtaagcacaatcattcaagaagttaaaagcactacaaacactttgggaggccaaggcgggtggatcacgaggtcaggagatcaataccatcctggccaacagggtgaaaccccgtctctactaaaatacaaaaaaattagccaggcatgttggcgggcgcctgtagtcccagctaccaggtaggctgaggcaggagaacggcgtgaaaccggggggcggagcttgcagtgagctgagatcgcgccactgcactccagcctgggagacagagtgagact

SEQ ID NO: 1505 - DNA, 591 bp, Homo sapiens
tggtagcctacagatgccatgtgaatgcagaaatagtgaacatgtcttttgaaaagcagtctgccattcacttcccatgatctcagactggcattttaaaaaatacgtctatcattgtaaattagtgagattctggtatttgattaatattaacaaaatactgaggaatgttattttgttttactgaaggcagctaaaatgtttgatgttttaatgtaagtttttgcaccagattttataggggaaattttaaaaaatgaatctaccacacccttgctccccatgtagtgacctatgagggtgtgtggaatggtgtgtgaggatgttcttgttgcctgtctgagcctcagatgcctcatccgtacagggtggataatcataacttacttcttagggttgatgtgataataatatctataagttagtaagggatgagcaaacattcattctcttccgcttccctttaacagccttttatgaacatgctcctttgctacccttgacgactctttgaaacctaaaaaggagctttagtcagattaacagctggggctgaattttaggtcttccatccaataagagtgagctgct

SEQ ID NO: 1506 - DNA, 494 bp, Homo sapiens
ggatttaagtaagaaaagttcaagctgcacaactggaaatatcttaaaggcttttaaaatgtttctttgaattagaaacctctttcttcacaattttcacatattcccatcttgtcctttttaaagcaattacacaaacaaatctcatttggccagatatctccctctggatactaatcaaattattcctttccttttaatctcaacatcttaaataaatctctgtatttcaaggaggtaatataattatgttacttagaaatgtgacaataattagcaaattcaagagaattaacttaaaatattaaaaatattgagcatgttaaaataataaatgagaatagactacaaaaccagggcttttatgttaattttcccaaacatttccagcctataaggtcacattatcctgtgaccttatgtctgacatgtaatatttttaacacccaacctgcttaactgcagggaatctagtcatcttatctctaagtatg

SEQ ID NO: 1507 - DNA, 177 bp, Homo sapiens
atcagggttcgattccggagagggagcctgagaaacggctaccacatccaaggaaggcagcaggcgcgcaaattacccactcccgacccggggaggtagtgacgaaaaaaaaaaaaaaaaaaaaaaaaaaaaagggggccctttttttggtaaatcccaaatttaaaaaaaactttg

SEQ ID NO: 1508 - DNA, 307 bp, Homo sapiens
agagtgaggaggaaccaggtgagaacgaggccggagacagaggaggcagggggtgagaggaggccagagacagcggccctgtaaagaaaacattcaggctgttggccgggcgcggtggctcacgcctgtaatcccagcacttggggaggccaagcgggtggatcacaaggtcaggagttcgagactagcctggccaatatggtgaaaccctgtctctactaaaaatacaaaaaattagccgggcctggtggcgggcgcctgtagtcccagctactccagaggctgaggcaggagaatggcgtgaacc

SEQ ID NO: 1509 - DNA, 353 bp, Homo sapiens
caactttaatcactgcatagccagactgcatacacacacatgcatgcgtgcatgtgtgtgtgcacatgcacacacacactatgtcacttctgagatcccttactgaattaattgtagctttcattcttagattttacattctatgactgtctacctcttttcagaccagctttctgggcatcttccaattcaatttgaggaaaacttgtaaattttaagataagagagactcagatggaggccaaaagatgtaatttggaaaatgtcaaaaccaatttaaaaaggaaaataaaagtataaaaaatgcatgtttatgctaagtcaaaaaaccagggagtatttcagctcacgag

SEQ ID NO: 1510 - DNA, 344 bp, Homo sapiens
taaacaatttagaaagtcatcttgggcccattggcagtatgtatcccattttgggaaaactggagtggtcaaacaagaacatttggggcaaatgggatgctttggcaggtcctaagagtggggaagctgaggcagctggttcagtgtattgctatgaactcatggaatatacacagcagagccaacctagagactgcctggaggaagcttcagaactaagcagttttgcctcttgtgacaaaagtatcctttgtactcccacgagaacacatcgaataagttaaacagactgagattgagtcagagattttccacctaaatactggcattatgcttacacaagt

SEQ ID NO: 1511 - DNA, 575 bp, Homo sapiens
gtgtgtgtgtgtgtgtaggttgagaaaggctgcaaagaagggatggggtgaggaggaagatggatggcatcgtacaaatccagtctcaccgctggaaactaaacttaaagtaccctcatcccctcatcgtaatagaggtggtgtgatcaagtaggctttattccttcgatgcaagtttgattcaacatatgcaaatcaataaatgcgattcatcacataaacagaactaaaagcaaaaacacatgatcatctcaatagatgcagaaaaggcctttgataaaattcaacagccttcatgttaatcccaccccgcaaatgtggcattgaaggaacatacttcaaaataataaaaaagtcatgtatgacaaacccatagccacatcatactgattgggcaaaagctggaagcaccccaccttgaaaaccagaacaagacaaggatgccctctctctccccactcctattcaacatagcactggaagtcctggccaaaacaatcaggcaagagaaagaaataaaagacatccaaataggaagagaggaagtcaaactatctctgtttgcagacaatatg

SEQ ID NO: 1512 - DNA, 591 bp, Homo sapiens
ggacatcttaagtctctagctcagaaacaatgagatgtaaatttgagttgtccagaattgtatttatggccatctaggaaaattcttgggtaagttcgacatttcggcatgttgctgggattcttccagggtttgaccctaggagtatttgtagttgctcctgtcagtggtaatttagcaagcatggttggagagatgcagactgacatcttctgggatgttggcctcagtgagaattcgacatgatgaatattagatggtagagcagttggaatcagaggctgaagaatgggaccaatactgattccaatccccactcttggcctcatccatcaccatcatctccctgcccttttcttctccaaaataacgactagcaaaataaaactctggccgggtgtggttgctcacgcctataatcgcagcactttgggaggccaaggcgggcggatcacgaggtcaggagatcgagactatcctggctaacatggtgaaaccccgtctctaccaaaaatacaaaaaatttgccaggcatggtggcaggtgcctgtagtcccagctactcgggaggctgagtcaggagaatggcgt

SEQ ID NO: 1513 - DNA, 488 bp, Homo sapiens
aaatatttatgttatagctatttaaatacacttttattgtaaaaatccagtgttttggaaatttttcattataggatcaaataattaggaagaacataagtaagagacattaccttattcgattattcaattccttaactaaaatataatttagttgtaatttaaatcataattccttgaaaaagattgtttttcaaatataaggtattatctgttttataactctggctcactcctggtttctatgcactttttcttaacagcattttaagacattaattttaccttattgataatgcttcctttttgaaatctttccagcagtgaaattaccatgcaaagtataacttcaagtgtcaagaacgcaaacatgactaaaaatatattgctttacacatacaacaagtgtatgtgtttctgttttactggtttagaagatgtgtcacttgaatattcaaaattcagtgactttctcaatttcggagaat

SEQ ID NO: 1514 - DNA, 605 bp, Homo sapiens
gcctcagaagcagcgctttgcggggaggagagggctgggtttcgaacccacaaggccttcaggacctgtgagggccccagcaggtagaggagcggaccatgaaccaggtaggagagagggaagaggggactgaaaaggtcgtcaggccatcagagaagttaatgaattcacctcaccctttcaagccaggagttctaaccaagagatcaagggcagaggcccctgggggcaggaaggtggggaccggaaagcagtgaggagatgacacagtgtcctctggaatctgggtaacaagctctgaagggccagagctaaaagggcatccctcctcctctgagactcttagggagtggccatggggtccaacagggtcttggactctggctcaggctggaggtttgaatgagcagggtaagaaaaagagagcctggctgcgcgcattggctcacgcctgtgatcccagcactctgggaggctggggtgggtggatcagctgaggtcaggagttcaagaccagcctgaccaacatggtgaaacccggtctctattaaatacaaaaaaaaattagccgggcatggtagcgcatgcctgtgatgccagctacc

SEQ ID NO: 1515 - DNA, 500 bp, Homo sapiens
ggagatttgattgctgggcttgaaaatgttgaggacaaagatgactttaaagaaagtgctcttagtggactacaagtgacaaaatactgattgtagagaacccgaagatttaatagaatatgaggaattctatgagttttgtcataagaaattggtaaggaaggggatattaggttaagggaaggatttccttttacagctgggcattggtatatatatgtaattttctgaatattcagtcctaagagaattatcagtaaaatgatttaaaattgatacacctttttctttcaacttatataattcctgagtttggatagaaaacgttcaaatagaaaggaaatctgcttttttttctttttctttttcttttttaaattggatcaagtgacaccaggccaaacacactgaaattaacctgagagacaagtttagagtttagatttcatttagtttcccagattgccattcaaatttcatagaaattttttatctgaact

SEQ ID NO: 1516 - DNA, 553 bp, Homo sapiens
tcctatttattttccataaatgacatgacaaaaattctttattgcattggggtgcgagtggggatgtgaacgggacgagggacgaggtataaaactagttattgcacactccaaaagctctgatttgaaaatatagtttaagccctggtttacagaaacactttaaaactctagtcttaatctagctaaagctccttaccatcttggcaacaaaagcaatttgagcaatttgagcaaaaccataatctaatttaacctaaagcttgtaatatgtatctttgcattaagtaagatgtgtagttttaattactttccttaagttagaaagtagggcccagtgcagtggctcacgcctgtaatcccagcactttgggaggcctaggtgggcagatcacctaaggtcaggagttcgagaccagcctggccaacatagtgaaaccctgtcttcactaaaaatacaaaattagccgggcatggtggtgcctgtagtaccagctactcaggaggctgaggcaggagaattgtttgaacctggggaggtggaggttgtagt

SEQ ID NO: 1517 - DNA, 526 bp, Homo sapiens
gatacacactcatatgtgtatatatttaggtattttttcttaatactaggtacatgtacacacctatatctatacctatatctacagttttgccacctatatgaggtacaaattcatcaagttttgattattttttaataagtgaaaaaactttattaaggatattttatatgttcatagctattttcaattattatacttatcagaagtttatttgataaatattttactttaaacatctttgtttctaatagtttcctattttactgtcttgtaccattagggaaatccttaagttctccaaatagataacctttatatttcacactctgtattgcatatcacaacaccttgcatatagcaagtattgaacaaatatttcttatttgttaatataaaataaaatagatataatgaaagaaaatcctattagagttaattgcatctagagctacaataaaatgaaaattagatagtttaaacaaattttaagcatgtctaaataaaagcttaaataatcctacaa

SEQ ID NO: 1518 - DNA, 454 bp, Homo sapiens
gaccctaacctctctttgttctcctagacccagtgggtacaagctgcttcctacacttattacattacctcaggttcctgtgtgctgtcagccctgtgtgtagcacccacactccttctgatcccttcagcatcttgtgcacacaggcttaccgcgtgctttcacagccagcatctgtgctccctcgtatgtgcccagagagtgagaagtgcctgacaattcttgtccgcccgaggcagccatgaataaatgaccatggaagctttaacaatgtagctcccttgcctctgatcaggatgactctgagagatgtgacctacactgtctccagagctcccctgtggggctgtgccagagtcaccgtccatggattcgcttttctgatcctacaacttcactcccctcccagttttccctggagtgtcttcctaataaactactttcacatggattc

SEQ ID NO: 1519 - DNA, 487 bp, Homo sapiens
atgtaaagaaaaataaatcgagtttaaaacaaacacagtgttggggcaaatcccctagtttttcaccgtaataatcctgtggaagttcttttgaccaactggattctttttctttccattttttcctctgctgtttttgttggaggacttacagtagtggaattttattcactcttaaattggttaatttcttatgctttttctttgttggcagtcttactgttgccacagtggtatggctgaaaagacatcaaagggatcaaaacaaagaaaatttattattgagattatgtgatatggtagaaaaagtataagcgtagcagtcatttgacctatagacttagtcacctatcagctgcctttcttttatttttctttctcgatagctaattatttatttaaaaagcagcctatattgattctaaaaaagaagagaaagaggaaaaatacaagcaactaaaattaaaatgtaaagttaccattaatg

SEQ ID NO: 1520 - DNA, 450 bp, Homo sapiens
gaaatttcagctaactctcaccacctcccactaaaccgctttcctgagggcagaaatccatcttccagctgtgaatcaggatttgccacaagaaacccctgcctgcctcctaacacctgccattcattagacactgaatccggtagggcagtcctgggatctgaaggtctttagatcgccagggccacgtttctgggaggctggtgtatttggaaccgccctatcattctgggagccctgtgcgtccccagctgccctgcggagtcgctgttagacattgtacacctgccctgcaccccggatgcagactccgtaattcttcaagtcagccccagttcatgcaactgacttttctcaatcaaaggcatttgccaagtgttcaaggattattacagcgatttattacactgagaagacttttcatctggatacatttgcaagtcaaagaaa

SEQ ID NO: 1521 - DNA, 556 bp, Homo sapiens
taggaggcttaataacatgctggcctctacccactaggtctactaacaaccagcaccccacttaacgtttttactccagacactgccaaatgtcccctaggggttacaatgccctggttgagaatctctgccctagagaatagtattagcatctcagtggtgacaataagataaagcagacccttatttataagtgagatacagctgggactctaagctagtactgttaatttatctcttcaacaaagttactattaagtgattcagaaggcacatgtggagagcaaaaaataaaaattaaaaaaataagctgggtgtgtgttgtgcacctgtagcacctatagtcctagctactcaggaggctgaagcaggaggattgtttgagcccaggagtttgagagtgcagtgagctatgattgtgccactgcactccagcctgggtgacagaacaagaccctctctcaaaattaaatgaatgagtaaatgaagatgtattctgatttaaccaagctggtacctcctagtgactgtatttggtagagaattacagttttga

SEQ ID NO: 1522 - DNA, 606 bp, Homo sapiens
tggtttctgtaatgttggcagtcactgcatttaattcaagtagcatttatttttgcagtgatattccttattgcagaagcatctagtctcacatcatggccactgaagtatcggtctggtgaaattgcttcccacgggagttagttgaaagcctgaagtcatcaggggtcaccatctgggtaatgtacttcgtatatatttcaggaagggaactgtccaacatacaagcagatctgtagttttgacaagccttggaagtaaaagacaaccacttgtagcattccttagcctgaaggaacatgaagggaactagtagggggagaatgctgacaaaaagggaaaacaaagtatcttagaaaatattatatgcttttgtcttggcatgctgcgaagcaggacatgatccataatggtcaggactttatttgtaagataggtttcaaactttctaaataggtttatttagtggatttagaaaataaaaacccaaaattcttgcaacaaataaatataacacccctagctgaatatctttgcatttcaaggtgcaagatgaattccttgaaagcaaagttacatttgtcttaaaagtcttataatttcaag

SEQ ID NO: 1523 - DNA, 537 bp, Homo sapiens
tgatttctcaccctcccaaacacttaccttatttttttctctatatctgtttgtttttgtttccttaatatattccaggaaatttatttttgggttgtcctacaggagaagttatgatgaatagaaaagtgtgaagaagaaccttctattctcctcagagtatagggcaaagagcgtgcaattgcacccaaaatatcagtgtggaagggtcatataactgatactagcaagtaacacattgtcttacagaattctcattcttaggctaaaatattaccttcctcatcaaacttaccctgaccgcatgcttgatgttgtttgattaaaatataatacgcttttatttcccaaatacacaaacacacacacgcgcacacacacacacatacacacataatatatttggggaaatatatgtgctataggatctatatttattcacttctaaaaattgtgctacatcaaaaatgacaaaaaaatgccaaaaagagttggtaaaatgatcacctgtattcagtcacataactattatttagt

SEQ ID NO: 1524 - DNA, 280 bp, Homo sapiens
ttatctttgacacagtgatacccattgtccccacttagtttttaattttcaaccccacctggactacactgaccaccctgacctcaacaagttcaatttctacctttattattgacctataattgagactccactcagcagacattgatacctaatcagtcctgcatttggacaatccctcttagattgactcagtcatgccaagagctcagccgctgcttccttctctgcctgctgtcatctgattcatcatgacacttcagtaacaggatgttaaatg

SEQ ID NO: 1525 - DNA, 641 bp, Homo sapiens
gattagacctaaatattctgatggtcttgcacgttcattttcaaaatcatttcttctgtcttttgatagaaaattcagaatctccaagtaaagtagatatgcaggttacttgatgtcaaatgccacttcaattttctgggccttcacacttttcattctcattctgttatattatacagttgacccctgagaaacatggatttgaacttcactagtccaattataggtacattttttggtaaatatattgaaaagttttctgaagatttgtgacaatttacagaaattttgcaaatgaaccatgtagcctagaaatactggaaaaaataagaaaaagttaggtgtgtcatgaatgcataaaatatatgtagatactagtctattttattatttactaccataaaatatacacaaatcttttataaaaacttaaaacttaccaaaacacacataaacacttacaggccacatatggtaccattgcactctagagaaatttaaacaaatgcaaagatgcagtattaaatcataactgcctaaaattaactacagtatatactgtactactgtaataattttttatccacctcttgttgctattgcagtggtctcaagagttgcaagtatttgcttaaaacact

SEQ ID NO: 1526 - DNA, 604 bp, Homo sapiens
gaacgcggttcccggggagactgtatgatttttcaaatttttatcagtctaagtataagagaagaactctaacctccccaggtgatttggatatctactctggagataaagttggttcatcgttaaaatattctgatgaaagcaagcattgtagaacaccattgggcagcttattcaagcacgtaaatgtgaattgcctagatgatgaactggattctttccatgatttgaagaaacaggaaacagaagaagagttaattgaaaatgattatagagttagtaccctcgaaaataaccaagcagtcttttaaagaaatagaaaaagttgccttgccaactaatacgacctcatcgagacctcggactgagtgttgtagtgatgcaggtgactctcctttgaaacctgtcagctgtccaaaatctaaagcatcagacaagcggagtttacttccacatcagatcagtcagatatatgacgaattatttcagatacatctgaaattgcggtgtgaaactgcagcacaacagaaatttgctgaagaacttcaaaagcgagaacgttttttacttgaaagagaacaactgcttttcagacatgaaaatg

SEQ ID NO: 1527 - DNA, 542 bp, Homo sapiens
ctcaccgagtaaatgagttgcctttagttttctctgttcccatgatgttgagctgagagatcctgacatgcacattgtcagagctgccttatggtcagaagagtggatggtgattttagggacacttgggagttgatttttctctaaagtattttaatgatggtacatgtaataccatcattagagacatgtttgtccactacttttagttgcttttgagaaagcaagcactttccataaattatataaatggtcatttatatttatgtgtgaattggattttcaaatggcatcatgagaaagtagttcctgcacatgaagttgctaaaatatggggcaagttacgtaaaggagaattgaaaagcatgagagacaggactgctgatttctaaacttaatgggagtctgtgtgtgtctgggaagatctagaagtttcttgcactggaacggcaacagatgaaaaaagtgctaggtcatgcactcaaggagtgcatgttcattccttaagaactctggaatcagatgcatcatgttgatgctta

SEQ ID NO: 1528 - DNA, 557 bp, Homo sapiens
ctagccttccagcaccagcaaccacccactccagccttcttgatgtgtgagagaagtaacctccaattgtttaaggcactgtattacttgctgcaaatagcattcatgacttattgcaagtttgtggaaacacaagtttttcagggtgcttttgcaagggatgatgctgagacgtcaagcaggtgccaggctgttgagggccctgatgccacattaaaggagtttagcagtgctttccaggcaatgggtcctttcccagtgggatacatcagatgactggaggcagcacacatataaggcaatgcataatcttgaatcacacaaccagacatttagctctgttcccattctcttccagtccttctaattacataaagaagatctttcaaaattggcctaggtggctcacgtctataatcccaacactttgggaggccaaggtggaaggatcacttgagcccaggagttcgagaccagcctgggcaatatggtgagactctgcctctacaaaaaatttaaaaaattattagccaggcatggtgatgcacacctgtggt

SEQ ID NO: 1529 - DNA, 576 bp, Homo sapiens
gtcatcaacatcctcattgtcatggcaaattgtgagtttatctttgccagtgtcagatagttcatcaacttccttttagccagattgcaaaaagtcccatgactctatttccaactccaatgccatctgacatgagacaaaatcagagtagattaagatagtggtcttaactgaatgtagttaaagtatgctacttgtgcaaatttttcagaaatatatgaccatatgaacatgttgctgaggccttgccaggccttgaaaggggcctgtgcaagtgaggggcacagagattaagttttattagcttctcagaaattctacctctgaataagatttttgagtactttgcatgccaggatgaggagagtgaatctaagagatgtattgaatgaagaagtaagatacattggataaaggatgtaaagtaaagaatatagagtgctggccgggcgcggtggctcttgcctgtaatcccagcactttgggaggccaaggtgggcggatcacaaggtcaggagatcgagaccatcctggctaacatggtgaaaccccgtctctactaaaaatacaaaaaat

SEQ ID NO: 1530 - DNA, 513 bp, Homo sapiens
aggaggtttgtgtaattatgattactgaaggaagaagacaattatgtcagagtatagaagtatataaaatagctaccaggaagttattttagagaaatttttcttaaaagactgtaatcagaaacaaagacaattaatgcagggacattccatgaacttattcacaaaagctggtaacaggacttaataatctttgaaagctgcatttccaaacattgacctaaccattaggaccaagatggacctaatattctaattaccaagaagagagtggtgatgaattaagtggggagagaaactgagtgtaaactggaagattttaatgttttatttaacttaactaattctggtagaattttttactttgaaactctattttatggtaatttaacaataaggattctaaatggtggctcagcattcagggctgagaaagacactgaagggtaatgccacaaggagaggctggataaagctctaataaaattatttcttttatgctacttactagca

SEQ ID NO: 1531 - DNA, 517 bp, Homo sapiens
tctgtatgtgtgtgtgttgtgtgtgtgtgtgttcgatgaaaaggatgtgcacatttaaacatgtttgcattgactgaattttaaaaaattcataataaaagagtcaattccaatgcctgtcaatgcataatagttctcactttagagtccttgatatttctcttcctgattagtgtcaccacatcattcctttaaacattttgataaaagagatatcaattaatggtgccctggtaaactgtaatcagaatagattcccaagatgaagttggttcacctgtccctttaacaaccagctatttaggcgatcaatgtcagaaaactagaacaaatagaaacacattttccagtagagagacattcagttgactccattttggttttctttctcggtttaacttttgatttacccaagaaagaccaggaaatcagtgattgcctagagtgaaaactgctagaagaagagattatatacaaagaaggataaggaatattttggatatgatgaaaatagtct

SEQ ID NO: 1532 - DNA, 517 bp, Homo sapiens
agagttgggaggaggaagtggccatgctgcaggtgccctaacagatccagggaagcatggagagcacagccactagcctgcctcgggctgcagggggcggggagcacatgcggcgtgcagctgtgagcagcgcaggtcggaagaggcatttggaaatgacacgctctgtccaggaactgcagtaaacgttctagcttgtaataatctttccttctggcagatggtgggttcacactgagttaagtagcttcacgactgctagtggctggaagcttccagattagtagtttaagccagaaaacaatgttgatacgtcttgagatgtgtataaatcatttgatttggctgggcagggtggctcacacctgtaatcccagcattttgggaggctgaggtgggcagattatttgaagtcatagttcgagaccagcctggccaacatggtgaaaccccatctctactaaaaatagaaaaattagccgggcatgatggcgcacgcctgtaattccggctactc

SEQ ID NO: 1533 - DNA, 371 bp, Homo sapiens
atggctatgtcaaatttgagatgcaggtggtgaagacagggggggagaatcagttgacatttgaaaatataggtttgaaacctacaggaaaatattggagtaaaaaaaataaagaaaatcaaacatcaaaggaaatgctggaagtgtgggaattgataaaaggagcacaggaaaagtgtgcagagcgttgttacccaaagtgctgtgggaattttatacacatatgaatacagctcacaaaacacacaaatatttttgcttccctggatcatttactggagtcttttacatacacattctgaagtataaggtatgcagaattttctaagcgtatcatagaattccattccaagaatacatttcaggaaaac

SEQ ID NO: 1534 - DNA, 317 bp, Homo sapiens
tttgtcctttttaaaaaaaataaatgtttttggcaacaaatcgacattttacattattcccatataagatgaaatttctaagccagaatttaccatgagaaaaaccttaaagaaatgggccgggcatgatggcttatgcctgcaatcccagcactttgggaggccgaggtgggtggatcacttgagttcaggagttcgagaccagcctggccagcatggggaatccccgtctctactaaaaatacaaaataaccaggcatggtagtgcatgcctgtaatctcagctactctggaggctctggagcgagagtctcttg

SEQ ID NO: 1535 - DNA, 617 bp, Homo sapiens
gtgcaggtcatacacaaaagaattaaaaccaatcataacagcaaaaacttgaaaataaaaagattgtcaattaagcacctcaaaaataaaatttagaaaataatggctctgttagcatcacacaagtatatgctgtagtttaaggttaaaggcatgaaacagtattgtgtcatgagaaaatgcacactttacaaaaagataaaacactagtaaacaggtatatagatttggtagctcagcagctaacttcataaagtgaaaatcattaaaaatgccagaaccttcattttccaaaagactttagaaaggaaacttcgagagaacaggggaagttggcaaagaatatgcagattccttgaggaactggcagctgatagttggagtcccagaagctcacttatgaatagaggaagaagtcaagatgatctgccagttcagataatcagtggaaaatcctctgcataaaatcactttagtgatgatggaaatagaaagctaagacactgaatagccagttgcaatatccagtgtgccagaggcatacaaagagagcactcattgaaacagagtaagctgagctgtctccaaacagaaatgtggtatgcttttgtcatatt

SEQ ID NO: 1536 - DNA, 551 bp, Homo sapiens
ctataagtgccagttactacttaactcaatatccacaaacagcgcagaaggactagattctttcattggtctgtttaagacaggtgagagctcttattattcctgaaagagttatcacagctggaggagcagcaatacaattcttgcaataaaagaggtggtaagtgaaatcaaaaggcaatgcatctctcttcttccaacccaacgtatttttatttttactggaatacaagttaagattaggttgcttattcttcggctgaggtatgagcatttatagctcagctgttcagagcaagagctgagcagttaaatactgctctgtgccctggtcctccgccagccgcccagcagacaacacagcacgccgagctcagaggaacactgtctcctcaagtgcttcttcttcctctgtgttgtttcctgtgtttccccacatactgtgcctttccctgtacaggtgctgtttccataagaatatgttgctcaattctccatgtggtcacctgttgaaatggtccatcatagccaccaaagcagcactaggcatg

SEQ ID NO: 1537 - DNA, 619 bp, Homo sapiens
tcagaaaaccttttttgaaattgttgaataaattgttttcagataaaccaagcaaaaccagaatgtggacggcagagccttgttgaacttcttatccgaccagtacagaggttacccagtgttgcattacttttaaatggtacttgtctgatctgtttcaaactacatcagatattttaatggaattgtttttttccaaaaaagatgaatttcttctcatttttagagtttcttagatttcagcattaaagtttatatatgttttgctttatggattatcttaaaaaatagttactggtgctactaaaattcagcctggcctgaaatattttatttgttgattagtagtatatatttcgtcttttcatttaaaatttttcttaatatttcatggtgtgtcactaattcaaaatcattttatatccaagtacatacaaaatttgcccacaaaatcacaaagagaagataatttgtatgtcccgacttttttgtagccctttttttgaattttagtaaagttctatatacttggctttatgcttactgttttgaccttagattgttcagaatactcttgaaacatatctatttattctagaactgaactataggtatcaat

SEQ ID NO: 1538 - DNA, 571 bp, Homo sapiens
cactcactcttttgctaatcgttctctaaatcagagcttcccaactggtggccacaaaacactggtgggcaatgaacaagtaactgatacgtcaagatattcatgctttcactgaccagatgatctccatgtcagataatgccaggtagatgccaataaacttggtgtgcttatagaggaaggaccacttgattctccctgcagagcatctataaataactgagagttggatgatgccagtttatattttgttaatgtaattttcaaaaccactctctttggggttgtcaagtattcctggggtgccacatggagaagagctatttccatagtactaggtaacttgagagcttttataatggcttgtaatcactggaaattattagcgtacaagtttcggtaacaattcttataaagtaggcaagagcagctgccattacttctaaggtcatacctgtaaggcttagaattggggactatgaattaataatgagtttgcaccagtaggattttccaagtacctagggcattagtaaaaccaatttaaaatatatttatatttgaggaaagg

SEQ ID NO: 1539 - DNA, 554 bp, Homo sapiens
ggggatagagtggtggataggacaggtttgtgatctcacagatctatagtttagggagagagacagacaacagaccaggaagcaaatacagatagggagaggtgcacagaggaaagtaagacaaggggtgtgggaacaaatgactggagatggtgctaatttggattggggggtggggctcagggaaggctgcagaggtgatatgaatgaaatttgagaagatttaaataaaaagaaaggtccaagaatgcaaatttctgggtagagtggtccagggaggaacaccaaggagtgtcttaaggtagaagtgtgtttgatgtgttcaaggaacccagagaaagccagagaatcagggggactgggatgaaatgagatgagagaaagacagggtggaccactgggaagggtctaacttactgcaactgcagtaggaagcagtggaggctcaaggcaggaagcatgatggtgaaatttatccttgtttaaaatcaatccagattttaagtggataaacaaattatcatgtatccatagaatggaatatatgatagaga

SEQ ID NO: 1540 - DNA, 603 bp, Homo sapiens
tcagccaagggaaatacacatctaagactaagaaaaacatgatctcttagcctgcccaagttgaaggcacccagaatttgtcccaagagcaaacttctagaattctcaacagagaaaacccaagcagagatcttccagagcaagccattctccatcacacccctgtccagcaagaagagagccatggttaacacaagcacctactgcaccacagttctcaattctggctgcgcgttacactcacacacgaggaactttgacaacttctgatgcaagggtcccatgccagagactcggatttaagtggcgtagtgtcaaaccaagtcaccagtacctctgaaatatcttcagaagctctgggtgcagtggctcacacctgtaatcccaacactttgggaggcagaggcagaaggactgctggagcccagaagttcgagaccagcctgggcaaaaatagtgagaccatgtttctatgaattttttctttttaattaactgggcatggtagcatgtgcctatagttccagctactccagaagctgaagtgggagaatcacttgagccaggaaggtcaaagttgcagtgagccataattgcaccact

SEQ ID NO: 1541 - DNA, 385 bp, Homo sapiens
  misc_feature 295: n = A,T,C or G
catatattccagcaaattaatctctttcttgagcttcagacttctttttttcaacttcttaatatatacttttagtataacatgctctagacctatcaaacttaatttcatttaatgtaatctcaattaactcatgttcttaagtggaaaatattgtagtcatcctcaaactccctgagtattttatcaatcacacagctaaatatcttaagcctcatattttctttcacagccattccactctcacctgacatgatgtgtgataatattaactcctgatcaagcttcctcattntttcactctcctgtatatttcacactcccagctcaggtttgcttcttaaacacagatttgaatacattactgtaaatctctgttttgctt

SEQ ID NO: 1542 - DNA, 520 bp, Homo sapiens
tcttttgtgggattttctctatcgatgccatccatcactgtggctgcaatggagctctctgtatcttccgcctccacagtgctcagctgtttttctcacctggcaccagaaatgcaactcaaagaaagaaacagcagaagggaaataaaacaagaacaagaagctgggattgaagccagatgaggtggaatgagcagaggggctgagagatatagaatctaaattctacattacgctttgccacaacccacctctgagagtgttggccccatctctttcatcatttcttctgcttcttaaaaaggttgatatgatgaggaaaataggaatgaggagagaggatctaaagtctcgttgcttcaaagctttagctgttcaatatcttctaagatttctgtgattctgaaacttacacgtttaaaaatttagagcctgatggactagcgctgaaacaagcaaagcagaaggtagagccagtgagcataggatttgctgtccatgtgtagggggaaaggagaaa

SEQ ID NO: 1543 - DNA, 517 bp, Homo sapiens
accaaacgacatgagctagaagctaatttgtttagttcagcagtgtatcctcttataattaggatagaccaaggcatgtagtaggtgctcaaaaaatatctgtcaaatgaatgaataagagtggcttggagccagcccaccctcttatgaagtaccagtttcctcatcttcaagacagaaacagtaataggacttagcccatgaggttgctgttgattcggtgaaatgatattcataaaggtctgagcacagtggctgggacataagcactcaaacatcagctgctatcactatcgtgtccttccagtaccttttgaaaccttgtgctgatgaattcagaaagcagccctaaggctccctttccctgtgctgctctagccagtcccctcccaggcaggcaaggaagcttctccaccaatgagcctctttatgcactcatggttccatgtccaggcaggcttgggcagctggggtacagagaagcgtagggtgccttcacatacctgggatgcaaacc

SEQ ID NO: 1544 - DNA, 619 bp, Homo sapiens
aaggctgcaggttttttaatgatgttttactcactctacatgggactacagagtggcctaaggctaacaattgtaaaaatgataaacttttgccctgccataccttctttgaagtgtcatctcccctctagaatctgtctggctttgtttactcttcaatggcttcaggtcatgtgtgtgcgtgtgtgtgtgtgtgtctgtctgtctctgtgtgtaaagaatatttatttacaggaatactaaattattggtatatctagaataccctgtatcatcatctaaatttgctgggagatattattaaattagaactagctgttaagagcacatttttagatgtcaagatcgttttgtgtgataatagagatgaacctatttgattttgggggactgcctatagcacaaattttgcttgtgaataactatactagtgtgatataaactcccaacatttctgatgtgttagtagacaactaattaaaatttctaatttctattcttcctttaaagtttttagttccttgaagcttggatgttcattgttttatcctaatgtctggtgcatttcctggcttatagaaaacatgatatatttttaaaaggataaattatatggaaa

SEQ ID NO: 1545 - DNA, 600 bp, Homo sapiens
gtaggattggaagcttgtagagtcttctctgtgccctcaatatccccagagttcatgacagtgtgctttgaatgggcctaattttacattgtacagagtatttggggcattctttcaatatgtatttcataactttcaactctgagaattcaggagagaaattagaagtagaagataaatccaggatgtccaagttggagttttgggaaaacgagtatataataggaaggaagttatttgtaaacatacatgaaaatttcccagaactgaatatcctgtctgcagattgaaaactctggtagcatttaacacggtgagtgaaatgacacccacagcaaggcacgtggtggtggcattttgtggtttgtatgtttgaagctgtgtttaaatatcacatagaatatgatttgaacttcaatatacagtccaggcaataagtattgtggctgagatggaggagaagttgatactgtttggctgcatcaagatacattcaggagtgctgggcgcagtggctcacacctataatcccgacacttgaggaggtcaaggcaggcggatcccttgagcccaggagttcgagacaagcctgggcatcat

SEQ ID NO: 1546 - DNA, 567 bp, Homo sapiens
gattagacctaaatattctgatggtcttgcacgttcattttcaaaatcatttcttctgtcttttgatagaaaattcagaatctccaagtaaagtagatatgcaggttacttgatgtcaaatgccacttcaattttctgggccttcacacttttcattctcattctgttatattatacagttgacccctgagaaacatggatttgaacttcactagtccaattataggtacattttttggtaaatatattgaaaagttttctgaagatttgtgacaatttacagaaatttgcagatgaaccatgtagcctagaaatactggaaaaaataagaaaaagttaggtgtgtcatgaatgcataaaatatatgtagatactagtctattttattatttactaccataaaatatacacaaatcttttataaaaacttaaaacttaccaaaacacacataaacacttacaggccacatatggtaccattgcactctagagaaatttaaacaaatgcaaagatgcagtattaaatcataactgcctaaaattaactacagtatatactgtactact

SEQ ID NO: 1547 - DNA, 575 bp, Homo sapiens
caaactcctggcctcaagcaatcctcctgcctcaacctcccaaaatgctgggattagaggtatgagccaccatacctggcccaaacccttatttttatgtgtcattagccagaattgtattacatggccactttttccaatgagatagatactttctcacccctagtcaggaagctagggattatagatattagggaggcaaatttttcactttgagacactacaacattggtgggggcttatgtgaatttaagttaaaagctcctgattgggatgttgtcaggagcacgcacaaggctgttggggttggaagagtagattcctggaatgaaatttcctagtaatttcctttctttatttagtcaacaccaaggagtagtctgcttctcccctttctgttgctaccacttctctctaatcaaactgtttcttctctgactcattgcagaaaagaacattgtctttccttcagcctttttcttactctcctcatttctaaaggaaatgcctgctcagcccatctttctgttttgaaggtttttatagaagattaaaatttcccccactctgttctt

SEQ ID NO: 1548 - DNA, 546 bp, Homo sapiens
gggttccactgtggtttcccaaggagaggtaaataataacagctagtatttattgagcacatactatgtgccaggctcggtgttactcatttaacactgtgttttctattaactaatttaattctaacaattccatgatgtagcttttattttcagatgaagtcaccaagacttgctcatggagacacagctggaaagcagaagcaccaggattcaagcctgggccggtgggaagcctgaggctcttacccgccctcccttcagtgctgccttccttcatgcttcacttgttcctttttcaatgtccctgcttttcctgccctcatttcaactgctcatccgtcttcccagacttttctacagacgtgcggcattgcagtactgctcttgctgcaaatgtcagatttccttggtcagatttgcttattgtgggactttctgctgagatatatcagagatgttacaactgcgagaaatgcaggcagttctctgcgatccatctgccatgcaatgacaagagatgcttaaaggctgtctggtagaact

SEQ ID NO: 1549 - DNA, 463 bp, Homo sapiens
ggatttcggtaaaagaaaagaaattgttctgttaaagttccttctcaagctcttcagaaaagatcagaataacaagattcagtttgagtcatttgcttaaggatcgtcttgattgagagttgagctggtattttactgccagggtgactaaaataactattttgcctactccttcctcttttcacattcatacacatcagacgtgacttggagaggattccactaactcagtaatttttatccagttcagatcagaagtttgtgtgaagctgatcaatgttgcttaggttgtaaatgcagaacttggagattttatgtggcatttacaaaggggtcattagtcatatattagcagaaaatcagtcaccgaagtatgaatccttgttatgtgccatgatccctgccttcatgaagctgacatttggttgtagagagggagaccaggaaaataatgaagaatgtg

SEQ ID NO: 1550 - DNA, 290 bp, Homo sapiens
ttagcattttttcccactggttctaaatgaaccccatcctccttactttaaaccttcagaacagttgcctatagatagagttattagtcagacatttgggaatatctaaactacagaggaatgctgaggaattgtagctacacatgatgattgcaatttcaaggaaagggaatttatgctgaaatatttgaataacttcccctcttagtttttactatgtcaaaaaaattcatgtaaatgtatccctttacacaattggtctactgaaatttttggtgaaactaaaacac

SEQ ID NO: 1551 - DNA, 205 bp, Homo sapiens
ctgttccctctgccccacaatgacatctccgcggactcttttcagtctttcctatgtgaacctgatgggatttcttacaagaaggtttggattctgccaatgtctacagcccacgatggttcccatagtcccctgtcctgcattctcatattcagctttcacccatctgtcaactattcttcctgacctcttcttgtcagtatca

SEQ ID NO: 1552 - DNA, 618 bp, Homo sapiens
acacctcagccaaacaaatcagaaagtcagctcacaaccctctatttctcactcctgagaaggctgctcataaacagtgatctcatttgatccccacaacaacactatgaggcatgtaaattggtattagcaccattttacacaagaaactgcaactcaaagaaataaggggcttgcccaaagtcacacaaatcaagatgtctgaaccaggaccagagcacaagtcttttacctactgacccaacattcctttcactcactacatctgtaaatacgcagttagaaaaacctgatatccaccataatctgcaaactttcataatatacatttgtgactacaacattcttaggtaggtaaccacccacataccagctatgcacatcaaaaacatttacacgaaagatcagctaatgacctgcttattaaaacaaaaccaggacttgcttatcaaaaacaaaaccagggacaagaggggctgccaatgctgtatctcagaactaccactcatacacatgccctaatgactaacacccattgactagcatcacccctacctacacaacaaaagaaccccacttttgaaaacctgccaactctaggattcaacatactacact

SEQ ID NO: 1553 - DNA, 371 bp, Homo sapiens
actcacgatggatatgcttttagagaaacactgtgacaaagaccctttgctccagaggaaggacctgcagtggccccaggctgtggctccagcatcacttaagacagtgtgaacatttggacacaattaaaaacaggacacttaatcaaagagcacacttacaaagtaaaggggcaggaaagctgggaggcaggaggtgcaggaccccacgtgggacaggcagctgtgtgttgttggtaccgccttcctgccatggctttcctacaccagcagagagaaagcccatttctgctctctgctgcaagactctctggatggaaggtccagttccacaggaaggaaatcctggtagctgaggcgtggctgtgcac

SEQ ID NO: 1554 - DNA, 473 bp, Homo sapiens
ctcttctaaaactgcctggaactgaattctgccaacaacctgaatgaacaagaaaatagattctcccttagcgacaccaggaagaaatgcagccctgatgacacctagagtttagcatagtgcaaccaatgtcagactttcaacctacagagctgaaagatacatttgtgctgttttcagtctctaagtttgtggcagcaatagaaaatgaatacactcttcttacaaattttgtctgcatatttttattggagtggggttattttaaaacaagaaaggacttgtgagtttaaactaaagattcttagaacattctggaatgatatttatttttatgaaataatttctagtttaaacacatgacattgattttagcttgcattctaagtcatctgagatttgaaggatgttccatgtcttagtcttatttattggggcaactttgcaattccaaaaattatatacacaaaatg

SEQ ID NO: 1555 - DNA, 501 bp, Homo sapiens
taattcctttggaaatctgaaagatagcggtacatgcatgtgtgagacttatttttactctgtctacagacagcatttgggagcatataggggatttgtagacaagatgcagtagcttaatctaccaatcaggaaccactagcttactgaaacagcactcaagtcaaagccccacagtgggagtgtttaatgggcagggcatcacgacttaaattcccatcacaattattaaaccaaaaaggaaaggcagtttcccacaagaaagccagaagtttacagaaaaaggatgaaacagaagatgtgtagccagaaaacagctatccattacaaacaatttcaaaagatcattcatatatttatttaatcatgtgtattgatcaattcgatcattaattgtaaagacttaaaggaaataagcctagaaaagtaaaacttgaggcaagcgctagggaaatggcctattctagctaatggaatatattccagcctgagatggcaggc

SEQ ID NO: 1556 - DNA, 619 bp, Homo sapiens
ctatgtaatacatctgcacatcctgcatatgtacccctgaacttaaaagaaaagttaaaacaccccaaaacacccactgtaattctaatccaagtagccactatagtaactgccattgtctaagaatttcaaaggcttttgttgattaattaatgagtataccctattctcaatgaatatgagatgacaatttggtaacataactaactgcacacacatacacagacctacacgtatattatacataccaatgtatctgagggtgattgcatttactaaagtggctacctggattaggattactttcagctttgctgatgaaagaattcaagagtattgtttggttaccctgtaactgtaatatcattactgcagaaactccctgagatatactcaaggatttacacacagggatgtatactgctgcaccattcccaatcagaaaagagagaaaaattaatattttggaatgctgaaatagtttagaaaactagaatttattaaaccatgaaaacaaactacatctgtatatattgatatgactagatttgctttatatcttatgtagtaagataattcctaatttttcctggtatttttattatgggcaggcataaaa

SEQ ID NO: 1557 - DNA, 480 bp, Homo sapiens
tgttcatctatgtgggtcagctccaagcacaaagctagaaagcatttgagtgaaggaatattgacatagggaggaagtgaaaagactacattttccaagcatgacattacatccttcgcacagtgcaacaagcagacaaactccaaggctccatgttaaacacacacacacacacacacacacaccacacaattggttttagcaacaaaatttcagcccatttaaaacctttggtgttatgttctcactcataagtggaagttgaacaatgagaacacatggacacagggaggggaacatcacacactggggcctgttgggaggtgaggggcaaagggaaggagagcattaggataaatacctaatgcatgtggggcttaaaaacctagatgacagcttgataggtgcagcaaaccaccatggcacatgtatacctatgtaataaacctgcatattcagcacatgtatcccagaacttaa

SEQ ID NO: 1558 - DNA, 540 bp, Homo sapiens
ataacttttaaactgagccagtggtcacaaactcatttgtatcaaggggctaggaggcaacacaagagtttttaaatttttttttaattttttggagatggaatctcgctctgttgcccaggctggagtgcagtggggtgatcttggctcattgcaacctctgcctccccggttcaagtgattctcctgcctcagcctcctgagtagctgggattacaggcacctgccaccacctggctaattttttgtatttttagtagagacggggttttgccattgtggcccaggccggccttgaactcctgacctctagtgatccacccaccctggcctcccagagagctgggattacaggtgtgagccaccatgcctggcctaaaatttgtttttttaaaaagaaaatttactaaaaaggactaatatgctcatacttactcatttttgttaaattctgtatgttatatatgtaaaagaacattttaaaaaatgcaacttttaagaacttggcattgggtttatgttgcctagaattgaaacata

SEQ ID NO: 1559 - DNA, 324 bp, Homo sapiens
ctgccagagtcaccacttgctgagtgattaggcctccgagaaagcaaggcggctgggggacatgcgaacacgacgagttcggctgtgcctgccttctcctcactgcccaggtgtgttctgcggccaagcgtccgagtgctcttatcttcagtgcctatcatgcacatacgtaacccacaaatactgactgaattagaattagggttattagggttatgacttagggaaatctttcaatgtccttggcttctatctcctcatttgtcagatgaaactgaaatacaagcaatgccttataaatttgttgtaatggggccatgcatg

SEQ ID NO: 1560 - DNA, 573 bp, Homo sapiens
aatatttatattgacagaaccatattttcccaaagttaatgttatttctgggtgataaaaatgggcatttcttgataggaatttggtcctgtatctaagattaaacttcctttctcacatacatctgctctgtgttgccatataagtgatgggcagtaatgacatttttgaaatcactcaagccataatcctgctactccctcattccttacatagagatggtcaccaggaatactatctagttgccaatccctaatacctctctaatcaaggcacttgtttctttctcaccgtcttagttaagatatcctcatcattcaccagcagtttttaaactccagtgagcttcagaatcaccctccagagcccaggaaaaaatccgaaggaccagcctctacccaggaggttctgattcaaaagggaaggacaggacaggcctggtggctcatacctgtaaccccaacactccaagaggtcaagtcaggaggatcccttgagcccagaagttagagaccagcctgggcgacacagtgagaccccatatctacaaaataaaaaataaaaaaaaaatta

SEQ ID NO: 1561 - DNA, 504 bp, Homo sapiens
attcttagtaaacatttaggagcaaatgtaacaggagtataatttaccttgaccaagtataattactcttaacccaagagtactgctcctgctttttacgcaaagacaatctcacataggtcgataaggggacaatttgaggctagttattgtgaagttatctgggggcagcctgggtggcctgtcactgggaaagcaggcaggtgagcgggggcggtgaggcactggaggacgtgcagtaggtagtaatgacagtaacagcgtggggtgagaaggaaaccagaatgaggaggggcagctcatttgaataaagtcaatacctgctattaaaataatcattttggccgggtgaggtggctcgatcacgaggtcaagagatctagaccatcctggctaacatggtgaaaccccgtctctactaagaatgcaattagccgggcgtggtggcaagtgcttgtagtctcagctactcgggaggctaaggcaggagaattgcttgaaccc

SEQ ID NO: 1562 - DNA, 606 bp, Homo sapiens
actggaagggcttggggaattcctaaaaactccatttacagtgtaggagatccccttctgttactcaaagttcccttcttacagagtattctgagacatttgtgattagtatccccttgagctttgtttctaatttccaccttctttcagggctcagaggaagaaaactgaatacatatacatacacactcacacacacacacacacacacacacacacatatatataatgataaatatataaatacacaagcatgcatactcaatcacacacaaacacacacacatcaccctgatactgttagttcagtggtcctagaatttaagtcatttatttgtaccacttgactctagtgtcattcattcctaattagtccatgtttaaacataacttcagatagaagacaatgaggattttataaaacataaggtaagatatatgtctgagaaaaaggcaggtctgacacaattatggatttaaacgtttttggttgattctggcactattagcaaaaataatacataaatttatatagtgcctactatgtagtaggatacgagataagaagtagcaaagatttgaatttaacagtttttgaatgaaaac

SEQ ID NO: 1563 - DNA, 599 bp, Homo sapiens
aatttatctatgtcaggtacctcatataatatttatctcacacatatgtaatgcttctcaaatttgcatgtcattctggtgcattctagtctactctgtattattccaatattagtaggtgtactgtcaaagtgagcagtgtttttatttttttagaaaatttcttatcagtcattgctagtctatagaaacataattgatctttgtctatccaccgtgtatcctgtataattcagtatttgctattattgtacatagtgaattacaggatgcatatcttgtgtcctgtatcattcaactgttttcttacacttaataaaaatgaccatatttctccattgaattacttacacatctttgttgaaaatcaattcactattcattcttataggctgtttttgtagagtccatcaaattctctacatatatgattaaatcatgagaaaaatattatacttcatgctttccaaaaggaatgtctttcatttgcttttcttgtctaattgcattggctagaactcccttacaatgttgaatacaggttcagggctataagtgcaggtttgttatataggtaaacttatgccatggagtttgtt

SEQ ID NO: 1564 - DNA, 580 bp, Homo sapiens
agctattggaaatgcaaactggcagaacctttcttgaggataactgacaattaatatgaacaaattgggggtacttttagcccaataattttagctataggaacttatcataactatgtataaagatgtagctgaaaatgggtttatcatggtatcatgtataattgtgaaaaataaaaaacaaccagagtccctcaaaatagaggtttgctgtaataatttttaagattttggtgtatctggacaatggcatattatgtaatatttaaaagcaatgtagaataattccttccttataaaactatatttgacttattaagtcaatcccaataaataaaatcccaaacaactggttgtccgctaaaatgttaactgcttatttagggtgttgagattatggctgctatatgtttatttacttggcttctcttagcttacttttctaatcaggtattttgtaataagacaagaaagctattttagtgattggttttaagcagtaacttggaatatatgccttagttctagctagtgatgctctgtctttacagatttactgagatgtttgatgattttccac

SEQ ID NO: 1565 - DNA, 316 bp, Homo sapiens
ataataataatggctgcatttgttgttgtttcccctgtcttgatcccctggtggatggtcattgtgcagtagaaacaagagataatcctgtgtgcttccttcttgtttcactgaatttggccccaagtctacctgaatgcccttaaccagagttctggaacacttctgacttaggaagcctcaaacaccctagtatgtttccagttttccaacagttgagaaaaacatgataaagccgcaaattctatatgtggaaaagcagtgctgtgtgaagaatggtgtacacctgagtcatttgttggcaacagtgtgatct

SEQ ID NO: 1566 - DNA, 318 bp, Homo sapiens
atttcttcaccagttcgcacaattgcataagggctaatctccacaataaatctcttatttcaaattgatgataatagttctgattatttgaatgaatcctaaccattacatcccacatcagaccttatgtaggtcttacatatgaccttggcagcacgggtagattaccactgctgtgatgtgattacactgattcaaagatgctataatattttatattctgtagtgctgaaattgagaattaccaaatctagcatgagcagtgaaattagaggcattttattactgcaatatttatttatagctacctatttatat

SEQ ID NO: 1567 - DNA, 288 bp, Homo sapiens
tctgtacagcagcagtcacctattttttctcgttgaatattttcgatccatggttggttgaatccacagatgtcacactcacagatatgaaacccacagatagagagggcttactgtacttagatggaaagtaaagaagaataaaaggagttagagagaggccggaaggatcttttagaaaaggtggttgggaaagagctttctgtgctggtagcatctgaccagagacctgaatgatacaaagaagctaatcataccaagatcagaagggacaatgaactcttaaca

SEQ ID NO: 1568 - DNA, 266 bp, Homo sapiens
tttagtagagacagggtttcaccgcattagccaagatggtctcgatctcctgacctcgtgatccacccgcctcagcctcccaaagtgctgggattacaggcgtgagccactgcgcccggcctcaggtttcccctttcaacccacaagggaggtccctaagaatatggccccaggctggccgcatcaaagaaggcttgggtaggaactgttacaagtctgactctccccctcaaagaccttattagcactgggcgtggtggctcacg

SEQ ID NO: 1569 - DNA, 419 bp, Homo sapiens
ccaaagacctgccgggactgacaaaaagcaacaaccgataaacaagagcaagctttagcatcttaaaaatacgctcgccagagtttattttacattttcaattgaagggtggcaagataaaagtgagagactcttgtacgcgtatgcctcaagctcagaagatcaaacaattcaaatataaattccagaaagatcttttagaacagggagaaacctagtcaaaaatgaaaggaaatttcccccagctacagggaaacactgattttcaaattaaaaggccccataaagtgctggggcaggatgactgagaaatgaccccactcagacgcatcattgcaacatttcagaacaccaaaaatgggtcgggcgcagtggctcacttccgtaatctcagcactttgggaggctgagatgggtag

SEQ ID NO: 1570 - DNA, 578 bp, Homo sapiens
acattgctaaggtctagatgtttgtctcctccaaacctcatgttgaaatttgatttctagtgctggaggtgtggcctaataggaggtgactaggtcatgggtgtggatcctttgtgaactgattaatgccctcctttgtggtgagtgagttcttactctcttagatcctacaacagctggttgttaaaaagagcctggcacctccccttctctcttgcttcctttgttgccatgtaatctctgcacatgctggctttccttcacctactgccatgagtggaagagcctgaggccctcaccagatgcaactgctcaatcttgaactttccaggcatcagaatcatgagccaaacaaactttttaaaaataaattacccagtcttgtttattattttatagcaacacaaaatggactaagacacgcatttattcatgaatgatagaatcacaatagttcatcatgaagagaacatggttgtgtagataatggaatgagcctgatgaaggtaaggatgttgatgattaagctggtgggacagacacaaaggtttgtgtgaggcttatgtcatatgttatgt

SEQ ID NO: 1571 - DNA, 491 bp, Homo sapiens
ttatggcacaaccttggggcatgcccactcttaggaggatatgaagtccgggaaggaggctgactcaacctggggatctccagagttgggggacacaatgaaagagaatcatggcaagaagaaagtttcagggcagacgggataggcaagaggatcaaaggaaacagaaaaaaagtgaataggccaggcatggtagctcacacctgcaatcccagaactttggaaggccgaggcaggcggatcacttgaggtcaggaattcaagaccaacctggccaacgtggcaaaaccctgtctctgctaataatacaaaaattagcgtggtggtgtgcgtctgtagtccctgctacttgggagtctgaggcaggagaattgctcgaacctgggagacaaaggttgcagtgagcctttgctcactggagtgcagatcatgccactgatctggttggagtgcagatcacgccactgcactccagcctgggtgacacagtg

SEQ ID NO: 1572 - DNA, 365 bp, Homo sapiens
ataaatatctcactttgtcacttgtctgccccaaaaaaaacataaaaatatcttcttggtctagaaagtaaaattataatgcttggcataatgtagacagaaatagaaattcccatttatcctttttctcctttgcccccacacttttcttccatgttcacatcagtacctaatgtcccagacatatggaattcattgtttcatgaatagagccaacacattctaactaccatgcatttagtcaaaccatctggccacctggaatttcctaccatcccccataaaatttaaattaaaaaattccactgttctgtcctctctgaagatgtccctgaacccttattgaaactcattgacatatcctt

SEQ ID NO: 1573 - DNA, 382 bp, Homo sapiens
cagcctcatgtgtacatatgtcaaattttccaattcatgtcataagaaagtctttaatcaacctagttcctcagcaaatagaacatgatttgtcttaactccatatggtttccatgtttggacatacatgttcctacattgcccattctcccctttgtggcctttccaacgttcctttaatctagtctccccatggtagacataaacatccttgggaatcttaatgacaacataaagggccagttccatggagccttactaactgccactcaggaatgaaaggatgagatttccctgtgagccgccatccttttgaacatagaattcatgtaaatgaaatatatctgagcaatgtatttctaaacagaatcttgtggtactg

SEQ ID NO: 1574 - DNA, 611 bp, Homo sapiens
aagtagggacagatcccttccccaggattactaaggaacaatagaaagaactttgaaactccatttccactctaatgatttcccctgcactcctccacacctgctgtgtaagaagagtgagaagaggaggggcagcaggaaccatggctctactggaaatgtggtgttagtgataaggtgttggagtgggaggtcacttccttccctcttatttgggaagggggtttgagccccagttctctcaaaggcaaatgaattgacagctccaagaaactggctggtataataagggaagggattttctttgcctacctgctcaactgctaaagttgagtcttctctgctgtggccaaaacagtgaaatgtggtgactaagtaccagcaagaactggactgtgtttctggagcctaggggcaagtatgaatcttgagtattgagataatatcttgtgtgacgtttctgaatgtagaggcttttgagagtagccacaagcaacttggaaaaggtccatggaacagtgtccttgagaagatgaaagcaatagaccccccatgttcatctctgcacttcttgaagaagaaggtagatgccataaaaaagcatggagtct

SEQ ID NO: 1575 - DNA, 619 bp, Homo sapiens
aacacaagtcaaagacaagtgtcaacatgctttcaaccaacattaatgaggaaacaagacacaaattctttttctttttttattttattttatttttgagatggaatctcgccctgtcgcccaagcttgagtgcagtggcgtgatctccactcaccacaagctcctcctcctgggttcacgccattctcctgcctcagactcctgagtagcggggactacaggcgcctgcaacaacgcctggctaattttttgtattatagtagagatggggtttcaccgtgttagccaggatggtctcgatcttctgacctcgtgatatgcccgcctcaccctcctaaagtgctgggattacaggttgagccactgagcctggccctgtttgttcttttacattaactttacaatatatttgccatgttctaaaaatgaatttaattggaattttattgaaattatatgagacatgatttagtccaagatgaacacacaacattattattactctttccatccagctatggcatatttctttgttttctctagttggcctttgtatcgctcaataaaatttgtggctctggtatatttcataataatcatacattatatttcattatt

SEQ ID NO: 1576 - DNA, 474 bp, Homo sapiens
ttacataacttaatgcataagaaaaaactgaagcaataagaaaacactctttaagcatattaggagggcaaatcaagttgagaaaacattttaaagagaaagtgtcctctgagatgacttttaagattagaggtttatgaaccaaagaaagagctggtgcctaggcatgacctgtgacaggctcacagcagtctttctccatctcatcactattggcacctggggctggataacactgttttgtgggctgtctcgtgcattgtaggatgtttagcagcacctctggccactgcccactaggtgccagtaattcatatacatacacagacacagacacacacacacacacacacacacatacacagagttatgactatcaaaaatgtctccacatgtttactaagtatctcatggggtagaaggcaaaatggccccttgttcaggattgagaacaactggtctatatgatgctaa

SEQ ID NO: 1577 - DNA, 330 bp, Homo sapiens
accagaaggatatcccaggcaacctcaaagacttctgttggtttcatcttccaaacctaccactttcatcacagcacctctgccttaagaacatgtaaaaatgtattacccacagaacaaaatccgaatgccttggcctcagctatacagttgcaaccttacttttccagtatgcactaaacaatatctaccttaccccttaaaatgtgaatgcaattttcttttattcaggtcatttctttctaaaatgtcttatccttttatttcttattcttcagtaacagccaccaattgagtacttctgtgtgtccaacatgccatgctaaacac

SEQ ID NO: 1578 - DNA, 504 bp, Homo sapiens
ttaaatatgattaagctcaggaagcagggcacatttaaacattaacaaaattttgtaattttaaaaagctggcatggaaatgagattataaaaaggtgcagccagtttctggttatgtacaggaagcagtgataaaattaactataatgaaaactacctgaatgtcttactcctcgggccgatttataatatgctcatgcttcttgctcctcagagagagaaacagctgctcaagtactcgtgtgtgtgcgtgtgtgtgtgtgtgcgtgtgtgtttgtgtgtgtactgtactgtacttttcttagctttcagaacaaagaaaataagtgggttgggtgtggctgcctatgcctgtaatcccagtacttttggagtccagggtaggaggatctttgagcgcaggagtttgagacgagcctgggcaacatggtgaaactccatctctacaaaaaatacaaaaaaattggccagacttagtggtgcatgcctatagtcccaactact

SEQ ID NO: 1579 - DNA, 357 bp, Homo sapiens
tcaacttcatacacaaattcactcttgaaagaagttgcattggatacgtactaaagttggcagagaagataaaacctgaattgtatcttgaggctatgtattggctttgactaagctgagaagggtgaggaccaagaaaataatgagattaaaatgacttgacccaagcaagctatagataaatgtgaaggcagcaggcaacaaagagcacagtcaagagcactgggtcagaaaacagtgttattcatgtaactacagggcatcattcagctgctgggaaagaaacctaaagaacttctgtcttctggagtcctccgctccttgctttctcctgtttgatccttgcaggcaggggta

SEQ ID NO: 1580 - DNA, 432 bp, Homo sapiens
gaaagtaatgaatgtgcaacatccttaaaattctcatgcactttcatttctattagaaagatattctatgggaataatatagacaatgttgttgtaaatgacaagaactcattctttatgactaaaaattacaacaattgaactcatggagacctagaaaatagaatgatagttgccagatactaggaagggtattgggtggggaaaggaattggagatggttaatgtgggtacaaaaacatagaatgagtaagatctagtatttgatagcataacagggtgagtgtagtcaacaataatttattgtatatgttaaaataactaaaagtataattgattgtttgtaatacaaagaaaggataaaagctggaggtgatgggtgaatatccatcattttccctggtgtgattattaagcattgtatgcctctat

SEQ ID NO: 1581 - DNA, 476 bp, Homo sapiens
ttgcagtgagctgagatgttccattccattccagcctgggcaacagagtgagactccatctcaaaaacaaaaatgaaaaacctgcagaggtactaataaagtttgcaagtccttggtctaagttgcaatttttttctccacacctgagaaatctgttaagttgtacaaataaataattcaaaggccaaagtaccacatatctcatcttaggtgatcaacaagttcacgccaagccccaacagcccagcgctaaggaaggccacagtgtccatgtgagcagtgactcccagctaaacttagactcagtatctgtccatacagaggatcaaacatcccagagttccacctcgaggaacttccctgattgaccccatgagtggactcctcggtaacattcccgctgtgagaaagcctgccagacctatcagggtcttcatgccagaaaggatgcagctccaggaagccctggctctcgt

SEQ ID NO: 1582 - DNA, 331 bp, Homo sapiens
gtattagtcttccttcttagcttctgtttctcccatctccttctttttattctttaattctttacttttttaatgaaaaaaaatcatagcaactaacatttagttgctatgtgctaggctctctgctaaatgctttgcatatcctagattatttaattctcacagtgatcctgtggggattgatggttatctccattttgcagatgtggaggctgaagcttcaaagtttaattagcaagtttgaagctttgtatgctgtatagcagtgagtctcaaaatgtagttcctagaccagaagtctcaacttcatttgggaacttgttagaagtgc

SEQ ID NO: 1583 - DNA, 591 bp, Homo sapiens
gtaggggggataactaaacctaacagagaattaggaagctgttctgaagtgagatcaaaaggcctcagtgggtaactcaataaaccagaaaggagtctaaattaacctcttaagttaacttagtttctctttgttactctttgcacttaagttactcttaagttactctttgcacaaaaatgcatcttcccctttcaccttaaccatcctaagagctaatgaaaaacgacctttggccaaaaggtccaggatgtgctccttattctggaaatgcaatagcgtctcacctcaccaccctgtccagtagttgtggcttgttacatgaaaattaacctgtcccttagaattcacatcatgcggctgggcacagtggctcatgcctgtaatcccagcactgatcacgaggtcaggagatcgatactatcctggctaacacggtgaaaccccatctctactaaaaatacaaaaaattagccaggcgtggtggcaggcgcctgtagtcccagctactcaggaggctgaggcaggagaatggcgtgaacccaggaggcagagcttgcagtgagccgagactacgccactgcattccag

SEQ ID NO: 1584 - DNA, 458 bp, Homo sapiens
ttgggagcaacccctggaagatagaaaaggcaagaaaactgattaatcctgagagcctccagatggaatgctgctgtgctaacaccttgattttagcccactgaaactgattttagacttgtctactctagaactggaagagaataaatttgtgttgctctaagtcactaaatttgtggtaattcgttacaacagcagtaggaaacaaactcaggaaccaacatgagcatgaagcatatgtggcctgctgtgctgtaatgaagatttttgtctctgacccaagactcttgtgtcttctggcagcatccatgagactatggcaagctgatttgcagaaggggcaaaatcttggaccattcacagttcttaacatttagttcataaaaatgatgatatagtcatgggtatttgtctgacgtttaagtatctttcaatcttctgatcaataaatctacttc

SEQ ID NO: 1585 - DNA, 455 bp, Homo sapiens
actgatgaaattatctgtacaccgaaattccatgacacctcccagtacttttgaaggtcaaggcaggtggatcacctgaggtcaggagttcaagactagcctggccaacatggtgaaaccccctctctacaaaaatacaacaattagccaggtatgacagtgggtgcctgtaatttcagttactcaggaggctgaagaaggagaaccagttgaacccaggaggcggagtttgctgttaggcaagattctgccattgcactccagcctgggcaacagagcgagactccgtatcaaacacacaaacactccatgacatgcagtttacctatatatcaaacctgcacatgtagccctgaacttaaattttaaaaaaagaaagtaaccatttttttaaaagtttaatatttcatctttcaaatttcttgaatattcatgtatttatgtaatacatacat

SEQ ID NO: 1586 - DNA, 456 bp, Homo sapiens
tatgtgaagttcttgttaagatcttttgccatttttctactgcattcttccttgttttccacatggattttttttaactttattacattaaaacaattaaccctcagccttcatgaactaacttttttcaggtcaactagtatcttagttcatgttctgctgctttaacagaataccagatgctaggtaatttacaataaacaaatttatttgtttcatggttctggaggctgggaagtccaagattgagaggctgcatctggtgagggccttcttgatgcatcatctcatgatggaagggcagaagggtaagacagcacacacatgagagaaagagaagggggcaaacttaccttttgccaggaacccacacccctgataagagcattgatccattcttaagggcagagccctcatgacataatcaccctcttaaaggtcccacctctcaacatt

SEQ ID NO: 1587 - DNA, 644 bp, Homo sapiens
gcactaagacattcatgagggatctgctttcatgatccaagcacctcccacaggccccacctccaacactgggaatcaaacttcaacatgagatttggaggggacaaacacccaagctatatcaaccagatacaagaaattttgcctgtggtttccctttgtagcaatgtattctttctaccctctcagtcagctattgtatcattcagaatatccctagttaataagaacttaaatttaccatttataatagaaagtgtaaaagaggaatgttttataatatttattatatttttcaatcttcattgtagtcgttaaaatacaaaagacgtttcggccaggcacagtggctcactcctgtaaccccagcattttggtaggccaaggcaggcggatcatgaggtcaggagatcaagaccatcctggctaacacggtgaaaccccgtctctactaaaaatataaaaaaaattagccgggcgtggtggcgggtgcctgtagtcccagctactcaggaggctgaggcaggagaatggcgtgaacccaggaggcagagcttgcagtgagctgagatcgcgccactggactccagccagggtgacagagcgagactctgtcccaaaaaaaaaaaaaaaaaaaaaaaaaa

SEQ ID NO: 1588 - DNA, 414 bp, Homo sapiens
aatgtgtaatctgctgctgttgagtagagagttctaggaatgtttattagttcctttgggttgatggtggccgattcttccataaccttacagatgttatgtctcccagttctactgattactgacagaacagtgtccttgactgtatattgactatatttatatatacagactcttctattattattgtggattaaaataattttgtagccgggcgcggtgactcacacctgtaatcccagcactttgggaggcctgaggcaggtgatcacgagatcaggagattgagatcatcctggctaacacagtgaaaccatgtctccactaaaaacacaaaaaattagctgggcgtggtggcacgtgcctgtaatcccagttactcgggaggctgaggcaggagaatcacttgaacct

SEQ ID NO: 1589 - DNA, 463 bp, Homo sapiens
gtaggggggataactaaacctaacagagaattaggaagctgttctgaagtgagatcaaaaggcctcagtgggtaactcaataaaccagaaaggagtctaaattaacctcttaagttaacttagtttctctttgttactctttgcacttaagttactcttaagttactctttgcacaaaaatgcatcttcccctttcaccttaaccatcctaagagctaatgaaaaacgacctttggccaaaaggtccaggatgtgctccttattctggaaatgcaatagcgtctcacctcaccaccctgtccagtagttgtggcttgttacatgaaaattaacctgtcccttagaattcacatcatgcggctgggcacagtggctcatgcctgtaatcccagcactgatcacgaggtcaggagatcgatactatcctggctaacacggtgaaaccccatctctactaaaaata

SEQ ID NO: 1590 - DNA, 490 bp, Homo sapiens
ctcttcaaccattcgtgctgagccctgataatgacaagtgggcactcccttgctctaaggtcaccaaagaccccagaggtggctaaagcttgacctaaggagggaggaaaagcttggacacatggaacatttcatagagaaggggaagtcaatgtgaagttgcaggtgggagtgcccatttgcagatcctacacatcgtatttcacaggtgcatactggggaaatctactacgtatttctacacttggtcaggtttggtttatgctaatattgaaaaatgtggccaggcatcatggctcacgcctgtatcgggagattgagaccatcctggctaacatggtgaaaccccgtctctactaaaaatacaaaataaataaataaataaaaacttagccgggcatggtggcacatgcctgtagtcccagctacttgggaagctgaggcgggagaatcgcttgagcccgggaggcggaagttgcagtgagccgag

SEQ ID NO: 1591 - DNA, 559 bp, Homo sapiens
caccatccacccagttaacatcaggttggccttgagaatagagtccactgttcacactggggtcctagaataggagaggctgcgccagtacaggatggggccccggtgtgcccgggatccgtccggccgagaagcagcaagtccctggaggaaactgcaccagggaagatggtcagaaagaccagcctgcatggggtgtgagctgctgggccgtgctcgccaccacccgcctctctttcctctgcaggacacagaaggctctgccatgtggctgtgctctctgtggtgtctggaatattttcttccatttcctcactactgaaatctttccctttactaagaaatgcctttaaaatggaaatgtctttgaaacctgggtagcagttttaataactcccttccaccccatgtctataactagcattggggtccccaggagcacccccactcagcgattcactgggaggactcctggagctcatgcccagcaggatggccatgatttgttacagagaaagcacgcggagcatggtcagcagagcgagaaggtggaggagag

SEQ ID NO: 1592 - DNA, 372 bp, Homo sapiens
tacggctgatggtggctatagctatttgtttagccaacatttatagcgctacgagccaatatactaagctgaaacgatttgctttcccagatactatggcagctagggatagccacatgacacagttttgaccaatgagatacaagagagagagctctgagaaagttcattctcatgatgtaaacaagtcccaatccctcatttcctggaaatagctcctgagtggtgcagagccatctcacacctatgaagacaaataaatgctaaatgataaggagtggtgagaaagacagaaggaacctggttccctgatggcactgctgagatgccacatctgcccaaaatgcttagattcccaagcgtgcatttctc

SEQ ID NO: 1593 - DNA, 467 bp, Homo sapiens
gcactctacatgttcttatttgggtatgcatacatctagtattgagcctatgtatttcaggaacaaaccaaccagcaaagagaagtggagagttggatgctgggagtaagagcagtttggtagaaaggttctgttctgttaaaccaaccaacattttccattgccctagccataatcatcaattccactgtgggagaatacagtgctgtactttgtatagctaggtctgaagtgcttttttctcacctacaaggagatgaagacactcactgttagccataatcacttttaaccatgagggaggtcagcctaaagacaaacaaaaaggacaaaagtgaagaaacagtaaagaaacggagaaggatccttgataaaaccaggtctcaagcctttcttacctctaaactactcagatacatgacctgatacatctcctctatttgagatgaatttcatcttagatatat

SEQ ID NO: 1594 - DNA, 405 bp, Homo sapiens
gggtgcaaaccagtgtatttcattacattagagattcatgtgagtatacagcccttgaaatgttaactagtccaagctgacatatgccatcagtataaaatacataccagactttgaagatgtacaaaaagactgtaaactatgtcaatttttatgttggtgaaattacaacatttttggtatagtggattaaataactttttaaaactaatgttattttatgagggaacattttggatctactcctcttaaatgtattaatagctaacaattactctgtaattctagcaccataataagcaaagtactcagcaaacattatgccttaatcacaacagcttgaagcagatattattacctctagtctatatgtaagaacagagattaaaaaaacaaacaaaaaaa

SEQ ID NO: 1595 - DNA, 565 bp, Homo sapiens
taattgttgaacatctttggaaagctataattttcacctgcttgcaacttgcataaagcaaattccatagcagagtgaagaatattaaagacctctattagagggagcctcttcagttacccaagggcacacagttcacttggatagtcagtctcctgggagtaattattttagattgtattccttattccagaagacaggtgttttcacatcacagatcttgggaaagtgtccatgacctctgtaggccttctatcctattgccctgaattagagaaaggaacgcaccaacagttctccagaatcaattctaattattaaaccctatttagaatttatgcttaattctcttatatagttattttataaatttgctcagtaaaccagtatatacagcataatccccttatttaatgtatgtcagggccaaatttaaatgaatattctcagccgggcgcggtggctcacgcctggaatcccagcactttgggaagccaaggcagacgaatcacgaggtcaggagatcgagaccatcctggctaacacagtgaaaccccgtgtctac

SEQ ID NO: 1596 - DNA, 650 bp, Homo sapiens
cgggttccgaagccacaggtcaggactaataatgtaaatcccagggaagggaccaccctgacagcatttcctgctagtgtgggtatttcataggatcctgcgcttctgtgatcaccagatgaagaaaacacagcgtaagtgaaaaccggggagagaaacacaggggcaagtgaagcccgcctctttggtaagaagtctggcagcgtagcctcgggaggtaccgggcttggggctccgggctgggcttcagcagtgcgggccgcggaaatggctcctcacagagcgcgtgtgcgccccatgctggggagggacgccatgcacggcttgctgcctggacacattcttcaattataatttataaactttttcctttgcttataaaaaattaatatatgctaaacttaaagtacataaaagtatacgtaggaaaataaaatgaagaagaaaacatacaagaaggaaaggcacagcaaaacttgaacatttaagagttccacagtaaaagattttgatttttaaaaaatacatatttaaggttttctaattaaatgcctcattggaaggcttttagggagacagcgctatgtatactttctgtcagcgagaggcagtaaatggaggaatgaataaagcctggccacagggaccat

SEQ ID NO: 1597 - DNA, 502 bp, Homo sapiens
ctggccttgagctcctaggctcaagcgatcttcccaccttggcctcccaaagtgctgaatttacaggtgtgagccacagtgcccagcccattgttttctaatatgattttatccacttaattatatgtgtgaacttctttccctcctgttacatgatagctacttcatcatcgcatgtggttgcctggttttgttggttccactgtgtgtgggcaaataccatatcatgcagggcctccttgtagataactgtagattattttcttgggttctttattagaaatagaatggctgggccaggggcgatggctcacgcctgtaatcccagccctttggaagatcacgaggtcaggagatcgagaccatccgggctaacatggtgaaaccccgtctctactaaaaatacaaaaaattagccaggcgtggtggcgggcgcctgtagtcccagctactcggaaggctgaggcaggagaatggcgtgaaccagggaggcggagcttgc

SEQ ID NO: 1598 - DNA, 517 bp, Homo sapiens
agtgaagagaaagaaacctgttctggagatatgaattgaaggttcataaactcatggagagatgtgagaagagaaaggagttgtgaagtttgtcccacaggaatctctaagatactaggaatcttgttatacttactttaagagaagtatataaggagtgttgtggaaggacagggaaatggaaaagttaatttcagccaagcatgtgggtgggtgggtggagcatgtagtggattgggaaaggctccctggaagaggtgacagttcagcattcatcatgcagtaaaccatttcaagcagggctggtggtattgccgagtgcagccaacccccgattttgatgtttggagcaaccagctgaggttgttgatgtggatatacaatctagaaaatttggcttgcctggttggtggaaatttttctttaatcacattctgctataggaaatgaacaggtttggggaattgaccaatcctaagtttcttcagtctaagaaaaacttcaaactcggacactg

SEQ ID NO: 1599 - DNA, 559 bp, Homo sapiens
aaccgtaagtacccaggtgtgtgctgcgttgctctgcccgtctgggatggttttcagcaccgctgctttgtgggagttgagtaagggaaaataaagagccaaaataaagccaagtctgagagtagcccccagaagcatgcactgtggagtcctgaggctgtagagaggccgtcacccagctttcaaggagccacattaaaacaagcttttggaaggtgatttgtcactgtttctcgagaacttttctgtttggcttagaaactccactttggggatttaagggaagaaagagaatttggacaaaagcaagagaaaagatatttatcggctgggcacggtggctcacgcctgtaatcccagcactttgggagtccgaggcgggcagatcacgaggtcaggagatcgagaccatcctggctaacacggtgaaaccccgtcaccactaaaaatacaaaaaaaaaattagctgggcgtggtggcgggtgcctatagtcccagctacttgggaggctgaggcaggagaatggcatgaacccgggaggcggagcttgcagtgagc

SEQ ID NO: 1600 - DNA, 526 bp, Homo sapiens
gtggatgccacatcttggaaagtgctgcctggacacacatctgtgtctctgcttccactgccccattccctggactgagcaacctcctgcccacccttcagagcccttccagacttcttctcttctctttgcttttcaggacacatgtgcttccaggcagaaggatggacccccaccacccatcagacacagcctagaattatctgtggatgaacctgccttctccatggactgccagcccccaaagcaggaaccacgtccttatagagggcctggcacacagtagggaactggggtggggtactgccatgcagcaggtatgtgggcaatgttgaatggattaaactgtacttggctagggtggtggctcatgcctgtaaaccgagcactttgggaggttgaggtgggaggatcacttgaggtcaggagtttgagaccagactggccaacatggtaaaaccccatctctactaaaaatgcaaaaattagctgggccttgtgtcacacacctatagtcccagctacg

SEQ ID NO: 1601 - DNA, 561 bp, Homo sapiens
gggctctgaagtctttttatttcaacttcttggaatcaccaccttgttaatgaacatcaaaatcttttgtgtcatttatcagattaattactttttccataaaaagagtgagttgagaggataacaagaaactccctgtccctgcttcatcctgaaaacaggagaatcaatatcttaaccctgtttttgagagatgaatgggtaggtcaacattgcttggctatttgtccttccatttgggacagattaccactgcactttcccctcaatctctagaatcatggcttatagaaaacaattttgtactgaattactaaatgcatcaaaactttattagacttattatcaaagagcatgctcagatgtatctattataaatagtaataaaaatataaaaacctaaaaacaatattataaataacagagaaaagctatgcactgttatgaaagcctttcatatttagggatatcaggtaaggtttcccttggtggggaagatgaagagcaaaccaaaataagagtaagagctggctgggtgtggtggcttacgcctgtaatccc

SEQ ID NO: 1602 - DNA, 628 bp, Homo sapiens
aaacattcatcaatttggcccagacaaaagtattcttgcttgctttaggatttactcaacttgttctaattttaaccttctgttgctttaaaatatggtaatggatttgttggttgttgaaggaattgaatgtgattgtggtgttacatcttttcttatattaaaatctttaattctaaaatcagtatgtcacatacattaccacattaacacatcaagactggaaactgatgattggaacagagacaaatgtgttggtgagttgtggtgagctgtcaggggacttatggactatagctgtcctatagtctataacgagccagctgaagatggacagaacaggaacaatgagaaggtacatagaagatgcagatgctgggtcaaattggtggtgataaaatctggtcattatctctttgtagcaagtaggggatctttcatggtttgggcaaaaattttctgaatcacaaagaagtcccatgtaacaatcgtgagatgtatcattctatatatttattctctgataattatgtcatgtctatcaatttctcaccataggcatatataaaaaataagatgataaagtaatggcattaggtgagttaattagcatactaaaatatgcacg

SEQ ID NO: 1603 - DNA, 518 bp, Homo sapiens
gagcagagtcatcctaagtgaacacatggaaggccctgaaaaattaaacttgggcacaaagttctctgcacattctcactggagaggcaggaacatttagccaaagtcaaagaccagggcaggggtaagaggaggcacccatcctagcctcaaatctctgccctgctactcaccagacacatgatcttagacatagaaatattgacaaattagctaactgtgccctggttttcccatctgcaaaatgggtataatcatattacttacctcaaagtgttcttggaaagatttcatgataatagcactcactatgtgcattagttgagcacttattaggtgccaggtggtattttaagtattttttaaaaatatatcaattcatttcatacatgaaaatcattttatgcagggtatataacaagtgcttggtagatgttagttatcttcaagatacctgtcattattagtgaaaagaaaaggtaggccgggcgcagtggctcatgcctgtaaccccaaca

SEQ ID NO: 1604 - DNA, 660 bp, Homo sapiens
ttgcagtgtcttcccatgcagcccacctttccccttagcccacctttcctctggcctaaagagtaagatgatatttctattagagacaggaatttacttggcctaactttgaaatggtccagtcagactcttatgaatggccatttgctaatttatcagttaagttcaatatgtttatttattcatggtttcatcctggctgttttcaaagcattattttgtttttgtcaatatttcctacttgacaatgtcctaaattgaaacaaatttattgctcccattacagagaatgggcaagtgccaaagcatttaatggggccagaggttagtgcaaaatatctctttcaggaatatcaaacccatcagttttctttcaatggcaaatgtccccaggctataaaagaactgaaagacttggcaaccaggtcatggttctgcttgagccattaggcaaatatccaaggtctcagcttcccccatttttaaaggaaaaagcaattaggcaaagaattatgaataaggaaaaatgcagtgagaacttaaagtgtgtattaattccttgatggctcataaattattaataggctcaacagtaacctaacaacactaccacctctcaatttacctactaatttaagcaggtataaatgagtcagctga

SEQ ID NO: 1605 - DNA, 455 bp, Homo sapiens
gaaatgatttgacaccatcagttacgacaatatacattatgtagtttggcagcattgtattttcttgagcaaagactcagcgcagggcctggggttaactactccaagtggaagccaggctaatgttaggtcaagtctcttagcacagtgtttaggcaaatcctttttgcttcagggaagttcacagtccctcctcttgttcaagagaaagaatgaatttctttctcgtagaataaatatagttgttgcactccaaagtcctcaaaagaaaaaagttcagccattgtttatcatcattgtgcaattcaggaagagtcaaggtggtaaatgcaacaatcgaggaggtttggtgtactatcaatggtggcacaattgtctcataagaatagagatgcacttggtgggtcatgcctgtaatcccaacactttgggacgctgaggtgggtggatcacga

SEQ ID NO: 1606 - DNA, 434 bp, Homo sapiens
gcagtgagctgagatcgtaccactgcactcgagcctgggcaacagagagactctgtctcaaataaataaataaataaatagatagataaataaagtagaatcctattttatacatttatctgggccttactttccacctaacaatatatgatggaaatccttcaaataaactgttatagatattacaccttcattctagcgactgtctagtactcctgtacacagatcttcttcttaaacagacagatttaacttcgattttcttgccaaattccactaaattacagtaaatggattgttttaaaggcataaacccacaaagagaatagaagaaacagcagcgacacagtgaaatggcatctaacttagcagactttggaaagttgtaggaaagccaagatcagtctggtatacatcgcagaaccccaagaagc

SEQ ID NO: 1607 - DNA, 386 bp, Homo sapiens
attgcatgagctttgtgatcctgcttcatatcccgcatgtgattttttttgagttccacctttatatttaatagttttcatttacacagcattcctgtgtgtttggaggagaagttcactctgctatgtcgactggacatctttatatttccagtgtcttcccaaatctgtgggccatgcttgcatctcctgaattaatcatttaataaatgaataaagcaggtgcgactaccctatgagagtcacaatgttggtgttcattgagagggtggacaatagaccccatgacatttcaggaaaaatgataagaaataatgggaaatgggagagtataaaatagcagacaacccaacactaaggaataatttctgttacttgcataaact

SEQ ID NO: 1608 - DNA, 426 bp, Homo sapiens
ttgggaaaggcatttcactcttaaatcctcaattcctttctctgtgaaataaaaactctatagaaactacataaaactaccctagataattttgtctattagaatctcctaaaaatcttccaacttgctgggcgcggtggctcaggcctataatcccagcactttgggaggccaaggcgggtggatcacctcaggtcaggagttcgagaccatcctggccaacctagtgaaaccccgtctctactaaaaatacaaaaacttagctgggtgtggtggcgggcttctgtaatctcagctactagggaggctgaggcaggagaattgcttgaacccgggaggtggaggttgcagtgagccgagatctcgccattgcactctagcccgggcaacaaaagcaaaactccgtctcagaaaaaaaaaaaaaaa

SEQ ID NO: 1609 - DNA, 136 bp, Homo sapiens
ataatggagacagagaacccaaggaagccaagcttaaaaataaaaataaaaataaaaactgaaaagagacatcagcagctgcatactgtagagacttcacagatttagtccaagcaagttactaaacaagcaaaac

SEQ ID NO: 1610 - DNA, 407 bp, Homo sapiens
atgtttgagaaagagcgttactctgtcgcccaggctggagtgcagtggtgcagtggtacaatcttggctcactggaaactctgcctcctgggttcaagtgattctcctgcctcagcctcctgagtagctgggattacaggcaccgccaccacaccaagctaatatttgtatttttagtagagacagggtttcgccatgttagccaggctggtctggaactcctgacctcaggtgatccacccgccttaccctccgaaagtgctgggatgacaggcgtgagctaccgcgcccagcctaaaaatttattttgaacaataatttgcagtgccctgaatacacaggctcatgcatctgtactttgtttagatgtttctccgtgcttagaatattcttctgcttctacccac

SEQ ID NO: 1611 - DNA, 408 bp, Homo sapiens
tgatgttatgctatggaagctaagcagcagaacctgggcagacagccatggacacatggatggctcctcctaccatatttgcttgaagtaaatgagattcagatctgagcctcagaggaatttcaaattgcaccctgccatggacctttagcctcttaccttccccaactcccccctctccacccaccaacaaatccattaaggtaaaatatctatagtgtttttaactgttcaaaatagttttcttcaaatgtgccaagagggcatttgcttaggcagattaagaaatgggccaggcatggtgactgacgcctgtaatcccaacactttgggaggtcgaggtgggcagatcacgaggtcaggagatcaagatcatcctggccaacgtggtgaaaccctgtctctact

SEQ ID NO: 1612 - DNA, 563 bp, Homo sapiens
ttaactggaaaacttgtagttattcaacaagcaaactaaaagtgttggcagagatgtaattctaaagcacgatcccacgcattccttcagtattacagctgttccttgtttgtttaataatagaactgatgagtagttaatttgagaggaaagctggtgcaggtgtagtgttatttagatgtcatggaggacacatgtaacatctgcagctagctatatggtaaaagcaaaacagaagttaaaatcagccctgtgtcaaatctgcatagttttaggcttcagggagtttctctgtatgttgaggcagaaagtttagtagaattccaagggaataaaagaggaaccaacatttgtagattttgccttctgtggcggaactcattcaatcttcaggagaacacttcaacggttgtatttgctccagtttacctagatgaaaaattgagacccagaatccatgcttttctttcctggttacacattagaatcaccaatgtggcattaaaacacacacacacacacacacacacacacactgcacacccattaggatggctactatc

SEQ ID NO: 1613 - DNA, 551 bp, Homo sapiens
tttcccacagtggtaaaatcttactctaaaaaaaagctaaatttagaataattacaatgatatgcatgttaagtcacttaggtataatctacacagcattaaaaaagatctttggggaaagttcaagaaaaatctctgaaaattaataatgtgtgatgtttttgctaaacattttaacagactgatattccacgccattgtgagttaatttatatcctgagcaccaaaaatgttgtcattgtaataaatgatgtgtactctgtaggacaatataaccacagtgttcagtggaattaatagcagcgtttgtacaacgtgtgaaaaagagaaaggaaagtgaaagctctgtagcctttattcatagaaaggcaatttttaaaaatcacccagaaatgtgcagccttgtgcatctattgtttaatccaacactctaccaaaaatagttacacagtgccaggccctatgcttggggctgggaatgtagcacatagaacacagttctttccgaactgcaggtagccgtgaagtcaattaaagagtcatcattggca

SEQ ID NO: 1614 - DNA, 596 bp, Homo sapiens
atagaagagtagggaagaaggaaaataaaagtggcttagtttggagcataattagcttgagggctgacattttaaatcctccagtagggagtttatgactgaaacttaatatgagtgatagttattgaccaacactcaaggtttgtttatttaaacagccaagaaagccaagagaatagaggtatacaatacaggagaaaagtgaagaaactaatttctgcgactcaagtatttaactttcagcatgtcatttaatttctgtacttcagcttcctcatttttaagtgagggtaataaatctagccctgtccgcctctgagcagcgttctgatgaacaaaggagataatgcatgtgaaagcactttgtagattgtacagcactgtgcagctccaagttgtttttagtgcaaaataaaacataaaattttgaagaataatttatctatagattctgaaaaagaaacaaagacagcagcataaggttgccaaggtagtgcccaggtaaattctatagagtgtttctgggaaaggagatacagttgtatgatcactaaattaaataggagatcaagggaggtaagaactgagaatttatc

SEQ ID NO: 1615 - DNA, 621 bp, Homo sapiens
ccaagtgggagcttcaagttagtcctgcctcatatctgccatttttcctaaatggcaatacttttatactaaatatataagcatatgaatccactacaatactgactgcatagtgaatttatatcttcttctcaatatttgtcatcaattagtgtagacagctagtgggcctgaaagtaccgagctaagcttttcttagtttgaatggcccttaccaatgagtttaactacatccagtttttgttattatgtaatgttacattgaaccattttaggttataatgatgaataaagatatgcaaatgatgatgttgaaagtgccacaaaagtacaccaaggaggccaggtgcagtggctcatgactataatcccagcactttgggaggctgaggcaggtgggtcacctgaggtcaggagtttgagatcagccgggccaacatggtgaaaccctgtctctattaaaaatacaaaaattagctgggcatggtggcatgtgcctgtaatcccaactgctcgggaggctgaggcacgagaatcacctgaacctgggaggcagaggttgcaatgagccgagattgtgccgctgcactctagcctgggcgacagagtgagactctgtct

SEQ ID NO: 1616 - DNA, 562 bp, Homo sapiens
tgtatattcatctcaggcttgtactttactattttcctatcttcctcctctttgatatgtttcatgttgttgttgtttttttatttgcttttctagcgctcattttggcggctcatatactaaaactggaataatataaagattagcttgtccctttgcaaggatgacatgaaaattcatgaatcttccaaacacacagccaacatcacactgaactggcaaaagttgaaagcatttctcttgagaactggaacaagacaaagatgcccttctcaccacttccagtaacattgtcagagcaatcaggcgagaaaaagaaatgaaacacatccaaataggaaaagaataagtcaaattatctctcttcactgacaatataattctatacctagaaaactctctaaattctgccaaaagactcatagacttgataagtgactttagtaaggtttcaggatacaaaatcaatgcacaaaaatcagcagcatttctatttatcaataatattcaagctgcccccaaatctagaaatacagcaagcaaagtagttgaaagatctcta

SEQ ID NO: 1617 - DNA, 475 bp, Homo sapiens
gtaaatagaaaacagctgtctatgaaatgggtcagagcaaatatatttggtcaggtgctggataaatagctcacagactgactaaaatagtcctaaacaaaacaaaacaaatctctaagccacacagacccaacctgaaggctttcaaaggcaaaaaacaaacaaaacaaaaaatctaatgtatttgtgactcattcatatttctattaaatgtgtgtttcctaaagctttattttcacaattagagctcaccaaagcaccaatcaaccaacccaaaactctaagcctggaagaattcttataaactatgctattccctggtgccctaaaccccatggtggtctagagactctggaaccttcaaaatctcagaggacataattgaatgattactgcctcaacagacaggaggaaagtatgacaggttgataaccaagtctgatatttcagataataatcagtattcttttaatga

SEQ ID NO: 1618 - DNA, 267 bp, Homo sapiens
aaaactttaattttaggaaatactttgattttaaagatatatatgaaaaatgatactctgcaactctgactccaaaatcacagggaaacaaaagactaaggtatccaaacacacaggccaaaaataagccccttagtgtcataatgataaacataatacttaggacagtagttaactcaaaggaggatataaagaaatgagtttgaaagaagcttcaaaagtaatggtcatatttcatttctttaattggatcaatggctcatgggt

SEQ ID NO: 1619 - DNA, 419 bp, Homo sapiens
ggattttgctgttaccgaggctgggctctaactcctgggctcaagggatcctcctgcctgagcctcccaaagtgctgggattagagacctaaaccactgccccggtccaggtctgaaactttttaaaggagagtaccacttgttgacccctttccttttgatactgggaagggagtgcttaagtgggggatgcctcctttctcaatgcaaagaggagactcttactagtatatttaggggtaatggttgccttttgccaaatgaaagtttgtgtctaccgtctggggagacataaacacagccaccaataagcactgtggttacagccagaaaggcctggtcctgaggctaattacactggagaagtctgaatgtgccccagggactggagaagtcccaccttcttcttgactacttct

SEQ ID NO: 1620 - DNA, 448 bp, Homo sapiens
ctaccaagtgacaaaaaaatctcaagagagttatcaagagagggaaaaagagagaaaacactaatcagcaatgaaccaattcctctcatatgtatgtaaatagataaatcagtgtataatgttaaataatgatgcagcaattaaaaaatttaaaaatagtctgggaccaaaagaagtaggggattttgtcaaattcaataaattgaggtaggaaaaggaataaaaaagtaaaaaccttttccaaaggtaatttagagtgaagcagtaaagatattttacaagtttcatcttttgggcctgagggaaggcacattgttggaggagaaatggtggctgtgttgttttcatgtaacagttgagaataagtactcaatgatgcgtttcattaggatcctattattaacactttgtagaaaagcaaagaactttcaaagaaacaaaggagata

SEQ ID NO: 1621 - DNA, 415 bp, Homo sapiens
tccaggagagggcctggctctcttctcctgctgttagcacgatacgaaaataaagtacaggaaaacccacttggaaaactgagcctggctgcctggcagctgtttggtgagaacatagggaatgttctgaagtcctggagctgtcaaccaaaggaaaaggaacaaagggcagaatgagacaggatgtgaagggcttctgtgggcacagaagcagtagggtaaggaaagaggatgggcctgctcttgactggtatgagaggcatccaggactcctggagcagctaagcgcaggtcctcagctccagcacatttattacagcatgttagatgggcgggaccctgttactttaagcctaccatggcacacactcacaaaagtctctttttaagaaaaaaaatctttttttaagatagc

SEQ ID NO: 1622 - DNA, 568 bp, Homo sapiens
cttatatatttaaatcaaaatatatattcatttttcatgttagttaattttcttcttctgcatgatttttaaagattgtaaaggtcatatgccagagtaatttgagggtgttgaagtgaaagaagctgatgttgagatacacatagctagaaacatttagaccatgagatacacaaaaatttgatagaaacatatgacttcttttgcagatctgcagattactaaggttcctaagttaaagccagccaactccatgacacacattttgaataaggaaaaacaatagggtaacttatgatagtcttgacgactgcttgagaatggtaagaatacagcgacaaaatacccccagtatgttaaaaagtggctatctttaagttttaccataccatagtacagaaactagatttaaataacgcccatacaaatataatgtattcttaaaacactaggttgggggaagttgtggagggcaacccctgaaagtaaatatttttacaaagccttttccctaaaaaataggtataatgcttttaaagttaataaaaccatatgaaaatctagtaat

SEQ ID NO: 1623 - DNA, 463 bp, Homo sapiens
gcatggatattcatgacagctttcatttaaaaaaaagaagcttcaggagagtcattaagagttaggagcatattaataatagaagacctaaaatccatctcagttcaagatagatcaactggacaaaaacttcagtaaggctattgaggacctagattaacacaactgaaaggtagatcttagggtcatctattgcatataagagaatatacatttttgtaaatgcgcatgggatgctcatgaaagatgattattgaggtacaaagaaaactcttaaaaatttctcccaggccgggcgtggtggctcacgcctgtaatcccagcactttgggaggccaaggtgggtggatcatgaggtcaggagtccgagaccagcctgaccaacatggtgaaatcctgtctctactaaaaacacaaaaattagccgggcatggtggcgtgcgcctgtaatcccagttactca

SEQ ID NO: 1624 - DNA, 122 bp, Homo sapiens
attaatcttgccaatataaaccctttattttaattaagatgaattatttttcttccagttattggctcctagagataagtgatgactatttaaatttctgaaaatgtagttgaaatgagtat

SEQ ID NO: 1625 - DNA, 528 bp, Homo sapiens
tgttactttaacccataaccatagatgcattggttgctatatttgtctccaggaataggaaggcacaaagaaattggaccacagaggcgttgtgggggacagtggctagctgctatgactgccaatgtccatttcccttccttttgtaaggcatcccaatttcttctggggactgaacctctgaccctctcaattcacaaacttctcctggaattggctcccctccagctctaaggaagagcatgtgacttaggcctggcctatcagagcaccacattcccctggccaggattagtttaggaacgtgcatgtgatctacttcagactaacgagagtcacactaagaatatttgttggaaggagcgaaacactgttcttttatcactggatttgaacatgaagatgaaaccaaaattcagatgagtagggctgaaaggagaggcaccaggtcctggtgacactgttggagcccctacaacaacgggtgctgcaactagcccttgagccaatgaatactcaccacccccc

SEQ ID NO: 1626 - DNA, 508 bp, Homo sapiens
ttttattaatggtcatctttaaaatgtcaattaatgccaaagctctgcactgtgataatgcaaatctataaagaaactagcttgacactttatagtaagtagggcaaaaggaagaagcttttatgtttttattatacataactgaatatgacagaaggaaagaagaaggttggaaaccctaatgttttgagctgtgattgcaaacccaatttaaaaattaaaaataaataaataaaattctgaatttaaaccaacaggcttttctcttaggcctctacatttccacaatataatactggctaccatgggatgataaacaatttaaattactatggattgaatgctactgcaaatatgagtctttgtactacaaaaccaatattacctattttaataccactggtgaaagagaaatgccattgcatgaatgtctgctgcgcattatggagaaggctttagatcattaaattttcatccaccatcctttaaacttttttaaatgtttttc

SEQ ID NO: 1627 - DNA, 327 bp, Homo sapiens
ctcagcctcccaagttgctgggattacaggcatgtgccaccgcgcctggctaattttgtatttttagtagagacggggtttctccatgttggccaggctggtctcaaactcccgacctcaggttatcctcccgcctcagcctcccaaagtgctgagattataggcgtgagccaccgcacccggctaccttgacattttctaacctagagtcaccttaaccactgtcgtctccctctggaatcccctctagaagatccccttaatttataccactctgtctcctggcattggccacattcctgtcttcagatatcccagggactcacc

SEQ ID NO: 1628 - DNA, 373 bp, Homo sapiens
agacatgcagcctttatacagcctccaccctgctagtgttatcacgattccggagttcattgaggcctcagctggactaaagcaacatgctccagtgcaacatctggacccttgcagacaaataattgcactattctttacatcctgtctaagttcccttgtcaaatctgtgaggaaggcctccctgttctactttcctcagccatgctctccacacatagaaaaggacaaagacttagctacttaggaacatcacttggctgcagtgagctatgatttcataagtaatacttattcattcactattattaaattctagcattttcttctatctgcttcagaatttcgtttattaaaaaataaaatataggct

SEQ ID NO: 1629 - DNA, 618 bp, Homo sapiens
tgcatccaattttgaaaaccatggccttttaggaataatctttgaaggcaacgatattcctcaagtcagaaaatgtgtgccttgccttttgctgttcatgttatattactcaaaatataaacaggagatcctacttttagtagattaattaatgacactaagttaatttgcttctcagtgttttcttcccattttacctgtttggttcaggaccttttatgaggctattagcttgattttatcacattgacattcctgtatttattgccaaactaagtgtataggtttctagctccaaaacaaacaaaccaacacacaaaagacaaagaaagggaaagatgaagaaaagataataactgaaatgtactcatacatttttcaaaccagagaatgatcaaacaaaaataaattagtggaaactgaagaaacaaatgagaagggaatgagtagcacatatattctgtaatcagcttgtcatatacacatttgaagaaagaatatgtcaggtatatatttttccaagtcaatatacgagacgtaaaatgagaaatggccaacttcataaaattacacatttcttttccattataagaatactggaataaaattaaaagttag

SEQ ID NO: 1630 - DNA, 391 bp, Homo sapiens
gagtaaataggtcagccaagttaagagtataaagtgtcaaaagcaatgtttgttgagctgggcaacatgatgacttaaacttgtgtttactctttttccgaaggtttggttgtggttgtacttttaaacaacgttttgatggtctaagaattccaaatgagagcagtttaaagaaagaaacaaaagaggaaataaaatagatacgttgtcttaatgaatactggctattgcatatatttcaaacatatgtccataggaacttttcagattaatttatttgttctggaatttcagcgattacttagaaggaacaagatttcatttaatgtaattaattacattaagatatagggaagcataattttctgaagtatttagcagaccttataat

SEQ ID NO: 1631 - DNA, 413 bp, Homo sapiens
ctctttttttgtagagatggggtctcgctatgctgcgttggctggtttggaactcctggcctcaagggatccaaccattttagtctcccaaagtgctaggattatagacatgtgccatgatgcctggcccaaagacatctttaatctgaattgcacttcattaactattagacacatttatgtttattatgtaatgctttcttcacatccatactgaagaagatccagtacgtattatatctattttatagatgaagaaaaacaaagcttacatgttacagtctttgtagaacatagactgtagtgggggacacaacttttaagtaaatccacacctggataaatatattattgtaaactttcattcgtgtgagggaggtaaagagcaaggtgtttaggagataatatcaagg

SEQ ID NO: 1632 - DNA, 440 bp, Homo sapiens
agaagtgtaactgacagataaagtgctttaggtatgaatagacagggagaagccagatggaaaagcagagttataaatacatatgaaacttacaactccacaagataaacatattctttcttaacatctaaggatattttcaaaatatataatcattggtcaggcacggtggctcatgcctataatcctagcactttgggaggctgaggtgggcagatcacttgaggtcaggagttcaagaccagcctggccaaaatggtgaaagcccatctctactaaaaataaaaaaattagctgagcttaatggcgtgtgtctgtaatcccagctactcaggaggctgaggcaggagaattgcttgaacctgggaggcggaggttgcagtgagctgagatcccgccattgcactccagcctgggggacaagagcgaaactccgtctc

SEQ ID NO: 1633 - DNA, 83 bp, Homo sapiens
tctcacctataaaatgagaaccacatgtcaacttcatgaaattgttgccagagttaaattcacaaagataattaaaaatgact

SEQ ID NO: 1634 - DNA, 435 bp, Homo sapiens
atcgcctggggttaggagttcaagaccagcctggccaacatggtgaaaccctgtctctactaaaaatacaaaaattagctgagcgtggtgggcacctgtaatcccagctacttgggaggctgaggcaggagaatcgcttgaacacgggaggcagaggctgcagggagccgagacagcaccactgcactccagcctgggcaacagagcaagactccatctccaaaaaaaataaacaaataaacaaaatgccaagagtatgctgatgtaaaggtttaagtagaaactctggttgttttactcatgtgtgtaaaccaagcccccaagatgtgccaccaaaatacagagtttgtgggtggatcagcctgtacctgagccccctctgccacactgacatgatcctcattaaagaaagaaaagagggggcaggtggatcac

SEQ ID NO: 1635 - DNA, 543 bp, Homo sapiens
ttcacctaagcgatgaacacacatatttacataaaggatgttatttaaaattctatgcagaggaatgtttccaattttgtatgctaatgtaaaataggaagtaatattcttttacaagttcagttccactggaatcagatcaaaatcagatgagctcaaggtcacataataaatagcaaaggccaaattatctcataaaattgtcgaagcatttatgttaaacccatccctgcatgaggaccaaagcagcacagaaatcaggaaaaagttctacttttcaactcaagaacactattactgatgcactgacacacatggaaatgacttcagggcattggcatagaagcaacactaacttataagctttaaaaatcaagagtttccaatgcagaccgacatctattaaaccctgtcattgtgctcagttagaaaccttgatacttctgtaaaggaaaatcaaaccacagggaataaacattccaataaacactttgaaacaccgaggattatggaaatatttcccaggtttgtaacctgatggtg

SEQ ID NO: 1636 - DNA, 601 bp, Homo sapiens
tgcaccaaacccttctggaggcggcgggctcctgggtagcaggggcctggggacaggaagacgccctctccagggtcacagcccaggtggatggggcctggcatgtggggcctaactctgccccctccccatggctcagccaccctcctggctgctccctgctgcccctgcctgtgaccccattgtgatgcccctcaactgtcctcacccagctggcggtgagccttgctcacttcctccctcacatccgtgatgcccaggcagtgcctgggacagagaaaagcctcaggacgtgctaactacacagagtctgtgtattaatatgaccataagccgggcgcggtggctcacacctgtaatcccagcactttgggaggccgaggcaggcggatcacgaggtcaggagattgagaccatcctggctaacgtgggtgaaaccccgtctctactaaaaatataaaaaattagccgggcgtggtggcaggtgcctgtagtcccagctacttgggaggctgaggcaggagaatggcgtgaacccggggaggcagagcttgcagcgagctgagatcgcgccactgcagtccggcctgggcgaaagatg

SEQ ID NO: 1637 - DNA, 621 bp, Homo sapiens
catctatgccttcaagattgtatttgttttgttttttggcagtgaatatggtgtgtgtgtgtgtgcatttgtgtgtgtacatgtgggagagagggagatagacgagagattgaaaatgtatgtgtgttagcctacttggtattctctgagtttcttggatttgtgatttttttgtctttttttaatttttcaaaattattgggtattacctcaatgctcagataaataattttaaatgtggaagcatctctaaactgaggaataggcagaagctggaagagtttcgggtgcatgctagaggcttagattgttataaaaagaacttttaaaggcgattctggtgaggactcaggaagaaaagagaagagctaaagacaaagcctccattttcttggagaatacaaaagtaatcatgaacagaatgttggcaaagacatggatggtcaaggtcattgtcatgaggtctcagacagaatcaagtgatattattattggaagctagaggaaaggcaatctctgttacaaagtggcaaagaatttggcagaattctgttcatgttctagtgttctgtggaaggtagaacttgaaagcaataaaaatgtatatttagcataattaaa

SEQ ID NO: 1638 - DNA, 547 bp, Homo sapiens
atgcaaaatggtatacacaagcttcatctatgacatactcttgcccctcccccaaaatgtttacactgaatcaaatcaagcttcttaggttagacctgcactttctaatataatagccactagtcgcatgtggctactgagcacctaagaagtggctagtcttacttaacatgtgctgcaaatgtaaaatacaaactggatttttgaagactttgtgagaaaaaagttatgctgattccatcttgaaattatattttgggtatattgagttaaatgaattattaaaatgaattttacctatctttttacatttctaaatgtggttacaattttaaaatcacacattaggctttcatgtgtggttcccatgtttctattagatagtactgctacagtttgcaggaaatctaggggatgtggaaataagtgaaacaattgcttcatttataaagtgagataggggtctcactatattgtccaggctgggtctcaactgctggattcaagtgatcctcccaactcagcctcccaaaatgctgggatcaca

SEQ ID NO: 1639 - DNA, 550 bp, Homo sapiens
  misc_feature 335: n = A,T,C or G
agtttaattagtttactgaaatggagtcttcatagtggctaagtgtgatatattggcttttgtcacttgaaataaaaaagaggtaattagtccctactcaaatatattgttttctcagaataggttgaattttattttaggcagtaatccagaaccaacttccaactgatttataaatgctacaagaaaagatcatccttcagacaacttaagaatccaatcgcgtaaaagcaggattctcaaagggagaaacatttcatcccccaggggacagtgagccaagtctagagacatctttgggcatcacagtgtggggagaactacagttggcattnctagagatgccaccaaatgcccaacaaagcactcagcagtccccacatagagaatgatccagcccagcgtccacactgccaaggtggagaaaccgtgatataaacagtaaattcagtatccaaatgcctacgccaaccattaagggaaagtgtgcccactgttcctgacttgcaaatcccaaatccatacggtgggacatttgcatttttcctac

SEQ ID NO: 1640 - DNA, 546 bp, Homo sapiens
cattcttttcagcttggatatggagagtttcaaaaagatgctacttgcccagtaggtgtcattaatccatcaaacaaaatttacagaaggataaattatgtggagaatatatctatgcctggaatttgagaggaatgatgcgaattatgcaggcaatgtagaagactgtccaaatggaatctccttccacaaatttgattcctcaaagtagcacatatcctttttcagactgctgagtttttctgtaggaatgtaaatgaactctatgcaaaatttggggaatgtttcagtaagctcaaaagattcttctttttcaagaaaattttaatatacccatagactacactaccatcaaagcagccaagtatttaatcttgaaaaatactatttttatttttcaagataaaattgtccccaaattgggaaagtatcatggattggatagaatttggactattttattctttaagttttaaagcgtatttcagatgacaggtacatgaaccaaactaaaaaacttaatgaaaaatgctgatgaatcgaaat

SEQ ID NO: 1641 - DNA, 540 bp, Homo sapiens
acatctgttgaggaaagataacagggaaataagaggggacaccttctcttttctttttatttctcctctgttctctcttcacagatgagcaatcgcatctccataccacatgacatacccctttgatgcatcctcaaaaacttgggaaagttcagtttcctgaaactttaaaacaaaaagctagattttctttgtaatatggtttggcctaaaaatgaactgggagaaaattacaaaagtcagcctcagaacccaatgcccctatataggaaattctcaaattaacctcctcagttatttaactgagataaggacaaagaggacagggctaaggagaaagagaagcatagagatgagaggcagactcaatgactggctggtttacaagactgccagcaccctccaggttgccctaagaacactccttcaggtaacagccattattagtatggggaagccaggccactggaggccaaactgtcccaatgggataaatggcataaagccctgcatagcttgccccttctgctacaagcacag

SEQ ID NO: 1642 - DNA, 470 bp, Homo sapiens
tattgaattatagaaagcaaaagttacatttcttcagcactagtgtgactgggtagacaaagagtcatactatcaaaatatctaaaaaaagttttagggtaaaataaccaaaaaaatctttcaaaaccttttattcaatatttgcatttaaatttatgaatcactaagcttaacattttgtgttaatgaagttcgttgcaggcagtcagcacttattccacatgtgctgtggcctccacacaccctgcatttcatcagcttgtgcctagggatatttcctcttcaccttaacaaatactcatctaccataggccaggcattatataaaagtgaactgttaattacaaggaggggctgggcgtggtggctcatgcctgtaatcccagcactttaggaggacaaggtgggcagatcacgaggtcaggagatcaagaccatcctggctaatgtggtgaaaccctgtctctact

SEQ ID NO: 1643 - DNA, 489 bp, Homo sapiens
tttttgaggcagagtctcgctctctctcccaggctgaagtgcagtggcatgatctcagctcattgcaacctctgcctccagggtttaagtgattctcttgccttagtctccagagtagctaagattacagacatgtgccaacatactcggctaatttttgtatttttagtagagatggagtttcaccatgttggccaggctggtcttgaactcctgatctcatgtgatctgcccgccttggcctcccaaagtgcggggattacaggtgtgagtcactgtgcccagccttacttagctttcttataacttatatcccatgagtttaaaacctttattataaatatagttattttacaaggacaagctggacagcttatattgtaggcaacaatataaaaaatgtttatttgaatgggattattttctatagggcaaaaccaaaaagtgaaataaatagtaagcatttccaaaagctcatttattatacta

SEQ ID NO: 1644 - DNA, 438 bp, Homo sapiens
gagacagagtcttgtcctgtcacccaggctggagtgcaatggcgtgatctcggctcactgcaacctccgcttcccaggttccagcgattctcctgcctcagcctcccaagtagctgggattacagaaaaatggatggacatgttttactgcctgaacgctggtgccagttaggccaacagtcatgtggcaatggctatgaattgcaagcattgctgattgttatctgctgctactgcctttgagctggagcggaacagatcaacatgggccaaacaagagcctctttggagatttctctactgcttcaagcacacagattccaagtttagaagctcaagagaaggttgaaaataaaatacatttagtttttgtcatctacctgggattacttcactattggaaaagaatatcacaagataatataaataacaaattac

SEQ ID NO: 1645 - DNA, 535 bp, Homo sapiens
tgcaataaatacgttgcatgctgcggaggcagggaaggcattcttctgcatgttgtgtcctgcagtggagggaaaggcattcttctgcaggatgcatgctgcagagaaggagggaaggtgttcttctgcatgttgcatactgcaggggggaaggcactcttctgcatgttgtgtcctgcagtggaggaaaaggcattcttctgtaggttgcatgctgcagagggagagaaggcatttttctgcatgttgcatgctgcagaggaggagggaaggcattcttctgcatgatgcatgctaatccatggacatggaggccatgaaagaggaaggaagaggcagtaacaatgggtactccaatcgcacagcttttcaagcaagtgttgtttgctttattcttttcctttcaaaggagagagaaaacccaaaaccacctccaattacaatatgtggaagatgaaataaaagaaagtcaagttaatttgtggccttttaaaaaaacaagaggttgagcatggtgtctcacacatgtaatccc

SEQ ID NO: 1646 - DNA, 517 bp, Homo sapiens
tctgaaatgtaaatgactaggtagaataactcagagagaactgaagagagctgggaagtgggtgagattcctgagaagaggccctcagaaacagagtagaagtgactatgtgatacatgcttgataaagctccttgatccatccagcccctagttgttcatagccttagagtaggcagggagtgcagccaatggttttacacactcgcggcagaagttttgaggcagtggagaaagccagacctggagcaaatgatagcacagcagcaatctgtagggattgatgacccaggactggcacagataactgatgtcacagaagatgcctgcatagtcaggtgacagtcaggaaccagacatcactgtgccctgcaacatgggctaaggaatttagccaccatcctggggaaaagtggcagaaccttaaataggttgacatttttgttcctgttgttaggtaaaaattataggaaactattgttgtggactaaactcctgcactaagccccaacagatca

SEQ ID NO: 1647 - DNA, 580 bp, Homo sapiens
tgaataagtctcaggagatctcatggttttaaaaaggggagtttccctgcacaacctctcttgccttgtctgctgccatgtgagatgtgcctttctgaggcctccccagccaggtggagctataagtctaatgaacctctttcttttgtagattgcccaatcttggaatgtctttatcagcagcgtaaaaacagactaatacaaattcttactgatacttgtattctcttttaatcacaaaatagaacatttcccagagaagaaaatactatttcaagaaaatactccaagaatgtttctggtcatcctaaagtgatgttaacaatgacttctttatgtaaaaaatccctttctcaaactcataaactatgtaaatatgtatgataaatattaccttctgtgctagaataatagataataaaagatataatcaaaaataatacaaaaaggtcaagaatgcatcagaaaacttctttagtgacagatgctatctgaggaaatttttttattctggcatgaagagcccactaaaagtaacagacatggccaggcgaggtggctcacacctgtaatcccagca

SEQ ID NO: 1648 - DNA, 358 bp, Homo sapiens
atctccttcaaatatctggtttattattaaatatatgtgaaactagtggacaatttgggagaggtcaagagaatgaaacagatatgttcactattacttatgaaaattattttatgaatagccaagcatatatatcctcttttttattgatcaaagatgctttacatctcattttaaagtaataggcttcataatttcacacagctcaatagtgtaaaaagaatgtatttcttaaaataatgtagggtcggccgggcatattggctcatgccactttgggagatcaaggcgggtggataacctgatgctaggagttcgagaccagcctggccaacgtggagaaaccccctttcaacta

SEQ ID NO: 1649 - DNA, 448 bp, Homo sapiens
cttttcatcaccgtcatcatcatcattgtcatcatttgtctggattcttgcaaatgtgcttccaactctgcccaccttgcaatctcacccacacggcacccaaaccatttctgcatggcctccgtgggaccaggggctccccagctccacaatggggagagccccccagggtagagccttaaaggcccatgtgactcccaccagtcctcaccctgcaccacatggctctgggacctctcctgggtgcaacctctcttgttccctgccacacttctgcctcagtgcctttgatgaattctgccctctgcttggaatactcaccacgtccagacacccacctggcttacctcctcacatcctttcagtctttgctcaatgatcacctttcccgaggtctacaagacccctgtgtttaaaagagcaacttagcacacttcccttcctctgc

SEQ ID NO: 1650 - DNA, 554 bp, Homo sapiens
ttcaatatgtttatttattcatggtttcatcctggctgttttcaaagcattattttgtttttgtcaatatttcctacttgacaatgtcctaaattgaaacaaatttattgctcccattacagagaatgggcaagtgccaaagcatttaatggggccagaggttagtgcaaaatatctctttcaggaatatcaaacccatcagttttctttcaatggcaaatgtccccaggctataaaagaactgaaagacttggcaaccaggtcatggttctgcttgagccattaggcaaatatccaaggtctcagcttcccccatttttaaaggaaaaagcaattaggcaaagaattatgaataaggaaaaatgcagtgagaacttaaagtgtgcattaattccttgatggctcataaattattaataggctcaacagtaacctaacaacactaccacctctcaatttacctactaatttaagcaggtataaatgagtcagctgagcaaaccattaagaggcagactttgcatgccttgactgctaaaactgaggaacatact

SEQ ID NO: 1651 - DNA, 172 bp, Homo sapiens
ggaagacacaatacagatacatagggaaaaatgtgctgtggtccccagttgtaaacaccatttagtgtaaattagggattttctcttgataaggatgagaaggtaatcatgaatcagttagtcgagaagttgttatggagtacctactatgtgcactataactattcaagaa

SEQ ID NO: 1652 - DNA, 527 bp, Homo sapiens
ggctgggagaggggcacccgcgcacgggagcagccggtgggaactcaggggcgactcagagggatcagcctgcaggtcacagcccgggctgtggtcccatgggctctgtgctgcctgtgtgcttgcgaagttaattacagccacacacaaactcactgcaaattgttcccagttagaactgcaaattcactggaacaaggagtgctaattacattccacttgttcccactgcctcttgttaatattccaacagctgcttcagcaagataatgatggctccagccgaaatgattgaacagatagatttaaaaatcagtactggctgggcgcggtggctcacccctgtaaccccagcactttgggaggccgaggtgggtggatcacctgaggtcaggagttcaaggccagcctagccaacatgatgaaaccccatctctactaaaatatacaaaaattagctgggcgtggtggcgttcgcctgtagtcccagctactcgggaggctgaggcaggggaatcacttgaacc

SEQ ID NO: 1653 - DNA, 624 bp, Homo sapiens
ggcatgagccactgcgcctggcccagttttcttttttaaaagaaataaaacttaccaataaagtcagaatgtttgttagaatctttcattcctgttaactccagaagtaaccactattatgaatttggattgtatccttccagagcacaattttactatacttttacaatatgtgtggttttccatcaacaatatatagtatttttatatgcttttacatttttatataaatcttatactgtagttgtcttcttgcactcaatatttttgaattcattttgtagatgtaatcaatgatatgcatataccaaattttatttattaatttccttattgatggattaagttgctttaaaatattttgctattagaaacaatgctgtaatgaacagctttattcacatctccttgagtatacatcaagatacatcaagattatacctaggatgttgctgagtgcagtgtttcacacctgtaattctagcactttgggaggctgaggcaggtgaattgcctgggctcaggagttggagaccagcctgggcaacatggcaaaacccatctctacaaaggatagaagattagctaggcatggtggcatgtgcctgtagtccgagctactcg

SEQ ID NO: 1654 - DNA, 90 bp, Homo sapiens
aagtcaaaacaatgaaaggtctataaacattgaaatggataaataaattatagtagattcgatacatgctaacaaacatgtatgcattta

SEQ ID NO: 1655 - DNA, 495 bp, Homo sapiens
atcagttcatacacccaatatactgctacaacaagcaaggaacccatgtagagccttggcctcctgaaagcacctagaaacaaagccaaacaatcatatacaacaaactccacagccatatcctcaagggaaaaaagagtaaaaatttaaatgtcccatccaaatgatgactaatttaaaaataagaagtgacagcttcttcacatgagaaagaatcagcagaagaactctggcaatacaaaaagacagagtgttttgacaccttcaaaggagtgcagtatgttccctcaaacatatttgagggaatgattcagaaaagttttcctgatcttgatagagaagtatttattcagatacaaaaaactcagagaacatctgggaggtactatatgagattaacatcatcaagaaatataatcaacagagtatccaagatcaacactaaagaaaaaatcttaaaggcagctagagagaagtgtcaaatttacctgcaaa

SEQ ID NO: 1656 - DNA, 498 bp, Homo sapiens
actgaaactgatgcagataaaagtacagaggtggctattggtaaatgccaccactattccatttgaaagacaatcttgtttctaaatcaaaaagaaaaacaagtaatatcaataactcctaaagagataacacagctctttatatgtttatatggcatggtgcataccagcactactcagatgaaggtcagcaaactgttcatttcagatccacaatgagataagaggcttaggccagaatctaaagcttcacatcactaaccactgtttagtttcgtagcaagattttctgaataaagaaagcagtgccaaggccaggagtggtggctcacacttgtaatcccagaactttggaaggccaaggtaagaggatcacttaagtccaggagttcgagaccaccgtgggcaacacggcgaaatataaaaattagctgggaatagtgatgaacgcctgtagtcccagctactcagaaggctgaggtgggaggatcagttgag

SEQ ID NO: 1657 - DNA, 521 bp, Homo sapiens
cagcagttttaatctattctaaacatccctttatgaaaacacaaaacacaaatgtttaggacatggggaaatatagctcagaccacctaaggctaaagtaggggtcagcaaactcacagtccatagatcaaatctgacccacagcctgcttttgtaaataaagttctattggaacacagccatgctcatgcatttacatattgtctatggatgctttcatgctacagttgtaacagaccatatggcctgcaaagccagaaatatttgctatctagaccctgtcagaaaaagcatgccaattactggtctaaaaagtggaaaaagaggtggatattaaacttaacattgttagttaaggggcagtgctactcaaagtgtggtctgtggaaaagtgtccccatgcgatgcaataaacacagaaattaagagtaaaaatttaaaaacgtctctagcaatgtgacaaagtattttaatgtctgttgaatctatagtaattaagatatttggcttgtattttgcat

SEQ ID NO: 1658 - DNA, 488 bp, Homo sapiens
ggaaactgggaagttcagtggagctgaggtacagactccactccaggaggaacaagggcacagaaagaagactgcagagcagggctgagcttgattgcaaaggttatactgcatgctgggaagtttacaattaatctgtagacaataagaaaccactggaggtgtggaagccaataaatcactcaatccgagaaaactggagcagagcaaggatggattactagtagggaggaacagatggcaagcaggccggttaggtgtctaatctgggcaagctgacaataaagcctggtagtgggaaatcaagaggacccagcatagggtaacaatctggagataaaattaatagactcaagaaacgcattagatgggaagtcaaggaagatgctgagatttctggtcaaggtttccacccggtcaataaagtgggttcttaaaccattaatgaagacagagatttaggaacagggagaagcagcaggaagagc

SEQ ID NO: 1659 - DNA, 645 bp, Homo sapiens
caagcaacagctgagtagaagattttaatctcattacaactgatgtcagcattctacctgaggcaaaactaattgcagcagcttcctcccacagccccacctcaccacatactcatcccagataaccatgcaaaagaaaatgtactaataaaggaagagttttcatttgcgcctttacagtcatgtataagctagagcacaacgtcccccatgtacctaacagaaagtgtccatgccctttcccacgcctctccttagtgccaatatctgggatggaatgctggctggatgtgctattttatgagaacaaaaggaatataggtgtcttcaaggaggatgaacctaatttagagtctcaggtcaaccttgagtaagctactcaacatctcagaacctcggtttccttgtctataacatatgggctccgtttgcttttaattctcttgaagaattaaatgaaagtatgtacctctcagagccagtacctggctcagaaaatgctaaataagtacatatttgactccctgagttggcaatgacaaaacagtggaacttggaggagctcacataactcaggaacaccagaattggtttaaattagaattctcccaaattctactagaattttaaaagaatatattctac

SEQ ID NO: 1660 - DNA, 616 bp, Homo sapiens
gacagtctgtactagaaactcaaggattagaactgaggttgaatcccactttcgcacttggaagctgtgtgatcttgagcaggtgttccaacctctctgagctccagatacctttggattgacaaggtcagggtttctccctgagaagtaattttctaacaccttgacatacacactctcctggcctgtgtcctggaccactgggccagtttcaacccctctgctggagacagcagcaaggtccctggcgatccctatgttcgaagtctgcttgccactgcctccagcagcctgtctgccattccccaggcctcagtgctattctgtggtgagcacagaagtgtccttgcccagtctcagtttttatttattttttattgtcagcctcagttcctaaaatcttaccacgttattagaggaaggtatatttttgacaactttatccacagttaccttaaatcaaggtgtcatatacacagtgccaagactgaagatgtttttcaacataaaaatccattttgatgatgcaaaggctgttgagaatcccttttgaaatttcatcagccagtactcagaagacttttggatttgactaacacagaggaatctcttcttg

SEQ ID NO: 1661 - DNA, 543 bp, Homo sapiens
gccttgggctccttaccacatgcctcaattatccttgcactcttaaacatggtggtgccatgagagattcccaacaggtcaacacacagctcttgtatcattttcttctttcgggaggctggtagtatctccccacagaagaagagtgatctctaacaggtcaaatgcatggttttctgcactgtgtttatgattctggaggccggcagtttttccattcagctgataagtggcagatcccgggatggatgagattagcatctgggatggcaagtgtccaggatggctcagaagtagctgccaaactccacttgactctcagtcccagcatcacagggtggcaagttgctgcagaggccatggatctcaaccatgtatcatttggaagtgaaaactaacagatgcgaaatagctttttaaaaatcaagacatggccagggatggtggctcacggccatattcccagcactttgggaagctgaggcaggagggtcgcttaagcccgggagtttaaggctgcagtgagccatgatggcactactg

SEQ ID NO: 1662 - DNA, 593 bp, Homo sapiens
caggtgcccagcaccacgcccagctaatttttgtatttttagtagagatggggtttcaccatgttggccaggctggtctcggactcctgaccttgtgatccacccgcctcagcctcccaaagtgctgggattacaggtgtgagccactgtgcctggccatgccgaagttttaatggaagttaaatataaggaaaaacacctgggcctggctcagttactgttaacaactattaattacttattctgagaagatgtgagggatacacattgctgccctcaaggagcttgcaatctagttgaaaactataatagcacaagaacaaagacaactctatgaaatggaaataacatagcataattactgtctgcctataggttactacttgcccatagcaaaatggtgattttgaatttttgaaagaacactttcctttcagaaatgcagaacaaatgtattcacttagcaaaaagttatggaataactactatatgccaagaattgcactaaatactaggcatacaaagatggttaagacattcctcataccctcatttcacttggaaagaggcagtcttagaacagaagtcagaat

SEQ ID NO: 1663 - DNA, 592 bp, Homo sapiens
gaaatcatgaaacttattggtaaaagtaaatatatagacaaaggtagaatactgtattactgtaatgttggagggtacatcactttggattgtagtattaaagttaaacataaaattattaaaataacaaccactaaaatattttcaagaataaacaattgaataaatatctcaacaaactggataacccaaaagagatgaaaaaattcccaaaaatgtacaatccataaagcaaatcaagaggaaatagaatgtttgcacagccttctgacaagtatacagacagaatcaataatcaaaagtctcagagaaataaaaaaagtccaggaccaggtgacttcaccagtgaaccctaccaaatattaaaagatgaattaacaccaatctttctcaaagttttcaaagaaattgtatagcaggaagcatttcaaaactaattttgaggtcagcattaccctgataccgaagccaaaggcaccgcaagaaaagaacactacaggtcaatatccctgaagaacatagaggcaaaaattcctaaaaaaatgccacaataccaaatataagaaacatattaaaaatattacattataac

SEQ ID NO: 1664 - DNA, 562 bp, Homo sapiens
ctctaagcctttggtgtcccagcaactattgcagtaggcagtgatctgggagaggggttcctcctgcaaaaatcaaaggggggtggtttcagagctttcggatgcagcgctccagtgctctatgggatgaaaattctttcatcatttttactttcctgctgttttactatttcccccaattttaagcttctcctggcccacgcaaagcatgtcctccctgccccccaccagtagaccaaaggctaaaatttaaaagagtctcttttcccactccgcagaaatagcacctggcttgcaaaaacaggtaagttatgagacataggtcatttttccttgtttctgacttttccctttaaagatccatttaacagttacatataggccgggcatggtggctcacgcctgtcatcccagcactttgggaggctgaggcgggtggatcacgaggtcaggagatcgagaccatcctggctaacacggtgaaaccccgtctctacaaaaaatacaaaaatatagctgggcgcggtggcgggcgcctgtagtcccagctactcgggaggct

SEQ ID NO: 1665 - DNA, 579 bp, Homo sapiens
aaataggtctttaggcagcagaattgagaccgtgatagcaagagaggatatggacaggctaaaccagggcagtacccttttctggacttggctaagaatttttatcaattcctttgtaagaaaggtttgagaagtgaataccagaactttatagtacagtgtttgtaatttgttttctgggtgtggtggtggcagctgtggcactgctgtggggtgtgtgtgtgtgtgtgtgtgtgcacagcgcttatattaattggtagtctccttctgggtttttatttcatcactttcagtagattctttataaagtcttgagttaaagaacccattcagatatttttatacacatatcagtaccaggtgggatgcactgataaattcatatgagtttcagatcctctgaggaggctgaccacatacatagctctcctcccagagtgtgcccagataagcttgttccagcctgggcacagtctatgttacatgagccagcagcactcttgctagtggtcctgtatgaattgtttatatttggcagagatagggaaggaaatccatttccatattttctttttcctc

SEQ ID NO: 1666 - DNA, 442 bp, Homo sapiens
cttgtattattttcctccacggcactttttactatttggcattttctgccttgaatggttcattattttattgtttgtctctcctccctagaatgtaattcttatgagggcagaggctatgatctacccgctgctgtgtccccagcacctagtatctggcacactccaggaacttgaacattctttgttgaatgaattactgactgtgcaaatagaagaaatttccaaatgtttgaaggtggacacgaaaaagaaatggaaaagtgagcaacagaggctgctggaacgtctcctatcacagttttgccacacacttttagaataaatggcacattccactattttattagggaagttcctgcctctttttattattgtgcactgactgcccaaactgatatatattttatatctttcactgatatttgacttttaaacctca

SEQ ID NO: 1667 - DNA, 569 bp, Homo sapiens
atgagatcttttggcggtctaatagctattaaaatttcaaagtgatgatcataaatgatgttttgagataatctataacaataataatgtggcatgaaaatatctgatttctatgggtgacaacttcacagattctgccaatcctaagagatgctaaatttttgttaaaagttcatgaaaatgagatgcaattcaagttgacagaaccctgtgaattctatccatggatccctttaggatctgtgcattacaggtaaagaacacttcctttacagcattgtaaaccagtgcacgaatgctcattagacatgtataatacaataaagttctgctggctaagagcactctagaacattggaagcagggagatgagggtaggagaattgcataaacagcatagtctctggagccagattttctgggttcaaattccagctccacctcttactatttttgtgatcttgaacaagtgacttaacctctcaacactatttcttcaacttttaaatggcaataatagggccgggcatggtggttcatgcctgtaattccaaggaggggaatttgga

SEQ ID NO: 1668 - DNA, 621 bp, Homo sapiens
gaatcctggcatctactaggtgcaacttctagcagtgtgctttcaggcaaaactatatttctctgtgccttcagttaccttctttgtaaaatgcggacaataatagcataaaattcatacagttactatgagaattaagtgagtctatatataaagtgctcggaacactatctgatacaaacaatgactaacactcaggtagcccttcctattattcactttcacttttgacaggcctcctatctgcacagtgtattctctttcttctcaacctggccaaaccatatctagcttcatgacctacctgaagcttactttcttctccaagtttcaccaacctttcttctctttaaactctaatggtatttggctgtctttaaatgttatttaaactatttcaaacatatacatattgctattgtagaaagacttataaattactcaagaacaaagatcttattactaattccctctctatccaccaagtgcctagcatttaaacactacagggcaatacatgcatacagaatgacaaatacatcaacttctgtaagttcagataacaagctgacagattaatctaatcgtgatataatgttgagtaacacaatcagcaatatt

SEQ ID NO: 1669 - DNA, 610 bp, Homo sapiens
tcatttgaacaggcagtgcgaattcttccagatgatgttgcatgtaacatcattaaaataggttatttagtaagaaataaagagatttgtaaaaagacaatggcttattggtctcaaaggatctacactgaagaactcttaatgtacttgctccattatgatgcagggaaacacagtttcagccactggaccttttagtgacttaaaaaagaggtttgaaactggctgggcgcagtggctcacgcatgtaatcccagcacttagggaggctgatttgggtggatcacgaggtcgggagatcaagaccatcctggccaacatggtgaaacctcgtctctactaaaatataaaaaattagccgggcgtggtggtgtgcacctgtagtcccagctacttgggactgaggcagaggaattgcttgaacccgggaggcggaggttgcagtgagccaacatcgcgccactgggctccagcctggtgacagagcgagactccatctcaaaaaaataaaaaaaaggtttgaaaagtagtcctatatactatgaagaatatgcatcctatttataatattaaaaccttaatgactaaaagagttggcaaaagactctga

SEQ ID NO: 1670 - DNA, 618 bp, Homo sapiens
atagaagtaaataaaatgtagtcacttccttctcactcttctgtgctttcccacacgctgctccttcccttggaaacaccccttctctgcctcaccacagtaactctaatcatctcaaaaactcactttaaacatttactgcttccaaggctctttgcttctaaaccagcatttggcttggtgttattggatgataatatttttcccatctaaacaaaaagcttcttgagggcaggggctgtatcttttgtctctatatcctcaaccctaagacaaattgtgtataaagcaagaatctgcatgtaaaatatttctttagtttcatgttttaccaaaagttcaacctccaacatgcaacaaaaattgctattaaaactcatactgcccatttgaaaaaattttccaacatttatttatttaaaatctatttgtatttaattttcccagattgttaactaaaccatcagttcataggactactgaaactaaattaacagaattcctatctgtattcttaataactccatggtttttagtgtttaaaactgccatgctgattatgccaaagctctacatacttaagagacacactggatagtccataatacagcgtcaatt

SEQ ID NO: 1671 - DNA, 620 bp, Homo sapiens
ggaaagctagtgttgtgccttttacatattagagcatcataaaatgttttgttcttgtgttttttatttaactctctgctcatagccattcatacctgactatagtctatttacttggatctcttttctatgtgcctgtattatctatttgtttgctttcttgcttttgagttgacttattgtactttaggattcaggaaagagaaatgagaaatgctgagagaattggagttttattatcagtggttctaggaagaagcctttttccaactcatcttccaccacggattaactggaatgctatgacactgctatttgttatttatgccattgtttaataattggtatgctgaaagtagtatctactatgagtcatacactttagatattttcctagaagctactttttggtgggggaggtaaagagaatgtgaagggcctagatacgaaaaaatggaactagaaagaaaagtactaaagaagagtaaaaccaactctgttttggaattatttttatatctcagtcaagatacctacaggaagaaatggtacactgaacatgagtaattgaagaaagcataagaaagagaatatttacaaatttgtgtgaaaaaaaaaaa

SEQ ID NO: 1672 - DNA, 568 bp, Homo sapiens
cagattggaagctgctgtaatggaactaaaggagaaaaatacataagaatatatttttaaagtgtgtttcaaatgggtttagcagtgcattagtcatctatgtcaagagtttaacatgtttaaacaaagaaacacagtcacaatgactttcaattctgaataagtaatgcaactcacaataaggtcaaatcaagaactctagttgtgattagaatggagaagagtatttcattctatttagaccaaaattcagctaatttctaagcaacgactaagtgaaaaagacttaatgttccccaaatgttataaaaggtagttcacacatcctaactgtatattgcgtatagtaaattaagttgataaaataagaaaaaactccagattataatgtacaagtcccataataaccatgaagggttatcactgtagtaaaagaaaaacagccaagcaataatcagtttaacatcaaggtcctctccccaacacacacaccacactataaacactaaattaatccagcaaggtccgaattaggtcagaagacacatgggacttcatctggtgggaa

SEQ ID NO: 1673 - DNA, 639 bp, Homo sapiens
caagccaaagaactccaagaattaacagccaccaccagaagctaggaagtctcattcccacttggtgctactgctaaatgactatcaatgaaattacactttcatcacatgtcactcaactagccaaaatccccaggtgcctagtaaccactggattcatgtgccatctgaaattctacattaagagtccacgctaatttcccactacaatctaatctgtatattcccagtagcaaagactttgcaactatcctgccagaagtctccataatgtgcctctcactttctaaccctagcatatttgctcatcctactccaatcatctagaacacctgtgcacctccccttgtcctaatcctgtgattccttcatgacccatctaatactgcattctctataagagggctgttacggcttctttccttcacacagtattacctccttctcccctgtactcaaatatcacacttacagcacttcccgtgttttcttttgtatttgccttcatgtgtagtctttcatgatcttggcaatccaccttttggactatcagccatttaagggcaaaagtgtgctttattcatctctggtttcttgcactccactgccatacacatgtagtcatttaataaatatacc

SEQ ID NO: 1674 - DNA, 509 bp, Homo sapiens
ctaagaagcggagagggatactcctagctgggagcctttcatagcactcctgaattcacaacctcacggatggcacaagtgcaacttaaggtcaacactgggttgtttttgtttgtttgtttgtttggttggttggttgttttttgttttgttttttgtttttgagacagagtctagctctgttgcccaggctggagtgcagtggcgtgatctcagctcactgcaaactctgcctcccaggttcaagcgattctcctgcctcagcctcccgagtaactgggattacaggcatgagccaccatgcccggctagtgtgtgtgtgtgtgtgtgtgtgtgtgtgtctgtgtgtgtatgtttaatagagacagggtttcaccaagttggccaggctggtctcgaactcctgacctcaggtgattcacctgtctctgccccccagagtgctgggattacaggcatgagccactgcgcccggccagtagtgtgtattttttagaaacaacatttgg

SEQ ID NO: 1675 - DNA, 469 bp, Homo sapiens
cttgtccccaaaacataatttccctgctgtatttatctcaatggaatttagaagtagcgtggattatgtcaccctgagagttatttcttgtgtccactaaaagagaaaatgcacagaagaacgtgtctatcttaccgagaccactcatacagtgttggcaagaggacagtccccagagtctcaccatataatgaagctaatcactctatgaattatcttaattgaatttgaatgtattgctactgagtactatgggaagagcggccagtaaggacgcggtattttcccacagcattcagttagcaatgcattcaaatttaattaagatcattcatcactggggatgtccgtgctacagttgcctgcttttggtctgcctaagataggcatatctactttcacaggttgtctcttgtattgagtacaggattgtttgatccatccttaagtattatcctgagatgtgctt

SEQ ID NO: 1676 - DNA, 511 bp, Homo sapiens
gtatccatgtaataggatgttttctgtcaccttgaatggtttttgccctaatactttttcttaaattaatagagtccaacctttaattttacttattttctttttacatattttcccattcttatgccttaaaacatctttgccaatttgttttagatatgttttagggagtagcaaataatttgtattttttattattaatcatttcaatgcatcctaattttctttccattttaatagaagtaaaatactgatataagttgttatcattgatatgattcatattatttatttgttttttcatcattttattttgcttacctgctgtgttttacatttcttgtaatatgattgttttgtttgagttttttggggggttattggtttcctatttgttttccgtataaataagtgatttatacactagctacatagaaataggacattctcttttagtttcataagctttgtttattattatttatcctagttactttcccatacatttact

SEQ ID NO: 1677 - DNA, 573 bp, Homo sapiens
acctttgtaatctactcttccatggataaacatgtacccttttgaacaaagaaagtaatatgtgtgaaacacttctaaagtctgagtttttaataaattctccaacctagtcataattcaattggccgatgatgaaagccattgttgactaggcagtgtttaagctccaagtgttaaagcacaacttataactaatcataggctaaaaaataagctatgccaatccagaagcaaccctaagaaggctggctaaaatctaataacacgactaaaaagataaataaggaatagagccaaattgtgagattcacagatgtcacacaattaggcaaagcaagtcactaaacatacaaacacaaaaatagcaataacaaacaccaccatgaaatggaaaattagattccaggtgttttagaatatattacctaagatatccagtttttaacaatgacaatggaaaaaatgtgcaaaaaaattataacccatgcaccggggaaaaaacaaacccaaaataagtcccatacattggacttagcaagatgttataactgtcttcaaaaccccgggaaacta

SEQ ID NO: 1678 - DNA, 477 bp, Homo sapiens
gagcctggggactttccacacccccgtctcccgggttcaagcgattctcgtgcctcagcctcccaagtagctgggattacaggcatgcgccaccaccccggctaattttgtatttttagtagagacggggcttttccatgttggtcaggctggtcttgaactcccgacctcaggtaatccaccagcctcagccttctaaagtgctgggattacaggcgtgagccactgcacctggccgagtagttgatgactttttaaactgtggttgaggttccatgcacttctgacgcctctcccatgttggttcagcagctttgcgccccctgcctaactgcagacgtggcgggagatgagtccccgaacgcttggctgctcggtcaggcactgccacagcggccagcgtgctgcaggggttgctcagggagctcctccgtgttgtgaggccttattgctcacggcttacgtccagctcttctc

SEQ ID NO: 1679 - DNA, 545 bp, Homo sapiens
gacagaagggcaggaggtcctcctatctctacttgaaataccctcagaggtagggagctcacccccactataacagtccattttatctttgaacggaattgattgctgaatagttcttccttgtctgtgtgaaactggtccccctctaatactgtctatttttctcagttctttctgcaggagttagtaagtgatgaatctagtccctctgtcacacatttgaacacagttattctctctaacctaaacattcccaggtttttcatgtgatatggcttccaggttcttcctcaaacatggaacccagtactaaatgctgtgttacttttgtgattaccatgaaaccattatctcccttgttctcaacattcttctttgaatgctgctatgttccgttcttacaaatctccaggggagaaattccacagttttgttaaggtcttacattccagtgcctcccacaaaatctttcttatgcttaacttaaatcttgtcttacccttgttaattggatctaagaaaacacatattcaggcaggggatca

SEQ ID NO: 1680 - DNA, 525 bp, Homo sapiens
ctgtactccagcctggctcaaaaaaataaataaataaaatatactgaagttgtgttgtttgagaactgcattgtatgtgcattatatcttaatgaacaatacattttttaaaacaccatgacaaatgacatcaggaagagtgtcatattacagcccgaggcaaaggaatagttgataatactgatctttatttgaaatgctcataatttgttcatcatatgtttttggtattaattttgattttttacaattttgccttaaattatcatttatattgggggaaaaaagagaaagaactgtatttataattatgacacagtacatctgcagctcctaaaattcctgacactattgtcttcaggtaaatatatgctgtggttattattcagcttctctgttatgaattaaaacccaaagatcttctcacaagagtaccgttgaagttcatcatgagtgcagtaaggaaaaatcatgaagttcatcatgatgaagttcattatgagttcagtagtaaaaaaatccaag

SEQ ID NO: 1681 - DNA, 396 bp, Homo sapiens
ggagaaatccacagtgataacattttgtgtatttccttccagacatttttttccctctacatgtgtcagcacttcccagatgtgatgatggtatttgaaagagcatgatctggaaatcctgagccgtgctgccacaagaaaatggatgcacagaggacaaggccaggcagcgcaggtcttcattacactgagactttgcctgagtcccatggtgccccagtgccctggcctgggcacatcagcactgccttctgtccaggccccatgagtctcagatggtggaccctggtgacggaaggctgggtagatgccatggacctttcataggtcatagccacagctgagcacttggtgtcttactactcagtggagaggagaagtgtgctgaagggtggt

SEQ ID NO: 1682 - DNA, 629 bp, Homo sapiens
tataaagcgtcttttctgactgtaatgaaataaaactagaaatcaataagaagaagaactttggaaactatacaaacacatgaaaattaaataatatgctcctgaacaatcactgatcaatgaaaaaactgaaaagaaaattttaaaatttcttgaaataaatgaaaatagaaacacaatataccaaacatatgagacacagcaaaagcagtattaagagagctcacagcaataaatacctacatcaaaaaagtagaacaacttcaaataaacaacaatgcctctgaaaacactagaaaagcaagagcaaacaaaacctaaaattggtagaagtaaggaaagaaattctctcacatcagcggccctcctagggaaccctcaaaataaactaatatctggcccttaaagataacaacaagctttgtgccagaactcttgatgatggcagttttctttgaggaaaaggaagatttttaacacaatttttagtttgcacataggaatttagaaggagcaagaaggagaagagaatacttccaaacttgtttcacaaggcaaatattaccctgataccaaaatcagacaaaaatcagatctaaaaaaggagaaatctataggccaatatctct

SEQ ID NO: 1683 - DNA, 603 bp, Homo sapiens
tatgttttcttccaaatgttttatagtgtagttcttatatctaggtctttgattcactttgagtttttatatataatgggagatcacatgctgtttttgaaaacgagttaaagtggtaaacaatcaggagtttaaaaatatgcatctatctttggttttactgacaatcatgtgatattttgttaaacataccatttaatagaaagaaaacaaactttaacctctaatgaggctgatattctcaatatttactttaaaaatgtgataagcttagagttattagaaaaggcctttgacatttttgtttttacaaatcaactgctttcaataaagacttgaataaatgaagccatatttttatgttatgtaaataatatttttgaaatacattaaaaaatctgtattatataacatgttataattatatggctttttgtttaatgcagtggctctcaatcaggggcaattttgcccctcaaaggaaatttggtggctgggcatggaggctaatgcctataattccagcactttgggaggccgaggctggtggatcacctgaggtcaggagttcaagaccagcctgaccaacatggtgaaaccccg

SEQ ID NO: 1684 - DNA, 590 bp, Homo sapiens
agaatttatgcccttgcctgactggctgccttatccaattcagcatgctggaacttaaaaatattggccgggtgcagtggctcacgcctataatcccaacacatcgggaggctgaggcgggtggatcacttgaggccaggagttcgagaccagcctggccaaaagtggtgaaactccctctctactaaaaatacaaaaaattaccggggtgtggtggcagacgcctgtagcccccgctactcgggaggctgaggcaggagaatcgcttgaacccaggatgcagaggttgcagtgagcggagatcgcaccactgcactccagcctgggtgacagagcaagactccatctcaaaaaaagaaaaagggggggatactggatcatgagcaaatgtccactgatgctatcagcacggcgatggagactggcccatggatgggggcaagccgctttgtgggctcttgagctaggaagtcacagtttctcttgtgcccctttgagaaatatttagcacctttgtattcagccaaccaagtggctctcagtccatagaaagacgtctagaagttaactgtgagaattccttacccatg

SEQ ID NO: 1685 - DNA, 500 bp, Homo sapiens
caatctaggttgtggcctatgcaaaactctccaaggacattgcttgtttggatatgttagctgtctgtgtggagagaacctggaggacagaattctagcctggagaaccagttcaacagacagggcttctgtaactctactggagcaaatagatatgagcagctgcaatactcaatctcctatagcactgttcctccaaatggagtccttagaaccctgagagttcccatatgtgttctcaagagtcctcaaaataatattctccaagataattttttaaaataatagacttggctgggcacagtggctcacgcctgtaatcctagcactttgggaggctgaggtgggcggatcacctgaggtcaggagttcaagaccagcctggccaacatggtgaaaccccgtctctactgaaagtacaaaaattaaccaggcgtggtggtgggtgcctgtaatcccagctactcgggggactgaggcaggagaatcgcttgaacctg

SEQ ID NO: 1686 - DNA, 676 bp, Homo sapiens
cagaagtttaattttttataatgatggatgaagacagtaatatctaccttgagtggcttgtcataagtattaaataataaaaactagcattaaaaatatctagcatacctagatatatgttatatgttatagttatatgtttaaaaatttgtgtttatttcatgccttatttatctttaagaaactttatagcctgatcggtgctgattctttttccaaaaagtcacgtaaaattttatcaggacaatgttttctgtaacaaccattatttcttgtctttctgccataagtggagaaaaaagatgtgaaggatcttgagttttcatactttctaaatgggctaagagtacagatgtcagaagctatgccatgctacactatgaaacatgtttgttgaaaaagtttccacttcaacatgattttggaatgaggtgcagacttttccatacaatatctatgaataaaaatattcatttggtatttgattactaattaatcagatattaattgcattctctattataaaagccatattgtgcaaacacacacacaagtcaaattcctaaaaatatcctatataaaaggtttcaacctcagtatttctatagatgctatgagaaattataaagtatagtcattaaagtaatcctcttaaaggccaagtctggcatgattc

SEQ ID NO: 1687 - DNA, 612 bp, Homo sapiens
acagaaagtttcacgcaccaagatccatcaggaactataaaatgtttgttgtagaatctggcactgtacatacccactaaggcaaggcagatatggaagagtctgagatgacagtagaaatttagactgttggtcaaggcatgttgtctccaaggtaaaatagttttcgattaggatataggaaaatagaactatgtggcgttctgagaagagtgaaattcccagcaggtggtaaagcctagagatgcagactctagatgggcaatttccacgttcagtgttttagtcatatctcatttaatgatcagaagcaggaagtcatgaaatctagcttaagtataaatcaaaataagagttacgttgaggccgggcgcggtggctcacgcctgtaatcccagcactttgggagaccgaggcgggcggatcacgaggtcaggagatcgagaccatcctggctaacacggtgaaaccccgtctctattaaaaatacaaaaaattagccaggcgtggtggcgggcgcctgtagtcccagctactcgggaggctgaggcaggagaatggcgtgaacctgggaggcggagcttgcagtgagccgagatggcgccactgcac

SEQ ID NO: 1688 - DNA, 598 bp, Homo sapiens
  misc_feature 394, 395: n = A,T,C or G
accacataaaacagcagtcttcaaaaaacggaaactgcaggataggtaggaataaaaaaacacattcataaaggttaacattgccactctgaatccaagacaggttaagaggccaaaatgaaattatctagaagccttcagtttctcatggatatgataccaagcattgcgcttcaataacagagaaaacacctttccaacctcccttgaaacgtttatggaaacttgccacatattaagacacaaaggaaacttcagtaattccacaaagcagagagaatctaaacatattctctaatcacagtacagtaaaactagaaattaaagactcaaaaattccctactggaaatgttactaactctattaaattactcttgggtcagaggacaaatnntaatttgttcaaaatggtaacaccttgtatcagaatccatgatgcaattaaagcaatgaggcaaagaaaattacatccaaaatgaaaaagaaacatcaaatgcaaaattaggaaaagattaaagtaaacaaaggagaaacagttgcaaaataacaagcaaggctgggtgtggcagctaatgcctgtaatctcaccactttgag

SEQ ID NO: 1689 - DNA, 302 bp, Homo sapiens
tagaagagtattctcaagtgatcccattttggaatacattttagaagagtattctcaagtgatcccattttggaatacatttttgattattgctgtgtgtattatatatgtgcacatgtacaaatgcatagaaaatattgtggagggatacacattcaacagtgattgcatctaaagaatacagctgggcgcggtggctcacgcctgtaatcccagcactttgggaggctgaggcggttggaatccttgaggccaggagttcaagaacagcctgaccaatatggtgaacccccacctctact

SEQ ID NO: 1690 - DNA, 473 bp, Homo sapiens
tctagtactgcctgtcctcaaattgtccttttcttttcatttattttttaaattcggagcagcactacagaaccttatagatcaagcttatccaacccacggcctgtaggcctcatgcagcccagcatggctttgaatgtggcccaacacaaatttgtgaactttcttaagacattatgagatttttctgtgtgatttttttctttttttagcccatcagttatcattagtgttagtgtattttatgtgtggcccaagacaattctttcagtgtggcccagggaagccaaaagattggacagtgctgttgcagatgtattcaagaacaatagatagaaggactaatcaattgatcctggaaaaactgcagataatggcctggaaaaactaccactaatcagaggattcaggctactgaggaccatggtttctagaacttattaaggctgccatgaacttagaactcacatact

SEQ ID NO: 1691 - DNA, 151 bp, Homo sapiens
acagaaggtagcatcttctaatcttcagacttgcttgccttttcaaactcccactgtgattattttctactacctgtttcatatagtcagttaatctcatgaatttcaaatgctgacctagatgcagatgtttttgtggatacactatatt

SEQ ID NO: 1692 - DNA, 492 bp, Homo sapiens
ctgatagttggagtcccagaagctcacttatgaatagaggaagaagtcaagatgatctgccagttcagataatcagtggaaaatcctctgcataaaatcactttagtgatgatggaaatagaaagctaagacactgaatagccagttgcaatttccagtgtgccagaggcatacaaagagagcactcattgaaacagagtaagctgagctgtctccaaacagaaatgtggtatgcttttgtcatattaaggaaactgtcatccttttaaaaggaaagtatacagagtggaagattatagtgcagacctatcataggaaagcttaaaattaaataaacctgaaacactttttttcctactaaaaatcagaattaaaaatcacaagttagaatgcttacctcaatctatactaatgatgcaccgggcaccttattaaacaaactggaagtaaaaatcaaaatacgtgatattatttttagatgatttataagtt

SEQ ID NO: 1693 - DNA, 505 bp, Homo sapiens
cactttaatttcctctgaatggtcgttgcaaccccccccaccgccccacccattcctaattacaagttgctgtttccgacttgcctcctggtggcccaatttcaaaacagtgattaaaattaattacctgggggccccctccccggaggggaggagccccaggagccccagagatgcatccacgtccccactggaggttctgcctgggctcccacaccctggcttcccgagtggcctggggacagggacagcctctctctgggtctctgcttgcttatctgtgaaatatttcagctggccagatgcggtggctcacgcctgtaatctaacactttgagaggctgaggcgggtggatcactagagatcaggagctcgagaccagcctgaccaacatggtgaaaccctgtctctactaaaaatacaaaaattagccaggcaaggtggcacgtgcctgtaatcccagctacttgggagcctgtggcaggagaatcgcttgaacctgag

SEQ ID NO: 1694 - DNA, 546 bp, Homo sapiens
aatataaagtcaagatgaaggaaagaatcttaagaggtgtgaggcaaaagcattgggtaacctataaagaaaaacctatcagatcaacagcagattttgattggggtcctatctttaaacaaaataattgtcagccaactattttgtatccagcaaaatgaagcttcataaatgaagaggagacaaagtctttttcagacaaacaaatgctgagagaatatgccactaccaaaccagcactctaagaaatgctaaaaggagttctaaatcttgaaataaaaccttggaatccaccaaaatagaacctccttaaagcataaatctcacagggcctataaaacagtagcacaataaaaaaccaaggtatttaggcaacaagtaacatgatgaatagaacagtacctcacatctcaatactgacgttgaatgtaaatggtgtaaatgctccacttaaaatatacagaatggtaaaatgaataaaaatctacaaacaaatatctgctgtcttcaagagattcacctaacacataaggactcacataaact

SEQ ID NO: 1695 - DNA, 574 bp, Homo sapiens
ttttcaacgagaacttattcatctatccaacattcttcatccattcaacactcataaatatttagtgggcattcacaatattccaagttcaaacttgactttcagtgagttcacagataacggtttccaggtggctaaatttgacacatctgggagtcaggcaacaggaattcaggttaaagaaaacaaagagaaagatcagatacttgggcagatagtgaagccagtgagagaacctgggccctcaggcccctggatccatcctctgcagagaggtgctcaatcctttgcagctttgcagagaggtgctcaatctaaattcaggaaaacaaactctcctatcacagatagggaaattgaggctgatcaaactcttgtacaattttgtttattccatagcccctatgtcaccctatcaccgtattaccacttctatctttgtaagtttctactgaaaccccttatcttagtacaaaaaggcttccaagaatacaaaaattagccaagtgtggtggcaggcgcctgtaatcccagctactcaggaggccgaggaaggagaatcaattgaacctgg

SEQ ID NO: 1696 - DNA, 421 bp, Homo sapiens
gctgggattacaggcatgagccacgcctggcctctaccatttttctgtgtgtactcctcaactctgcctcctattacttagctgaccttttaatctacattcagctcatgctctctacttcaactatagtaaaacgtccataaatgtttgttgagtaaatgaaagaaagagacacgctctgccccattttctctaagtgtcccaactctctgttccactaccatcttcaagtcttaggaatatgctattcattgtgccagaaatgtctcccagtctctcccaagactgtatttccctttctgtcttacaacgcagcaatagtcacctctttcatggcattttcttaaattacacctccttggtttggctttatagtcactcttaaaaacttgcacggtggctcatgcttgtaatcccagca

SEQ ID NO: 1697 - DNA, 461 bp, Homo sapiens
ttctgtgcttttcagtgccacagtcagttctgttacaagtcaacagagcagtgaagatgctggtctattgtttagaaaaaatataatcctcaaacagttatttatcttcattttatttcttgttttggaaagcagcaaaaacttcaacatggttgtatactttgtacttagatcatggccagaaagttaggagacaagctgagaatattttattgtctgcacaaagatagagatcatattgaataatgaagaggtaagtcaaatctgaagaacgacttaaaattgtaaggaacttgatgttagtaacactacttactttgcaattatccaggataattttagcagatgggaatgattccccgctccctgactaaagaacaagaccataggtattcttgtattgtaaaagtgaccagtcattgagtgtagtttgtaatagtatttttaaatgcttattacat

SEQ ID NO: 1698 - DNA, 448 bp, Homo sapiens
aatttaaaataattgaaaagaactctgttgaaaccttgaagtagacttaacatgcttttcaaaagtatgtgtactctgactaagtgaaaaaacagttctggacaatgttttttcactctccaattaaaggtttatatttttaaaagcattaaagtacactttagaaagcaattatatttacctatcaattttagaaaatcaagtatttaaccaaataatttttggtttgtatccaaatgtgatcattctaaagtttgtacatactgtaaaatgaaagaactttgggaggtcgaggcaggtggatcacgaggtcaggagatcgagaccatcctggctaacatggtgaaaccctgtctctactaaaaatacaaaaaattatctgggcatggtgacatgcacctgtagtcccagctactcgggaggctgaggcaggaaaatggcgtgaacc

SEQ ID NO: 1699 - DNA, 405 bp, Homo sapiens
atacatcccataaaggacttttaaaagactaggtagtctcaaaagttcggtcgagctctatatgctgtactagtataaatcctcctttcagaatttgaaggagaaaaagacattttatgatgtgagggtcattcagatgagaccagaacaaactgaagtgtggttaaaggtgcagggccagttggccagaatgcccctgcgacagttttacatttttaagtgatatcatattacataataatagcacatgactatttctattctgtgaattataattgctaaaggaaataccccgctatttatgagatgcttagtgcatctgtcaccatggccttctggcccaaatcaaaatgatcggagctattaagatgatttccctatttggctgggttttaaagactatag

SEQ ID NO: 1700 - DNA, 461 bp, Homo sapiens
gatccagtaagacttgaagaatagaggtttggggtttatgaaagaattctagggccaataatacggatttgggaatcatggtggcattttatggcgtgagagttgatgtgatcacaaagggaaactatgggggattaggaaagaaggaaaaggatgaaatcctaagaaactccagcatttagaaagattgtataggtacaaaagccaacaaaggaggatgagatgaaagcgggggaaaactaaggagaaattaggagagagttgccatgatagaaacaaaggaaaggggcgttttaatgtgggagtggctagcaatgcaaatgctacaaagtgcaaaaaagccaaagactaaatcgggtttcctatgggcattggcagcctcactaatgtagcttcagatgagtattaggtgttaagccagccttcgtgaagtatgtcagaggtccagccagcgtccacat

SEQ ID NO: 1701 - DNA, 473 bp, Homo sapiens
gctgcaaatcatcaaaattagggatattttgttaccactttctttattgtttattttttctctctgctcctctccctgcatatggttgttattcaatgtatttgttaaattcattatttttttctgaaaagaatgaataaagagaaacaaaagattttatttgcagaaattacataaaagacagtcctcagttaaatcttcctgattaataggttgactgtaagtcactcgggcctgaaacagtatgtgttttgagcactccctcttgaatttctgattcaactgtattggggtggatcatattaaaaatgtttcatgttctactctgaggcactcatcctgagcaccagagacctaagcagaatggggctaattagtggggagagaatcagcaaactgagtttaccaggtaaaaataaaacgatttgctcctttacaaggacttaagcctttggaaactggaaagtaaaaat

SEQ ID NO: 1702 - DNA, 618 bp, Homo sapiens
ataccaggacctggagacaaccaacattttggagaccttcatcaaacagaattaggcccctctggtgctggctgccgagtgggcatcaatcagaatggcacaggcaagtttgtcaagaagccagcctcttccagcagtgcccctcagaatatccctaagaggacagatgtgaagagccaggatgttgccgtttccccgcagcagcaacagtgctcaaagagctatgtcgacaggcacatggaatccttgagtcagtccaaaagtttccgtcgtcggcacaactcctgtaagtagggtcaagttgatatttcttctcaatctggtgtttcagggctataagccataagcactgctgctctttaaacaaatcctttgttattccaataaaatggatgctggctgagcgtcacagaaatacaacatggttctcttcctccaggcctcattcctcaagatgttaagggaaaggaaataagctgttagggatgcctgtgagcttcctgccctctcttaccacttccttcaggaaaagtctgcccagagtttactaacagtgatgttttaaatccaggaactactgggcgtggtggcacgcatctatagtcccagctacttgag

SEQ ID NO: 1703 - DNA, 524 bp, Homo sapiens
ggtcataagaaaaaatacttgctaaatatttgaaagaacagctacaatatctctcagtgggaaaaatagaggcagaaagctagtggcaaaatctctgagtgactgtttcccattcttaacccagtatcaaatatgctatggaatcagcactacagagaagctgatataatgggaggcagaatgccattacaccctttttttcccctcaggatcttagaatcagtcaccggtggttttgcaaaaactactactaacaacaacaacattttaaaaaagaaacctcatcttcagagaaagcactggctaaccggtctccattttcagttgctgggataaagaacctatgtgggccaggcgcagtggctcatgcctgtaatcccagcactttgggaggctgaggcaggcagatcacttgaggccaggagttcgagaccagcctggccaacatggcgaaaccctgttgctactgaaaatacaaaattttagccaggcatggtggcatgcgcctgtagtccctactgctc

SEQ ID NO: 1704 - DNA, 561 bp, Homo sapiens
gtgtatccaggtaaaaagggcattttgcagtcttcctcgctgtttatgatggccaggtaattcagttctcttcagtgcagatgtctcctggggactttttgggaaaagtagtaatctcatatctgtgtgaaaaggcaacacatccagcccaaagtgtatgctatcagtctcacttgtagttaagggtggctgtgaaatacaattctgtcaatttggacatatcacacttctcctgggtatctgagaaaaatttgcctttcctgacatggacaccccttcttccttactatatccagcttatttctactcaaagtgtgccatagcttgggtaactcgggcagcagactctgcgactgagattagtatgcagagagcttgttaggagttctcataggatcaaaacttgaggagcaaagaaaggagagtatgattgggcacaggagggaagaggagaggtaatgcagtgtgaacagaaagttcagacaaagctacagggcgctctcgagataagatgacccttcagtattattccatgttgcacaaaaaagactgatctctatg

SEQ ID NO: 1705 - DNA, 567 bp, Homo sapiens
tacattttattgtggttggagagatcaaaatgcctaagactgtggtctaaagagaagccatcaacatgtacactgagaagctttcctttttagagtccattacagtatccttgctctttgagttgttccttcttctaggtactcataagtttaatatttctgagtctaactctattacaagctctatgatgaagttcaaccatggagtcatgaaagatggcttcaccattattgatatcaaaatgataactagtgatattctcgtcatattacccaaataaaattgtataaaccaggcagggcgcggtggcacacgcctgtaatcccagcactttgggaggctgaggcgggtggatcaccaggtcagaagtttgagaccagcctgaccatcatggtgaaactctgtctctactaaaaatacaaaaattagccaggcatggtggcgtgtgcctgtaatcccagctactcaggaggctgaggcaggagaatcatttgaaccagggaggcagaggttgcagtgagccaagatcacaccactgcactccagccagggcaacagagcgagac

SEQ ID NO: 1706 - DNA, 563 bp, Homo sapiens
cagctactcgggaggctgagacaggggcctaggattaaataaggagttttggcaaaactaggctggaactccaaaacctgctacgtaagtactcacgagggttgctagttattagtattattactttgttgttatttttaggagtggagcaggttgtatttgtatcttacatcaccggctctggtcagatttcaattaatgtcacagataggatttaaacatttcttttattatttttaagattttaggccaggcacggtggctcccagcactttgggaggctgaggggggtggatcaccagaggtcaggggttcgagaccagcctggccaacatagtgaaactccgtctctactaaaaatacaaaaaaaattagctgggcatggtggcacgtgcctgtaaccccagctattcgggaggctgaggccaggagtttgagactagcctgggcaaatagtgagaacttgtctctaccaaaacaaaacaaaacaaccaacaacattaggccaggcgtggtggctcacacctgtaatcccagtactttggggggccgaggcaggcagt

SEQ ID NO: 1707 - DNA, 525 bp, Homo sapiens
tgatatccctttaactcaattcatccctcaggcttgacttggaggccacttactcagggaagtctctcttgttggttcagacaatgctagtccccagttatttactctgagaatgtcttctactttttctttcaaacacacataattataagtaaataattatctaggtaattatttaatgcctatctctccttctctcaccatcaaacttttaaggacagagagggcagaatcatgtctgatcagttcaccttacatgcacagtgccagttatatagtaaatgacctaaatatttttgaatgacgtatacttgtggccatttttcctttttagagcttcaccacatttagatattgtgcaaaacatcccagaatctggaatgtactctagttccacaggggctgttcctcactttgcctgatggccaataacatgcataagtctcctttattcccgcctcaacaggagtgtgtgcacacacagacacacacacactcacttacacacagactcacacactcaca

SEQ ID NO: 1708 - DNA, 594 bp, Homo sapiens
aaacaacacttattgaaaggcatattttaactagaaactttctatatttcaaaaacacttaagatgtcattatattaagtcaattgctactattgagaaactaagcctcaaagacaatttgtctaaaataatgggatcagaattcaagtccatgtctatcgaaccaaagtgattgttcttctacttagaagagagactattttagctggaaggggcttttttgaaatagttcaaaacagattcctaatgttattgataaaataaaacaagggttaaagagaatgaggtccattggatgcttgcagagaagagaaatgcaaatgaaacatgatcctgaagtgtctcttggaaaacaaatttctatctttgttattggaaggtcattcaacatcctttaaaggaatttacttttgtataattagtgaccacaataagcctaatctgggaacaattgtttttggtcaactcctacaaatttcttgtgggaggaagatggccttccttttctatgaattcagaattcatagcacatggtagtcacccaacatgtgtttgttggataaatgatgaatgaaacagaataaataacagaac

SEQ ID NO: 1709 - DNA, 571 bp, Homo sapiens
atgcagggtttcggctttgcgcttgtgtaagttctcataacaccacctttctctcctttttctccctgcctgacagaagcagccacttcctgcagttactgatgtctggattacctcaacatcccgtttgctacatcaactttctaaaatacatgccgtctattccctatactaaatcccctctatttgaaatttctgatttgctttccatgttcctgactagaacctgctggaacaggacattcatacctttagtgaggtcttgtcaaatctcttacaaggataattacacagaaataaaattttagctcctaaaaagagaaaactatcctattaggttgctatctctgtcaacaagaaagaatatactaaccccataggtacaaaatttcaggttcttcattcactcctgaatgaatgtgatccgggccccagcaagataaagatgtcttaggctctaggaacaaaacttggaatgagacatgatctctaacccccaaaaggagactataattaggagagaagaggtcagttataatgccacagtggaggaatctattagagcaactag

SEQ ID NO: 1710 - DNA, 536 bp, Homo sapiens
gctcaactccactaggtgacttcttcagtctattctgaaccaaaatctattctgctgtaaatagatggagaacaacaggatagactgtcagaaactgtgtaagatctaggattcactgtttcatggatgctatcagaaaaaaaataaaaaaacctgaatgagagacaaaacacttcattgctcatggcaaaagcagtagccagatctttatgcttatttgcataaattccctatgtccaagtcccaaggtggtgacatcaagaatccatgacagctgctttcattgaaagggtagaatgctgagtttggggtcatcaccactttcatggtaattgaaagtaaacctactctttgcccgatggagacagtacctcatccctcaaggttaagggttgcaaacaaaacaaggatgagagatggctcagatggtcaaggccttgcattctgggaatacacagcaagaatatgcagggacactcagggcgtatgctggattgcctctctcaacacagactaaaaagccattcaaaattgag

SEQ ID NO: 1711 - DNA, 552 bp, Homo sapiens
tggatcacgaggtcaagagtttgagaccagcctcaccaatatggtgaaaccctgtctctactaaaaatacaaaaaattagccaggcatggtggtgcgcacctatagtcccagctactcaggaggctgaggcagaagaatcgcttgaacccaggaggcagaggttgcagtgagccaagatcatgccactacactccagactgggtgacagagcgagactctgtctcaaaaaaataaaaaaaaaatctgagattgtggaggcagaagaggtcattctctttctgaataaagttgttagagaatctagttaggaaaactgtgttctagtccctaagaaacatataaaattaaaatctctcaagaacattctcacaaaggcaattattttgcttgttttcagatcaaaatgaaccatgtaatttcttttaggaagtagaagtagtatacaaacaatctgtaaaagagtttaattcagccgggcgcggtggctcacgcctgtaatcccagcactttgggaggcagagacgggcggatcacgaggtcaggagatcgag

SEQ ID NO: 1712 - DNA, 418 bp, Homo sapiens
cagatcacctacaggagagatggccacaccaggaacctgtttgtgtatcatgaaagtgggaaggtgagatgcctggagttgccacctccgcctccagctcgcaccccaggacttggcaggtgcagctcaccacctcccctgctcactggtgctgtgctcagctgcctcttgagattttctgctaccatttgccttaatctatcattgcctcccagtctgagataaagatatgaggagggcagggtgagatcagggagaggaacctggcaagtaccatggctatatctggacagtgcacagccaccaatgaaagtccagttacagaagggactatgcccagggatgcaaagccaggtagggccagaggttctgaatacgggggaggaactgatggacagtcaggcagcagtgcaccccg

SEQ ID NO: 1713 - DNA, 125 bp, Homo sapiens
ttttggggtgggtaaggatcgtatgttgaattccttctagctggctggtatgctattcttagctgggaaaggaacataattgtgatggggtgtgtgtgtgtgtgtgtgtgtgtgtgtgtgtgtgt

SEQ ID NO: 1714 - DNA, 442 bp, Homo sapiens
  misc_feature 385: n = A,T,C or G
actcaaactaaacttgaaaaacaggtgtcaaaactggaacaagaacttcaaaaacaaagggaaagttcagctgaaaagttgagaaaaatggaggagaaatgtgaatcagctgcacatgaagcagatttgaaaaggcaaaaagtgattgagcttactggcactgccaggcaagtaaagattgagatggatcagtacaaagaagagctgtctaaaatggaaaaggaaataatgcacctaaaacgagatggagaaaataaagcaatgcacctctctcaattagatatgatcttagatcagacaaagacagagctagaaaagaaaacaaatgctggagttagaaaagttacagcacagtactgaaactgaactaacagaagccttgcanaaacgggaagtacttgagactgaactacaaaatgctcatggagaattaaaaagtact

SEQ ID NO: 1715 - DNA, 456 bp, Homo sapiens
  misc_feature 103: n = A,T,C or G
tacgaccagaaaaagagaactttgacattatgtgtaaaaatcagcctaaagacttcattcattcaagttcacggtgagtcatagctcttccaggctgcaagtngatctaattggcaactgacttcttaaaaaagagaagcaaaaagacaattttcaactttttcttgtcaactcatttcaaaaggaagttaaggtcatcatattcaatatcaccgtctcttagtacaaactggaatgttatttttccctgttatggattcctgatattttcagttaagtttatttatttaattcctcccatacagcatacatcactctctatcctggagatgcaacagtaaacaaggaaagcagtgtcccttctgtcatggagtttatattctagtacaggaagcataaattaataaattacaaatcaggattcatgacataatagtttataagagcttagataca

SEQ ID NO: 1716 - DNA, 568 bp, Homo sapiens
attcattttatacataggcataaaaacacacacatacacactttcagttaattaagtaattctcaaagctgtactctgaggtaagtcactattattatcatcactattttacaaagaaagggaggtttaggaagagttaggtaaattgtttgaggtacagctaatgaatggcagagatggatttcaaaaacaattctgtctcctgcccacctgcacaattacctactttgctttttcacagaagtagaataaattagatgtggtgagtagagaagtgaaataaaaaataatcacaaagcatgccatttggataacttggaagacaacagatacaatttactatgcaattactatgcaccagcactcactatgataaaccctttaaaaagtcaactttgggaggccgaggcaggtggatcacctgaggtcaggagttcgagaccagcctgaccaacatggtgaaaccccgtctctactaaaaatacaaaaaattacccaggcatggtggcgggcgcctgtaatcccagctacttgggaggctggggcagcagaatcgcttgatcctggg

SEQ ID NO: 1717 - DNA, 480 bp, Homo sapiens
aggcgtgagccacagtgcctggccctagagtagtttctgtgttctttactgataaaagcaaatggctgtatttgaagctatactacccttccacataaaatggacccaaaaaataaagagttgtaaaacaggaagaaaagatcacagtattagagaacaagttcaggaagcccaatattcaaataggagttctagaaacagaacttggaggaaaactgagagaaggaattcagcaaaaaaaaaaattcaaggccgggcatggtggctcatgcctgtaatcccagcactttgggaggccgaggtgggcagatcataaggtcaggagatcgagaccatcctggctaacacggcgaaacccagtctctactaaaaatacaaaaaattacccgggcgtggtggcggggcctgtagtcccagctactcgggaggctgaggcaggagaatggcgtgaacccgggaggtggagcttgcagtgagccg

SEQ ID NO: 1718 - DNA, 560 bp, Homo sapiens
acaaggtccacatccaggaaaccccttgtcactgtgagtggtccttggtaaatgtccagtgcagctggaccctagagaactggggctgggttgcagcagggttggaaaagagagatagcggaaaaggtagccaggagcccaaacaggaagccaagccgagcagttaagactttatctccaagatagctgagcaatcaggacaggattttaaagacgagagtgacttgctaagactggcatttgaaagagctctggcttctggataatgcaggagaggggcaacactgaagaccagtttggggccatcacagttttccagggaaaagatgctggtgacttgaactgaaagtagtggaggagggtaaagagaaaacaaggaggttgtagaatgtcttcaggagaaatagcagaacttagaattttcttagccgggtgaggtggctcaggcctgtaatcccagcactttgggaggctgaggtgggcagatcacaaagtcaggagattgagaccatcctggccaagctggtgaaaccccatctctactaaaaatacaaaaatta

SEQ ID NO: 1719 - DNA, 603 bp, Homo sapiens
agccagccacctagctacccttgactactgttcatttctgaaacttgtttctctagaacttttgttcattcttaaagcgaaccaagatatttcaaatacatgaatttttttacttaagttagctaaagtcatatttggtagttttcaccatgaaatctatggtctgccaccccaggtcttccataaggcaacccacatggtcctaccttctgtggagcacagtcattgctgcattctgaaagcccctgggttaaacagatgtttctcgagagcagctgatatcagctaggtaaggagcatcaccatcatataattaacaagatgtgcatgtatcttaacagtcaattttaattttcaaatcagagcctactaacacaaaagaatctcccttggaaagaatatacacatacatataactagctagctagatagacagacaatcagactgattgattattcattcaacatttattgtgttcttattatggaccaaacttcttaggtcttaggcataaaaagacaaagaagataccacccctccctttcaggagctcacaatcttggtaagagactgaaatgtgatcgggttatggcaataacttt

SEQ ID NO: 1720 - DNA, 637 bp, Homo sapiens
cagcttcctgtcacacatggatagtcctccagccctggtcaaaatgccagccgactgcagcaaaatgacaagaccaggtgaaatctgcaaaacctacctgcggccagcccaaaatatgaacctaccaaattatgtgctaataagtgattttgttttaagccattgatgtttaggattgttcattatacagcaaaggctgatacactgatagagggatcacgtgatatgaaaaatacgtggtgactaatgtgaccgttggcttgctgggatgcccatgatgccagaaactcctaagctagtcttggagaacagcagattcagtcctcccatttctcactcactcctgggcatgaattcattaaatgggaaaggaaacagattgacctgacctacttttatttttctcctcttttttcagctgagtggataaaaagtaaatgtatctaagttaaaagtacacaaggccagacgcggtggctcacgcctgtaatcccaggactttgggaggccgaggtggatggatcatgaggtcaggagatcgagaccatcctggctgacaaggtgacaccccgtctctactaacaatacaaaaaattatccgggcgtggtggtcggcacctgtagtcccagctactcg

SEQ ID NO: 1721 - DNA, 629 bp, Homo sapiens
tcacgtgatgactggatgtggaggcaagcttcagagtcagggaatcatctgagaagacccaagaatttgactctaggagccataaacactcagatcaagacccgaggagtcaagagctgcttccaggagaaggcaggttcctgctgggctcagcagcagctgtgcgcagggccgtcaggctggggacggacatttgaattcagttgactgatggaggagcagtgagcctgtgagccagcctctggggtcaaggctcccagacagtggctgctctgttactccatgtgttccctaccagctcccccacggtggctgcggggactgagcacacagaccctgcaccttctggggcatctcccctgcctctcacaaagtcctgctgcttcctctgctgtattcatcacagtcttcacaatagtcatgtcaccgatttctcaagaatgtgtaggaatcatgccttgccccatgccctcagcatttgtgggccgttcagaggtatgttatgtgaaaacacgtcactacaatccgctgaaagctggtaggtgcaaagctcctctatggagtttccaaagcgccccagcagcctgggaggcctggcaagttgactggcttcctcagtcccagctcat

SEQ ID NO: 1722 - DNA, 559 bp, Homo sapiens
tggtcttcactatttttaaaccatctcagctaaatcttttatgttattgtatttttaattctggtttgatccctggaggtgaaggctacagtgaaccatgattacaccactgcatctcagcctgggtgacagagcaagaccctgtctttttataaagagagaaagtgagagaaaaagagaaagagaaagagagaaagaaaaaggaaagaaagaaagagagaaaagaaagcaagaaagagagagaaagaaagaaaagaaagctgtgaagatgatacttgttaaccagaatgaaagctcatttggtcagtagattaaatacaaataataattctatcattatgtctcaggcagtgtgctataagtgattattacgtgtcatcttatttcatccttacagtaatctgttttgggtaaattttaggataatttctggctgggtgcggtggcttacgcctgtaatcccagcactttgggaggccgagacaggcggatcacctgaggtcaggagtttgagaccaggctggccaacatggtgaaatcctgtctctactaaaaatac

SEQ ID NO: 1723 - DNA, 518 bp, Homo sapiens
ggaatcccacagtgagctataatcactagtcccagtaccttgctcagtccttcgctggggctgcctgagaacagcacaacctcagcttaacaggtgaggcagaggccaggctcagtggctcacacctgcaatcccagcactttgggagtccgaggtgggaaggtcacttgagcccaggagttcaacaccagccagggcaacatagtgagacgtcatctctactaacaataaaaaagtaaattatctgagtgtagtggtgcacacctgtagtcccagctactcaggaggctgaggtgggaggatcacttgagcccagaaggtcaaagctgcattgagcctgggtgacagagcaaggcccatgcctcagaaatagaaaaataaaaatagctggaatctgtcagctcccagcattgctcacagccgaagggcaagctccttcttgaagggagaccagaacagcacaccctagagctgccccacccatattggcgcacagttggatgactctgatgatccac

SEQ ID NO: 1724 - DNA, 520 bp, Homo sapiens
gtacaaagatgttaattggttctaatcctctcctagaagctgttttggtagcctgacctggcaccctgaaggacaccttggtgtgaaaaactaaagggtccattgaggagggagtgaaaggcagccaagcattccaacacattttaatttcaggaattaaaaaagaggaacatcatcatggagatcctagagaaatcttacaaagctttaataacagtgaagtaagtcctacaaacacccaagcgcgcacgcgcgcgcacacacacacacatagacacacacacacacacacacacacacacacacacaaaggaaaaaggaagccctagagtaggggcaaagggaaattcagattctcaaattcttcatttcataacttcttcttataaactggtttggctctctgaaatccaaaaacgtaatttcactagttgagacatttgttttttctgtcctgatttaccaaactgacatcctcatgaaaatcagattcccactctgctcaaccccgacagactct

SEQ ID NO: 1725 - DNA, 564 bp, Homo sapiens
catttatataaaatataatgattgctttgttatctgtcagcagagactttgaaatattgtatatttgctttgagtggacttaactaattctgctaagatgcttatggagaggtgggagagaggaaaatgtttgcagtacagatagacctatttagaagaaaagatattgctagtgggcagatctcaactctggatgagatgcattaggaataatggcgatgttagactcaaacacagtaagtgacacaaactcctctttctcttttttctgtcattgaatggccccttcctccacccagttgtccagtccttatgttttggtaattctgagtttgtcctgactttctgcatccaattcatcatgaaaccctcctgtctcataaacatctttcctcttctccatgccgctctgtggctctagctcagaccctcctcatgtgaagcttcttcccttgtgatgatgtcttgttgatgtcacatccctggcctccagacctcttactgtgccacccttttcctcaggactcttcagggccagcctcctccctctttttgtaaaccacg

SEQ ID NO: 1726 - DNA, 349 bp, Homo sapiens
gattctcctgcctcagcctcccgagtagctgggactacaggcgcccgccaccacacccggctaatttttgtatttttagtagagacggggtttcaccgtgttggccaggatggtctctagctcttgacctcatgatatacccaccttggcctcccaaagtgttgggattacaggcatgagccactgcgcccggccggaattcctgttcttttaagcccatgtctaatgccatttcctccatgaagtctctcctggtgcatttcttctcccagggaaccagcgctctccttcagctttgtcaatgtaagttgtgaagaaagtatttgttggtcgggcatggtggctcatg

SEQ ID NO: 1727 - DNA, 488 bp, Homo sapiens
tgaaaggtcaaggggattgatcatagggagcctggatttcagagggagttaaggtaggacagaggagcacgacttctcattataagcccctctatgctttttgatttgtacatggtggttattcctctggttcaatttctaaaattgcttttttaaattggaaaggcctttggtggtaactgtgaggtagaagccaaggggtgtgaatcctaccctgctgccaacttgctggcagagcccagaggatgactgctggcaactgctgatgaaggagaggaagttgcttggaggtcctggggcccgtggcaagacaaagggaatttggtaaaggagcagaggagacctaggctgggcccgcatagtgtaggggccacttaggatgtcttcctgccacctggttattttatgtagctttttaatatactgaagttgacataattttcaataaagcacattggagctgaatggagacgtttgctcaattctgc

SEQ ID NO: 1728 - DNA, 469 bp, Homo sapiens
tcactacgttgcccagtctgttcttgggcccgggagctggaggctgccgtgagccgagatcgccccatgccagtatgggcgacaaagcgagaccctgtctcaaacaaaactcacaaaatcaggggacaaggaaacaaaacaaggcttgatagtcaggcctagctgtggggacaaatgccataggtctgtggtttgcagcttcttggggtcctgagagaacaggcccctcccccttttcacgacagtgtgtgcatatgcacactcacttctgtatccagtttcagaggttctcagatctgaggtcccctatggactcctccgctacccccggttgcaaggtccctaagccattgaagaatctgacagaggcacaagtccaccctgacctttggcaggactgttctgctgccagagggattaccgagaaaggaaatcttgtcctggactcttcaagtggggtgagtgagct

SEQ ID NO: 1729 - DNA, 387 bp, Homo sapiens
atttattcagcaaatatttttaaaccactttctttggggtaaacagtgtactaagcactagagatatcatggtaaacaagccaggtatgatttcagtagtatacttgcttctaagtctattttctttcagcctttggatactggtttaaatctcttgtgggattttaagtttggtaggaagacagtcatgggtcaaataaatacacatgcttttagaattactacggacaagttcgagatgagttttaagcccaggccacatgtcagctttgtgtacttagataagctaccttcttagaacctcagggttttttttgtttcattcctaataaagaaataacaaatactgcctcacagactagttgtgataaaataagatatttgata

SEQ ID NO: 1730 - DNA, 162 bp, Homo sapiens
aaagatcattgcaagtaaaatgaatcattaagctgatcaagcctagaaaccaccaccagaagtatttatagcattattagggcggagtatctacaatccattctcagacttattataagtctcaagatccaccctttgaaaagctaatcctatcctcaatct

SEQ ID NO: 1731 - DNA, 536 bp, Homo sapiens
aattgaaataaaatataaaatcatttaaatgtttaaccatgttaaagggagcatcatgacccagagcgttattcttagaagttgccagccttataaagacccatcagggtaagcaagtctagggacaagcagttaaaaatgaagcacttctaactatgtacctcaaggtgaaatagattttatagaaaaagccatatatgataaaaatctaaactttcagaactagatgactttgatggatggctttacaaaatgatagctaatataacataattcaaaatcaaatgagtttttaaaatagagcatctgggccgggcgcggtggctcatgcctgtaatcccagcactttgggaggccgaggtgggcggatcacgaggtcaggagatcgagaccatcctggccaacacgctgaaaccccgtctctactaaagatacaaaaaattagccaggcgtggcagtgggcacctgttgtcccatctactagggaggctgaggcaggagaatgacgtgaacccgggaggtggagcttgcagtga

SEQ ID NO: 1732 - DNA, 655 bp, Homo sapiens
tctgttaatatctttaaaaatgaaaaatatacttttcttgagatccaataataccccttctggaatcatatctcagaaacaaatgcatcagttctttaggataattatagaagatttgtgtggggcaggaggggagcagaggaggaaggaaagtatacactgtctataacagcaaaatttcataaaacaaagagaatgctcatcattgtggaaattactaaattaattgtgatatagcacacaatgagatacatacatagttaggcctgttcctgctgacttagagggactgccacaatttactgggaagtagatgaagagaaagtaagatgtagaagtatataatatggtctagtgttcctagctgacaaaactatctctttcatcacattcatgaaaaacagaattatacacatctagctaacagtgataaggtggggagattaaagaaaaaaaagtggctggcatggtggctcatgcctgtaatcctagaactttgggaggctgaggtggggggatcacctgagatcaggcgtttgagaccagcctggccaacatggcgaaacctcgtctctacgggatgggggggaaaaaaaacccaactagccaggaatggtggctcattcctgtaatcccagctacttgggaggaggct

SEQ ID NO: 1733 - DNA, 429 bp, Homo sapiens
tttgtgcacaaaaggcatactgtttaaacaaactggtatctacctatcttagaaatttttattattaacagatttaaagccaaatataacaatatacgcaaaagtaggagaatgggtttctaaatttttggaaaacaataataggagttcttaagatgcatgaaaggcaactgaatttcatgacagaaatagtaagaaagaaggaataagaaaatgtttcttggccgggcgcagtggatcatgcctgtaatcccagctctttgggattacaaggcaggtgggtcacctgtcagaagttcaagaccagcctagccaatatgatgaaacctcgtctctactaaaaatacaaaaattagctgggcatgatggccagtgcctgtaatcccagctacttgggaggttgaggcaggagaatcgcttgaacctgag

SEQ ID NO: 1734 - DNA, 503 bp, Homo sapiens
catctatgccttcaagattgtatttgttttgttttttggcagtgaatatggtgtgtgtgtgtgtgcatttgtgtgtgtacatgtgggagagagggagatagacgagagattgaaaatgtatgtgtgttagcctacttggtattctctgagtttcttggatttgtgatttttttgtctttttttaatttttcaaaattattgggtattacctcaatgctcagataaataattttaaatgtggaagcaactctaaactgaggaataggcagaagctggaagagtttcgggtgcatgctagaggcttagattgttataaaaagaacttttaaaggcgattctggtgaggactcaggaagaaaagagaagagctaaagacaaagcctccattttcttggagaatacaaaagtaatcatgaacagaatgttggcaaagacatggatggtcaaggtcattgtcatgaggtctcagacagaatcaagtgatattattattggaagctaga

SEQ ID NO: 1735 - DNA, 529 bp, Homo sapiens
taccctcaaggagtgtacagtctgaaaaggaaattgtgatgcacactaaaattcataggttgtataggaaaatggcacaattgtagtccctggagttaggaagaggtgaatcagaagatgggcaacagagctcctacctccacaactataggggaaataagatgcaaacaaacattagaagggagaatgttataagactaccaggagaagaaaccctggtcaaagcataaaatataattatatattgaccaagttcaatgcatttattattcttatcatcatctgccagcatcatttgattcagatatttatacccaccctaaatgtaccaaattgtcagttcaattagcaaactatgaattttgagaattcatctcacctcaaactctagttgtgattcttattgaaattatgtatataagcatcacacacacgcacccacacatacacatatacactcacacacacttctaataatttaacttccaaagagatacacaagttgtattcttcactaggaataaattat

SEQ ID NO: 1736 - DNA, 526 bp, Homo sapiens
gtgtaaatacttactacttgcttgttgttcttgttgttgttgggggtgatgatgatgatggtggtgatggtggtggtgtcttctctgaaaacactgaatgcatatggctacatgttcttttaagaggtaggaccttccagagggtgtcaagtgaaataagttcatactatggcacctgacatggaacaactggggagcggtggtttggaggtactttatgagtcaggattgcattaagctgcatggaatagagacttgtctgtaaatagggctttgtccttcccaataacaagaagtggatgcagcctggggctggcacagctgctcaagatagtggtcaaagacccagcttctctacctgcctgctgtgcatcctcacgctcctgcatctccaggcatcatgaacacattccaggcaggaagacagaagggcaaaaagtgtgtaccagtatgtttattcctttttatgaggaaaccaatagccttctcagatgccccatcagcagacttctgcttgcctctcatt

SEQ ID NO: 1737 - DNA, 575 bp, Homo sapiens
gtgtgcacctgtaatcccagctacttgggaggctgaggcagagaattgcttgaacccgggaggcggaggttgcagtgagtcaagatcacgccactgccctccagtctgggcaaaagagcgagactccatctcaaaaaagaaaagaaaatgggaatgcattcaggtgagtaaagtatttaatatgtttgtgttattatctgaaaactgcctgtggtgcctaggtccagggccaacaactcatgaatggatttgacagataaaatgttcagaatgtgataatacctaattaggaaagaaaatactagagctatgataattataatgtaacatcatgtctctctccaccccatctccaatggaaaaatgctgtcgttgacttaaatttccctgaagtgattttaaataacccagtgaaatttgagagagggaaatttgtttaaaatatgataaacaagatgaaagattttttttatcctaaaggttaaagtatcccctgaggtaaatcatctttgggaatagatgtttatattggttcctatgtctcccaaagacctccatgtcaaaccagcaatttt

SEQ ID NO: 1738 - DNA, 562 bp, Homo sapiens
ctctctctaccaactagatcaagagaatcctgaaagtcaaggttaaccaagacagagccaggctctgaaaaaatctagaggcctcaaggttccaggaggaagatgagctctgtggctactaggggaagccctggtgccagctgactggccaaggatctcattacctttataaacacattgattgattgattgagacagagtcttgctctgtcgcccaggctggagagcagtggtgcgatctcagctcactgcaagctctgcctcctgggttcacgccattctcctgcctcagcctcccaagtaactgggactacaggtgcccaccatgccaggctaatttttttgtattcttagtagagacggggtttcattgtgttagccaggatggtcttgatctcctgacctcatgatccgctcacctcggcctcccgaagtgctgggattacaggcgtgagccaccgtgcccagccacagaaaatatatttttaaaattagctaggtgtgggggcacacagctgtagtcctagctacttgggagtctgaagcaggaggataacttgag

SEQ ID NO: 1739 - DNA, 571 bp, Homo sapiens
ctgaattatagttactaaatgagaggaaattgtgggtgatgtatcttcacagatattcctgggatagatgaacgtgacttagattatatagaaatcaaagattatatttcagggataagaaaactaggcacagaagacactaagattgaaaaataattatttctgagtaactgagtcatgcctagagtaaagaaatagtcaaattagccacaaggcaagtagtatgtgtttgcttaagtcctgaggttgaacgatctcattaatggctccaattcctcacacgcaccccgccccctccgagatcagcatccttgagcatgtggtcttccagtaccctcctagtctgtgcccactgttcgatttgttgggaatggggtgttaacatatgcaacaggggccgggcgcggtggctcacgcctgtaatcccagcactttgggaggccaaggcgggcggatcacgaggtcaggagatcgagaccatcctggctaacacagtgaaaccccgtctctactaaaaaatacaaaaaattagccgggcgtggtggcaggcgcctgtagtcccagctactcg

SEQ ID NO: 1740 - DNA, 558 bp, Homo sapiens
ctgctcagtttgtttctcagcactgtgctttgcttaaagtcctgctgtaaaactctgagatattgattagatatggacttcaggagtcatgatttttaccatcttattttgtccctgggtcatatgatgaaatacttcagttgttttttatctgtgtaattgcttcttgcattataaggtttttgtaacactcaccattcttaacccaaagcaagctttattaaatatgaaaataggtcatcaaccacatttcattttgtgtacgttaagaactattagtttggccaggcgtggtgacttacgcctgtaatcccagcactttgggaggccgaggcgggtggatcatgaggtcaggagatcaagaccatcctggctaacacagtgaaaccccgtctctagtaaaaataaaaaataaattagctgggtgtggtggtgggcacctgtagtctcagctacttgggaggctgaggtaggagaatggcgtgaacccgggaggtagagcttgcagtgagccgagattgcgccactgcactccagcctgggcgacagagcgagact

SEQ ID NO: 1741 - DNA, 544 bp, Homo sapiens
ggctgaggcaggagaattacttgaacccaggaagtggaggttacagtgagccaagatcatgccactgcactccagcctgagtgacaaaagacgagaccatctcaaaaataataataataatttctggcttcttctgcagatgaaattagataatctttggaaaggcttacacatagtaccagatgttgtaaaatttactaattaataggaattaattaatgaatgccaaggggcagagccacacttcctatgatagttccttgctataaggtgctattttgttctctacatttactccatagtaagcttttgtttgagaaaaaaaatgccagtttggtgcgtagtagatacgcagaggctgagaaaggaacagatgacacaataacacaatggtaacagaatgtataatgcttccctctcaacttggttgatttgttttttttacatttacttggaccaaacaagcaaaaatacatgctccccagaagaacagaaataaggattttctttgggaggtggaggcgggcggatcacctgacattag

SEQ ID NO: 1742 - DNA, 325 bp, Homo sapiens
tgctcaagtgtcagggtaatatgtattgatgtctacaacttattatgaaatgtaccaacaaaaagaatgaattgatagatggataaatgacaaagcaaatgtagcaaactgttaaccatagaacctaggtggtagtaatatgggtgtttgctatgcacttctttccattttactgtatgtttgattatattcattataaaatgttagggtggggtttttaaaaggcaaatggtctgcaaaccttacccaaatacagtcacccaagagtcatcgaggtgatcttctgaagtcaaagaatctccttgagtataaaaaggatccaact

SEQ ID NO: 1743 - DNA, 371 bp, Homo sapiens
tgttttttgtttgtttaatcagtatgacttcttacatttttgtttttctttagaagtgcattttggttattcatttatgcttttataaaaaccagactgtatagtggtgagcagaaataatgccctttaatgccttagtaaggtcagagacctagcaggtgatcgcgtgtgctcccctccaggatcccagggcagcgaagcttgtgatcagttgctgcctcttcttgccgttgtttcctttacccctctgcttaccgaaaataattgctgttcttttaatgccaagaagttcccatttataaactgaagttagttagataattaggtagcttagaacagtggcttttaaactttttgattggctctactat

SEQ ID NO: 1744 - DNA, 380 bp, Homo sapiens
gcaccaaaagcactcaccactccgtgtctctcttgaaagctaatctctgtggtggtgtttttccactgtgccaatctgaagcggcccagaggagggagaaacagtgtaggccacttttcatgctgtgatgacagacagctgaatcatcctgaatgtgtgcaattgcatgggtgtttattactacaagttacatggtgtttgccacagatatgagtcaacccaggagcatcctcatatttgtcatcttgtaataataatcagagtatgaaagtacaaaaaccatttgggggcgttgatgacctctcagaaacagagctttcccatccaccatggccacattaatagaaacatctccttattttcagatgatttacttttta

SEQ ID NO: 1745 - DNA, 464 bp, Homo sapiens
acagcaaaaatctaatgtgttctttagatgcagttggtgtagctggacattcagtatttgttggtacttggcaaaatgatggagagtgacaggtttttattctaaattctatccacaaacctgctttgtgctagaatctgaaagccccttctatattcatgatttctctgccatttctccactaaaatctttttatgtatacaacaaacagctttatgaaataatgataaatttcatcacattagaagtgttaaggccgggcgcaatggctcacacctgtaatcccagcactttgggaggctgaggcgggaggatcacctgaggtcaggagttcaagaccatcctgaccaacatggtaaaaccctgtctctactaaaaatacaaaacttagccaggcgtggcgatgggtgcctgtaatcccaactactcaggagtctgaggcaggagaatcgcatggacctggg

SEQ ID NO: 1746 - DNA, 401 bp, Homo sapiens
tagaggattacaggcgtgagccactgtgcccagctgttttacatcatttttttaaaaaaattattttttatttttttgagacagggtcttgctggtgcctaggctgcagtgcagtggcacgatcatggttcaaggcagtctcaacttcctgggctcaagtgatcctcctgccttggcctcccaaagtgctgagattacaggtgtgagccactgtacccagtctgttttacatcatttttaatggctgacttttccagttgtaactgcaccataagttatttatttaatgtctttactggtggacatttttactattttcagttttttcctacacttatcaatgaacttcattgtggatacatcttgtagactcatcgcttctttttttttttttgaaaaaa

SEQ ID NO: 1747 - DNA, 589 bp, Homo sapiens
tcaagattaagctagtatggcctcagatgagaagacacatggaaacttgagaaataaaagggaaagttaatgaaagatgttagtgaaatttcattcaccagcagtaatgggtgttcatgcatgttcctaagacattacaaaagttaaaatttaaactcatatgttaattcatagagaacttgatggcaaatttaagtcttcatagcaaatttaaatattaggaaaacatgagggtatgtgtgaaggttaacagagagtatgagagaaaaaaacactgattacaaacaaatatcagcaatatagcgaggtctcattacatgtaaactagtacatgcaaagaagtataaattgttgaattgtatagctggaaatgtcctctaacgcttccctcaggtagtaatttaggtagcgacataagggattatttaacccgatcacgatcactgaagaccctgtatcaggctaaatggagtaaagatgagggctagctctataattttggattttgaaagtccatgctccttatcccttttaagatttggataagaaacagcaaaactgaaaatcggtccatctatttactctccat

SEQ ID NO: 1748 - DNA, 366 bp, Homo sapiens
taggactgaagtaatacagcagtggggcattatacatccatccctctacctaacaacagaaggcaagccagacccatatttgccaattcccaatgaagtaggctcattcctctccatgatcaaaccatggtccctctgacaacatcaggcaggaccaacaccatcgagttgatcaggagccccttttgttgttttctgattgagaaaaagtggtcaagggaagaattcatccccactcctccaccacccctttccatttcacgcaagagtgtattttaaaatgacccaactatatctgtttacaataaagcactttcaatccaacaacataggcaagctgaaactaaaaggatgctacatagtatt

SEQ ID NO: 1749 - DNA, 444 bp, Homo sapiens
atggaggcccagcactcccctagtatagctttaaaaggcaacacaaagcttattatggttgtggcttatccagactcccacccaagtacagcaagtaacaggcagtgactcaatgtccatttaaaaaaatctgagtcttgggccggccatggtggctcatgccggtaatcccagcactttgggaggtcgagatgggcggatcacgaggtcaggagtttgagaccagcctggccgacatagtgaaaccctgtctcaactaaaaatacaaaaaattagctgggcatggtggtgggtgcctgcaatcccagctacttgggaggctgaggcaggagaatggcttgaacctgggaggcagaggttgtagtgagccgagatcgcaccactgcactccagcctggatgacagagcaagactccatctcaaaaaaaaaaaaaaaaaaaaaaa

SEQ ID NO: 1750 - DNA, 573 bp, Homo sapiens
aagctggatcaaggtgctccagaggagagttgaaagggtgatagaaatacatatgcacgcacacaccacacacactcacacactaacatgtgaagtcaacagacaaaagtaatctggtctagacaaacatacttgacgaaatgaaaaaatggtagaaacagtggactaatttggggtacaagaaagcatccagaaagcagttagtggatttttgcctctgaaaagtatttaatccctaaatgccctttatattttgtagcagcccacacataatttaatgtcatgtttatttatgtaaaatcctctgcatggcactgaaattgagtgaaacagccactgcataccccttgaggaaattaaaaggcaagccaaccaacagtgtcgcagacagagctagggacatacagataaccgaatcaacattagacacagcaaattgtagcacatggagagccctcgtgaagagcaaaaaactttttgtaaatttgctataccctcctgactctgtttctccacagagccagaggtcatttgtagctaagacataaaatctgcacctgagttgcaggactc

SEQ ID NO: 1751 - DNA, 486 bp, Homo sapiens
gggagaatgatttttcatgcctaataataatagttaagattattatacttgcatgcattttcttctagaattgtgttaatagtttagaaatattgtgtattacagcactcaatgctgaaattataggtattaacattttactttatgcaaagagaaacagaagtccagagatgaagtggtttatcaaggcttgaagtgccaatgaatctcagatctcctgaactgaaactaagaaccataccaacttgcaataacaaagcaatttttaccttgtttctgggatcaatcacatatttttttgtgtgaattccctgcaaatgagaaatttgctttaaattttttttaaataaaataaacattttagaataaaatggatccagtcattaaaatgactggaaaacctgtagtttagatatttaaggaagatttgcttttctgttatttatttccattgccccttatgcctatcaataagctattaacagt

SEQ ID NO: 1752 - DNA, 508 bp, Homo sapiens
ataatcaagttatagctttacattgattgatatattcatagtgagaagagcatcttcattgacgttcttgattttaagaatcctagagaatcgtattttttaatactgaaaaatgattgtttactagcaattgttcagtatgaagtacaactagtttttttaaatgttatattgaaaaatgtttgatcttgtatatttggttttcaaatctgtttcctatacaataattttatattctaaatgtggaaaaatttgtattattttaaaagtagttgaaaatggtataatacaaaggcagtttaccaaatattctaggccacatacatttctatgaagtgtcgtatgcaacctttgaaatgtctgtggagagaacgtcatatggatgatattaatgctttgattaatgtagagcctttctgtgaaaacctatggccagttcaagtacccaagcctttctccttatcactaccactttttgaaattagaggtggaatgcttgaattctaat

SEQ ID NO: 1753 - DNA, 455 bp, Homo sapiens
  misc_feature 361: n = A,T,C or G
cagtgttccttcctttagggtatgacacaggacatctttggaaatgaaggtcttatgacccaagatcagaaaggcaggagaagattagagtgctgccctgggcaggtgagaggagggcggaagaaggtcagagagagagagagagagagactctgttttctgaggcctacttctgaggcctaatgtgccccaacgttaaaagatagtgacaagggctatgggagttatgagccaggaactgtggacaaaatctagtatgtgttaactagttgtcttgtttaaacctaagaatatactaatataaaggataaaaaagaaatttaagtttggcagcataatgtaatttcagggcatatgattntatcacttactatctgtgtaacatttggcaaggaacctaacattacaaaactacagttcacttctattaaagtgggtataatcatgcttacctc

SEQ ID NO: 1754 - DNA, 439 bp, Homo sapiens
  misc_feature 363: n = A,T,C or G
ggggtttgatgaacgcggttcccggggagactggtacggttgctgtgtgctatggagccgagggtcgtcaagccaccggggcaggatttagtagtggagagtctcaaaagccgctacggactcgggggcagctgccccgacgagtatgatttttcaaatttttatcagtctaagtataagagaagaactctaacctccccaggtgatttggatatctactctggagataaagttggttcatcgttaaaatattctgatgaaagcaagcattgtagaacaccattgggcagcttattcaagcacgtaaatgtgaattgcctagatgatgaactggattctttccatgatttgaagaaacagganacagaagaagagttaattgaaaatgattatagagttagtacctcgaaaataaccaagcagtcttttaaagaaatag

SEQ ID NO: 1755 - DNA, 528 bp, Homo sapiens
ataaacaagcgaaatatctaacagttatgagatactgttttaattctgttcattaaaaagaaaacataaacatgctaaaacgtctttatcagcaaaacctgttcaggcagttaaaaaaatttctctctccaacaaacaagatttaacttgcaagtaaactgtttcatttctgtgaccctttattctcccagttaatacttccattttcttagaaaagacatgccctagtgcaatggttcccccatctgagaatacagcagattcccattagtaactgtttcatgctggcactgattgggggtgaaaagccagggatatgttgtttcaaagttccccaggagattttgctacatgacacgcctcccccacctccaattcccacacagcataactctcttctggtagaaactgtattctgttataagaagtttcactcttacacggaggcacaccaacaactgaaagcaagatttaaaggtcatctaaatcacttcatgctcattattaggtgaaatgctctttcatata

SEQ ID NO: 1756 - DNA, 421 bp, Homo sapiens
gacggggtttcaccattttggccaggctggtctcgaactcctgacctcaagtgatccacctgcctcagcctcccaaagtgttgggattacgggcacgagccactgcacccgacttcccttggcttttaattacagcactaaccactcttaggtctaatgatcaccttaaaatagtggccaaatattggccttgggagaacatccccgaggagggaatgttcccttccccagccacttcccctgccccggtccctgtccctgctgcagctactgggactgagtcccaccacgtggttcatggaggctgacccagggaaggacctgcccagcccccatgcagggcattcttgcattatctgggaaattcttctggcttctccgtacctgttgagactgcagaatgggtgacatttgctgagct

SEQ ID NO: 1757 - DNA, 489 bp, Homo sapiens
ttagttattcacacaaaaacaaccataggactggaactttaaagtgtatgagaatttattcccagtcctaaatggaatatatttttaatgttatcaatacttggggtgaatgaaggtgagttggtggtacccattaaatatcaaggttaggagtggtggctggaaaatcaaccctggtggaagtttaggaataccacggttcaattatgtacatttctgtctgtgagttatggagcaataagacttaaaacaagacttaggctgggcacagtggctgacgcctataatcccaacactttgggagaccgaggtgggcggatcatctgaggtcgggagttcgagaccagcctgatcaacatggagaaaccccgtctctaccaaaaacacaaaatcagctgggcgtggtggcgtatgcctgtaatcccagctgctcagtaaggctgaggcaggagaattgcttgaacctcggatgtggaggttgcggtgagt

SEQ ID NO: 1758 - DNA, 335 bp, Homo sapiens
ctaacggtggagcttcaggtctgcatttttctttctctttttttagtgggcacagctatgatatcaaaaggtaggcctggaaccaagctgatgggagagggaagacctgaactggtcagtataagaaggaaatgagaaatgaacaggaatgaaatggggcgcgagtggtcagagagcaaagaaggaagtgtgggcagtgagtgcctgatggctgcggagtttctgtttcaaacgataaaaaaaaattttagaaatggacacaacattggccgggcacggtggctcacacctgtaatcccagcactttgggaggctgaggcgggtggatcacctga

SEQ ID NO: 1759 - DNA, 509 bp, Homo sapiens
aagtggggccttgtcaatcaagaaaggtaaaagtaaggctgggaaggcaagcagccgcctttgtcaaagtgctgatttttatttccttctacgtacaatgggaagtcactggcaggcttaggaaaggggagtgaaagattagagctgcattttttaaaagatgatcatgtgaggactgggcctaaggagcaagagcagaaacttagggcaggagttttgaggcaggagatgctggcctggtctgggatagagaacagtgacattatccaagatatatttgaaagatagaatcagcaaaaatattggcaaatgagagagaaggaggtaccaaaaatatctcctaattttctggagctcctaggtaaatagtgtaccatttactaagataagaaatacttaggaagatgctacaggatgaagcatcaagaattcagtcttggaaaccaaacggcatcagcatagctgttagaaggacagtcagatttactaacttctgtgttagcatctgt

SEQ ID NO: 1760 - DNA, 522 bp, Homo sapiens
gttctggtacaaggtatttccccaaggtcttacagaaatgtaaagggttgatactattctgagtgcatataaaacttttaaaactgaagaacattgtttagcactatacaaactatagcaataatttaagatctgccatagtggccttcttctgtgcctcagagaacttggaaatcatcagtagcttatgctaacataaaaatacattaaccatgagttacacattctcatatatatgttttcaaataccagcaatcatttcattaaaaataaaacaagcacttccacttatcttaaagactacttctcggctgggcgcggtggctcacgcgatcacgaggtcaggaaatcgagaccatcctggctaacatggtgaaaccctgtctctactaaaaatacaaaaaattagctgggcgtggtagcaggcgcctgtagtcccagctactcgggaggctgaggcaggagaatggcgtgaacctgggaggcggagcttgcagtgagctgagatgtgccactgcactc

SEQ ID NO: 1761 - DNA, 580 bp, Homo sapiens
aattactttgagcagatgccagtatttcttctcaatgagatttcaaagaataagaaagctaaacacagtattatcaagaattaaatgtgagcattctgcctactttctgcaagtggcctacattcaacctttggaggtatgcttatacgtttaacgactaaagtaacataacataatacttaacagtgccactcaggggttttagctgtgaaaaagcagtggatcctaagaacagtgggcactgaagttgcctgtctctatgtcaggttacagctcaagctgtgtatatgctgcagacgcccaagctgaatttaagagaatccgctctaaaacattacttgctatttagacacatgcttaaagttatttccttttaaaccttaggcagattgtgaaatattcccgatgtattgtctcacaatgcataacaaagcttttcacatattttcagatatttgggaatgtttccatatgtctggcatgcctgtaatccagcactttgagaggtggaagcaggagaatcacttaagcccaggagttcaaaatcagcctaggcaacaaaaggagacccccatctcta

SEQ ID NO: 1762 - DNA, 407 bp, Homo sapiens
tgtagcaactaattctgttgggcttatataagtgtgtgattgactaaaccccaaagtttatacatacatgaatttctgtgaagacagatgtccctaatcttgaacatgtggaattaatgtttttaagcctatgtacaaaacattatttctactaaatttccctttatgcattttggcccatatttccaggctgctaaagtattctgaattttgattcagttatgtaacatattagttactccagctttgtgctatggagatactttctaggtgtgccttctatgtctgtgtctttgtaaggttgtttttggtttttgcctttagttggcgagttctgggtttgttgactctaataagtaaattattaattaacgtctcaaagtttctaaataagcatattactgcac

SEQ ID NO: 1763 - DNA, 452 bp, Homo sapiens
gacagaagggtaagaggctcttcagccttgacgttccttcacaagctctctcacctgctgccattaagacatgccttcttccccttccaccatgattataagtttcctgaggcctccccagccatgtggagctgtgagtcagttaaagctcttttctctataaattacccagtcttgggcagtgctttatagcagtgtgagaacagactaatacacagaccaaaagaaaattaatagaaaggggcatggctgtgctgaatggaactgctcgttacagaagaccagacatctatcagaaaaacctgcccaatgccgtagctaattccaaaactaaagattaacccagcaaagccacaatgtacttccaactcttggcagttccaaatgaggtcagcatttaataatggcagcccctaaccctagcaggagcacagcagtaacacagatgaaag

SEQ ID NO: 1764 - DNA, 541 bp, Homo sapiens
gagacagcccttctgtgccccctgcctgggcaaatgacacctccacccacataggctcaaagctggggagcaagatatcctccttaccactgccctctcccaccccccacctttcccaaaccctcacagggcacagcacagactactctgcaccccaatatccactctccccttcttccaaagcaataggacttccaatacgtagctgggcacagctacccagaaataagaccacatttcccagcctcccttgtatataggtgtggccaaggggttaaattctagccaataggatgtgtgcaaaagtgaactgcgcaggtccctgcatgtgtctctaagggaaagggcaggtctacctccatcattagcttcccttctcctttccccttcctggcagttggagtgtaggagagggtgaccatccgatttggacaataagagcaaagacaatcgtttagggaaaatggagcaacaaggtaggaggagcctgggtccctgatgccttggaatagccaaaccagagctgcgacacttacttaca

SEQ ID NO: 1765 - DNA, 555 bp, Homo sapiens
tatttagtgggatcctcccagtcctacggtaccagcttgcattgtgaaggaaaatgaaggacagaataaagcccttctcccagtctggtttatttctgtacacagaacctctgaaaacaggaggccaaggctgacctctttagtcaagagtcagctcaactttaaaattataattgcatgtgaaagctaaaatgggaaagagaaaaaatcagttctcaggaccgaaatgctaaaaacccttgggtcacattccagttagggtcctggccgtgcacacagagctcccattgggggaaggtgggcaagagaccagccaagaccaattcaaactatagggtgttggggatcatggcatttattctagaagtgtccagtttacagataaaggaatgtactatagtgataatgctatataatcttttaaaaaatagaagcttatggtcagatctcattattgagaaaggtgccaaagaatctacccactccaagtgaactatttgcagtaaagaaatcagaggaggctgggtgcggtggcttacgcctgtaatcccagca

SEQ ID NO: 1766 - DNA, 261 bp, Homo sapiens
tttctaggatcaaccacaattgtctatcactagaatatctctaaaaacttcctaagtagatggagttcataataattaggtagaaaataaataataaattttgataaaatatttaaatcactattttcatcaaagacatcgaatgaccaaaatgtaattgtcctggaaaacttgccttctaaaaaaatttagaggattaggtaactccaggataatatttaagttttgtttgtttgttttttgtttatgtgtgtgtgtgtg

SEQ ID NO: 1767 - DNA, 511 bp, Homo sapiens
tgctgatatcgcaccactgcgctccaacgtggtcgacagaacaagactcgtctcaaaaaaaaattaaattaaaaagttgtaccttattataataaagacaatagaaagggaggaatctaggagaataagttgttgtaagggtgaacaaggttcataaaacacacacgcacacaccctgtggtggttgtgaggactggtgtggtacaacagaggaagagaaggcagggagaccagagttgaaggctattgcatgttgtccacgttttaatctcttaggcagaaaagggcaaagacatgcccttttcattgtcaccagctttacttttaccttttaaaagtaaattgttggctgggcgtggtggctcacgcctgtaatcccagcactttgggaggccaaggagttcaagaccgcctggccaacatggcaaaaccccatctctactaaaaatacaaaaagtatccatatgtggtggcgggcacctgtaatcccagctactcgggaggctgaggc

SEQ ID NO: 1768 - DNA, 471 bp, Homo sapiens
atttgtagtaaagtgatatcacaagaagaaaaatgtggcttttgtatataaaataccactgggtttttttgtgccatatttttcctaggtaaagacaaagagggagagtggaggggttggactggggtatggaagggagaactggatggcatctagaaaataaaaatgacctgaacttgcatcagcctatcatccagtgctgcatggtggctcagatctggccaccgtgaatgagctcattggagctatcttttatattgtctcctgggtctgacctgtaagtgtgactaatttataggaaatttcctagactccctttacaatgttctactaattacagtgagggaaagtcagtgataaagaagcaaaaagaaaaggggaaaaggaaaatgggtgaacggaggaaggaggagttagtgtttcatgggaacagagtttcagttttgccaaatgccactgaaatgtacactg

SEQ ID NO: 1769 - DNA, 569 bp, Homo sapiens
ggaatgatggcacatgggaatgaaggttctcggtagccacagctgtactggcattgtggaagtgctccatgagagattgcctaagtgtgactatcattctctggccctcacacaattctatggcagagacaatgtatctttaaaatataccattctctcatcctagacacagaagacaagatttgccagcctctattgtagttgggtagtgggcaaattctagcaaaatttaggtggaattgatatagaccagactcaggcctggaacttcagagcactgggcatggtgctcttgccccctcttggggaagcttagaggccacatactccagatggcatagctacaggtatagggtagtcacttggccctgttaaatcaatgtgagcaaaaactaactggttattgcttttagatttgggaggatggtctgttgtagcagcagctagcattgcttaccctaactaaaacatttgaatatcctttatttaatactcctctgcttgaaggaaatataacagatagtaacagctgaacttttatcctgactgatagtttcaattattcaata

SEQ ID NO: 1770 - DNA, 397 bp, Homo sapiens
catgaggaaggaaaggaataagatcaggtcaagatgagaaagtgtaatgagaaaatgccattaaaacaagaagaaattcaggtaatcattcagtattgcctattaagggtattaataggctgggcatagtactcatgcgtataatcccagcactttgagagacagaggccggtggatcacctgaggtcaggagttcaagaccagcttggccaacagggtgaaatcccatctctactaaaaatacaaaaattagctgggcgtggcggcactcacctataatcccagctacttgggaggctggagaattgcttgaacctggaaagcggaggttgcagtgagccgagatcgcaccactgcactccagtctgggtggtagactaagactcagtctcacaaa

SEQ ID NO: 1771 - DNA, 532 bp, Homo sapiens
agtgatctgcccacctcgggctcccaaagtgctgggatgacaggtgtgagccactgcgcctcgtctaatttttaatatttttagtggagacagggtttcaccatgttggccaggctggtcttgaattcctgacctcaagtgatctgcccacctcggcctcccaaagtgctgggatgacaggcgtgagccattggtcccggtctctttactttcttaatgttctttgatgcacggcagtttttagttttggtggagtcaaaatttgtttgtttgttttttcctgttgctcatgctttgggtgtcatatccattggcaaatccaaggttcatggaaatgtacccctatgtcttcttctaagatctgtacagatttagctcattgttcgattttgagtcaatttttgtagatggtttaacatgggagtttgtggatgtctgtctgtctcagcgtctcttgttgaagagacgatgctccccccatggaatggcctggcaccgttgctcacagatgtatgggctcatttctagactc

SEQ ID NO: 1772 - DNA, 441 bp, Homo sapiens
tttttggcatgttgcaccctgggacctctcctgttgatcatcccatggccattcccatggccacaatggcagttcttcctctcaatgtatctcaaggactataccaatggttctggtttccagccactctctaaactgctggttattggcctcttcaatccaacatatgctgagcctccagatcaattgtcttgatactccttatgaccaggctattcctatgtttacaaaacctcaggagttctctcatccctgtagaccaaagcccaaaatctttagtcctgaacataacacagcatttgtactgtgacgcagcacaactttctacttactctccttcatggatcctgtaactctagccagactccgttttgcatcagatacaccagaattttcctctcctattactggcttgtgtagttctctttctgaaacgaacct

SEQ ID NO: 1773 - DNA, 574 bp, Homo sapiens
cgcctcgcttaattattcacttttaattaagcaagaaaacttattttaattaatgagctcaagcttacagaaagagtgtgagttttttctacaacttccaatcattcaccagcagattgatatagtctggttttatttctgatctccatggcctagttctacccaagacatacacctgcatctctggaattctaggtctgatttcaggttatttttgtaaatgttgatgaaaatcaaatgtacttgagttgaaaataaaactcatatttttccattcaaaaagtatttattgaactccctactcaatgctatgtactacatgagagactgggaatataaatgtaatatagatatcaatgatgtatgcaagatgcttgagttctgctggggtgggacacagaggaggagagggttagtcatacctacttaagaaaggaaaccgggctgagcagaaaatgaagttaatcatcatcctcatttttctaaatgcacattatattaggcatgccattattttaaaacaaccatgccattattttaaaatctccatggtagagatttgttgtggtatatt

SEQ ID NO: 1774 - DNA, 570 bp, Homo sapiens
gagacagcccttctgtgccccctgcctgggcaaatgacacctccacccacataggctcaaagctggggagcaagatatcctccttaccactgccctctcccaccccccacctttcccaaaccctcacagggcacagcacagactactctgcaccccaatatccactctccccttcttccaaagcaataggacttccaatacgtagctgggcacagctacccagaaataagaccacatttcccagcctcccttgtatataggtgtggccaaggggttaaattctagccaataggatgtgtgcaaaagtgaactgcgcaggtccctgcatgtgtctctaagggaaagggcaggtctacctccatcattagcttcccttctcctttccccttcctggcagttggagtgtaggagagggtgaccatccgatttggacaataagagcacagacaatcgtttagggaaaatggagcaacaaggtaggaggagcctgggtccctgatgccttggaatagccaaaccagagctgcgacacttacttacaccaggactgactctatgttaaagggaaac

SEQ ID NO: 1775 - DNA, 542 bp, Homo sapiens
cagagtaaggaagggcgtgggttgttcttggccaaccttctggaattaggaaacccagttcccactggtaaagccgggctgcctggcctgccctcatgtgacaccagggaccacttgctgcttgcaatgggcttagctgagagccaggcccccccctctgttttctggcttctgtgcatgccctttgttggcctggtgggaggggcgtgggcatcctctggctgcagcagcctggctctggctattctatgtccttaccaggcccatgttcccaagaagtgacctttctaacatgatcccgggcccctgaacttccattgcctcggaaggcaagttctcagctgagaggctcacaaatagatatatgtatgtgatgatgagtacaggagtgtgggcatgtgtgtgaaagaaaaataatttttaaaaatagaaaaataagccaggcatggtggctcactcctgtaatcccagaactctgggaggccgaagcaggaggattgcttgaacccaagagtttgagaccagcttaagcacaaagtgag

SEQ ID NO: 1776 - DNA, 549 bp, Homo sapiens
atatgttcttaatacaggctgtaatatataaattggaaacaggaggaaaatagagtcaatctaataaaggaaatttttttaaatgaatgcaaatgtacagaaaaaaggcattaaacaactaggtgaaagataaggaagacagataaaggtgatcctatgattgggtccctgaaataaggaacatttccatgaaggaagaattggatcgtctaatcaaaagggcacaccatatattaaggaacactcacacaatgcaaacatcaccaaaacatattctggttattaaaactggagtatgaataacaattatttaagtagtcaggcagaaaaagcaagttatgtgcaatgggggaaattctccctagcctcagactcttctgtagaagctttccatgctagaagatagagccaaagtcataagggaaagtaaatgtgactccaaaatactttaccccagacaagttgttcaagtgtaaaagcaacaggtagatattctcagatatgaataaattaaaatttcaggaaatatagccctaatgagctcctctt

SEQ ID NO: 1777 - DNA, 544 bp, Homo sapiens
ctgtactctgaatcagaataatatactccatcaaggagactgacattggcaccaccttcccagaaatccaggagcgcctttgcatgaggaaaagcagaagggagtaaagtcatgaaacattgtgtgtgtgtttgtataaaactgtatatttttgctcacatataataactatatatttctgctaatttttccttttaaaggctattaagttacttaaaatccattgcctaataaaactgcaattcacctttgtaattcactcatttgtttgctgtcacagggaagatagaaattgagcacgttttcggctgggtgtggtggctcacgcctgtaatcctagcacttggggaggccgaggtgggcggatcacgaggtcaggagatcgagaccatcctggctaacatggtgaaacctcgtctccactaaaaattcaaaaaattaactgggcgaggtggtgggcgcctgtagtcccagctactcgggaggctgaggcaggagaatggcatgaaccccgaaggcagagtttgcagtgagccgagatcga

SEQ ID NO: 1778 - DNA, 594 bp, Homo sapiens
atcattatgctacactgctggggagaaagtttggcttgcatttgagatccttatagcacatctaagtgtaaatttccaaaaggcaattggaaatatgataataatggaacccaaatgtcagagctgaagatgtggaattcttcagcgtatgaatgttcattggagttgtagacactgtccaacaaataatgtataattttattggcccaaatgagagtaatagggacttcaagacagcttgatgccatcaagagtctacttctagaccccttttatagcgttaatacaaagcaacaactactgtattatttcataaatatatttggtttcatggttgtttatatattcaaaacaattattttactgtggtacttgcaaattcatagaactcttttgcacctaactacattaataccagatactaaaagttaacttaagaaaataaagaatcctaatcaacatttatctattattaaatttggatttgaagaacttgcgcagtctgtcttctaagtccaattgtaaactccctaaccaaagctttactgttgttacaagacaactggagttagtcatttgtcttccctggtagca

SEQ ID NO: 1779 - DNA, 282 bp, Homo sapiens
gcagataaggatgaggctgtttggtttgacgtaagttaaattgcctgaactgcaggtggctctcaagcttgccatccctgatgaagactgtaaccatgatgcattaatgtgtattataaaccaaaagaattgaaatattttgccactttactagggcagaaacttggaacatatgtttggaaatgaattttcagtattttaaatcagagaggatgggatttattgttgaaccaagcacaattttagatatatatagatgaaagtcatctggaggtgtccgga

SEQ ID NO: 1780 - DNA, 620 bp, Homo sapiens
aggctatgaattcaagaccatcctgagcaacaaagcaagactccatctctatttcaaataatttttaaaaggcacattctaataaattctactgccaccaaagcaaaacaaaacaaaataaaaacaataaagagaaattatctggaagctgagtatgaaatgtggtatcaggattcttcaattcattccaattttctgaaatccattagatacagtgcaaccaaactatgctcagtggccactgggacagatagaaaattctataactgatacattcggggaggagccaagatggccgaataggaacagctccggtctacagctcccagcgtgaccgacgcagaagaccggtgatttctgcatttccatctgagacctgcagctgagggtcctgtctgttagaaggaaaactaacaaacagaaaggacatccacaccaaaaacccatctgtacatcaccatcatcacagaccaaaagtagataaaaccacaaagatggggaaaaaacagaacagaaaaactggaagctccaaaaatcagagtgcctctcctcctccaaaggaacgcagctcctcaccagcaacagaacaaagctggatggagaatgactttgacgagctg

SEQ ID NO: 1781 - DNA, 612 bp, Homo sapiens
ccattaaagatttaggttaagacagtgtaaacaaatgacttattataatgcaaatattccagagtttcccattcaataaaagatactcatgaaatatataattatgatttataattatgaataatttattgaatatctaaattatttattgcatagatattaatgcttagtaataataagcattttatttcctcctgtgtaataggcactgtgatagatattttatataaattatctttaaccattccaactctacaagatagatgttatcacctccactttataaataaggaaactgaagcccaaagaagttaaatcacctgcatagcgccaaatgtcctttcagttgcagagtctgcattcaaactcaagactcggaatttttccattacggtttttttcttttcttagagattgggtcttgctctgttacccaggctggagtgcagtggtgtaatcatagttcacagcagcctcaaactcctgggctcaagcaatcctcccgcctcagcctcccaagtcacagggattacaggtacaagtcactccattacattctgcttcttctttcactatgtaatttactattctgaaaaatagaacctggcgcag

SEQ ID NO: 1782 - DNA, 386 bp, Homo sapiens
gtgtttggataactagtcctcccaaaaagaagtggattggcactcacagtaataagatctacttgtagcgaagagctttctgagtattattcactgcactggactgtttactagattattaagctcaacttatctgtatgtaataaagaaatgaggaaggacattaaaaacacaaaaggaatatgtgaaggttatggtgatgactgtataccagaagtttcattcagtttcattaaattcatgacaacctctaagctgagacttgttattttttcggacatgaaaactgaagcacaaagcgatgaaataaggtctccaaggtcaaatagccagccaatgtagatcgggatcttaatataggtctattttactctaaagtactttct

SEQ ID NO: 1783 - DNA, 659 bp, Homo sapiens
acactagactaggttcagtctgcttacatgagacttctctagtggagagaaatcttccaagtagcagcagcagcctgatttctatgaatgagaaagacatataaacaaagaggaagagtggcctgatacaccttaccaagtaagagagttgaaccatctccacatgacaatggaagctccactctcaagcaccacagccacaaaggaacattctattgattctgacccatcctcgggaagttggggatgaacatggtagggagttcttgagtaatgagaaaaacatcctgagaatacaaactttatagggttgttaagtatatggtatacagagtagtgaattggcatggtattcgcttacagggaactcacagtcaagaaagttaatttgctgaatgatactaacatctcctctgctacattcatttctttttaatgatttaatggataattttttaggatttaatggttaattaggatttggacatatcttggccaacataaaaagagactaatgatgtaccttgctcttttgaaaaggaatatgatgttcaagcagcagtaacagatattctggagccaatcagtatgaggattagcagccgatcttctacaataatgtatatttaaaaattaagtgaaaatgcaataacgtacgt

SEQ ID NO: 1784 - DNA, 653 bp, Homo sapiens
aggtaacaaggaatcttagtactggtaatatcatcttcaatggtcatacataaattaggggtgcaaaatgaacagtaactactgaaagctagatctccccaattttcacctctatctagattcaaaacataacagtctattagtcttatatcctcagagaagactggaagactctagttggaagatcatgatcagcccaaaggaatagaccagtggatatgtcatgaggagcttttctgggaaaacttctcgacctgattgccctgtctggaagccacagttgacaattattacctaagaacctgaagcttaccgtaaacatttattgtattgctcttgaacgcaaacagataacaaacaatcatgagattctaggtacagccaataacaaacacagaaacaaaaaataaacaaaacaactgaaagtaaacagagcctatacagtgtgggaaaaaagtaattattaatttcctcagagagggaagataagataatacaacaagaacaaggtgtgatataaaatggatattcaaaaaaatagaattcttaaaaattaagaaatttattgcagaaatatataacttaatgggagatttggaaggtaaagctgactgcatctgcagaaaagttagtgtaaacagagttgggaatga

SEQ ID NO: 1785 - DNA, 542 bp, Homo sapiens
tctgcgtaatgtgtaagatcttggaatttctggaatagctatggggggaaagcgctaggacctgagagtcactcccaatttattattttattatatatttgtcatagagacgggagtcttgctgcgttgcccaggatggtctcaaactcctggcctcaagagaacctcctgcctccgcctcccaaagtactggcattacaggcatgagccgcagtgcctggcaggttccacttccaattgttaagagtctgaagccagagacagttggttctttcatgctcaaactgggtagcgatggtgcactgcaggcgagagtgcctagcaccatgagtgcagtgaggtggccctgtggcaaaacccaggagcctggagggtccaaaaaggccacaatagactgggggagatttgaagagaaagcctgaaaaactcaaggtttcaagtatcagcaaaaccatgggagacggccaggtgaaatggctgacatctgtaatccccgcactttgggaggccgaggcaggtggctcacctgaggtcaggagttc

SEQ ID NO: 1786 - DNA, 426 bp, Homo sapiens
atctaatgtatgtggtgagcattaatgctactctgtttaatgattcatagctgctagtaggagtctgtctaaacagtatgttaggaacaggttttaagctttcatcttttatattgatccaagctagttatccacatctccaaaatttaaagccacatgtataggtgtatgtagtggactgcaaagcattggaccagggttttgaaggctgggtccttgaccctactctgctgttaaccagcagtgtgactttgggtcaggcactttccattttcaagcataagtatgttcatccacagaatgaaggcaagtttcttccaacaaaaattctgtgaagaataaaaatgtccacacacaggtctctgttttagaagttaagtctgcattaactatgactaagttgaacgagttcgatctttttaaatg

SEQ ID NO: 1787 - DNA, 213 bp, Homo sapiens
tttaaaggcaaggtgagaggagtgcttgagcttgagtctgaggccgcagtgagctatgaccacaccactgcaccccagtctgggtgacagcgcaagaccccaactccaaaaagaaaaaagaaaaatcacaaagaattgcatggcagagtgcctgtctttcacagctttaactgctgaaggaactttcttttttttttttttttgaaggggggg

SEQ ID NO: 1788 - DNA, 534 bp, Homo sapiens
tacacatttctgaattatttgaattttttaacaggagcatatatgattcatattaccagaaatagcaaacatcaagctgaactgcagctaaggagtgtctgtgataaagagaaaactgtttgattattaaacaaaagacaattgaagcctcagttcttttaatttgccttgttcaattagttacttaactttatgaactcaagtcatacactgagaccctaaagttgtttttgttttgaattaatgccatatagctgaaagtgacaaacactttactcatggcagtatacagaaaattttcagggaagattaaaaggcatgaaaacagcaggttgtggtggctcatgcctgtaatcccagcactttgggaggccaatgtgggcggatcacttgaggtcaagagttcgagaccagcctggccaacatagagaaaccccgtctctactaaaagtacaaaaataagccggctgtggtggcgggtgcctgtaatcccagctactcgggaggctaagacaggagaatcacttgaaccct

SEQ ID NO: 1789 - DNA, 455 bp, Homo sapiens
agaggaggtggggtacagaggcggggtgtgagcctagccctttgcctcccacccatgtgccctcttctttccccggggagggagggactcacctctgcctggagccccacggaccctctgcctccagagcacgatgctgagggccaggatgacaactccctggcccattgtgagcagcagcatcagaatccaaggcatgtcccagcccgtggaaggggcacagagggcaggagaagcatcgatggaggctgtagcctctcaccctgacccatagagaatggcggccaggcacagtggctcatgcctgtaattccagcacattgggaggccgaggcgagcagaccacttggggtcgggagttcaagaccagcctggtcaacatgatgaaacctcatctctactgaaagtataaaaattgaggccaggcgcagtggttcacacctgtaatcccagca

SEQ ID NO: 1790 - DNA, 360 bp, Homo sapiens
aagcacagtccaggttataacaggagcccaggcacttgatgtgggaaccctatttgtctcattcagcacctagagttttaacgtcctatgaggcacagctaatgcccttcattatttttttgtaattgactgcatagtttagaactatgtcttgaatttaatatctatctgttgaataaatgaattaataatgatgaaaatctgtccacaggttatgtgcagtactgaagagcaacttcaactattgaggtatctatcagaagtcttactctctaaaaagcctctggttagttactgatatacgttgctgataatttcactctcacaacgtaggtgaagcaggaatgttatctggcctct

SEQ ID NO: 1791 - DNA, 347 bp, Homo sapiens
cgtttctttaattctcccaataactctgtaaacgaggtactatgattatcccattttcagactgaagcacaaaactggggcacagggtcacttgcgcaggcttacacagttagtaagtggcagaggcaagattcaaacccagaccacatgacttcagagccaaagcacgtaattgtggtgcaataccacctctctagttctggaattggcactagctgcttaaattggtgggaggtgggggtggttacagttttctaatgaattaagaatttgagatattggagaacatttccagccctaacactaaaaatgtcatgaaagccatgaccttacagacaatctcctct

SEQ ID NO: 1792 - DNA, 294 bp, Homo sapiens
catcttgaattaaaatactactgcaggcaacaagaaacttctttgagatagttgagtacaaataatacatagcaataaatagcttccacaaaaccacaacagatataagatataatgaaagacaatgacctatttatattagcaacaaaaatgtaagtatctagcaaaaaacaaatagaaatatgtgagttctatagggagaaaacttgaaaacactacgaaggatacaaaggaagacttgaacaaattgaaagatatatcattactggacagaaatgctcagcatcataaaaa

SEQ ID NO: 1793 - DNA, 576 bp, Homo sapiens
caccaccacacccggctaattttttgtagtttagtagagacgggttttcactgtgttagccaggatggtctccatctcctgacctggtgatccacccacctcggcctcccaaagtgctgggattacaggcatgagccaccgcgcccggccaaaattcacggtggtttttatctgagatgtccgcatcacacatttcctcactgctcttgaggttccactgacaatcagaagaatttcaatttttacattaattttgttttgttactgctttggggaggcaactggagatgattcaacatttattaaatcaactctttgggattaatgggtgttctcttcttctgaaatacaatgttctgttctgttttcatgaggctccaattgaaaactcattcctgcccctgtcctcatttccctccctgggtctgtgaacagctttctgaagagacagagagaagtgagctagctctgggagtaggcagtggaagagcactacagtgctttccatacctagctgaaaaggacctgtagaaaatctgcagacacatttatgatcagggacttctttcccttcct

SEQ ID NO: 1794 - DNA, 567 bp, Homo sapiens
tcccatcgccacaaatgcaatatgtttggaactaaactcatcatctggccatctgtttcattcctggttttgtttactagttttaacgcctctcttacttgctcatcctgtcctcctttgcctgcagtttaggaatactaccactaggtggccatattgggttatactttcttgcattctaagccagaagctggctttcacaaatattcaagatggtgggtgggccacctcagagtttcacccaaatttttagcaaaaagaaaacatgatagttttttttagtgtaaacattttatgccctaataaaatccttaaatatcataaactttctaaactcatttttaaggataattttgtgggccaggtgcagtagctcatgcctgtaatcccagcactttgggaggtcgaggtgggtggatcacttgaggtcaggagttcacgaccagcctggccaacgtggtgaaacccccgtctctactaaaaatacaaaaattagttaggtgtgatggcgcacacctttaatcccggctactccggaggctgaggcaggagaaccgcttgaaccca

SEQ ID NO: 1795 - DNA, 517 bp, Homo sapiens
agaaactccgaacacatctgaacatcagaagggacagactccagaagcgccaccttaagggctataacactcaccgcgagggtccgcagcttcattcttgaagtcagtgagaccaagaacccaccaattccggacacactatgaactgagctaaataagtactttacatacattatttcagttaatcttcaaatgaaccagatcggagaagtagaatcctccttaaacagctaacaaagctgagcacagagaaattcaatcatttgttaggaggcacacagatagttctttgttggattccaaagccaatgatattaactacaagttatactttttccctatttcaggaaatgaagagaacctaatgaagtcacactaaaacaatctttgatattctaaggtctgttttctggaaggcaagtggattagtttcctcttactgctgcaacaaattaacacaggcatggtgtcttaaaacaattaaaaaaatgtcagcaccatagggaaaaaaaaaaaa

SEQ ID NO: 1796 - DNA, 458 bp, Homo sapiens
ttctcaaatgtgattgatctgatataacttgaacattttcatgctctgagagtcattcctgctctggtaaccttctctaaaaatctgagacctgttgttagactgtacagtggaagatgctgtcgtcagaatatacagtggaaaatgctgtcagagatacaaataattatagctcatgcctttggctattgtttagttgagatgaggccaagatgtatgtatgaggactgaataacaacacaggggaataagcaattgaatgcctgagttagtacacaacaattgcttagaaagtcagaagacagaagaatgttgtgggttgaaacatcctcgaggcagttctgacaccttttcaaggaggcatgagctttagggaggcttcatggacaagtaggagtttaaacagaagagagacaaggaaagattatttcaggaagtggtgggagtaattttagcat

SEQ ID NO: 1797 - DNA, 620 bp, Homo sapiens
atctttcattacatattcttccgtagtcatatgttcataaagggtagagtgcatgcacaaaacacctgcacttttaaaattctttctctcctcttttgttaagtatatttatttgaacttgcttaagttaaatacatgcatgagacaatatcaacatatgctaaaattatttatcacagctaaagacatctcaccgaattccactcatctgatttaactgtttatgctatcttaaagtttcctgtatttctcgttctgttactttgctaatttcgtatactcaaccctgatttggaacatagacatctacctttaaaattcaattaagatttttggtaacttcttaagtttttttaactgtggtaaaatatacataaaatgtaaccatgaccacgtgcggtggctcacgcctatagtcccagcactttgggaggctgaggcaggaagatcacttgaggtcaggagtttgagaccagcctggccaacatggtgaaaccccatctctgctaaaaatacaaaaattagctgggcgtggtggtgggtgcctataatcccagctactcaggaggctaaggcaggagaactgcttgaatctgggaggcggaggctgcagtgagctg

SEQ ID NO: 1798 - DNA, 445 bp, Homo sapiens
aagtgctgggattacaggcgcccaccaccacacccagctaatttttgtatgaaaggtaattttttttaaagccagaaaacacagaagtgaaaatctctttccagtccaggcaaaagaagggcatgtattcacacattcattcattttggtagagcgttggtcacgggcacagacccagctgccccactgcttattagccccatcgtttcccagctaggtgacctttctgccttggtttccccacctataaagggggatagtaacagtacacctatcctctagtcaattccagtgaaatgctcagaacagcatctggcatgtggttcttgctcaattcatggtatcttttactcggaccacaacttctaaagcttaaaattaggttagataataagaaacatccagaatgaggccaaaatgaaaccagggctgtcctggaaaatct

SEQ ID NO: 1799 - DNA, 492 bp, Homo sapiens
attgccttttgagagatctcatccattcttaagatttgaatgtccacttctgcatggatggcatgcaacatctccagtactggcattttccatatattgcagtaccactttggaaatgcactgactctttaaaagccacataaatgttcagccattaaattcaaagttattatgtcttaataaaaatgatttcctcccatctcaaaacattattttctttcaactatcatatacaataacctgttacacaaatccgtacgttgtttatggtattttgaaaccatatttttatcttcattcttgtttgtaaaagataatctattattgaattctttcacacatcactctaaactcctttgcatttttctcttatccacttttactttcaagatttttatctaaccgctttatcccctacattgtgattcatacgcagcccctgggaagtgaggagtgcctctgcccaaccacgatgcaaccctccaggtgtga

SEQ ID NO: 1800 - DNA, 457 bp, Homo sapiens
gacagaagggttcaatatgtttatggattcatggtttcatcctggctgttttcaaagcattattttgtttttgtcaatatttcctacttgacaatgtcctaaattgaaacaaatttattgctcccattacagagaatgggcaagtgccaaagcatttaatggggccagaggttagtgcaaaatatctctttcaggaatatcaaacccatcagttttctttcaatggcaaatgtccccaggctataaaagaactgaaagacttggcaaccaggtcatggttctgcttgagccattaggcaaatatccaaggtctcagcttcccccatttttaaaggaaaaagcaattaggcaaagaattatgaataaggaaaaatgcagtgagaacttaaagtgtgcattaattccttgatggctcataaattattaataggctcaacagtaacctaacaacactacc

SEQ ID NO: 1801 - DNA, 459 bp, Homo sapiens
aatattttgttaaaaatgcccccacatttattattgaagtatattcaaaatatattcaagatttgatacattggtttagccattcagctgatgttgagattgcagcaacctcagcccacaaaaacacaaacctgaggtggagtgtattcatccatttttgtactgctttgaagaaatacctgagactgggtaatttataaagaaaaagaggtttaagggactcgcagttccacatggctgggaggcgagggaggagcaagggcacatcttacatggctgaaggcaagagagtgtgtgtaggggaacggccctttataaaaccatcagatctcatgagacttattcactatcactagaacagcgccaaaaaacctgcccccgtgattcagttaccttccatcaggtacctcccatgacacatgggaattatgggagctacagttaagatgagatttggct

SEQ ID NO: 1802 - DNA, 426 bp, Homo sapiens
tgaaaggtcaaggggattgatcatagggagcctggatttcagagggagttaaggtaggacagaggagcacgacttctcattataagcccctctatgctttttgatttgtacatggtggttattcctctggttcaatttctaaaattgcttttttaaattggaaaggcctttggtggtaactgtgaggtagaagccaaggggtgtgaatcctaccctgctgccaacttgctggcagagcccagaggatgactgctggcaactgctgatgaaggagaggaagttgcttggaggtcctggggcccgtggcaagacaaagggaatttggtaaaggagcagaggagacctaggctgggcccgcatagtgtaggggccacttaggatgtcttcctgccacctggttattttatgtagctttttaatatactg

SEQ ID NO: 1803 - DNA, 542 bp, Homo sapiens
ggaacatcacactctggggactgttgtggggtgaggggaggtgggagggatagcattaggagatacacctaatgctaaatgacgagttaatgggtgcagcacaccagcatggcacatgtgtacatatgtaacatacctgcacattgtgcacatgtaccctaaaacttaaagtataataataataataaataaaataaataaaaattaatgttaactaatttgagataatgcctgtttatttatcttgattcttaactgaattataacgtgtttatattttattaattgaataatgttttattcttatcttgaaaattatgtgtttgcagctttgcggaagtgtgaattcagtgaattttccctagtgttatgtacattttgccataggagagatttaatattactaattaattttaactttggctttaacagtacattttagagattaaacagatatcaatctagaaaagttgtactttgttattaacttgtaaacaaatgtaataatgtccaactttaaagtctcatgtaatggaaacatc

SEQ ID NO: 1804 - DNA, 573 bp, Homo sapiens
acagggtcccacactttgattttgcaaattacgcagcctgtcccatgtggagttttagatttgaattattattttattagtatttttaggctatatatcttcactctaaaaaatgcacgtgtatgtattagttttataagtgagatttacagcagtcattgaacttcttgcagagctttgctgccagtcttaactgtagggtgtggtctgtcagccaacaaacagctttttaaagaatgttgcatgttgtgtgagagggaaaaaatacgacacaaagggcctttaatcaacatgcttgcaaagccactctcacagagtagacgccttattgggtaatttctgggtcccaagccccatgctgaccacaaggatacagagagaaacagagcacagcccctgccctcaaggagtgccttgtctagttgaaatctgtttcgtaactttctaaacctcaagccactctaagaaatatgcaacccagaattcagtacacatagagataatacacacatagaaagatgaaacagtaggccgggcatggtggctcatgcatgtaatccctactttttggga

SEQ ID NO: 1805 - DNA, 597 bp, Homo sapiens
cccaagagctattagaatagataatttgagtacataaaaattaaaacttctatataacacaagcaatgttagagtcaaggaacgtatgaaaggaaagtcttctcataatattaatatccgcactggataaagtatttcaaaatcaactagaaaactgagcaaaactctgagcaggaaatttgctgaaattttaatttgctgaagttataaatagccactaatcaaacaaaaatatgcccaatcagggaactgtaaacgaaaagattgtggtataacttttcacacatcagattttttaagtaaattaagtacatgcagtgttggcaaggctgaggggaaataagcactcttagtgagaaaataaatgctgctgcctggactggaaaattaggaatgccttttagaaggatcaatttagtggcatttatccatttttaaatgcatttcatttgccacaataatttcaattacaggtgtctattctatagaaataattgagcttgtttatgttaaaagatattcattgcagtacttctcaaaatagaaaacacatactgtaatctaatatttacatgtatattatcaatagtggaaatt

SEQ ID NO: 1806 - DNA, 494 bp, Homo sapiens
ttatagaagtaaacagagggcttgggtaccctgagaaaaaatatggaaatcctctcacacaacagttggtcaaatcctaggaatgttctgtttgcaagatgaaaggagttctgaattggatggtggtaatggttgcacagcaatatgaatgtacttaataccaccgaacggtacacctaaaaatggtaaaggtggtaaacttcatgttttgtgtattttaccacaatttaaaaatgtgttattaaattaagaaagcaagctaggaatggccactggctttgttaaaagagtatctcatctaactgatctaagcctcccttttgataaggtgaaaactgaaaaaggagcattagttaaaatctacctcaagagtaatgagcccatctttatgacatactcaggacagagggagaaaagtgatctaacttgaccacagtgaactgtctggaaaggtaattgagctgacaggatgtggtggctcatgcctggaattc

SEQ ID NO: 1807 - DNA, 540 bp, Homo sapiens
cctgtctctatgacattctgcttccaccaggaagccttctctgatagactcaactctgtgcttttccaaggccctattctcctttttaaaacgtacttctaaggatgcctagtctttttattcatacactatcttcataactccatgtaatggtcctattatttttatacagaataaaacagagacactaaaatgttaataatagaattcagtaactttttttaagaaacctattagaaatttaaaaatgtgggcaacttcgccaggtgcggtggctcatgcctgtaatcccagcactttgagaggcagaggggggtggatcacaaggtcaggaattcaagaccagcctggccaagatcgtgaaaccccgtctctactaaaaatacaaaaattagccgggcgtggtggtggactcctgtaatcccagctacttggggaggctgaggcagagaattgcttgaaccctggaggcagaggttgcagtgagccgagattgcgccactgcactccagcctggctgacagagcgagactccgtctc

SEQ ID NO: 1808 - DNA, 504 bp, Homo sapiens
agtgtggcctggcgatgagccacaagttgaaagatcagtcctgtagctcatttagagaaaaatgccaaaaagatgaaatctgaggccctgtgaaagagagggcccacggcgtggcttacggtccctccataaatgtcagcaaagtgacacctgagatgtaagtgctccttcccctctctccatcataaaaaaaatatgggtgcaggccaggagcgatggctcacgcctgtagtcccagcactttgggaggctgaggcaggcagatcacctgaggtcaggagttcaagaccagcctggccaacatggtgaaaccttgtctctattaaaaatacaaaaattagttgggcatggtgacaggcgcctgtaatcccagctactccactcaggaggctgaggcaggagcatcgcttgaacccaggaggcagaggttgcagtgagctgagatcggaccactgaactccagcctgggcaacttgtggctcatgccacaccagccgtcccaaa

SEQ ID NO: 1809 - DNA, 448 bp, Homo sapiens
actgtcatcattctgatgtgatgacatactagaacattgcctgtgtagttttcttgtaaatcatgaaaggaatttagttagctgttgagtaggaatattaaattttatgtatttttctacctttaaataaaacattgaaacttcatctaaaatatttggaaagttacatatgtcaagcttaatattttatgatgtattatgtaacattaatttttatatttttttcaaacaaaatgatactattgaaaaagtttagaaatgcagaaagaacagagtcactgttattctagtaccttggtaaaattacttttaatattttgttatatatcttacatactacctgaacatatctttctaaaatgcacagccatttgcacgttgccagatgctcttaatttgctggtagactaggtatagaattcttgctggcagtttctttctttcagca

SEQ ID NO: 1810 - DNA, 105 bp, Homo sapiens
actacagagtaaccggcactccactttcgaaaggctgccatgaacagagttttgtgatcaccaggtgtcccttttctgagaactcttccttactccacctgcgtg

SEQ ID NO: 1811 - DNA, 542 bp, Homo sapiens
ttggattttctctatcgatgccatccatcactgtggctgcaatggagctctctgtatcttccgcctccacagtgctcagctgtttttctcacctggcaccagaaatgcaactcaaagaaagaaacagcagaagggaaataaaacaagaacaagaagctgggattgaagccagatgaggtggaatgagcagaggggctgagagatatagaatctaaattctacattacgctttgccacaacccacctctgagagtgttggccccatctctttcatcattcttctgcttcttaaaaaggttgatatgatgaggaaaataggaatgaggagagaggatctaaagtctcgttgcttcaaagctttagctgttcaatatcttctaagatttctgtgattctgaaacttacacgtttaaaaatttagagcctgatggactagctctgaaacaagcaaagcagaaggtagagccagtgagcataggatttgctgtccatgtgtagggggaaaggagaaaaagtagtttcagatatccttgaagtaaacc

SEQ ID NO: 1812 - DNA, 560 bp, Homo sapiens
tcttttaacttccttttaaaccacgcactgaatgcatctgtgaaaaagacctgcatactacaagataactttaattacatatcttctgtggggtccgtgcttttagtttagtataggtttatgcaaagtgatactattggtaatgtgtaatttaaacacacacacaaactaacaggccctgccgcctatcaatgtctgggtgatatcagagaaggccgtgtgggaatctagaactttcttctctgccaggtagttacaatgtgccccgtccttctccaccagattccttaggtgtcaaagtaaactaagtgagaaggtggaactttcaccatcatctagtggtaaaaaggtccaaggcctcctgatgtttgccttcccttcagtgtaggccatagtgggagcagaaacaagaaaaaaatcccccactctccaaaggtggttgagcagggataaatttttatcaccacctagcaataacaaggcacccccactttcaccatgtgtggtgtcacaggaggtttatttccaagagttaaaatacagagcctcatagcataata

SEQ ID NO: 1813 - DNA, 359 bp, Homo sapiens
ccactggtttccccgtgttcacacacttgttctctttctctctttctgctgactggtctgaggtttagcatttgtatccgcaaaatgtcttttgagtcctcacagacagtggctttgagaaacctgctcttgttgtccccacgtgacctcattggtcaaccttagtgctgctaacagcaagacaagcagatactgtgtgcattccgacatgaggcagtacaaagtacatagtatcacctaggaactagtcttgccaaaagcagaggggggcagggggagacagagagacacagagagagaaacagagacagtgacagtgagaaatttaacctaagtctaacccagcctttggatctaac

SEQ ID NO: 1814 - DNA, 447 bp, Homo sapiens
  misc_feature 342: n = A,T,C or G
gtagtggcatgatctcagctgactgcaacatctgcctgccggtatcaagcgattctcctgcttcagtctcccaagtagctaagattacaggcgcctgccaaccacacccagctaatttttatatttttagtagagactgggttttgccattttggctgggctagtcttgaactcccgacctcaagtgatccacctgcctcagcctcccaaagtgctggaattacaggcatgagctaccacgcccagccccagacttcaattctcttccttcagccttcacccactatgggctcatccaatcttagaacttagacctagaagttcacctggatcttatcttanactctaatctgttctgctcggcagggccaggtaaatactattaagggtaagcactcagcccaccacacacacctgcacaaaacaggagactgggccgggcgcggt

SEQ ID NO: 1815 - DNA, 538 bp, Homo sapiens
gcgagaacacgacagacgggttatagaagtaaacagaggcttgggtacctgagaaaaaatatggaaatcctctcacacaacagttggtcaaatcctaggaatgttctgtttgcaagatgaaaggagttctgaattggatggtggtaatggttgcacagcaatatgaatgtacttaataccaccgaacggtacacctaaaaatggtaaaggtggtaaacttcatgttttgtgtattttaccacaatttaaaaatgtgttattaaattaagaaagcaagctaggaatggccactggctttgttaaaagagtatctcatctaactgatctaagcctcccttttgataaggtgaaaactgaaaaaggagcattagttaaaatctacctcaagagtaatgagcccatctttatgacatactcaggacagagggagaaaagtgatctaacttgaccacagtgaactgtctggaaaggtaattgagctgacaggatgtggtggctcatgcctggaattccagcattttgggagggcaaggcagca

SEQ ID NO: 1816 - DNA, 412 bp, Homo sapiens
cgtgtctcactgtgatgacgctggccttgtgtttcgtcaggtggtgtccacaggtgccctgctggttgctttttctctgccctgggagaggctcgctgaggctgcacggctgcctgggagaggctcgctgaggctgcacggctgcctgggcggcctctgacgcgccctgtggactgcagcatccaggggatcgcgtctgcaactcttattgctttggcgtttacctattggggatttaaaaaaaaaattgttcatttttataaaaaagacatgggctggctgggcacggtggctcaggcctgtaatcccaatactttgggaggctgaggtgggcggatcacctgaggtaaggatttcgagaccagcctgatcaacatggagaaaccctgtctctaccaaaaatacaaagtta

SEQ ID NO: 1817 - DNA, 431 bp, Homo sapiens
gtcttgtttggtttagtatcggttttccaatgtcattcaagtaatttgggtactggaagaatcgggttaattgattacaaatatactgcagtgcaagaaatagggtttaataaattcaatgtctcatttgttcaaataggatttaatgttcactgccagtctcacattggctgaattaatatttcccagaaataacaaagggtcacaacacaagtcagaatcgtcatcctgggagaaatcatagagattaaggtcgccaaggaaacttttttgttatataattacttttatttatgtgaaacaaaaccttgccttatctagatagcatatgacttagtaatagaaattcctatacaaattataatgtgtgtagcaatttatatcactgaagcagccattgtgaactaaacaattagtaccagataatgagt

SEQ ID NO: 1818 - DNA, 449 bp, Homo sapiens
ctgtgtgaccttttcagtattaaaaaaaatccaaatagtattattaagcagcacgttagcatattttatagtattatatataatcacaaccacaatctagatatgtaaaactatgtcatactttcagtatactaagctattttatatagatttcctacagctagtccatgaaagatactcagatgtaagagtgtttcttaggttgtcaaaaagcataaatgcatacactcacaacaaaatatttttgccatccctgttttcattagcaccccacaagaaggtatataccacacctagatcaaaatttccttaagtttaacagtcgcaacaattttacctcatttgggaaaatgttactctaacaagtaacctggcttttaattaaaaagagactaatttgtttctacctcaatattttaaatattttttgttctaactatatgaataaa

SEQ ID NO: 1819 - DNA, 418 bp, Homo sapiens
tccttccaggtcaatggcctccccagttgcaggagaatggcttttctgcgaagaggagaaaatgatgcactcccaatagtacctcggactcacagccttcccagggagggataaagaaatagaaatgagaataactaaaaattatgaacaattattccctaaactagcacacgtaagtaagaatgataaaataacatgtttgtaaacatggaggcatgtttgtacattctcagtaacattaatgtttctgagaggaagtctagcactatataaagtaaaactgtttatgtcatttgaactgtattgcacgtacaaaaaaaaaattaaaagaaaatcccaaaagaaagttatgtataacttattaaagaaaaaattaaaactgcaatgtccaatattaaagaaatgctgacttggcatg

SEQ ID NO: 1820 - DNA, 420 bp, Homo sapiens
ttgagtatgcttgagaatctctaaacagcacaactgcaccaagaattctcttgcattattactctgtactattaatttgtttgttgatagcagcaaatgagctttcacttactgagtcctgtgtgagcccagactatttcagcacttaagagtccttcaatgactacctcagaggtggatctcagggtgtctggggctcctatgcacatatgtttcttgttgtttacaaagctctttggacttaatctgaatgacagttgccctaaaaagctggagacaaatgactagccataaagttttatttttcaacatttaatttttagaataattaatttaataacagattttagggcatgtattccttgctacttagtggtttatgtctcttttaggagaatacctcattatgttctctatatt

SEQ ID NO: 1821 - DNA, 390 bp, Homo sapiens
gggtggggagaggaacaaggcaaggctggacggacagcagggaccaggtgggaaacaaggcagacactgaagacagcatctgtgaggtgaggcctggacactggcgtaagagatcagagtaggctgtggacgatgttaaatgacttgacggtggtcaattagatggagagggcaagaaccttgaaggtcctgacacttgttgaatggaacttaagtattctcaggagtgatcaaattggagactggacatcaaaaactatacctgatattaaaaacagcaacaaaaggcttagctcacacttgtaatcccagcactttgggaggccgaggtggacagatcacgaggtcaggagatcgagaccatcctggctaacacagtgaaaccccgtc

SEQ ID NO: 1822 - DNA, 440 bp, Homo sapiens
gatcggtcaccaagggtcatgtctgcacttcaccacgtgccaaaacaacactagatcccgcccactcagcccctagcacgggaattggactgagattcctccaaccccaacagcagcgcccagtggggtcaccaaacaagactccaactgaccaagggcagcaggctggggacactcacacactctgggggagtcctctgaggctggtgtggaggaggctccaggggagaagccagcaggaacgtgggagggagagggtggtgccaagaggagtgggaggagccctgggaggggagaggaggacaggggaggaccgactagacagggtgcaaggcaatgacgcaggcctggccacgccagctttctcgctgggtggctgggtggagggagggaagtgctctaagccaggcagccatggaggtgggagggatggggatgga

SEQ ID NO: 1823 - DNA, 440 bp, Homo sapiens
actcgtctgagaagaagagctatcacctgagcgctctggagaacttagccggagctttcaggcagtctgggagcctacatggaggcgtgtaggcttatgtctcatgtccacgttgcccgggagacaaaatccttttctatttagagctgccccaaaatgttctgcaccagcttctcactgcggtggcttcaccttagcatacaggtatgtggacggccactgtgctggctcaccttggacactgccttcatgggcctgggtcaggttctcagtcagcagctcttgccaactccaggaggcccagacccaggagtggcctcctgctgccggacacgaagagggaaagagctgagctgcccggccctcttcttctaacaagccctcctgggttgacaaagaaagtctctccctgcactgggtgacactggacactgtccctg

SEQ ID NO: 1824 - DNA, 447 bp, Homo sapiens
gcctcctcgggccccccgctcaggccgccgccgcctcccttgggagtcagggtgtgccctggtcacagccacattctggccaggtcctttacagctgccaagacagggaaggtggtgttagtaagagaagaaggctgggtggcgggtggtgcactggtaatcccagtacttgggaggcctaggcaggcggatggcttcaggccaggagttagagtccagctcaggcaacatggggaaaccccgtctctacaaaaaatacaaaaattagccaggcatggtggtgcacgcctgcggtcccagctaagtgaaacaattgcttgaggccgggtgcggtggctcatgcctgtaatcccagcactttgctgggagaccgaggcgggcggatcacgaggtcaggagatcgagaccatcctggctaacacggtgaaaccccgtctctactaaaaa

SEQ ID NO: 1825 - DNA, 448 bp, Homo sapiens
taattgataacacatatttacatttttctatctttaagaacaactaacatgttacaactactcatcataaaaagtttccattgttttaaggaaaacaacatgttgcatcatagaatcacaaaacagcagagctggaaagaaaatctgagaccacttaatttggttcgttaattttactgttgaaggaaccaagcctttcctaaagatctttatgaaccttatttctattttgcctcccatatttatttggaaattgtgtggaatgcttgggattatggtgactaatgcttgggattagtcatacagcaaggagttcaaacatagtccacggtgacaattaacacattgaactggattgagacaatctgataactgagtagacagtcattatactgccttcccagaaacggtaagcaccttatatgacacttttctaaaagaatcctta

SEQ ID NO: 1826 - DNA, 368 bp, Homo sapiens
tcctgattcatggtcttccctctgaagcttaccacagtgtagcgaaagtggtgaggcctcctgtgatggactactggtttgctgatttgggaaaaaggggaaattccaggcacaaaagagcccaggaggttaagagatttcacctatgggaaccaggatagaaagtggttcaagccgggcgcagtggctcacacctgtaatcccagcactttgggaggccaaagtgggcagatcacttgaggtcaggagtttgaaaccagcctggccaacatggtgaaaccctgtctctactagaaatacaaaaattagccacacgtgatggccagcgcctataatcccagctactcaggaggctgaagcacaagaat

SEQ ID NO: 1827 - DNA, 366 bp, Homo sapiens
tttcagactggagttctgtcagtagagaactcttaacagttaagatcatcaaaggtaaaatgagctgctgcagaactccctgagcttcccactctcagaggtgctcccggaggggtagaacccatagaccatttgatggaaaatctgtataacagatttttagatggtgagagtcaggaattcaaatttctggcacttacaaagatattcttctactttaagaacattaggcggccgggcgcggtggctcacgcctgtaatcccagcactttgggaggccggggcgggtggatcatgaggtcaagaaatcgagaccatcctggctaacaaggtgaaaccccgtctctactaaaaatacaaaaaatt

SEQ ID NO: 1828 - DNA, 442 bp, Homo sapiens
ctgtctcttacacaactgaatgctcaccagcccattccctgggtctctggggagtagacaactgagctgaaattaattaggaatctatgttgtgtgggtctagtgataataaaagagatcagaaaattcatccaaaggcagcacagacaggcatccaaacagggactgtatctattctcctatcatctacacagaaagtgttccataatttactgactgaaaaacaaaaatcattataccaaaagagttggctttttctttaaaacctttgactaaatatttccaaaccagcagaattccaatcaattttgcttttaaatgaaccctgacttactgccccaaatgacttattctaatagttttcaagaaaagtaaaattttcagccaaaaccaaacaaaacaaggggatgagaggaaagaggttcagactataggatgaccc

SEQ ID NO: 1829 - DNA, 399 bp, Homo sapiens
gtacatctgttacaataacagtacataaaatcacctacagcctggctagttttaccataatcattgttcatagtgatgatacttcctgggacttcaaagtcagaaaatacttaactattttgaaagatttttcaatgtctcctcagttttcctctgaattcaataaataaaagtattacatcccctgagaactctgactgatagagttttctgacaatggctttttattttcaacatttcatgctttaattctgatatactttaaagaagatgtaacaggtaaaatatatagccagagttaccccctaaagtcggattggtaattttaacttaactatctttacttttgttaagtcatcacaaataatttttttgtgttaaattataaacataggccac

SEQ ID NO: 1830 - DNA, 447 bp, Homo sapiens
gtacctaacatttcacagctattataacaagtaatagggccacgattcaaacacaggaacatgggctttaaagcctcttgctcttattcatattgccacccttacttttcctgaccccacttcacagacatatttgtgaactgtctggggattcagtcttatgcagttatccaaatcacccttatcgattacctttaaaatagtaccccatacttcaaattacttcatcctcaaagatgcattagctttccatggctaccataaaaattaccacaaatatagtagcttaaaataacacaaatttattgtttcctataatgctgtagaattcaatgctcttactatcaaaattccaatgtcatttttcacagaagtaggaaaaaaaaatcccaaaatttgcatggaaccacaaaagacatcaaatagccaaatcaactttgagcataa

SEQ ID NO: 1831 - DNA, 433 bp, Homo sapiens
ttggcaggaacacattgaagactaagagtttttaggccaaatcatcgaaaataaataacatcacttgagaaatgatcagagaaataagaaagggccaccataacatgaataagacctactgtgaaggagaaggctttgccatttctatgctatttagggtgaactttgagttatggtgttctgttgggcacatcacatattgaaagaaaagtttgaaaagctaaagtcattgggagagcacacaggatggcaaaaagtcataaaatctttcttaacagcagtggttgaaatagttggagccacttagtttaatgaagacaaattagtgaagacagtgtggctgaccccaaatatttgacaggctttcataagtaaaagggatattggcctcatatagctctgaagtatgaatggctgtaaatggaaattggac

SEQ ID NO: 1832 - DNA, 324 bp, Homo sapiens
tttgtgaaaaataaaaacggatttaaagcaatggccctcaagtatcctaaatgccgggaaatggaaaagtaaaggcagattatgccagaggaaataagtatgctgaccgcctttagccatgtgatgaggaacagagatcttgggccttggagaatgtttttatgtggttgtgtggaatgaggggtattggggaaaagcaagggctctggggccctacagacgcaggttcaaatcctgtccaatatagcaaataatacccacctttcaggtgtgatgtggaagaaattaattcattatgggtattcaatatatggttttcccttc

SEQ ID NO: 1833 - DNA, 430 bp, Homo sapiens
ttgggaaattggccacagggtagcgttaaaatcctgtgaccttgaacaagtcatttaaggcatttgtccctcagtttcctggtctataagatggagaggagataatattgacctaattaggctttttgtgaacattaaatgatttgatatacataaaaagattagaataacacctggcaattaataagaactcaataaatgttagctattataatgaatagtaatcaaatatttctgcccttttatattagtttaacacaaaagctgatatgaaaaataataatattctataatgaaatattatactgccaaacgaatgaaaatataggtatgatttagaatctctccgccattttttcgaagtgtaaaaagcaaggttaaagtcacagaagctctatttgtacagatgagtatggaagggactgggcat

SEQ ID NO: 1834 - DNA, 408 bp, Homo sapiens
aaaccacactagcaagctgcaagagttggcactgctgctgcccatagccctgaagacggggaccaagaagctcacaaaggtacagggactagaggagaggggccagatttgggacgcaggtctttaaatagcagcaaatgggtcaccctctcctgggaaacctggacagatcctttcagtggcagcattcaaatgggaatggtgctactctgaacgggaatttccgggagtctgtgatcccataactaggtgcctggaggatcctttttttgcaaaggagagaggagaaaccgggctggggaaatagagatagcacaaagatcattgttccaggaatcaaatagccatgggtttgagccctctagcttcacagctacagaactctgggcagtttctcaggctacccag

SEQ ID NO: 1835 - DNA, 398 bp, Homo sapiens
taactgaaagatacgtatcagtccacactcccaccagaaatgcctgaagttctaactgcagaaaagctcctagaccctcacatgtcctgagcctagtctggaaagctgcctggaatccacgtgactgcatttgttccagggagagaatttgcacaggggcccacccctggaatgcaggctgctatagtatggtgccattttgagagcaaatacaacaacagactatatcccgccatggagaccaatagctcctgcatctccacaaccctgagacctcaccaatatccacccacacccactcaaagggctgcagcatcatagtgctggctaagcccagtggcacaaccacactgccagcatctgagaccacacaacatcccacaccccagggaacagat

SEQ ID NO: 1836 - DNA, 413 bp, Homo sapiens
tctggctggcattatcttcctctaggtacgattccccttgctgtctggcaggcagctatggtagagcagatctctctaatcagggcctgagcttattaacggctgggtttccattgttggcaggcacagactagaatggatcatcccagtctaggtgtactactctccagaggcaccagtttagagcctggattgtttgttaggatctttccctgcacccaggaaactctaaattttttcacctcggtaccttgtaacttgaaaattctactctgttatccagctctttttctgtttgttttcttagcctctcatcctgcacagcttaagaatttgaaagatcatgatgtcaggagatcgagaccatcctggctaacacggtgaaaccccgtctctactaaaaacataaaaac

SEQ ID NO: 1837 - DNA, 132 bp, Homo sapiens
tgtctgtagaaagtgtgcccattagtttatgtgggatcccagcccccatagactctcaaccctctaccttagcttacccgaggtgagcattcttccaataaacacccgtttgagtgtctttaatgatttatt

SEQ ID NO: 1838 - DNA, 558 bp, Homo sapiens
gctctgatactgtatttctctttactatataactttttgataatttgattagggatataagatgtatataaaagggagaaagtcgaaatttataatttagtttgtgatttcgaactaaatagaaaatttgcttatatattttgagcacataaatatagtttattgcctattgtttttagtcagatcctttctccttttcctcccaactttatctacactgttaaaatgtggaaacatatattcaagttcacttgttagtctctgctgtgcttggatagagatggtgatgcagcaggtactcaatgattgtgtattgagttaaaccatgaccaaagtagttaaaacagaaattttcctcctcagcattcatactctgatttagtctcaacctaaatgaatagtgcagtagaatcactgccttctcaggcctgtttctaggaggcatgtgaaacatatcagagtttcaaccctgttcccagtagacaagtatatagatcacaaaacacattcatatgcctttctagttgtcagtctatgcagaggatctaagaatggaat

SEQ ID NO: 1839 - DNA, 435 bp, Homo sapiens
aactcacttcatctcagccacccggttccgtagaagcgtttcatccgcgttttacagacgtgtgcaggcaaatagatacaagaaatctgatcctgtcctctcaaagaaaaccctctgaaataaacttatcacctttaaaaaaagggatgttgaagaacaagatggatttttgttgttgttgtcgtttttttgagatggagtctcgctcttgtcgtccaggccggaatgcggtggtgcgatctcggctcactgcaacctccgcctcccaggtttaagcgattcccctacctcagcctcatgagtagctaggattataggcacctgccaccacgcccggctaatttttgtatttttagtagagactgggtttcgccatgttggccaggctggtctcccaaagtgctgggattacagacgtgagcacccagcctggat

SEQ ID NO: 1840 - DNA, 590 bp, Homo sapiens
aagaaggtgattgtgaagaaaagactggaaagcaaagaggaagtggtttccatacatttacttatttatttctttcaatatacttttgatatactcgttatttttctaactcattaattttctgaaatttagaaggtgaggttagagaggttaagtgactgtttaaagctccatggctgaaaaactgccaaaccatgatggtcttaagtcagaccgtcttcagtatcctggcctcttaccttgttgcttcactacgtgtcaagaagtaggatctattagatgtagtatctcaccataagaaaggtagatacaaagactagaaggaaagaagtaaccttaatctgcacttgcatgtggaaaatgcatatttttaagaggtaagaggtggaaagaaagtagaacaggatttgatggaaaggtaggaggaagtgaaagactggatggagctgagagaagttcacagagatgggacagttaaggagtatgagaaaataatgcatatgttgattgttaaaaactcattactcttcttgaaaagattaccttctaagccaggtggaggaaaaaattagattgaaaagatctgatag

SEQ ID NO: 1841 - DNA, 509 bp, Homo sapiens
caaatcttctatatcttcacttattttctgcttacttgtaatctctatctataattacatatttatctatttctccttgaaattatatagattttgtgttatgtatagctgttattagatatataaatatttaggatcattatctcctcttcatgatttcacacttattatgaaatatctcctttatccatggtaataatctttgctctaagatctactttgatatttatatggtcactccaaacttcttttgatcgatgctagcatgatgtgcataccttttttccatcctttacttttaatttgcttgtgtctttatattgaaagtgtgttcttataggcataaacaagaccttatacttttatccaatctgataatagtctttgtcttataattggagcatttagaccaatcatctttaatgtaattgtctatttaaagttgcaccttaactccatgctttccaccacaactccatcctttccacctcagcccagatactcccaat

SEQ ID NO: 1842 - DNA, 451 bp, Homo sapiens
taagatcttatggacttacatgcatagaaagtaaataaaatgtagtcgcttccttctcactcttctgtgctttcccacacgctgctccttcccttggaaacaccccttctctgcctcaccacagtaactctactcatctcaaaaactcactttaaacatttactgcttccaaggctctttgcttctaacccagcatttgatatggtattattggatggtaatatttttcccatctaaacaaagagctccttgagggcaggggttgtatcttttgtttctatatcctcaaccctaagataaattgcgtataaagcaagaatttgcatgtaaaatatttctttagcttcatgttttactgaaagttcaacctccaacatgcaacaaaaattgctattaaaactcacactgcccatctgaaaaaattttccaacatttatttatttaaaatcta

SEQ ID NO: 1843 - DNA, 386 bp, Homo sapiens
ctttgagtattccatgtcctgtaaattgtaaggttttctactttggctgatggaaataagcactatgccttgcccatgttcacttcagagattgctcctaccaatcttgtctgtagttctgtctcctgtctttatacatatgcactgttctgtgccaggtaaatacttaaggggcactatctgtaaattgtcagagttctgtctctttgcagctcccttttcttcagtagtctcccatatgaactgtaaccaccttggttattacttctatcaacagctccttaactcagggaatttgacaggctctgccttaattctccttcccagcaccacagtttgaaagctgtctctagtcaataaactaaggcagtcatagagtttacctt

SEQ ID NO: 1844 - DNA, 520 bp, Homo sapiens
gatactgtagtattacagttaagaggtgatggggtttggatgaagataatgccagtgggaatggagaaacacaaacagaattttatatggactatagatatagaaattaggaaacttaatgtaggggaggacaagaaagaaagggagaaataagaaatggcacacaggtttttaacttgagcaactatatgatttgttttgtaacttagtcaatgagctcaaagtaaaaatggatgaataaataaataaatataattattaatgaaaatgttaataaatttatgaaagtttctctatacctaagaattagggtatatgaataatgccttcacatcacagagccccactcaatattattatttttcttaaattctaccaagatgaaaccttgattctttccagcttctggatgagttacctaacccccacatccacactaccctctgaagcatacaccaagaggttagcaatatccttgtcctcttccttcattaattaattccgatatcctagcatttat

SEQ ID NO: 1845 - DNA, 486 bp, Homo sapiens
tgtactgtaggacattagcagtatctctggctatgaaggcactagttgccagtagcgcacacacccccacccacccaatgagacaataaaaaatgcctccagacattgccaaatgtctcctgggggtggagggaaatccctagaaataaccgaaattggctttttttccctttcttttttgctgtcataagcctttataattctacagaatcttttggccaaacccataagtgaactgtgtgtgacttaattgtcttttattacaacttcatgtgaaatcagtgttcatttcctattaatactggcaacagattcaacagcttaatcacatacaagattatttctatatattcttacaaaaaaatttgtcataaattgcttctgccaaaacacatgaccaaattttcaagtttcatgaaaccatacagacataaatccatgcaagacgaaagcacatagaagaaacgactaccacatacaaagcgt

SEQ ID NO: 1846 - DNA, 476 bp, Homo sapiens
gtgaccacagttaataataatatatatttcaaaagtgctaaagagatgtttaatgttcacaccacaaataattggtgaggcaatggatatgttaattaggttgattgaatctttctataatgtgtaactagatgaaagcgtgacattgtactccacaaatatacacaattgttgtgaattaacaatttttttaatgtaggaaaaacttgatattttggtttccttttgtggcctccccttagtaggtgtacagtttccactggctctggtaacagaatgctcactcacatagtctgtccctgagagctcaggagctgggagctgtgcacgctgactgcctggggtccacctgggccagttgagggctgcctgctgaggcacttgaacccataatccaggaggaggaaggtcttagaagggaatggaagtggagtgacccaagaagaagctagaaagagtgctgggaggtcaaagct

SEQ ID NO: 1847 - DNA, 531 bp, Homo sapiens
tctgactcctcagtttatctgtcaaatggttccaaacttgagtagggtgagaggatcatcccccgtcaaatgtacattattcatacactgtaatggcgtaaaagaaccctagacacatgactcccttgctaataagtgcaccttcaaagcgatagtcatcatttagcatttatcggaagaggctggccccagctctggtgaagggcagagaaggtgtgggtggcctcacgtgttctcagtgtcacaaaatgatagcattaaacagacccactccctcatggaaggcaatttgacgaccttctattgatattgcaacatgtgtctctggcagcagatctcaatccttatgtaagggatatgggaagacttcctccacttcatgtatatgctttccctaagcagatctggcagatgcaaatttatccatatcttttcatttccattgaagttttagtatccacatcccctcctgaagacagaaaacttgtctttgtaaccctttttatttcagctgatctaaataattagttc

SEQ ID NO: 1848 - DNA, 228 bp, Homo sapiens
catggcccattccagggtgctaaggcattttttcagggcgcaagggtcttggtgaacagcatgctcttgaggctgtatggtcgccactccccattccattccagaggagggcacagaggccggactgtcgcagtcctcactttagtgggtgaggacacctgcctccaacccactacctacctcagaagcctgcaggctttttcttattacataccccacccaaagacc

SEQ ID NO: 1849 - DNA, 450 bp, Homo sapiens
ttcttaatgtagcctatttttaaaatatctcaaagtttgccatacagtctttatttcttatttcttaaaatattttctacattttgatacaactaacctttctaaagcataaatatctcactttgtcacttgtctgccccaaaaaaaacataaaaatatcttcttggtctagaaagtaaaattataatgcttggcataatgtagacagaaatagaaattcccatttatcctttttctcctttgcccccacacttttcttccatgttcacatcagtacctaatgtcccagacatatggaattcattgtttcatgaatagagccaacacattctaactaccatgcatttagtcaaaccatctggccacctggaatttcctaccatcccccataaaatttaaattaaaaaattccactgttctgtcctctctgaagatgtccctgaaccctta

SEQ ID NO: 1850 - DNA, 441 bp, Homo sapiens
ggaaggcctgctccctcctgcactaacccggggtgctttcacccactttagaccagtgtgaggtacggctttgcattccaatgacgacacattccaaactgatttggcagcactgtttaagtgctacaaggaaaccagtaaaacagaatcctgaatcagaatcctgacgattcatacaaaaattaaaacaggccttaaatctcaaaagtacttattaccaccctgtggccacatacccctacactatggcaaaaatggaaatcctgcagcagccagatgtgtgagagaagggaggtagccctccgtcccagagcagtaaacaaaggagctgcagagccacggagcactgaggagggttgtgctctccaaatatggccccactgagacacgcctccctcagcagactttcctgcagacgggtgtactgacagacggatgttc

SEQ ID NO: 1851 - DNA, 429 bp, Homo sapiens
acttctagaatgatggaggtgataattctgcctaactccacattggtagaaccacatctgggatatcatgttagtgcccggtgacagattagtgcaaacagaggaacatgactggattgctaaagagctcaacattctgccacaagagggacaaaaaaagtaaattggaatatataacttgaataagaaaatactcacggaggctgggtgcaatggctaatgcctgtaatcccagcactttgggaggctgaggcaggtggatcatttgaggtcaggagtttgagaccagcttggccaacatggtgaaacccggtcctactaaaaatacaaaaattagccaggcatggcaatgcatgcctgtaatcccagctactctggaggctgaggcacgagaatcgcttgaacctgggaggcaggggttgcagtaag

SEQ ID NO: 1852 - DNA, 112 bp, Homo sapiens
ggaattacagcagtttatttctcctcttcttttaattcttgtttcagtctccaggttttgtttcactgaacttgcaagatggtcataaagtagagtcttcaacataattagt

SEQ ID NO: 1853 - DNA, 444 bp, Homo sapiens
aatttttgtgtttttagtagggatggggtttcgccatgttggccagcctgttcttgatctcctgacctcaggtgatccgcacaccttggcctccccaagtgctgggattacaggtgtgagccacggcacccagcctgggctatttctttctctcctctgggatgaggggtgggggattgctctccagggcattacaagataaatgatcagaaaaacctacaccagccattagtggtgatgtaacagacagggtttctaatacagagaaaccgtaaagcaagagtaacttactgatctgttctactaacttgagcatcactcctccaacatgaaggtctccagatactctcagtgtgacgtctttctgctgctcttcattgggatggtcaacgcggaccacaagctcccaggaagcaaatgtaaagtcagtggatgacagcattg

SEQ ID NO: 1854 - DNA, 308 bp, Homo sapiens
actccagacacatcttcaattgctgctggaagattaagggaaatttaatttaatcttctataaccaaatcaacagcaatggagttagcacccagaaaaactggataagccctatcaatgaaaaacaaagcaaagattaacagaaaaacaaaaaaatcagtgattgatacaattaaaccaaaatcattaaaaaattaagttcacaattcagaattaaaagccaaaaaataggctggtgcagtggctcacacctgtaatcccagcacttgggaggccaaggcgggcggatcacctgaggtcaggaattcg

SEQ ID NO: 1855 - DNA, 443 bp, Homo sapiens
cagaatagatgatgttcatttatataacattctagaaaatgcaaactaatatatagggacaaaagctaatcagtggttgtctgaacccaggagtggagggaaagatgaaaaagggcatgagaaaacattttggtttgatagtaaaggtggtttcatgaatgtacacatctgccaaacctttaaatggatacagttagttgtatttacagtatactttaataagttaaattatcagcataaaatttttaaaaatcagtaactggtcagctgggtgtggtggctcatgcctgtaatcccagcactttgggaggccgaggtgagtggatcacgaggtcaggagatcgagactgtcctggctaacatagtgaaaccccgtctctactaaaaatacaaaaacaaaattagccgggcgtggtggcatgcgcctgtagtctcagctactc

SEQ ID NO: 1856 - DNA, 423 bp, Homo sapiens
ctctgggggcagctttcaacttgcaattgaaaaggcatgggggaggaacataggaaattcttaacaaagagaccgtcgccatgggaagcccttactcattcttacatctcagaaagccaggaaagtagaaggctcaacctgttgataggagtgctaatagaagattcaaaatgtgctctcccttctctcctgctcgtatcagtcatcatctcatcccactgcaacttcttgcagagatggcactgttctttaagattggtgcagtgtctctaacacagcagaggcagtgaatttacaaaaccctggtcctactgcctttgagccctccaactggaaattagttaaacaactttagctggccgggcgcggtggctcacgcctgtaatcccagcactttgggaggccaaggcgggcggatcatga

SEQ ID NO: 1857 - DNA, 258 bp, Homo sapiens
caataaaagcaaacacacaaagggttgaagcaagcgttggagactgagggcccaaaaaaagttccatttacataataaaactggtgtgttttaacagtaactatgccagctctaaagggtattggcaggccagacaatttgaggagaaaaaggatatattaatctaatcatatgtttattaacttattttcttaatatacaattttaaatcagaggtttttatttgtagacttattaaaaagaaaacatggcttaaaa

SEQ ID NO: 1858 - DNA, 388 bp, Homo sapiens
ttccttgagatatttcccacctatctaatgcacgcacacacacacacacgaacacacacaaaaacacacactcaacaggatgattagtagtactagaaactcctttgacaatttgtctacatttttgtttctttttacttaaataacacacacacacaaacattgttattctggaaaatactcaaattttcattgtaattactaatttatgcaggcactaaaatttgtttacatatggcctacaaaaatatttcaattaattgacaaaacaaatttattgttatgtaaatttgtgtgtttatatgtggtgagtacatttatataagagttctaggttattcaacttgcaatatctatatcagcaaaagcagtgctgcagaatatggac

SEQ ID NO: 1859 - DNA, 336 bp, Homo sapiens
gtataaataaaacaaatacatttgaatacagttgaatatacaatatacaaaattttcttccaagtataaaacgaaaataaaatacactactttctttaatagaatagaacattgtaataatgttccattgcatttgaccctcacataaatgctatgaggtagcattaagagataagatttgaggctgggcatggtggctcatgcctgtaattccagcactttgggaggtcgaggtgggcagatcattaggtcaggagtttgagaccagcctgaccaatacggtgaaatcccgtctctactaaaattacaaaaagtagtcgggcatggtggcatgta

SEQ ID NO: 1860 - DNA, 447 bp, Homo sapiens
ttggatagttggtggctgacccctgtccttaagcacacagccccctttcctagcctctgataactcaataaaatgcagtcctgcaaaggggtagctgtttgctaatgatctcagtttcatcattcttaccactattataattttgagacttggcttttttgtgtatttcagggcaggtgacattacggagttaaaaattctggagataccaggacctggagacaaccaacattttggagaccttcatcaaacagaattaggcccctctggtgctggctgccaagtgggcatcaatcagaatggcacaggcaagtttgtcaagaagccagcctcttccagcagtgcccctcagaatatccctaaggggacagatgtgaagagccaggatgctgccgtttccccgcagcagcaacagtgctcaaagagctatgtcgacaggcacatgga

SEQ ID NO: 1861 - DNA, 401 bp, Homo sapiens
agggatcccagctccttgggaggctgaggcaggagaatcgcttgaacctgggtagcagaggttgcagtgagccgagatcacgccactgcactccagcctgggcgacagagtgacactacatctaaaaaaagaaaagaaaaagaaaaaagaaaacatttagctccaactggctgctaattggtcatatgtcaaacaacaaaaaagtatcttgttttgtttttaggtaaaagagatcaaacaatgtaaaagatttgatgcataatgtcattcttctagtcttaatacttcacctacaaataagcttatgacacctccccaccttctgttttaatcctgttctcgatactccttagaattcactgatcacgaggtcaggagatccaggccatcctggctaacat

SEQ ID NO: 1862 - DNA, 407 bp, Homo sapiens
ggtcctggggctgcacgtgtggtgaggcctacagaagcggccttcagctggaccttggtctccccgccggacttcgagggtgtcatcgccgcccctgttgggggtgagcgccgcgcggctgcagcatgcctcacaggaagaaaaagccctttatagagaagaaaagctgtgtcttttcacttggtccaccggagccaacgagatcctttagcagcagatgagagtgcaccccagagggttctattgcccacacaaaaaatagacaatgaagaaaggcgagcagaacagaggaagtatggagtgttctttgatgacgactatgactacctgcagcacctgaaggaaccatctgggccttcagagcttattccctcaagtaccttcagtgcacacaacaggagagagga

SEQ ID NO: 1863 - DNA, 445 bp, Homo sapiens
tccacaagactcttgaaattatatattctgcagtaggataattatgttatctaaccagaatagtaatgacacatgcatttaaagctgataaaaatgagtcttgtcaaaaggaagtgacagcccaacttgtcaggccaaacacgctttggcatagaactttatatgctctttaaaatgactttaataaaaacaataagctaaccaatgcaatcaaactttgaaggtaataacaatatcagttatcaattttgtcctctcgatactccttggctagttttgcatttctgctaacatcattggtcctggatgattctgaaacttcagcctacaataccgtaaagtctttactgtatacgttcaacttcaagcataagataaattacaattaaaagtataatcagaggctgggcacagtggctcagccctgtaatcacggcactttggg

SEQ ID NO: 1864 - DNA, 444 bp, Homo sapiens
cagtatgcacaatgttgaaacagagttgataaacaaaaggtgactgatgttcactatcatcttttttaggaagtcaagtaagtttgtgatatagtttacagatacttctatcaaatattaaaatgtcttaagatggaaaaaaaaacagttttgacactcaagtaggttttacatattaacatatatagaatgcacatagaagaaagggtcagagaggtccctggaagtgccgtgtactgattcagcatcatgggggctgcacagcctgcactgtgagtaataactataataatagctatcatttaatgagcatttaccatgtgccaggaattaggttaaatctttacatgaattatagtattgagcccttttatccatgccttgagtaggtattattatatctattttaaagataaggaaattgagggccgggcacggaggctc

SEQ ID NO: 1865 - DNA, 373 bp, Homo sapiens
gggtgctgatggggccctgcaggctggagggtggccctgtcctcggctcccaggctctgttgctccctcgctgtgtgccctggggcagcttcctgatttctttcctcctgcttctcagaaatcagtctggatgggtaacaagacatcaaactgatactaatccagtggcctctggagtggatgcacaagatcatttactcacgtgagaaaaaaaaataacactttctttttaagttattcttttctataaaataagaataaaacagccgaggcaggaggatcacttgtggccaggaagagttcaagaccagccagggcaacatagtgagaccccatctctacaataatcagaaatcttaaaaaattagccgga

SEQ ID NO: 1866 - DNA, 443 bp, Homo sapiens
gattacaggcatgagccaccaggtctggcccccccattgtcatttttattagaagtttatttctcttcatatgagtaaagttttattaaagcagcttaactataaatatataaaaattttaaagacaagaaacatgactaatgaggtaaacatcaatggctgaaaagttggaaaattaggtgtgtgtgtgtgtgtgtgtgtgtgtgtgtaaatttaggcttccagtaatcataagcattactgtaattttcaccctaagtgaaccactttaaaatgtgtgcctttcttgagtaaccattgtaaatattaattggacattcacagactgtaaaggtttaaaactaatgactggatgttatggcaaacagtgtggagcttcctcaaaaaattaacaatagtactgatctagcaggcttgctactgagcatatatccgaaggacat

SEQ ID NO: 1867 - DNA, 277 bp, Homo sapiens
cgatttgcaaaagaaattcttcccaaatatttcaagcacaataatatggcaagctttgtgaggcaactgaatatgtgtgagtatggacagcagtttattggagtaccattatcagctactgatgaagccattttttttcccattagggtggtaaaggaaaattattccatacaagcaccgccaaattttggcttgtttattttagtcatttgaattttgaatatttttcagatggtttccgtaaagtagtacatatcgactctggaattgtaaagca

SEQ ID NO: 1868 - DNA, 298 bp, Homo sapiens
actttttgatatcttacagtagatttttttagggagtagtgagcacatgaaactaaactttgactttagagaatatcagcacacaatgttcacatggtaatttcactctcaggaatttattctaagaaatagtgaaagatgcatagtgaatgtttgagagagacagaaagcaaaatattaaaaatatataataggtgaacggtaaagtaagttatgggtacttgtaaaagaaatattatgcagccattagaagtcagatttttgaaaaatatttaatgaaatgagactactgagtttt

SEQ ID NO: 1869 - DNA, 439 bp, Homo sapiens
tgcttgaccacactttcactggcaaagatttaaagacaatcagtattacagctatatgattaaaataatttaagcaataaattaaataaaatttggggaattaaaatacaacctaactttttatccagatctagcaagtggtatttttatttttattgcaacctttcagaattcatattaggatattttaaagtctaagtgttgtatgaagagtagtatattaattataatggtgttaacttcatttaaacttacctgtatgttgattattcttcctctgtaaaattaagccacacagataaaacgttctgctatacttaacaagatagatatttgtataaaatgaaagttaagatattatccatagtgtaaatatttatcattcattacaactaaggggagactgtacccagatgatttcttcttggaaacaatattt

SEQ ID NO: 1870 - DNA, 611 bp, Homo sapiens
aacgcaagatgataccaggaaggcagattgggagtgagtttctagtggactctggatgccaagctaaagatgaggactttattttgtgggcaataagaaaccagaggaggcttctggatagagaagcgtagaacaagatgtgatgaggacagggatccagggagaagggctcggtgtcagggatatgcagaatggcaatggggaggggtcccagaagcaggagatggcccagcagaagaatgaaagacacagctggaaaaacacagtggaaagaattacacacccagagaaggagaggccacaaagcagacatggacacagacatacgccaaacaattgtcagctgacatgcctgttgcctcctttgggggccaatgaccttctcttacttgtccttcatacctgcacctagctcagtgtctgtttgagtagacactcaatccattctcgacaaatgaatgaactaatgaattccacatcctgaaaggtggagggaaagggagttaaagcttcaacatggtattaaacagggcagcaagacccagtctctacacaaaattaaaaaattagccaggcatggtggcacacacctgcagtgccagttacttgaa

SEQ ID NO: 1871 - DNA, 609 bp, Homo sapiens
caggttcagtgggatagcttatgtaactgcctaacaaggtctttggtatagtagacgcttagtcaagattgggtagcacccccttttcttaggctgtattccccagcttaaaaaggagttgctgtgtctctggtcgtgtgattgttgccccaggaatgagggactcactcattctagcagagaggcagttccctaagccatctgacaaaactcctagtccattctctttcttggatcatttcccaactaaccaaggtaacgcagtctgtttttcctgtgattttttttttctttttttaaagcattcccttttcttctttgactccgtttttctctctttctgtctgatgatgattgatatttttaaccctccttgcttcctcttgctggtctgtgccatagaatctagactctgggaggaggactctcctcttggaagactttgctccagaaactcagagctgggatttgccattctggactttgtttggtgtcttgccagaaagtggtctattgcatgatgtgtccacattttttcctccatgtgatccaaagagacatctgtctgggaagaatgtgatgggccccacaaatagactgcctggggta

SEQ ID NO: 1872 - DNA, 541 bp, Homo sapiens
tccccatctggaagtgctgcctgtgatgggaatcactgcagttaacacgtgtcccttagctcttgcaagaggtaggccttctgcctttggctctgacaaggtgcaggaggcctacccctttagcatctctaatggtgtcacagtctcacagcttggcactctggcttgttgtggttaagtgctgttttgctagaaaacatctgagcataatacgacaaaatatttgttttctcctcaacatcagcacatgtttgacctgttagaatttctaaaatgccaaagtagcaaggtgctacaagttagaactaacagatatgcaggttctcttggaactctgctttcaatttttctcttttcaaaaatctattgatgcttcagatgttagcagaggagtatcaggagctattgtttactgaaggaaagacgattgacctttgacagcaactcatggctggcattttggatattagtcacctatttcttttcattctttgtataaacatatattaagcacctgccatgcagtaagcatttgagtaac

SEQ ID NO: 1873 - DNA, 527 bp, Homo sapiens
agaattaatgcattttgtgtcccaagaaatctgggcctgtgccagtcatggacatatttatctatgttatctactagaaatattgttttcagctttgaccttaaaatttaaaatccacttttcattggaatttgttaataatataagataggagtgttttttctcacataaataactggttgactcaaggctatttaccgagaagactgccttcactcctcttctgtgcctgttttgtaatatacaaaatgtccaaatgtgtgagtctgagtgggactctcgagtttttctagttttctttgtgcctatttttgcattactaccatagatagcttttattactatagctttaatctaagtctgaatatatgtcattttaagctcacaaactttgttattcttcaggacagtttttacatttcttcgattttttatatgtatttaaattttttaaactgattagacagtttccacaagatttctgccaaaatattgtattgtgaaaatggaaatctatgaatcaattt

SEQ ID NO: 1874 - DNA, 330 bp, Homo sapiens
ctcacacctgtaatcctagcactttgggaggcccaggtgggaggatcacttgagctcacagaccagtctgggcaacacagtgagaccttgtctctctatattttttttaaagtagaagaaaaaaaaaagaagtaaactaagcttctagggtctttttgttggttttgtttttttatcactgtactcttcttccagaagacaaagactactaatacacacacggcaatcttaatactaagtaatctgacaaaaaaaaattacagcagctagaattttatctaagatttatataagtttaaatgtttaaaaaaaagaattttatgaggctga

SEQ ID NO: 1875 - DNA, 452 bp, Homo sapiens
ttctagagtcagatgtttcacaactatgtcatctttctgttgaatagtctatttcaaatactttattccaattatgcaagataatgggatgaagctcctaaaagttggaacgttaaaataaatatttttttgttgtcatcctgagtgttctgcacttaggaggcattaagcggatgttgctgcatgactgaaaaatggggaatctatgcttaagaacttgataaactaccatgttgcagttttcagtaatagactgaaaatgtaataataactcatactggccgggcgcggtggcttatgccggcaatcccagcactttgggaggccgaggtgggtggatcacgaggtcaagagatcgagaccatcctagccaacatggtgaaaccccatctctactaaaaatacaaaactaagctgggtgtggtgggacgtgcgtgtaatcccagctactc

SEQ ID NO: 1876 - DNA, 524 bp, Homo sapiens
aacctggtgagggcgtgttacatgctgcccagggccaggctgtgagtgctgtcttggacatctcgcccagaattgtgtttttgtttcaaggctaacacagaaaaccagtcttactttgggaaaggagaactggtttattattgattggatggaaagcaaatggccaggtctgtagtctccactgtaatttaaaaggctctatattatgataatcttttgacctgccaactttcttgttttcgttcaacagtgggagagtgggtcttgctcttctgtactactctgattgacaattctcaccaggttctactgaaaagatctagatcatagccatttgtctcataagccatttggctgaactgaaagatcaaatcatgtattcacaacattttgccttagtgttgatttctaaaagatcctagttcttaaaaaacacagcaaaaatctaatgtgttctttagatgcagttggtgtagctggacattcagtatttgttggtacttggcaaaatgatggagagtgac

SEQ ID NO: 1877 - DNA, 518 bp, Homo sapiens
aacctggtgagggcgtgttacatgctgcccagggccaggctgtgagtgctgtcttggacatctcgcccagaattgtgtttttgtttcaaggctaacacagaaaaccagtcttactttgggaaaggagaactggtttattattgattggatggaaagcaaatggccaggtctgtagtctccactgtaatttaaaaggctctatattatgataatcttttgacctgccaactttcttgttttcgttcaacagtgggagagtgggtcttgctcttctgtactactctgattgacaattctcaccaggttctactgaaaagatctagatcatagccatttgtctcataagccatttggctgaactgaaagatcaaatcatgtattcacaacattctgccttagtgttgatttctaaaagatcctagttcttaaaaaacacagcagaaatctaatgtgttctttagatgcagttggtgtagctggacattcagtatttgttggtacttggcaaaatgatggag

SEQ ID NO: 1878 - DNA, 547 bp, Homo sapiens
tattttgctctactgggccctggagtctttgcagatgctgtcaagatactgcactttttttttctttttgagacagagtcttgctctgtcacccaggctggaatgcagtggcatgatgtcagctcactgcaacctccgcctcccaggttcaagcaattctcctgcctcagcctcccgagtagctgggactacaggtgtgcgccaccatgcccagctaatttttttgtatttttagtagagacagggtttcaccatgttggcccggctgctcttgaactcctgacctcaggtgatctgcctacctcggcctcccaaagtgctgggattataggcatgaaccactgcgcctggccgatactgcagttttgatggccatcactggtacaacaccctgcgtatgccaagactgtcatgccttgtcagctataataaaaagcaggagacaaatggccttttgttacctgaaatgatggatcagtatgtatgtgcaaggatgcacgctgtcaagttcttgtgggttaatcatgccaggctgatggaggggctc

SEQ ID NO: 1879 - DNA, 116 bp, Homo sapiens
ttccaactttgcttttactttgagataaatgctaaagaaagaaaattactcagagcatctctcacaatccctgagcatctctcacaatcacatacactgatgatatatcacacatt

SEQ ID NO: 1880 - DNA, 552 bp, Homo sapiens
  misc_feature 433, 438: n = A,T,C or G
ggggtctcagcatttggggacgctctcagctctcggcgcacgtcccagcttccttcaaaatgcctactgttcacgaaatcctgtgcaagctcagcttggagggtgatgtaagtatatcactttcactttatataatttttgcaagttggacatctctctggataaccatattactctctatccttgtacatctaaggaagatggggacaattcagacagtcatcatttggttctcctctttcttaatacttcagctgttcctagtagttcaatttgaaggaaatatcatggcactggaaacttttcttggcctcacattaaaattggaaagaattagtgacactggaatggctggaattttattctgccatacttagcatgtcattggtaataactgttatgatggtacatgacttttaatgtcatgtcctgngattntattactggttggcataagccacagccatatcaaaactaattctgcatcttttggatttcttacagtgtccaggaagttattccagatgaagacttatacttttattttattta

SEQ ID NO: 1881 - DNA, 380 bp, Homo sapiens
gtgtagctgttaaataacatttgttgctttccatgacagaggtggctatattccagaaatgaatgaagtgtttcctgtgccttttcagtaatgaaggaaggagagggaagaaaattggtgatactagtattgtcaattaccattataagatattcaggagtgcaagttttaatcccatttgtaggtctcatttacatggaaaaaaaatttgatttatatagtaacataaatttagtttattttcctcccgattcaatcccacctgaagggacttgaacttgaacccttcagcatatagagaagagggtcaaaatacaattggtttgctaagctgtcacacagattcccttgctaacatttgcagtatttttcttggctga

SEQ ID NO: 1882 - DNA, 491 bp, Homo sapiens
caatcagtcaattatctgcagcctctaacacttgggctcatgcttcctcatttgataggtagttcctttaagatatcttattaacaaagagtctaattccatcaatattaaaatgccatctaagccaggcacggtggctcatgcctgtaatcccaagactttgggaggccaaggtgggcagatgcttgagtccaggagtttgagaccagcctgggcaacatggcaaaaccccatctctacaaaaaatacaaaaactgagctgggcatggtagcaatgagcctgcagtctcatctacttctgaggtgggaggatcacctgagccagggaagtcaagactgcagtgagccatggtggcgcccctgcactcgagcctgggtgacagtgagaccctgtctccaaaaaataaaataatacacaaaacaaaaacaaatgccatctaggaaagccttcattaatgtcttttaaactacttcctctactctctatactt

SEQ ID NO: 1883 - DNA, 546 bp, Homo sapiens
  misc_feature 147: n = A,T,C or G
attgtcttccacaaaaccagtccctggggccaaaaaggctaggaactgctgctctagaagaaacaccaaacgtaccaagatgtaaacagaaaaaagtaaaattacaaaagtacccaaaggaactgaaaaatatgagacaggcaaagncctctccaactttgactaaaaatacagaagccataaaaaaaaataaatttgactacataaaatgaaagagacttccaaagggcaaaccaccaccactaagtaaaccaaatcatgcatgatcaactggaaaaaaaatgcaactcatagcaaagactatacataaagagctttcagaataaagaagaaaaagaccaacaacatagtgggaaaatgtctgaaattcaaaacacactccacataaaaataaacacaaaatgacatttaaatacatgaaaatatgatcaaccttacttataataacagaaatataaattaaagctataacaaaataccatttctcacctaccagcaaaaattcaaaagtttgacaacagattccatgggtgatgttctagggaa

SEQ ID NO: 1884 - DNA, 616 bp, Homo sapiens
gacagagggattcacctagtctactattgaatataacccattcttcctcacaagctgaagtaaacttggattccttatttccatgcagcggagttaaagaaattgctgttcttcctgagggacactttctcccatcgaaccctttcccgtgttagaagatacactgtgtgattattcacatctttatgactctcctttcagagaattcttgagggtccttggactcttgctaattccacactctggagctctacctagatttctcctcttttcccttcaggagctttcaaacatttgagagagaagttagctgtgttgtctctctattggctcagggaattacagcagcttatttctcctcttcttttaattcttgtttcagtctccaggttttgtttcactgaacttgcaagatggtcataaagtagagtcttcaacataattagtaagatttgtctgacaactcaatgtcatgacatacaaaatagcattgctgatttacatttacattatataaagaaaatatttattaaaagatttagctttatgtctttaacaaaattatggaatagttgaggactggatgcagtggcttacacctgtaatcccaacactt

SEQ ID NO: 1885 - DNA, 449 bp, Homo sapiens
cagaaacaagaatgtggccctttcacagcccgtctggctcatctgaaagcttcagagaagcagccactttccgaggcagctgtacctaccccaggcctttgcaaaccagtggctccagcctggggcccagacagggatggggagggctagttctgcacccagctccgtggcctctgcttcctcccaggtaccaggaggtccaggcggcccagaaagcactgaggacggctgtggcagaggtgctgcctgaagcggaaagcgtgttggccaccgtgcagcaagttggccgcagatacagccccgtacctggccttgctggcttccccgggagctctggtcagctcagttgtctcagagctccgtgtggggtcgggaggatctattatagaagctggaggctgggcacggtggctcacgcctgtggatcacctgaattcaggagtttgaga

SEQ ID NO: 1886 - DNA, 312 bp, Homo sapiens
ggacggccagcgcacagccgcgcgggcggcggccaggagtcggagtcggagtcgtggtgaccagctgcaagcatccgcgttgcgtcctcctggggaagaggaaaggctcggttggagctggcagtttccaactccctggaggtcatctggagttcggtgaaacctgggaagaatgtgctcaaagggaaacctgggaagaagcagctcttcacctgaaaaatgttcactttgcctcagttgtgaattctttcattgagaaagagaattaccattataaagtaagagaattatatataatcatgcatttttctt

SEQ ID NO: 1887 - DNA, 293 bp, Homo sapiens
gatttcagatttcaagaaaagccagggaaacttagagtacctagacccattctgtataagggaagacatgcttctttaggtcattgaaataatgacatctgccatatatggaataaaaggctgccttgcctaggaggaagggcttgggtgctcactgaaagtgtcctgtttctagaatgccaagcacatatgactaattggcagtagtttcctccaaagcaagaaaatcctgcctgctgaccagagaaaagtgcctaatacggttaaagaatcactaagtgagacttttttat

SEQ ID NO: 1888 - DNA, 483 bp, Homo sapiens
aactaaaatatgtgagatgatggcaaggtgggcagaaggaaagttcaggaactatggacacaagactgtgggccctatgctacggtcaaagccaacgggttctctgaatacccaaaagctggttctctctctggctgcattctacaatcaccttaggagcttcaaacaacaccaattcctacgtgccctccagactgaatgatcagaacctgaaggtacagcccaggcaccggcactttaaaagagctccccagaagattctaatgtttagcgagaattgacagtactgtcccagtgggtcaatatctccctagcttaagacataccaggcgggatgtggtggctcacgcctgtaatcccagtgctttgggagaccaaggtgggcggatcacttcaggccaggagttcaagaccagcctggccaacatgatgaaaccctgtctcgactaaaagtacaggatcacctgaggtcagatgtttgtg

SEQ ID NO: 1889 - DNA, 485 bp, Homo sapiens
ccctcttgtctcttcatactcaggccaaaccaataggaatatttcacaaggtcagtaaagtgaatcagttaaactaaacaaaacggtttaaaccaaaccacctcagatttgctttgtatttttgaaatatcttaatttattttaattcaatgtaaaaagaaaagaatctattccatccaaaatatcaacaaatgcattgatcttaggggctacaactacaggagagggaataatttgggtttgtttggtgaaggcctgatggccagggagccccgctctgccattcctagtcatttttgttcccccaccggaaatgctgctccctcattcccaggatctcagagtgtctcaaaagcacagaggccatctttggaggcagtgggtgtgctcatgcttgtgctcctgtgtactaggggcagagagtggagggatatttgagaaagcagacacaggagaacaagctcaagcccttaccccagaatctc

SEQ ID NO: 1890 - DNA, 437 bp, Homo sapiens
gaattcagagataaataagaatgttgtacttccaggggctaacaattttcctggagataaagaaatatggcaactggtatctgtatcacatggtaaaatgtataagtcaaagtcctgtagaagcacagaggataaagtgttactgtgtttgcaactgcaatttgaaatacagaagaaacaattatttagaccagtagtcacaaattgcagagcatatagcctgcattgcaggcaccctaatgaagcagatgtgctaggtagaaatattagcagtcttttatcaaacgtattgcatggttaattccttggtactgcaggttttaaatatacagtcatcattttaaacttgagacaacatacagaatcggataaaatatttgcaaactatgcatcttatgaatgactgatatccattttctacaagaaactcaaacaac

SEQ ID NO: 1891 - DNA, 547 bp, Homo sapiens
gtgaaaccccgtgtctactaaaatatatatatacacaaaaaattagctgggtgtggtggcgggagcctgtagtcccagctattcgggaggctgaggcaagagaacggtgtgaactcgggaggtggagcttgcagtgagtcgagatggcaccactgcactccagcctgggcaacagagcgagactctgtctcagaaaaaaaaagaatcctacaaaaagatattctcatggagagccctaagccaacataagtgactacagtagagtagcaatggccacagggcaggtccagccagagaaactatctaagagagacccaccatctccacctccatgtttccagaaacatcctagtagcacagaagggcatctgaatttttcccatggtttccccgacatccttccccatgagctccaacaatagtttggctgagagaaatccaatggactgggaatgtccttatggttgcatagaccggggcaagtttagactgtgaacatcagcggcagatggcagtgaggatagatacctaaaaccaaagccatctc

SEQ ID NO: 1892 - DNA, 472 bp, Homo sapiens
ggagtattgctgattgtgttaatttttatgcttatattccctaatatatatatgtatatatatatgtgcacatacatatttaaattatttccttgattaatcaaacattactaggattccataatatgaacgtattaatcctacttcacaaatagaacaaagtaagaggataataaagcaaaacagaagtttttcaaaacttcacaaatttaagataatttgatattgttagtgaataagacaagcacctaataaagatgtattaaatgtccaatatgtacttaatacaaaactatatgattctaatattataaaataagtaacttcaaataactcttcaagagctaatagcttatttattaaaataatattaaaatggataatactggccgggcacggtggctcaagcctgtaatcccagcactttgggaggctgaggcaggcagatcacaaggtcaggagatcgaggtca

SEQ ID NO: 1893 - DNA, 400 bp, Homo sapiens
aattggaaaactgaatgaattttctcatgcaatttttctaatgtggtgattagattttactggatgcctgaacacttatagtacattttggattaataataatagttaagatgaattgcatacttactttgtgccaggcacatttctaatcagtttacatgattatctctaaacctcaccactgtctgaagtaggtagtatcatcttcatgttaaacatgaaaaaactgaggcacatttatatttggtgtttttcttcattcagagaaaacttctttcaggttatacaggagtatgtgcagcctagcattccaagacttgcatttttcttctgtatcaggaagggtaatacccttttagctgcataaacaagagtgttgctgccctggaagccgaataaa

SEQ ID NO: 1894 - DNA, 389 bp, Homo sapiens
ggcataaaagcaaggatggtaatatctgctaatagaacttcccatcccaggagggggttttcatttcttttgtttgcacaatttaaataggcaaagctacccctttaaatgacacgaaccttttgtccctatgagatttcggttatcaggccacagtctgtcagtttgaaaccatttccttcccaattagcttgcagttgggtggtgtgtcatgctgttttgcggtttctccaccttcatttgaccttcagcatcatctgcaatgctctctgtttagcaccaaaaatcacaatcaatgcagagaggcacctggtgtgtttgctcaagaattttgtgcttgaaaccttatagcttgagaggatttggggactgtggtttgtctgtagttg

SEQ ID NO: 1895 - DNA, 433 bp, Homo sapiens
tctattacacagtactaggcaagcagttcatagctcaattagatctaacttgcttcatttttaggcattatgttattctaaattaacactgtatttcatattctccaggtctgactattaaccagattttggaacctttagggcttattatttagtaatccctgaagctctcaagtaggcgtttttaaattcatgcattagaacggattaaaaattagctagaaacgcatgttaaatggcccactccctttcttttgctaattgtgctagaaatgaaaaagaaaatgcaagtgaggtcagatctagtgtggtacaaatgaacttgctacttggtttgctgccaattgctgccgaaacaggagttatttaaattagtaaataatttttgaaatcttcttagaatgtcacaggccacaattcaaattcacagacc

SEQ ID NO: 1896 - DNA, 477 bp, Homo sapiens
tccatgagtgtctgaggcccgtcccagtctgtgcggtgcggaggagagagcacctgcccctccacccgatgctttgtcctccttctcattcctgggaaggaaatcctgtgagctactcagctgcgagtgctgtgataacaggaacgcacctgtctgtgcttagttgagcactgcctagaacagtctggcacctagaacatactcctaagcacgggttgaatgaatgaaaagacccatcatttctgtttctgtttcaatgaagaatcatccacaggcagagggctaaggttttccctgtcagtaatcaaacagtcaagcccacaagattaagaatttcaggactacattcccctttccccatctctccctaccaaatacacgatagtaactgttttgtggttggtactaaagggtctgtttctgctcttccagacgtgctcaggcacatctgaagcacgggattaaatgggaccttcg

SEQ ID NO: 1897 - DNA, 339 bp, Homo sapiens
attcatacacatctgtgtagcagataatttcctgccataaatacagtagagaacaaacaaaatggtcagcagagtagacagcaacctacttcttgtgatgggaaaactgagctgtccaatacacagacttgagagctcactgagagtttttacacactagccagtcattgggtacagttcaaatttgtgcctgagcaaaaagtacaaatgttttcatactgcagaccttcaggatctcatgtataactggggcggcaaatcttgaatctgtaactgccaagggcctactttccaactctctctctctatctatccatatattatctataatttttcagc

SEQ ID NO: 1898 - DNA, 588 bp, Homo sapiens
gactccccaaacacagtttttccaccaacaaaaggttttcagtcctttaaattcatctaaggacataaactatgcagagcagtcaggatagaagccatgtgagccacaaacaacaaagcacaaattgcctccagtgggcatagagtttcagtgacttcatgttggctaaatataggcgaacacatggtgtgttgtgagtgccagggagaaccatgatgcaattatcccctccccttgatggaatagagaggaccagggtcagagggaagaatgagattacctaataaatggtcacgtcacggtcctcaactccactcccatccaagggttgcgcgcgcacacacacacacacacacacacacacccccaatacatgacaaagcaaacattatcacacagctttagaacaacatatttatcttctgattgtagttaaggataaattgctttaatattaaatttaattgttgtgattttctttttactccttattacataaaaaattcatattcaccatagaaaatttagaaatcagaataactattaatttttattgagcgttaatatatggcaggtattccctgtaat

SEQ ID NO: 1899 - DNA, 471 bp, Homo sapiens
aaatttttttaggggaattggaattggaagacaatagaattagagactgaaagttcaataaagttaaaggaagagatatagaaacaaaatctgcaaaatgctactactgtagtctaaagttgcacaggttcctaacctgagttaaaccaaaggtttgccagatctgtatcacaattcaaattcctctaatgcttccaccttcttatttccaaggcattaatctttaagaaatttctttacataccaaattgcatctcaccgtctgcttctggggaacccaacttgcaacactcagtatatgtccagtaattttctcttatatttttaatctaaattgagttggttctgtcacttgcaaccaagagtattaagactttatagtatttacatagtgagtagcataggtaatcagcagggatgtttagcagctttgataatatcctgattggatgttgaaagtatttaaatttt

SEQ ID NO: 1900 - DNA, 464 bp, Homo sapiens
cagctgcatttcagattgcttacattcactgacctcaaagacctaattgctccccaaaactgtgtctgacccggtaatggacacatactgtcttctcactcagatagctcaggaggatataagactgttcctcagtgtcctcattcttctttgtaaacagctggtggaggatcctcttaatcacagggtaagtagcagtaccttccagagccaagcactgagctgcagcccagctatccacactgttacctgccacagttgggtgaaaaagagttcagaatggtgatgtgttttccccctagagaacagcctttggattgatacccaaggctgctaccccacctgatatctcacttccttgtgccccactcagtctagaaatacaatttcttatttaaaccatattgagaagaatcatattggctgggcgcggtggctaacacctgtagtcctcacattttggg

SEQ ID NO: 1901 - DNA, 422 bp, Homo sapiens
gaaataccaaaggccaattagcttacaaagagattttttacctcagtaataagaaaaaaaaaattaaaacagcgatgagatagatggcaaaaatcaaaatgattaataggagtctaagaaacactatacagaattataccaggcccagcatggtggctcacacctgtaatcccagcactttgggaggccgaggcaggtggatcacgaggtcagaagtacgagaccagcctggccaacatagtgaaacccagtctctactaaaaatacaaaaattagccggagtggtggcgcacacctatagtcccagctactcgggaggctgaggcagggagaattgcttgaacccaggaggcggaggttgcagtgagccgagatcgcgccactgtactccagcctgggtgacagagcgggactcttgtctc

SEQ ID NO: 1902 - DNA, 605 bp, Homo sapiens
agtagtgtcaattttgaaaaatcttgcaatcttgctgtagattacaatgatatctaacaaataaattaatcccatcaacaactatatgccacctttgaacagttaattgaaaaaattcctagaaaaacatagttttaaactgactcaaaaaatgaaaactttaaattattctttaaccattaaaaaaagccaaaaatctttccacaacgaaatcactagattcagatagttttataggcaagtagagttaaatttctaaggcaccaatctcctacaaactattttaaggaagagaaagatgaaatattactaaatacctctgtgaagaaagcgaactggagagcaaagccagacaaagaaaaacaagctcaatttctctcctaatcataagtacaaaatattctaaaccaaataagaattgtttcagttaaacaatatgtaaaagttatggtacataacgaataacttgagtatattccggggatgcggagatgatttatagaatttataaatgtaattaactacgctaagacattacaggaaaagccgcagtgcatttttcataaatgcctccgataaaaataataaaaatgaacctaaattca

SEQ ID NO: 1903 - DNA, 586 bp, Homo sapiens
agctcggtgtgttgtggaagctgaaggaagctgccctgggctctgtttaggggctggatcaggcactgtgtatgttagaacaagagggcaacttaacatgtgactcaggaagcacagccgctccctgtccacccccaccatcacagggctggttaggaggaggtgctgagatgctgtcttggagttggtataggacatgggtgaagatctggctacggccacttccagccactgtccctggcgaagccatgcagccttcctgggcttttgggttagcatctttgaaatggacgtgactatatcaggcgggcgtgagcgggctgcctcctgtttgactggtgctctcctgacgcacaagagggaagctctcagtggggctcccagtcgttggcactccatggggtgggctttgccagagcatgagaggaagacgccacagttcaaagtggattctcggtcccagtcccaggctcccacgatgtggtcggagatagggatgaggtcagcagagaggtcatgattttcagagttggtgaggcaagcactgagaaactaagttcaacgagaacagtgatggattttaaaa

SEQ ID NO: 1904 - DNA, 434 bp, Homo sapiens
  misc_feature 358: n = A,T,C or G
gtgctaggattacaggcatgagctaccatgtccatccagtaattgactagctatttagaaaataaaccagtttagacactgtctctatactatacaccaaaataacatccaaagaaatttttcaaattaaaccataataaagttcaaataaaatagaggtaaaagtgtatttgatcaccagataggtagtgaccatttaagcgatgacggaaatgtaccttcactaccattctcataggtagtatttattgaacattttctgtgtgctaggtaatgtgtaaagtgatttctttatatgctattctcattgggttctcaaagcaagaacgtgatgtagatactcttagtgactccattntagcaatgtggaagttgaggcacagggagttttagtaacttgcgaaaggtcacacagccagaaagtggaagaatta

SEQ ID NO: 1905 - DNA, 568 bp, Homo sapiens
tagctttgttttgaaagaaggtctgatggtgaaattaaataacaagttaggatcaaggagaccatttgagagagaaaaggatctaaattctagttctagaatggaatcccagacataacatataactgaccccaattattctttagctaaaaggtatccttttctacaacaggattgcagtcattcttttccaattgactcagcaatatataacctctttttattatttaactttattttcatagctctgacataagctaaactccatttaatccaaaaggatttttaaagtgtctatactggaaaagactacaatggaaaaggactgactttgtacctagagcaggccaggatgaaaacataccctaggaccagaacagcaaggagggatgggtttcaatggatggtgctctgaaaacagcctcttgaaatttagatgctggcccttgaactaattgtatgggtggagcacgttagctgcttcagaataaaaaccaattatattaacaaccaccctcattatgcaggacataatcaccatgaccatgtcaatatgtgtgtggaatat

SEQ ID NO: 1906 - DNA, 559 bp, Homo sapiens
ttctttccaactctcattccatagctttccctttttctgcaaactttctctgtaacaaatctggtatgagttattttgtagcatcctcaccgttactgaaggccactttgtctctggcctataataagcataggcttcaaccagaaatggcaagagtgagacctaccattcactaggtgtctactccaaataggtagtagtgcttagtgtgctgagtgctttacatgcagtatctgccactccacattgttttgaagtgtccagtgatttttgtgcactatcatgcatcccattcatccaggggaagcgaaatatatcatcagtactttagagatgatggatctgtatctctcattctgtttaagaatcccaaatcactaattaagattcccagactacttatgcccctctaggctctttcagaatgaggtgtctttagatcaggatgtatgttcattcaaatgcttaacctacccattcaccccttgggcttggttggagttggagcagcctttcaggctttcttattaagaaatttctttttcatggctcacgcctg

SEQ ID NO: 1907 - DNA, 567 bp, Homo sapiens
gaggggatgcaaaagatgagtccgtgctggtcccatttcaaagaactcaaaatatggtggagacaagcacgtatacaaaaccagaacacagtataatgaataccacaggagtatacccgcaaaagttatatgggtgaagaaagaaggattaattagttctgccagagaaggactaattcagggaaggctttggagaacagggcacacatgatcggagactttactggttcagtcagctatataagtgataaggataacatgaagagaggtgccaagggcaagaaagtataagatatgtgtagaggctgggtgcagtggctcatgcctgtaatcccagcactttgggaggctgaggcgggcggatcacgtgaggtcaggggttcaagaccagcctggccaacataatgaaaccccatctctactaaaaatacaaaaattaggcgggcatggtggcgggcacctttagtcccagctacttgggaggctgaggcaggagaattgcttgaacccaggaggtggaggttgcagtgagccaagattgcaccactgcactccagcctggttgac

SEQ ID NO: 1908 - DNA, 537 bp, Homo sapiens
gtgggccggaggtcaccgagatctctcctcactgggggacggaataggcctctccctgcttgctgctgttctttggccttgtcccctgcctcctttcctggaccacctacaaggacctagagggaacagtactgggggcaggagctgggaaaggcctgctgtggttcactgctagtaagaaatagagactcagagaaatttcctgaaacacagcagactcttggcgcagccctttgagcagatgaaggaggacaagaagaagaacatccctcagctccagctgcatgccagaaacttcactcacattatctcatttcatctgcacagcagctcagcccagagtggagaggagtaaattggcccagaaagatcaagtaacttccttggagcttgtcagcgttgagtggaaacttggactctgatgtcgaactccaaaccccatgcttattctgtaaagcctgaaaagtgtcttggaattgctttagaagtaggagaagaggggaaccctgtgacattacactgtcttccagcataaca

SEQ ID NO: 1909 - DNA, 506 bp, Homo sapiens
gaaggtaaaagtagttgcatgggcatctacttttttaaaaaagttcagtgtggcttccaaaacacactgaataagcacacatgccttagttgtaggaaataaaaactaactctggcaatcttattttaaaaatttaaaaagtgattttatttaaaagatattagagatcatataatgtgtgagagccctgcgagtatacagaaaaggattctgtaaggtctgaagggtcagacaacagaaaccgtagcaagtatattacagaacaataacaagaagttttgtgtgtgacttatagcggtcatgcatctgacctctaactatttccaagatttgcgtcccatcttttggaataaaagtctcctaatctttgagaggctgaagggggtggatcatttgaggtcaggagtttaagacgagcctggcgaacatggtgaaaacctgtctctactaaaaatacaaaaaaatgagctgggcgtggtggtgcactcctgtaaacccagctactc

SEQ ID NO: 1910 - DNA, 594 bp, Homo sapiens
ttctatgcagagttttccccattctctggaaattctcattttaggaaccttacttctgttccctgggaaccccagtcccatccctttaagcaatatgaaacaccctgtctgtggatcaaattccagggagacttctgggcaaaaattcttttgccccatgacctgatatctttggtcatgcctcctggaggcacaagtccccaccacagggccgcctaccacatgtatctgatggctgaaattaagggcagcagggcagaaagcggatctgctgacaccacagttagacaagcttgcaccaaggctgtaaaacacccttggcagagcacaccagtaagttgtcctactaattagtttattatttcatttgagagatcaaatacataaataaaattaataaaccctgcaaaatacgtgcagcactggaaataaaagtacttctcaggtcattgcattaaacacagatattacatgctagaataatgttaacgcaaggaaagcaaatcatgctgccttataggccggaacgtaccaggagcagctggggtttgtggagtggttgacaagctttgggataggtcaggaaacatgaat

SEQ ID NO: 1911 - DNA, 588 bp, Homo sapiens
gcaatatactatagtaagagtcaatatgccagatgatataaaaattatgtatgtttgcctgaccagtatgagttaaaatatgtaactaaaaagcaagaggcaaatttataatcccaatgggggcctttaacttcttgcttttaataagcagaaaaaaacagaacaataatcaaaaaggatatagaggatctaaacaaaaccatataaattgttgttctaatttttatgtatagaacattgcaaacaacattagaaaagatgtatttttatcaaatgaccatatatgctgagatattaaagcaagcttcaatatcaattttttaaaaactgaatgtgttcatagggtgttttgacaacagtggaattaagttaggcatcaaaacaaagtagaaaaggtaacaagaaacactcccacctccccatgcgcacacaccaccccccccccaaacacacacactacacataaatcatttagaaataagctatgggccaaaaaactgaaagatcacaagaattagaaatattgagacctgaatgttaatatacatagtatctatcaaaatttttggaatgcaactaaaacagtgc

SEQ ID NO: 1912 - DNA, 557 bp, Homo sapiens
atcctagaaagtcaaggagattacacatgaggaaagacttaaatagtgaaagagagctagccatgcaaaggggaagcacatgcaaaagccgttaattgagaaagaactcggtatgtttgaagcagaaaggacagtggaatgaggtaaacagaactatgaaaagcagatgagagctatactgagattaaatcatacagaatctaaagctacaataagtagcttggattgcaatatgacagcaatacacagcaactgaagggattttaagctggagtagggtgtgaggggaacacagtgttaagcaaaatgctacataatcaatcaaaaatagttggcattccctttccacagccaaattccagatctcaggctcaggcaagaaaccaaacaatacctttctggagaaattaaatgttcccagagaaagactctttagacactgacatgtgaaggtatctaaagaaaaagccatctggccacctgacatcccaacagtaaatccaactcacgcagaataggtataggtatgcgttgagtccaagacaactgttcacact

SEQ ID NO: 1913 - DNA, 577 bp, Homo sapiens
caggggatccaggatcatcaccaaggtcattttcccagacagatgtgctgaggctgtagaaagtgctttttatttggttgggagcttgtgcataaatgcgagaggggctgcacatctgacggactagaggtgactcatggctgaaccggaacaggacatcggggagaagccagcagtcagaattcagaaccccaaagaaaatgacttcattgaaattgaactgaagagacaagaactgagttaccaaaacctactaaacgtgagttgctgtgaactggggattaaaccagaacgagtggagaagatcagaaagctaccaaacacactgctcagaaaggacaaagacattcgaagactgcgggactttcaggaagtggaactcattttaatgaaaaatggaagctccagattgacagaatatgtgccatctctgacagaaaggccctgctatgatagcaaagctgcaaaaatgacttattaaatactcccaggaatggccgcgcatggtggctcaccccctgtagtcccagcactttgggaggccaaggtgggcagatcaacctgggtcaggagttct

SEQ ID NO: 1914 - DNA, 596 bp, Homo sapiens
tggattgctgatttaaagaggcagcctccaagaggcagagaatgagagcaacacttatcacatttgattgacatcaaatccttttatcaggtaatatctcaaagaactagtgcctcggagaaattctagtttagaaaatgctgtgcactcaaacattctcaattcctggtatgaaccaaaatttaggtgcaacatagcaaatggttaaaagcaaggatgctggagcccactatgctggatccacaacttactcttctgtgaccttcagcaacttgcttaacctctctatgcccaagtttcctcatttgcagaacggcaagagggaaaatgacaagagcagttacctcatagggtcatactgaagattaaaatgaatgatgcagtggctcatgcctataatcccagcactttgggaggccaagagggatggatcacctgagatcaggagtttgagaccagcctgaccaacatggtgaagccccacctctactaaaaatacaaaaattagccaggcatggtggtgcatgcctgtaatcccagctacttcggaggctgaggcaggaaaatcgcttgaacctgggaggtgaggttgcagt

SEQ ID NO: 1915 - DNA, 472 bp, Homo sapiens
ccaacctatatatgtacttgacatatagtgttatgagtatttgtttacttatttattttaaggcttcctccaattactccagcatatatagcttttcttccaaatctacgaaccctgacatatcattagtaacatttatttgatacttaatccaacgcagggtacttttatacttacaaatttaagaattaagtgaggctgggtgcagtggtacacgcctgtaatcccagcattttgggaggccaagatgggaggatcatgatgtcaggagatcgagaccatcctggctaacacggtgaaaccccgtctctaccaaaaatacaaaaattagctgggcatggtggcacattcttatagccccagctacttgggaggctgaggcaggagaatcatttgaacccgggaagcagaggttgcagtgagccgagatcatgccactgcactccagcctgggctacagaggggaaaaaaa

SEQ ID NO: 1916 - DNA, 636 bp, Homo sapiens
tgaacctctgatcattcctattggcccctgggtgagaggcgggaggcatggggggactgaagtttccagttggccagtgagcgaagaaggcgttggctgtaggccactatgatttgctaggagaaatttgaatgggtatgccagggcaattttcacttgcgagcaaataaccagggctctatccgctcctgcagagaagcgttggaggtctcttttctttcttgattgtccctaggagcaatctactgatatccttgcccagaaaaacagatgttttccgattcaaaatcagaaattgagtgcctgctgtctaccctacctcgtgccaactcaatgaaagtagagaagtaaaatcttaccgatttcaaacatacgcagtcttaactgatttcattatggaacctcataggaatacagatttattgtagcagcataaacttttcaataggcttctgtgggtgcgcctttgttcaaaaagagcccttgtgtgtatttgtgtatatatacacgtttacaaacaccaatcacaggaggaatgtaaatattccactcaacactttacgaacagactaaggtacttttaaaaaattacaatgttaggctgggcactgtggctcacgcctgtaatcctagcat

SEQ ID NO: 1917 - DNA, 563 bp, Homo sapiens
tatatgaacaaggttttaggcaggggtctaggatacaaatcatggattagctcttgttaaaaaatgtatttcctttgggagtcattaagtgtttttgttacgtgtgaaaaatgcaagcagccactgttacctcgtgctcttagccaccattatacaaagaaaagagacaaaatgacaaaaaatgacaaacccactttagctgtcttttgcacctattacgtttcttgttccaagaatattttgtgaatacacagtaattgaacttaaattacattgtggttgatcattgtgttggcttttcttgacaatagtttcactttaacttaagaaaagggcatctcatttatttggcatggggttatgcatcatggtaaagttctttagtataacttaagcaattgtgtgtagatacataggtcatagatatggaaagtttacctgaggatcctggtatatgaaatttagctttgtaatatgtgaaaccaactaaattttacttaggggagtttggatgagaaagatgataatgagttctttgggcatagttttctaaagtaagacta

SEQ ID NO: 1918 - DNA, 578 bp, Homo sapiens
gtgtctccgggtgcgtctacacttgtgacccgggcacgcctctccagcagcctgtgccaggcacatcttccagtctttgtttctctcttctgtgaatctgtggctctgaggtcatgacttggtagctcggaggggtcccccatcgccccccacatctgcccacactcgggactcaggaggggtgccggtttctcagcccctctcacattagcacctacttggcagagggaaaactgaggccgtaggtgtcccaaggctgcccaaggtcaggtgggtctccctggctccttgttcagcctctcccctaccccaccagtgcttccctccctattgatcagggcccatatttaattaagaacttgattccacccagcgccagctctcccgggtaagccgggctacctgcccggctcagcctccctcctaacagctgctcaggactttcccacctcccagcctttgtccctgctggtcccaccggccagaagtcccctcccacatccacgcaggaggccagggtcaggcactgtaggccaccacaggaaaccacatttatattttagggctctggggagcca

SEQ ID NO: 1919 - DNA, 613 bp, Homo sapiens
tctgaattagaaatgaatttaagaagagttagatagacatggggttattttccatgatcagttatgaaaggaaggaagggatgatcagagtatattttttattatttaagaatagacacaaagttcttctattaaatagttcagccaataccaaattattttaattcaggatggaatttcctgcatcttataaatgagatgttgttgaaaagtaatttttaagatgatgttttattcttttccccttctgtgcatttaggtatcttatgttattcaggctgaaggaaaagagcatattattcacttggaaaggaacaagtaagacatttaatttattttggcttttcagtaatgtttttccaatagtatattggttttctttctagtttgatatggtttagtggatcctgaaccctgggattaagcagatttagctcttcatattggtgctgcacagtggcagctggctgggcaggcagtgacttctaaacaggaaagaaggcagagactggaaccaagtacctccagtttattcttttcaaatgcatcactaagggagcaaaggctacacatatgtgggggagttggggagaaggggagcctgcagtgactg

SEQ ID NO: 1920 - DNA, 607 bp, Homo sapiens
gtttcgctatttaacagatgaatgatgttgggaaagctaatcaagtcctctaagcttgatttctctcatctgtaataatgttgatgggaccttgctgataaggttgtttggcagattaataaagacaatacatggaaagtgctcaataactgttggttattatggtacattcaatattacacatattattatatgtgtaggtttatttatatattccattttataatttcttctatcactcacaatatccaaataaacttcttagaggtcaccacaagttcgctggagaaacggggaaacaaagatgccagtggaaatcttccatttagttttagcctttatttgttaacattcttctgtcacaaggtcttctcacccttgccaattatagaaagccattaatttgaaacccattaaaagccaccttatgatcaagaaaggatcaagctgaattaaattttccagcccaggaatattgatataactgaaacacaagatggaaaatctggacttgaagatcccaactagcctgcgtgttctcaaagccatgtgctgagaaaagaccccaccctgttcattttaagccttgtacttgtactttcctttg

SEQ ID NO: 1921 - DNA, 648 bp, Homo sapiens
gttttgggaaaagagtcaccaacagtctacttatcatacaagaaaagtatgcctggtttaaaaatcactggcgccaactcacttctatctttttttaatttttttttaagagatggggtttcgccatatcacccaggctggtctcaaactcctgagctcaagttacccacccacctctgcctcccaaagtgctgggattacaggtgttagccaccatacctgtcctacttctaactgatatacatgcatctggggacctctgagaaactctgaacagcgaacaattgaaaaaagaaatttctaaaaaagaataatttttcagcacctaaaacttctgtatgtgaaactataacaacaacctaaaatgcttctaatacggtaatggccctatttctctgcaaataaggattgctcatgattcttacactgcctttcaattaggattatacagctccattcctcattcaagcttcccatacgtgcacctaagtatcattttacaatgggatatacttaggtaaactgagacggtcagatgactcagcgagaagtcacccgaagaattttagaacaaagattaataactccaatataccctctcaaccaagaatttgaagaaactaaaaggttaaacacaaaatttctgga

SEQ ID NO: 1922 - DNA, 536 bp, Homo sapiens
ctgattgattagatgaatacaagctaagggaacagggcaatatgctaacagggagtccaaaaggaaagagcatttttgtgagtctgccaactgctctgaagatgaaatcacccccagaccactgtccctctcaacacgctgatgccagttttcctcccccacctcaaaaatcacagctgctcagagctggaagggtcttcagagtccctctgagccatagctatgtgttaggaccccctagggaattgtagaaagatccagaaatgcagcccactcccagagattcctaaattggtctcagatggagtctgacccatctctttttatacgttcccccaaatgattctaaattgtggctagaaaagagaaccactggccgggcgcggtggcttacgctcgtagatcacgaggtcaggagatcgagaccacggtgaaaccccgtctctactaaaaatacaaaacattagccgggcatggtggcgggcatctgtagtcccagctactcgtgaggctgaggcaggagaatggcgtgaatc

SEQ ID NO: 1923 - DNA, 622 bp, Homo sapiens
caggaagaagaaaacttcattaatagtctcaaagacatgagagaagttatctttttctttcatggacacaatgacacaaagtgtttatgaaaccaaaaaaatagcttttagaaattaaaaacggagcagaaatgaaaatttcaatagaatgataggaagaaaacttgaaatattctagaaagtagagcaaaaatccagagagaaggaaaatagaagaagaaagacgcaagtaatagagcacccatttagaaggtctgacatccaactaacgggttctacagagaacagagaatataaaaggaaggaaatcatcagtgacatagaatttaagaaaacttctcagaaccagagggtacaagtttctaaatggaaaggaccaccaagtgcccacacagtggctgagaaagaggaccgtctgtaagctttcagaagaagaaggatcaacagttggaacgacttcagacttcttgggagcaacgctgggaggtgaaaaataaggcagtgaaaaggctttcagtgtcttttagaaattatttataatctagaatactttgctcagccaaactttcagtgaagtgtgaatgttgaataatagctctcaaaagtttatttcccaacacac

SEQ ID NO: 1924 - DNA, 631 bp, Homo sapiens
tacttctgtgggaagtatcgcctcccactgatgcactacttgtgttcaccagaatgttcttccccttgcagttctgcctctcacagctccacttcccagagtgaatctgactcagaagatgaagctagtgttgctgcacgcagaatgcagaaagttcttcttggttgaacaggagtgcacagtgttgtgaaatacttaaaaaactgagcaaaatggttagacaagaaaatagagcttgaagttcactagaaatcttatcttcatcttaagtgttcatcaaagagtctgggatgatataaaacattttgtgtttcatctacccattcagcaagaatgagtccagtcccatgtttagattattttaacataatttgtgaatgatagtttcacatttggctgatggtttgcagttttcactcaagttttgcatgaatcacaaagcagaatggtaccttttgaagagcagttctgcaataagtcatgagtagtataacttttggacattgagatggagaaagtgagaaattatcaaagctataattgccagagttgcccttgggtttaggtagaacactgtataccatatatactatataccatatatactatatataccatatatattatatgc

SEQ ID NO: 1925 - DNA, 519 bp, Homo sapiens
atctgactttaaaattcttgtggtcaagtttctttaacttctgaaggactgtattggctctatattggaattaagtcctattcagttttaatcatcaaatttcaagctagaaaaaacaatcagtccagtcttctcattttatatatgaagaattgaactcagattagtgcttatcaaagaattccaatctgctgctatatcttactggccaatatttttagcatagtttatttatttattataaaccttttggggtcactgcagggaaattaaaaagcacatgtcagcagagatttccccctgaacattccattaagaagatatagactgccgcagggtctctttcctctttgatccctagtcaactacaggcatactttaaaataagtgaacagaccaaaaatacctcaccacagtttagcaatactttacgtggtgcatgtgtcatttattctgccacagaatcactgcacatcaggtggtctgtagtcctggatcttctcagagcaatatcacctc

SEQ ID NO: 1926 - DNA, 617 bp, Homo sapiens
aacttggtctctttgttcattatctccaagatctcaggctggctgctaagccactgcagcagcctccttacctgatgtcccacttatacccccaaactcaacacaacttctctaggatattctgtccattgcaccattttaccccaaattcttaggtgtactaaagttttgttccagcttggattgtgcacagtaactccaatactatcttcaccactattcccatgcctcacccccactaaacctgctgggctgggcctgtactgaatctccgcaccaccctcacccactccaccctacctcaccatctttgttggatcactgctcacttgcagaaagtcaagtgtaaaccctgctggtcatttccactctttttggcctttaatcactcatgatagccctttaatgtgtcccttagactctatgatatttgatagtaaaagaggtatcgaaagcatattttctggtcctcctgctttcagattcttccttctgtccctacttctgagatggagactgagtagggagtcaccaaaccgatctggagaagatgaactagatatgctcagattatggaccctggcctcagtggggagaaactggaattctaacccacc

SEQ ID NO: 1927 - DNA, 622 bp, Homo sapiens
tcaagtgattagtgtggccaggcgtggtggctcatgcctctctaatcccagcactttgggaggctgaggtgggtggatcacctgaggccaggagtttgagaccagtctggctaacaaggcaaaaccctgtctgtacaaaaaatacaaaaattagccacgcgtggtggcacacacgtgtagtcccagtcactcgggaggctgaggcacgaaaatcccttgaacccaagaggcagaggttgcagtgagctgagattgtgctactgcactccagcctgggcaacagagtgagattctgtctccaaaaaaatttaaaaataaaaaaagattgagtgaagaaaaaaaaatttgcagattccatcagtcaaagccattttcatatatctcctttgaatttccatttctgtgtataagggttttaaaaaatagttatcatattaagtagacagttgtttaattttcacattacgcgagcatttccatttcattacctgattttcataaccatcactctctgatgactatgtaacattactctcagtgcatgtttctcttactaccccctattgttggatgtctaaattgcgtctgattttttctctgttccataaaattgaaataaata

SEQ ID NO: 1928 - DNA, 629 bp, Homo sapiens
ggtcataagaaaaaatacttgctaaatatttgaaagaacagctacaatatctctcagtgggaaaaatagaggcagaaagctagtggcaaaatctctgagtgactgtttcccattcttaacccagtatcaaatatgctatggaatcagcactacagagaagctgatataatgggaggcagaatgccattacaccctttttttcccctcaggatcttagaatcagtcaccggtggttttgcaaaaactactactaacaacaacaacattttaaaaaagaaacctcatcttcagagaaagcactggctaaccggtctccattttcagttgctgggataaagaacctatgtgggccaggcgcagtggctcatgcctgtaatcccagcactttgggaggctgaggcaggcagatcacttgaggccaggagttcgagaccagcctggccaacatggcgaaaccctgttgctactgaaaatacaaaattttagccaggcatggtggcatgcgcctgtagtccctactgctcaggaggctgaggcatgagaattgcttgaacttgggaggagaaggttgcagtgagccgagattgcaccactgcactccagcctgggtcggacagagcaagactctg

SEQ ID NO: 1929 - DNA, 564 bp, Homo sapiens
tctgtattgtggaatttctgaaagaaagtgtaaatggcaatgtgtggaactaaagggtaggcaggtagattaagcagtagattaagccagcagtaactgttctgtttgcttccgaaaagcatgctattttacccacaggccacagtttctccattcccagttgtccaggatattttctcctagagttgttccataattgcctatgtctctgatactaaggattcttaatatatgtcattcctccaacacacaggcatacacacatccatataaagttctattatattggtttttcagcaactatattaaaaatctacattgggccggacgcggtggatcacgaggtcatgagatcgagaccatcctggctaacacggtgaaaccctgtctctactaaaaataataataaaaaaaaattagccgggtgcagtggtgggcgcctgcagtcccagctactcgggagactgaggcaggagaatggcgtgaacgtgggaggcggagcttgcagtgagccgagatagcgccactgcagtcaggcctgggcgaaagagcgagactctgtct

SEQ ID NO: 1930 - DNA, 649 bp, Homo sapiens
ggcactcaccgccgctgggggaccttgtcggaagcaactgccgccgccgcctctttcatctcttctggggcaggggccagggccaggttttacacatccataagtagacctttttggagcctcaccagccaattcaatggcgtcctcttctactgtgcctctgggatttcactatgaaacaaagtatgttgttctcagctacttgggactcctctctcaagagaagctgcaagagcaacatctttcctcaccccaaggggttcaactagatagagcttcacaatctctggatcaagaaattttattaaaagttaaaactgaaattgaagaagagctaaaatctctggacaaagaaatttctgaagccttcaccagcacaggctttgaccgtcacacttctccagtgttcagccctgccaatccagaaagctcaatggaagattgcttggcccatcttggagaaaaagtgtcccaggaactgaaagagcctctccataaagcattgcaaatgctcctgagccaattttggtgcctctggttttgctacgacaaatgcttttggaattgacaagacgtggtcaagaacctttgagcgcactgctgcagtttggcgtgacatacctggaggactattcggcagagtacatca

SEQ ID NO: 1931 - DNA, 564 bp, Homo sapiens
agtcaacaggtagaagctatagttttaagtgtagtgacactcctgctctgtaccttagtaaaaagaagtgtcccccttccagtaaccaaatttaaaaccacaaagcttatagttgcagggacaggaagcacaatttccccaaaacacatgaccatgaggtccactggttctgatatgtattgtactttctaaaggtaccagtccaatagtgtttgatacccgtgtcaatagtcacagtaatttgaagacgaaaacactggatcagtaaaagggatttcaaaggggcatcaatctcatctactacagtcttagttctattataattctagccccattttatccccttttatagtggaaatgaatattgcaattttcctgccccaaacttctcattgtgtattgagagtatagtggacagataaattgtctctttaattcacaggtcttcagaatgagagaagatatgccaaagactttttatctatacctgttcctgttatgatgatgaaatcctggactactagactgaatctgataccaaaattggaagagtttttgggtatc

SEQ ID NO: 1932 - DNA, 646 bp, Homo sapiens
ttcagtgcctctggccatttttaaaaggtaataaatacatggagttgatggctatagtgacttatttattcttttctctttgctttgaagtcaagaaatatttgtgctccctttttcacatgactcccctctgcccaccctgtttccacatagtctgttattaaaacaagttggaatcacaaaataaaaacctcaacagttgtctctcgactttcaactccatgattaaaaggagactgaaattatagtttagaggagtatccaaagtatgtacacgtgacatagttagttcagatgttgtgcagagtgcagcaaagtgtagctccaaagaagacagaataagtaaatgttaagtaaattagtttaatccaagcagataagaaaaagacatgtacttaatttatattgaagaaacagtcacttggtaggaggggaaaagggggtttagagtataactatagaagattggtttctgggcacggtggctcacgcttgtaatcccagcactttgggaggctgaggtgcatggatcaccttaggtcaggagttcgagaccaacttggtcaacacggtgaaaccttatctctactaaaaatacaaaaattagctgggcatggtggcaggtgcctgtaatcccagctgcttg

SEQ ID NO: 1933 - DNA, 549 bp, Homo sapiens
ttaacaactggagaaatgtaagttaaaagtgcttttggacatgaggacacatcaagtttgaccttgaacatttgaacagaaagtactggacaagccaataaccaggaaaatatttcaagttctggccagagagtctaaccctggtttttacttcccctccatctaacactggcctgtaaacatctgtcccccacctcctgagtgttcaattccgttgaagtgctttcaaatatcctccaagttatacccaaaaactatgaatctgaatgttcccaaatgtttctttccagctgcaccagagttgtgctgagttccacctaggcaggtcccagtggtctgcagtactcttgatttcttcaatcagatagtaggcatctccagacccaggaatgactcagcttcactttgaatttgagattttatactctgcatcactcctaaatcatttaagaaggctgaaatagcttttccgttttcccaactccccagaccaaatatagtgctgattatacccaacaggtattaaataggggggtgattgcagttaac

SEQ ID NO: 1934 - DNA, 631 bp, Homo sapiens
tcacaggtccgtgtgccagatacgacacacacacatacacacaaagaaagacacgcacacacacacgcacacgcacacatgagcacgcacacggacgcgcgcgcgcacacacacacacacacacacacaccattaagtaaacttggttcttaggcgttaccgacagtgagggatagagagagaaatagaaagacctaagccgcaaggcaaaacccagcaagggcagcagaagagatcaaagtcctgtgcccttggctgtcagcagagtgggtgctgggaagcttctggaagcaggcacctgagtggatgccggtgcacgtgaaaagaggccttcaagcctgaagaacacgtaaggagccagaacagggtgccacagagatactacccttaaggaagacagaaaagcattcgttccggggaaggggacattatccaatcagcgaccctgtgaaactcagacatgtccgggcacggtgactcacgcctctattcccatcgctttgggaggtcgaggccggcggaccccctgacgtctggagttgcagaccagcctgaccaacatgaggaaatcccgtctcttctaaaaagacgaaactcggttgggcttgctggcgagcgcctgtaatcccag

SEQ ID NO: 1935 - DNA, 629 bp, Homo sapiens
gagtggtcagagctgaggcccagaaggcaggcagcacagcacaggcagagagaggcagagatttgcagcaaatgctaaggatgtgggacttcatcatgtattcctaacactcactgcagtgtgaggaatggattggagggacacttgcagtagttcttgggagattatggtccctggaagattgtgggtggtcaggggaggggaaagtgtgtgcttttgtgagacacgtggtaggtaagagtaataggcatcacttattcctgcagagtgatggtggtggccagggaaagggagatttgaggtgatttccaggttttcagacctactcaagtgtatggaaagtgataaccttattgaaatagagaacacttagagaagaaccattagcaggagaactgtgtcagtctgttttaggacatagcaaggtgcatttgagacatgcagaacaggtattaatagtaagacatacagatccgaggccaggcacagtggctcatgcctgtgatcccagcactttgggaggccgaggtgggtggatcacatgaggtcagcagctcgagaccagcctggccaacatggcaaaatcccatctctactaaaaatacaaaaattagctgggcatagtggta

SEQ ID NO: 1936 - DNA, 437 bp, Homo sapiens
aagcactttgatatccaggacttcgggaaaaaataaatcactgtttgcttatagacatagacttacccctttgactcttaaagagacaaacaagggaggttgtgtctggggcagaagaaaattttgtgggtataatgagattttggggccgggcgcgatggctcacgcctgtaatcccagctctttgggagtccaagtcaggcagatcatgaggtcaggatattgagaccatcctggctaatacagtgaaaccccatctctactaaacatacaaaaaaagaaaaaaaaattagccaggaatggtggcacatgcctgtagtctcagctactcaagaggctaaggcaagagaatcactagaacccaggaggcagaggttgaatgagccaagatcatgccactgcactccagcctgggcaacagagtgagactctgtccc

SEQ ID NO: 1937 - DNA, 648 bp, Homo sapiens
cactacaaaaggcaaacgaggactacaattaattttgagaatgaagtttcccatctttcattacatattcttccgtagtcatatgttcataaagggtagagtgcatgcacaaaacacctgcacttttaaaattctttctctcctcttttgttaagtatatttatttgaacttgcttaagttaaatacatgcatgagacaatatcaacatatgctaaaattatttatcacagctaaagacatctcgccgaattccactcatctgatttaactgtttatgctatcttaaagtttcctgtatttctcgttctgttactttgctaatttcgtatactcaaccctgatttggaacatagacatctacttttaaaattcaattaagatttttggtaacttcttaagttttttttaactgtggtaaaatatacataaaatgtaaccatgaccacgtgcggtggctcacgcctatagtcccagcactttgggaggctgaggcaggaagatcacttgaggtcaggagtttgagaccagcctggccaacatggtgaaaccccatctctgctaaaaatacaaaaattagctgggcgtggtggtgggtgcctataatcccagctactcaggaggctaaggcaggagaactgcttgaatct

SEQ ID NO: 1938 - DNA, 619 bp, Homo sapiens
gagtcacacagtcttagacatttcaagtacattttttttctttctgaccaatctatgaaagcaaatatggcaggtgaagaatgaagtatgactgagttaatgcttcagtaataaactagcccatcagcgtctttagtccaagaggcaaacagaatttttaaccctctcaagaattgttagtgatatttgaaatttgttacgtaaaattttgtatgtaaccttttaaataaatctgaattcaatacacaatttgggaagaaatgttaatgttgtcaaggtcagaaatagcagcaggtgaaattacaaaattctttagaataatgcttttcttttacattatcttgagagtaggacactggatcttacactttaatagtctcttctgaagtggtttaatataatttactagcacctacaactataaagagtcacagctaacattaagggtatccttttcaggctaattattcactttttttttaatcttgcttctcatcttaatgtataattatgataattttactcagagtggggccagcctctatacaaattcagattttgagcagggtcaacaattacatttccttttctcagtttagtttattctattagttcctga

SEQ ID NO: 1939 - DNA, 495 bp, Homo sapiens
cggctcactgcaagctccgcctcccgggttcacgccattctcccgcctcagcctctcaagtagctgggattacacgcgcctgccaccacgcccggctaattttatttttgtgtttttagtagcccaaagtgctgggattacaggcttgagccactgtacctggcctgtgtgatgtattttagaggcagtgtagtagcatcctattgatgctgatgcattcttagacctttgattctcaggttcttagacctttgattctcaggttcttagacctttgattaaatgcattctaaaacattttaaatagtatgatcaaagtacaaatagacaattaggcatctctgaaagctgcgtttctgtgtattcaaattattggaaaaagaactaaacattcttggacaatttttctgtcgttttaaaatccgtgggatacatccattaccttaactatcctttcatactcagtaataatattacatcctgaatttaactccg

SEQ ID NO: 1940 - DNA, 584 bp, Homo sapiens
tatagaaatgctactggctgttcctgagttttagttttaaattactgtcaatcattcctcagtggtcccatgcacagtccccatgctgcagggaggccagctcctctgggcctcgtggagtaacggtgttgcttagcccatatcctcctggacaagtgctttggttcttccctttaccggtaaagtgttgcaaacgtagtctatcgagtttgttctatttcatctgttctgtttacgaaactgtaacttcatataggactgccttagggctgaagtaaataaactgtcaacctaaataaaacataaaacaggccgggcgcggtggctcacgcctggatcacgaggtcaggagatcgagaccatcccggctaaaacggtgaaaccccgtctctactaaaagtacaaaaaattagccgggcgtagcggcgggcgcctgtagtcccagctacttgggaggctgaggcaggagaatggcgtgaacccgggaggcagagcttgcagtgagccaagatcccgccactgcattccagcctgggcgacagagcgagactccgtcccaaaaaaaaaaaaaaaaaaaaaaaaat

SEQ ID NO: 1941 - DNA, 656 bp, Homo sapiens
tgctctgtttctctattctaaatgactttgtggacatataaacataatgacttgtacttgaaagcgagagagaggggaatatgttggatgtagagagaagataccatgagaccataactgttagtatggtgcccacacttcatgtcccttttgtctctatcctcaggtcagctgcatggttcctgccccatttttcccattgaaaacaggatgtaaaagtgaggtttgtaggacctcaggctccaattcatttgagcctgccattcccttctgtagacacccaaagggttttgccctaaatcagacttagggattggaaaaactaatctagtgtgacctcatgctttatcaagtcaagtatactgcccctcttataaaagcccagtgttgggctgggcgtggcggctcacacctataatcccagtactttgggaggctgaggcgggcggatcatgaggtcgagagttcaagaccagcctggccaatgtggtaaaccctgtctctactaaaaatacaaaaattagctgggcgtggtggcgggcgcctgtaatctcacctattcaggaggctgaggcaggagaatcatttgaaccgaggaggtggagtttgcagtgagccaaggttgcgccattgcactccagcctggatgacacagc

SEQ ID NO: 1942 - DNA, 637 bp, Homo sapiens
cccaagagctattagaatagataatttgagtacataaaaattaaaacttctatataacacaagcaatgttagagtcaaggaacgtatgaaaggaaagtcttctcataatattaatatccgcactggataaagtatttcaaaatcaactagaaaactgagcaaaactctgagcaggaaatttgctgaaattttaatttgctgaagttataaatagccactaatcaaacaaaaatatgcccaatcagggaactgtaaacgaaaagattgtggtataacttttcacacatcagattttttaagtaaattaagtacatgcagtgttggcaaggctgaggggaaataagcactcttagtgagaaaataaatgctgctgcctggactggaaaattaggaatgccttttagaaggatcaatttagtggcatttatccatttttaaatgcatttcatttgccacaataatttcaattacaggtgtctattctatagaaataattgagcttgtttatgttaaaagatattcattgcagtacttctcaaaatagaaaacacatactgtaatctaatatttacatgtatattatcaatagtggaaattctaaattatggtcccttcacacaatgatattctgtatagt

SEQ ID NO: 1943 - DNA, 595 bp, Homo sapiens
gagagtctagtccctgtcttgggcttcacccagaggcacttctccaagccaggcctcctttctgatgaccaaggagaggagctttatttcaccaaagcatcaaaaggtcatgtgattcatgcattgctctaagacatacagtgctcagacaagaagagggaaattactgacagtaattctgtgcattgacgaaaataacaccacgggcaagctctttactttggtggcatcacatcaggggaagaagactttggggcagtgctaaagactggatgtggagcagggccagtgtgatcaggtttaccagctggtcacttactcaatccgtggtcagaagatgaaggttctcatcttggctgtgtagtctgtcaaacagggggctggaatgtataatttgggacctaatcagcttgaaatttctgttttctacttaccaaatttacacttgacattgaatctttagaagcaaggtggaaaattggatttgttcccagcccttccagatgaatgagtgatatgaagtataatgtagtgaattagcatttcctattggaaggattgctcatttacatatcccaagaggtaacatataaat

SEQ ID NO: 1944 - DNA, 580 bp, Homo sapiens
aaatgatcaagggaaacatttcatagtccttaatctttctagtataaaacatcaaacaaatttcatgtagaatatctcttggtagctattaatattgtgaaattgtctttgttttaaacacattcacacattatgattaatgtattttaagcatatttatgtgagccatctttacaaattcaataattccttttctagtaaacactaaaacctattaaatcaataacattgatttatgtatatatatattgattcataacctaaatatatttatattttatacacatttatttgcatgctgtaaaatataaaatttagatatatttttctgtaacttaataggtatcttggcaattcagaaaacaaatttccgctccagagctgctctgactcaggcatctgtttcctttaggtgtctggttgagaaagtactcagagggtagaggatacttgagcagggtagagacccattagacaattttgtgtggaggtcaatacaggaggtaaattgtctactttggttagaaggtgcctggtttattcactgagacttgattacaacaaaagatagagtcacaca

SEQ ID NO: 1945 - DNA, 629 bp, Homo sapiens
caggaaagatattggcatatttccaaaataaactgcattcctgaatttaggaacacaccaggaagcttgctttactttagcaagagacaaattttagggttcaggagccaacagttctagagattgtatcattagttcccaaaagagggctggaaactgctcatggatacaatgatctctctaacaatgccctgaccactactcccaacccccaacacacacacacagcccaatttgagaacatattcctatgtgtaccattttatcagtagactctgatgagtggctctagctttatgggagtatctgacattatccatagcatactagttatttcagttttcagaagtatttttcttcagtgatgggagatctctccaccagatcccagaaataagccatcaattatcctcaaagggatgtatctagctgtggtgttgggtaccttgcaagtcttctattacagcgtcacttttgtggaacatcattagactttccattggcatcagtctctgagtttacaaagcaggtacctgcaaactactgagataaaagttaagattgtttgcatcagtgatggaagaacgtattgagtttagtcagtagggggagccatattttcaacttat

SEQ ID NO: 1946 - DNA, 642 bp, Homo sapiens
gacaggagtgaaaccctgtctcaaaaattaaaaatcaatagataaattcacctagaactaagcatttttagcgtttagtatgtggagtttcagtatttgtagtatgtggtgtttgtcatttatagtaacacacatgagaactacgagatgagacagtaaagggagctatgttgtggtaaaatttctacatttaacttgaagtggtagaaaaaaactctgattgtgaaaagtatgtattttgtaatccccatagtaagggttagtaaaccatattccacaggccaaatccagcccactgcctgtttttgtaaatacaattttgttggactgtagttacacctcattcattgcatatcatgtatggttgcttttgcactacagcatcagatttgggtgttgcaacacacattgtatggctgacaaagctcatcatatttattgtatctggccctttacagaaaaagtttgccggcccagtgtagtgactcttgcctataatcccagcactttgggaggccgaggcgggtggatcacgaggtcaggagttcaagaacagattggccaaaatggtgaaagtccacctccaccaaaactacaaaaattagccaggcgaggtggcaggcgcctgtaatcccagctttt

SEQ ID NO: 1947 - DNA, 624 bp, Homo sapiens
tttatggagccagtcacataggaaccctctacctggcacttatcaggattccagactcctacaaagaaagcaggggtttagcataaaccgcatcacttgtacagaaagtgtatgagccacgcatgtagggaagttttaatatccgtagggaactttaccaactgcaggcctaccttgccagcaggcctttctcaggaagcagcctcagatctattcattcttttctgcacacactatgcttttagataggccagtggctttcaagctgcaaatccaggccagacccaggtcggtttcacctgccactctctattccaatttgaagtctcatcggcaccgtaagcataacacagccctgaccctggactccatccctgccttccccatcgtgcccacagctgacccctcccgagttgtagccacgaccacctggacctctgtgaccacttcctcatgggtttcaggtcctcacctctgtgtttcaaactattttcagagtgtccttacgaaactgaaatcagtgtcacctccttgcttaaagctctccccaggggcttggggtgtgtggcttatgcctataatcccagtgccttgagaggcagaggcaggggaatagcttgatgc

SEQ ID NO: 1948 - DNA, 638 bp, Homo sapiens
aaagagctcatagttcacaaagagcaagtcaaaggatgtctggaatatttgaacatacaactgcctttggcatgaggtggcctacatacattctcaggggcaggataggctggagagctgatcaagctgccgggaagctgaagcaaaggcagggtggtggaatcaaatgtctcttcaactgaagactttaaaacttgggctttagctgggcgcagtagctcacacctgtaatcccagcactttgggaggtcaagtcgggtagatcacttgaggtcaggagttcgagaccagcctgaccaacatggggaaaccccatctctactaaaagtacaaaaattagccaggcatggtggcacatgcctgtaatcccagctactcaggaggctgaggctggagaatcgcttgaacgcgggaggcggaggttgcagtgagccgagatcacgccattgcactccagcctgggcaacagaaaaaagaaaaaaacaccaaaatgcaaaaaacaaaaaaacttgggcttcagctgggtgcagtggctcatgcttataatcctagccctttgggaggctgaggcaggaggattgcttgaggccaggatttagaaaccagcctgggcacacagggagaccctgtctttacct

SEQ ID NO: 1949 - DNA, 651 bp, Homo sapiens
gtcatcttttaggtcttgggaagaagcacttttccaaatcattctttaagcaaaggtattgaccacattttactctgggagggtattcctgctcatttgagaagcccacaaaatgcctcggcttcaacaacatatccacggttctttgtgttcctctcatctcatccttgcatgacactcggcaagcagggtgacagtaactaacccctatcattcaagttcaagattacagtcttgctgcctccccacatacctaccagacattgccttaatctttgggcaaagattttgatttgacaaaaagcaaataatctcaagagtattgtattttatcatttttcttaactttgaaagggatcttgtagataacaggagtaagaatttggagagggggccgggcaaggtggctcatgcctgtaatcccagcactttgggaggccaaggtgggcagatcacgaggtcaagagatcaagaccatcctggccaacgtgataaaaccctgtctctactaaaaatacaaaaattagctgggtgtggtggcgcacgcctgtagttccagctactcaggaggctgaggcaggagaatcacttgaacctgggaggtggaggttgcagtgagccgagatcatgccactgcattccagcctggag

SEQ ID NO: 1950 - DNA, 611 bp, Homo sapiens
atgttttatctcttacccattcatagagggtaaaagagagcaggccctaaacagagcctccttttaaactgatttttaaaaaactacctctgtggccgggcgcggtggctcacgcctgtaatcccagcactttgggaggccaaggtgggtggatcacctgaggtcaggagtttgagaccagcctggccaacatagcgaaaccccatttctactaaaaatacaaaaattagctgggtgtgatggtgtgcacttgtagtcccagctacttgggaggctgaggcaggagcttgaacctgggaggtggaggttgcagtgagccaagatcgtgccactgcactctagcctgagtgacagagtgagactccgcctcaaaacaacaataacgacaaaaaactacctctgtttctaacttctaattggctatagattataatgtctaatactgcattatcaacattttaaataccattttacactattagtatgaaaaacatagtaatcattaaaattgcatctgctagaatatttaatctgtcagaaaactgggtttaggaaacaatttaggcatgtaggctatcaaatatggcaaaaatgaaaagactatggagcat

SEQ ID NO: 1951 - DNA, 611 bp, Homo sapiens
caggccatgaatagtaatagatttatagttgatttaagaaatttttgtaactcaataaatactgaactaaagcattcaaattatctgctttgaaactgtaaatttttgttctaatcctaactctcttctttttggatactgaaaaacaatgaaggtgatgcattctcccagcctgattgcctctctgcaatgtcgaagtattggcagtgatttctaaaatagcaatattttatacactttttaaaatgagcttaatattaaaatgaattatacatttctctgagcagatggaacaatgttttattcaattttactatagtttattttcagaaatttgatataaaaacatcaggaataaaaacctgctctctcctgaaaatatggttcatgtagaaaagtggcttagagattaatagaaacttaatttagagactgatatcaactgcacagttactagtaaatgtcatttcatatagtctgttctaaagatcatattagctcatccactaaaaaatcaagcttattactcatgataagagttgatatcagatctagctcagataaacttattgtactatgttgacaagataaagctagctagtcaagaacac

SEQ ID NO: 1952 - DNA, 643 bp, Homo sapiens
tatttggctcatggagcagattgtattcacatgtagacagtcacttaggtgatgcgattccaggagcccctagaagtccatgaatctccactctcttcctctattatctgtaccattgtgggctattctgtcattgacgtttattctttgtgttgagtcttcacctgttaatgctctgtcttggtcacactcacacaaattaatcaacagaacatgatcttatattaactactaatttctggaatgcttttgaatgctgattacagtatacatctataatttgtcaatttaaagaaacacacagtgctgatccgcactcccagagttcccgatgcattagatctggggcagggcctaagaatttgcattcccaggtggtgctgatgagcctggtcagggaatgcactttgagaaccactgctctaggctatatctggaccttaccatatacaaaaataaaatcatttaagacacaattatagttttcacaaagtacaaatactaaagcagtaattctctgaaacatattaactcactcaatatgtattttgaacaggttgagttatctgctttcctatacacataaaatgaaagcttcaaatctgaagcaaagttaatgctctggtggaaacattcttttaca

SEQ ID NO: 1953 - DNA, 640 bp, Homo sapiens
gttttcttttctcatagcctatgtggatggctcctctctggccctgctttctgcaaccttacattttgggtgtagggtcctccactctgttaataccttctatgtctcctgattaaatttcttaaggcatagaatctccttagtgtttgactcaaattggctggccctgggtcagtttccttcctggtttcaatcagtagttgccagagttggaaggtggaattggatgccagaactgtctttttcaggtactgcagtcagcaaaccctggttaaaaggcaaaagatcaatctagaagtacaaagaaatgaacaatgcagtagtaagtgctcatttatttattaaaagcagttcaggccatgcacggtggctgcctgtaatcccagcactttgggaggctgaagcgaggggattgcttgagctcaggagtttgagaccactctcggcaatacggccaaacattgtccccacaaaaatacaaaaattagcagggcatggtggcatgtgtttgaagtcccacctacttggaaggctgaggtaggaggatcacttgagcctgggaggatgaacctcaagtaagtcatgtttgtgctacggcactccagcttaatgacaggtgagaccctgtctcgaacaaaac

SEQ ID NO: 1954 - DNA, 593 bp, Homo sapiens
ctacagaggcattaaatattgtagtcatattatagaaagtacaatgaattgttatggttttggtggacaaataattcttaattttcaatttaattgcaacagtaactataacatacaagaattaaaagtacagtggtatccttgagggatattttgcttaggactagaatatacaaccagagataaaaattgtgttagtaatataaaaattcaataatatgactgggctattactagatttggtgagaagtaggatatcaaaggcatttgctgggaggcatgagcagagaaaacgggacttaagagaattgttggccaggtggggtggctcacgcctgtactcccaacactttgggaagccaaagtgggcagatcatgaggtcaggagttcgagaccagcctggtcaatatggtgaaactccatctctactaaaaatacaaaaattagccagggctggtgtcatgcacctataatcccagctacttgggaggctgaggcagaagaatcacttgaatccgggaggcagagcttgcagtgagccgagatggcaccattgcactccagcctgggtgacagagtgagactccgtctc

SEQ ID NO: 1955 - DNA, 637 bp, Homo sapiens
tgggccgtggtgagagtgtttacaccatggaatgggcaaatgatcgaaatcagagcttttttttcctcaggagagccaacatttgccagttcactactcatcgtatctattggtatttaccatatttgatatttaaaaactaagaatttttaaaagtgcaagagtacacaggacacttttccttagccacgggagtgatgatgccatttcacatcatgtagcttgaggaaactactatgcttggaagaatgagacaaatgacctttttattttactatagttttaacatcccagatgccctacaaggatcttggggacacccaggagtctctggaccaccctttgaaaactgctgcctatagagaaagtaacttccagtaagcagggaggggtgtgaattaataaggaaaatgagagaaatagggctcctgagttacctcctagaatctcaaaaacttcagcctctcctttcgaagtgttcaccaacctctgcaatcacctgctaatttgctgtgctatccgttatttcaagtgttccatagttccacctgacaaatactgtgaaagacttgtttgaattcagggaaagctcatttgaaagtatgtaaatgatggtccagtaagaggacagtattct

SEQ ID NO: 1956 - DNA, 489 bp, Homo sapiens
tcacggcaacctctacctcccaggttcaagcaattctctgcctcagccttctgagtagctgagattacaggctactaccaccatatctggctaatttttgtatttttagtagagacggggtttcaccatgttggccaggctagtcttgaactcctgacgtcgtgatccacccacctcagctccccaaagtgctgggattacaggcttaagccaccgcacctggcctaaagataggctatcatccagaaaaatatactgtgatctaatgttaaaaataagttaaaactacctcaagctagtagtttgcacagtgtctgacaaatgttactgtgttttcctcaaaaatttaaaacatcagacagtcctcgtgtgaattcactgcagcatactgggtgccttggtgcacagtttggaaattgaggcacaagaattaacgtttcttgatgtcatgaaatataccatgtccaggccaggcgcagtggctcacac

SEQ ID NO: 1957 - DNA, 649 bp, Homo sapiens
gtttccatatatacatagtgattgttcatatatagggaattacactattcattcagaaagtattgaccgcctagtatgtgtctggcactgttttagtcactaggaatgtaatggtaaatgagacagtgttagctgggcgcagtggctcacacctgtaatcccagcactttggtaggccaaggcaggcagatcgcttaagcccgggagttcaaggccagtgagggcaacatggtggaaccccttctctacaaaaatacaaaaaattatctgggcctgatggtgtgcacctgtggccccagctactcaggaggctgaggtgggaggattgcttgagcctaggaggtggaggctgcagtgagctgtgattgtgctgctgcactccagcatgggtgacagagtgagactctgtctcaaaaaagagtgtgtacacagccagagccatataaaatacaggcacagatcactctgcacctgtcatctaaaaagacacatctggctgggcgcaggggctcaccagcactttgggaggcccaggtgggctgatcacctgaggtcaggagtttgagaccaggctggctaacatggtgagaccctgtctctattaaaaatacaaaaaattagccgggcatggtggcgcatgcctgtaatc

SEQ ID NO: 1958 - DNA, 613 bp, Homo sapiens
gtatagatacattacaatttatccaatttacttttgatacatatttagtttttttccagcgtttgttcttgattttataaatgtatttctattgaatggaatagcttggtcatagggaatacctgtattcaattatagcagagtttaagctccttgtcaacttttggcattttcagacttttcattttagtcaatctgttgggtatgtggtggtatcttactgtggttttaatgcatattgccttaactactaacatgattgtgtatcttttattcatagtttaatggccatttttataacctcttttgtgaagtgccttttaaaatatctttcccatttttaaattgtggtatttatctttttcatagtactttgtaggagttttccctatatttgggatataagtcctttattgggatctatctacccatctatctattctcactctgtgccttgactttttattttttaaatattgtctttgaattgacatgttttaattttaacttagtcaaatttgccaactttatcctgtataatttctttgtatcgaaggggcttaacaaaatcatctttgccaatgtcattaagatattttctacgtttttctct

SEQ ID NO: 1959 - DNA, 533 bp, Homo sapiens
gtaccagcagctttaaggagccagtatagtggctggcagcaaggacccccgggccagccaagtaggagcttgtgtctagggccctggccaagctgggctatgagcggacctgtcccagtgctgggaggcatcaagctggttggatgcccagaactgaatgctatgctccagctgtggcctcaccagtgctgaatagagaggaagagccaccttcatagcttacatgtaattcttctgcttatacaacccagtaccggatttacttactttgaccatttgcacgtgttacaatcgggtgaaagaacatggtgttgcgaaaagaaagagcagttacacagtagaacagttggaacaggtgtttgctcaggcaggatgggatgctcagccctgccagactgtacttcttaacagcagtagcttgtaccaggagctggagtcagatggcggcaccatggaggactattcattcacaggagtactgggaacccaaagtcaggatctccatggctggaaaaaaaaaaaaaaaaaaaaaa

SEQ ID NO: 1960 - DNA, 582 bp, Homo sapiens
acacattgtatgcctgtatcaaactatctcatctactccataaacataaacacctacaatttactcattaaaattaaaaacaaaaaaataaagaaacacacacagtgtgctaatcagaacatctgattggcttaatataataagtgtaacaaaattgaccagaaccaataaaagttaaaacaaaacaaatgttacaaaataaaacatttcattagctaaaagccataattttaattgacttttaaagcaaaacaaatattttacagtatcaaaattgatctctttaattcgctaaaaactattgaaattccaaattggaaacttcagagtatcaaaatgtaaaagtagaaacatctgaataaaaccttatatttttaggccaggcatggtggttcacacctgtaatcccagcactttgggagggcgaggcgggaggatcacctgaggtcgagagctcaagaccagcctgaccaacatggagaaagcctgtctctactaaaaatacaaaattagccgggcatggtggggcatacctgtaatcccagctactcgggaggctgaggcaagagaattgcttgaacc

SEQ ID NO: 1961 - DNA, 576 bp, Homo sapiens
tgctgggttctccatctccattctttcagctgggctcggcttcacagtcacctgccttccttgggctttggtctatagcatgtccatctactgtgagagctcagctgtctgaaggaacagggcccagcccatctgggacccccacgggcctccgttagggcatggggagctggaagcacaacatggggtgaggaagaaaagggagagagaaagaggaaggaaggagagcaccagaaggggagagatgggagaaagatgctagaagagaagggctgtgggggtagaggcaggagtggggacacagacggaggtctggggagatcggggctcgaatgtgcccttgaatggcaaacactttggcaggagtctagctggtgaagatggaagatagtaactgcctgctctcttagcattttggactaagttcttctactctcttatcttcttaatttcgcagcaaacaatggactattgactaagctttcagagctgtgggtgttctcagagggaggccagccagaacaccagcatctccggcttttcttccaactcccaagttggagctccatctatcag

SEQ ID NO: 1962 - DNA, 375 bp, Homo sapiens
ggtgtgactatggggacttcattcacctatccgggccttggtttcttgtctgtaaagtgggtttgagggtggcttgttctgcacagactgttgttcggaggggcgaggtcctctgggtaagcttctgcgtggtgtgcctcatgcaagttagggcggacccgatgaaatggaggtttgaccatttttcacaagaatggctgtttcccatgcccaagttagagtaagtgctaatgcatgttggaattcaggtgtctcaggccttgttctaggcactggggacatagcagggatggaggcgggcctagccctgcccttggggagcccagatccaacagggacacaggtgattgtgggcgtgaggtggctggtggcttg

SEQ ID NO: 1963 - DNA, 342 bp, Homo sapiens
  misc_feature 1, 2, 4: n = A,T,C or G
nngntatagttggaattacagatgggaagagaataggaaagttggaagtttttggccaagtttcatctattatgggcagattctgcagtaattttgtgttggctttctggactggttgctgtagaggttgtaggacaaagtgttatatatggtttggccactgtccctttgtgtatccagactctcaaatctagtttaatataacttagacaagtatggtactcaggtatctttccttgaaaatgtacttaaatataccctctgactattaaaaaggtattcaaataatgaatttaagaaaagataggccaggcgcagtggctcacgcctgtaatcccagca

SEQ ID NO: 1964 - DNA, 579 bp, Homo sapiens
accaatatggtcaccaccacatttcctgatcactctgtgacagtggtcaaaatgttgagattagtgaaaaataattggaaacaatctgaaaggtgaaagtcttctttttcttttgagatagagtctcactctgtcacccatgatcacagctcactgcagcctcaacctcctgggctcaagaggtcctcccgcctcagcctcccaagtagctgggaccacaggcacacattaccactcctagctaatttttaaattattttgtagagagggagtctcactatgttgctcaaacttgtctaaaactcctgggctcaagagatcctcccacctcaacctcacaaaatgttgggattacaggcatgagccactgtgcctggcccaaggtgaaagtcttttcatagaagaaaagataaacttgttgtatattcccatagttttaaaaatactcaggtatcaataagtatcaaatataatgttgattacacaaagccaagttacaaaaatatatgtgctagtatttttgtaaaacactgaaacacaaacaaagctaagtattctttatgaatttatatacacata

SEQ ID NO: 1965 - DNA, 615 bp, Homo sapiens
gatctacaaataattctgttgggatttggataagaattacattagacttacagatttgggaagtactgacacctttactatgaagataaacacagtatgtttgtccgtttattttgttactctttgatttatttcatttatattttgtagttttcactaaacagaatctgagaaggcttttttagaatatatattttagctatgtcctttttgggttttttagtaactataaatgtcaggcctctgagcccaagccaagccatcgcatcccctgtgacctgcacgtatacgcccagatggcctgaagtaagtaaagaatcacaaaagaagtgaatatgccctgccccaccttaactgatgacattccaccacaaaagaagtgtaaatggccggtccttgccttaactgatgacattaccttgtgaaagtccttttcctggctcatcctggctcaaaaacacccccactgagcaccttgggacccctactcctgcctgccagagaacaaaccccctttgactgtaattttcctttacctacccaaatcctataaaacggccccacccctatctcccttcgctgactctcttttcggactcagctcgcctgcaccca

SEQ ID NO: 1966 - DNA, 647 bp, Homo sapiens
agaggcccaagggaaatggggaggaacttctccctgaacctggtggagagtaaagatctgtgtggcacaaggggtagactgtgatgttaacactatagttgtagtatattttagacagttcaaattatgactctttttttaatttttatttttttgagacagtctcgctctgtcacccaggctggagtacggtggcatgaactcagctcattgcaaacaccacctcctaggttcatgtgattcttgtgcctcaccctaccaagtagctgggactacaggcatacaccaccacacctggctaatttttgtaattttggcagagatggggtctcaccatgttggccagcctcttttcgaactcctggcctcaagtgatctacctgccttggcctcccaaagtgctgggattacaggcatgagccaccacgttagaccattttagccctgaattttccttgatatgatttgtccattagtatttgttgttgttgttgttgttgttcttgttgttgtttttgagacagggtctcgctctgttgcccaggctggagtacagtggtgcaatcatggttcactgcaacctcaacctcctgggctcaattgatcctcctgcctcaacctcccaagaagctgggacaacaggtgca

SEQ ID NO: 1967 - DNA, 484 bp, Homo sapiens
tttaacacactggtggtgtaattagttgtctgttttaggacaaatctctttattcttaatttcctcatatgtaaaaggagggggcaaatacggatggtttctaaaattccttccagctccaaaattatatttgatccttggtttagttcacaagccaaactaaactacttgtatgaagaatagttgtaggctgaatgccgtggcctgtaatcctagcacttcgggaggctgaggtgggtggatcacgtgaggtcacggagttcgagatcaacctggccaacatggtgaaaccttgtctctactaaaaatacaaatattagctgggcgtggtggccagcgcctgtaatcccagctacttgggaggctaaggcaggggaatctcttgaacttgggaggctgaggtaggagaatcgcttgaacatgggaggcagagattgcagtgagccaatattgtgctactgcactccagcctgggcaatagagc

SEQ ID NO: 1968 - DNA, 560 bp, Homo sapiens
caactagttaccttccaagtaaggtaaaaatgtcaggcctttcgcaattcttgccactctctcaatatatttttgtgaaaatatactctcgtttttaatttatctctctgactgctcctccctcctccttctttcagctgatcatcttctcagccatctctgaaaaattgatgctactcagggctctgtccacggtcctgctttactttcgtttaatatgctcaccttgacaatcttccttttatctatcatttttattctaatatttgtacccaaatgtttttaagcatatattccagcaaattaatctctttcttgagcttcagacttcttttttcaacttcttaatatatacttttagtataacatgctctagacctatcaaacttaatttcatttaatgtaatctcaattaactcatgttcttaagtggaaaatattgtagtcatcctcaaactccctgagtattttatcaatcacacagctaaatatcttaagcctcatattttctttcacagccattccactctcacctgacatgatgtgtgataatattaact

SEQ ID NO: 1969 - DNA, 188 bp, Homo sapiens
gatttgagagatgcttgacttctttgctcaattattttatagaatgcagggtttttgcattttcccactttgtttcagtgctttccatggttaatgttggtttccttctcaggtcaaaataagagatcgcatctagaaatgataatcctcctccagtcgaggcagattttcttagaagcttcctagta

SEQ ID NO: 1970 - DNA, 624 bp, Homo sapiens
agcgtgtcgtgaaccaaggtcgtcattattctagcacaccgaaggtacacccatttcaaaccatgtgagctgtgagtaggcacagggttgggtcgctggggtgggaaaggctgcatgcgcttgtgcctaaggatgtttaacatgagagagctggaatccataataatggttcgcatccacccttgtatgatcatcaggatctcagccttcctcattttactctgtccatttcatttttgcttttattttttatgttaattgtaggcaaattaacaccttgtttaaaaaataaactggtgggcatggtgcctcacacctgtaatccctgcactttgggaagctaaggtgggagggttgcttgagtccaggagtttgagaccagcctggacaacatagtgagaccctgtctctacaaaaataaaaaatattagctgagcatggtggcatgcacctgtagttctagctactagggaggctggggcaggaggattgcttgagaccaggaggtcagggctgcggtgagccacaatcatgccactgcaccgtagcttgggtggcagagaaagactgtctcttaaaacaaaacaaggctgggcacggtggctcacacctgtaatcccagca

SEQ ID NO: 1971 - DNA, 629 bp, Homo sapiens
atcaaatttcgatttaagaaactccaaaaataacaaaaattggaaacagcctataacattttaggaaatcaagaaatatatttaattgtaacacccactttcatattccacaagagaaaaataaagcaaagcctgatcaagacgtgcctttaacacaactcaatcacctttgagccttcattctttaccagtctctctattctctgtgcctattttctactctccctgagcagaaatttaagtgtcacattttgccaaggcctccattacatgagtaatgagtgcttacatatattgatatcccctgattttctgttggtgaagtttccaggaacattcattctcttgggaggagtagagactcaggtaaaagtcatgtctcttcatcttccacccttcagagattactggtggccagaacacctatgtgggagagtgggtatgggaagtggggtgtgtggataaagaaactctgttcgggagaggctcccagggatctgtgagtcagaggagtcacctatctttagggttgcacaaatctagcaccttctatgaaaactgcattcacccagaatgtgaaaagaaaaaagggatggctgagaacttttaaaattcagcaacagacacct

SEQ ID NO: 1972 - DNA, 263 bp, Homo sapiens
aagataaaatttgaaatctggttaggctggtgttagggttctttgtttttggggtttggcagagatgtgtttaagtgctgtggccagaagcggggggaggggggggggtttggtgaaaattttttgttatgatgtctgtgtggaaagcggctgtgcagacattcaattgttattattatgtaaaaaaaaaaaaaaaaaaaaaaaaaaaaaaaaagggggggcctttttttcggtaaccccaacctgaaaaaaacctttggggg

SEQ ID NO: 1973 - DNA, 105 bp, Homo sapiens
aatacacaaaactcacttgcttcacttgaatccaaaattagaggttagaagttcaaatgttactacagcattgtgcataatggtaaaatactgaaaatagtctga

SEQ ID NO: 1974 - DNA, 657 bp, Homo sapiens
cggctgcgagtaagacgccagaagggcctcacccctaaccaggttgtgaatttagatgaaataaaatttatatttttatttgacgatggccctttcctcatcaggcgctatttactgcatcctacagatgagaatatcaaggcttcaatacatgaaaatccctgccaatgagtcaaagcccccatgtgaacccagatccaggtcttctgaagagttctctccaaagagttctgtatcatttctcctcataagaaatgagggcaaatgtgttggttcaaaggctcaggggatgctgaggctggtggccacagatttgtctctgaacagggtgaaagtagaaggaggtgtaaaaattctttcctccttgtggtatctcctttctagtggtagacatttaacccaccagttagaagggtttctataagcctttattttactgagatatcataaaacaaattcaaaagaacctcctagaagcattagcatttttgatccccaatatattcacactctggatttatttatttttttaattcttaagagaatgaagttttggaatgcaataatagtgtgagtgataagtctgcttcgcaaatgatttttttttccttctgtaaacataaattcaatgattttggattttgattactttcccta

SEQ ID NO: 1975 - DNA, 592 bp, Homo sapiens
caggcggcaggcagtatttggcccctgggccgactgtggtttaccaacccctggcctgggcttaggaggggtggcaacaatctattatgcaatttctgcagtgggaggagaacacaattactgctattctagttcttccgcttcctggtggctggtgatcccaggctatgattccagaaggcccaagcttctgcacacctgtgtgcaggaaggcagatggtgtgtggccagggaggacccaacaggcagtgagcggagtctccactgacaactctcagtagcacctttaagacccaggacaggccaggtgtggtagctcatgcctgtaatcctagcactttggagaacgtgccttgggcggccaaggcaggaggatcacttgaggtcaggagttcaagaccagcctggccaatatggtgaaacaccatctctactaaaaatacaaaaattagccgggcgtggtggtggacgtctgtagccccagctactcaggaggctgaagcaggagaacagcttgaacctgggaggcggaggttacagtgagcagagatggcgccactgcactccagcctatgtgacagagcaagactct

SEQ ID NO: 1976 - DNA, 601 bp, Homo sapiens
aaatcttttaattagttattttatcaagacttgagacactttctagctactgctctctagtttaagaataagcttcgtaaaccagaagaattaaacatttaaacataaaattaatgccattttaataattcatatccgaatcatttgtatttttaaaagtattttaaagcaggccaaataaagacatgaatcattaacattatttgaatttacattaaggaaagtatattttgagacatggttgatgtgttttcaccaagaagtaatttatggtcgtggaaaagaatttaataatcttcttgtatagtctcataacatcaaatcaggatctgattagtatttttttcttttgataagggaagaatcaatgtctgccctgataagttacaactgacttactttgtaagtactcatcccaatagatgtcataggccaacagattaaaaaccagagaatccagatgtcaactatgaattcaaaaaataactgaccactcctaactgaaaattttcaatattaaattacaataggtaggccaggcgtggtggcttatgcctgtaattccagcactttgggaggccgaggcaggtggatcacttga

SEQ ID NO: 1977 - DNA, 584 bp, Homo sapiens
attatctactggatttttactttcatgaaaataaaggacaccttcaataaatgagtttttactgcgttttggtttttagaaatacggtcttactgtgttgccctggctaaattcaaactcctgggctcaaataatcctcctgcctcagcctcccaagtagctggggctccaggctcgtgccactgcacccagctagttttcacttctttaaggtgcataatgtaaacgtgaagatgatagagaaagcctgtgttagacatttgcatttcatgggattgagccaaatctgggctgtttgctttctctcatgccaggcagggcagccaggggaggaggtgtcagcatggcatctggcaaaggggagaagaggacactcagcagggaggagccattacttaatgcagccaatcaaaagtgcatagctgcattcagctgagcccttgatctgaagtggctctactctggtcaagggggctcaaactccttggctaggacttgaggcatcaaagatgacaccttttcctttgggaagtactaatgagcctactcaattctctagatgtttcctaacactagtggtaaac

SEQ ID NO: 1978 - DNA, 578 bp, Homo sapiens
tgctggtcccactacaataattacacccacggctagaacatggagcaaagcaacaaatttcaacatcacagggtggagagggcagggagaatcacaaagctgttgaaactgaagttctcaatgcgtgcgatttatggctgagcagctatctcagtctgtagcatcaaagccttaggtgagagcagaggtgacagggacacccaatgcctcggtggccagttcctgctcaatttgaggtcacaggtcacatgagatctatctgttgacttggaaactcttcaaatctgggcacaactccctgttcccacagataactccattcttctcacacgcttttgggtatctcgagtggtgattgagaatagctcctgctcctctccttctctgccagctgctagaggaaatgtctccactatgaatagtaggaattgtgtttaatatttgcgagatttgcttcaaaatcatgtggataggccgggcgcggtggctcatgatcacaaggtcaggagatcgagaccatcctggctaacatggggaaaccctgtatctattaaatatacaaaaaattagacaggcgt

SEQ ID NO: 1979 - DNA, 628 bp, Homo sapiens
ctgatagggtaggtatcattattatctttacaggtgaggatattgaggtacagagaagttaatcacctgctcaaggccatacctactaagtggtttggcaggaaggcaaacccaagcagtcaggccctataacctgaaagtagacacttagccacaacactacactgtcagtcagttaaagtccagtcagacaattgccagtgatcgccaagtgtggtagcagatgccttagtggatgagcagggtacatcacttgaaaaaatcaggcagatgggaaaggaagatgttagcttggtgttatgcaaactctccagtgctaatagagtcctaaatacatagttcctaagtagtggcagacaaccctaaagcaagtctcagtttggtatggaactgtacgcagactgggtaataagatttctgaagcaaaatgagttctgtaaactagactcacattgagcatgaacttgcaatgccaatgccaatgccaatgcgaaactatggaacagggagccagagatgcttcagctcatttagtccacagttatactaaagagaaaaatcaatcaattgtaactgacccaaaaatgacacagatgatagaattactggatgggacattaaagcagct

SEQ ID NO: 1980 - DNA, 649 bp, Homo sapiens
actatctcggctcactgcaagctccgcctcctgggttcaggccattctcctgcctcagcctcctgagtagctgggactacaggcgcccgccaccgcgcccagctaatttgttgtatttttagtagagatggggtttcaccgtgttagccaggatggtctcgatctcctgacctcgtgatccacccgcctcggcctcccaaagtgttgggactacaggcgtgagccaccgcgcccggccaacaatcttaaggctgatttcctctctccccttcccttacttctgctgggctgcaagcaagattgcccacccttggctaaaggcatatgtactcttggattagaagaagggcagattcctagctagctactgatgaccaaaaagaataggaagcactgctggtagaagaccattactgacaaatctttcctggcggtacattcaaaccttgccccacaagggcattctgacagtatttaacaacatttgtattgcaaataactccttttgacttagtgacttcacttctaggtatgtatcctaatagtaatgctcacacatattctttcagaaagatgaatctgacaagattgcagcacctctaaataaagaaaaattagaagccagctaaatgtccaccagagaaaagct

SEQ ID NO: 1981 - DNA, 506 bp, Homo sapiens
gtgccttctgtgtccctctctcctgccatccagacaccaatgtgtccaccaaagattccggtctgggaggcacgtctttcccaccacactggggtgaaatacaagtccagctgtctctgccttatggtccagggcaagtttccccctgtaatatacacagacagactgtaaaaattatagattatttaatgtctgcgaggaaaaaatacaacgagcacatcaaagaatatcggcgctccatttaaagccgtgataaaagtttcctttaaaaataagcacatttagatgaaacggagttgatttgatgaagaaaatttaagcactagttttttatttcactgaatctcagatgccattcactgtaagattcatcattattttatgaagtgctcagaaagaaaaaatgctcccaataaaccagagcccaatacttttgtatcatcaattctgagctgcatcccaaatcggagatgtgaaaatcccgaaaaaaaaaaaaaaaaaaaaaa

SEQ ID NO: 1982 - DNA, 588 bp, Homo sapiens
tcacaggtccgtgtgccagatacgacacacacacatacacacaaagaaagacacgcacacacacacgcacacgcacacatgagcacgcacacggacgcgcgcgcgcacacacacacacacacacacacaccattaagtaaacttggttcttaggcgttaccgacagtgagggatagagagagaaatagaaagacctaagccgcaaggcaaaacccagcaagggcagcagaagagatcaaagtcctgtgcccttggctgtcagcagagtgggtgctgggaagcttctggaagcaggcacctgagtggatgccggtgcacgtgaaaagaggccttcaagcctgaagaacacgtaaggagccagaacagggtgccacagagatactacccttaaggaagacagaaaagcattcgttccggggaaggggacattatccaatcagcgaccctgtgaaactcagacatgtccgggcacggtgactcacgcctctattcccatcgctttgggaggtcgaggccggcggaccccctgacgtctggagttgcagaccagcctgaccaacatgaggaaatcccgtctcttctaaaaag

SEQ ID NO: 1983 - DNA, 612 bp, Homo sapiens
ttgcattaactttctgaaaacccccaaatcccagtacaaactctgttgtctaatatgttatggaaagaggcactcatttgagaaaatttaagattttgttcaattgttttactgaaagatgtgtgaccttaggccacttcactcctcaaagcctggggtggttattcggtcaatggggatgatgctcgtgtccacgttgcctcttgtagaacgtgtttagaaggaatgacatggctgttagtggctttgtaagtgcatagtactatacagagattagacaaccacttaactacttaagtggtttcatcacttctgtacctgaaaggtgtggcagagaatagcgatcattctggccctggattggccaaagtaattatgccaaagtcactggatatttttgctagggaagtggtccaagagaagtggtaccaaattgttgaaggcctctggctcataactttagaagagacatctgtgtgtgttcttaaatgacgtcatgaggtgtgttgtttgtttgttttaaactgaatgctaagacagtacaattaatagagactgaataccctgacttagagataattcatttcaggatgagaaatggcacatttaact

SEQ ID NO: 1984 - DNA, 606 bp, Homo sapiens
caggccatgaatagtaatagatttatagttgatttaagaaatttttgtaactcaataaatactgaactaaagcattcaaattatctgctttgaaactgtaaatttttgttctaatcctaactctcttctttttggatactgaaaaacaatgaaggtgatgcattctcccagcctgattgcctctctgcaatgtcgaagtattggcagtgatttctaaaatagcaatattttatacactttttaaaatgagcttaatattaaaatgaattatacatttctctgagcagatggaacaatgttttattcaattttactatagtttattttcagaaatttgatataaaaacatcaggaataaaaacctgctctctcctgaaaatatggttcatgtagaaaagtggcttagagattaatagaaacttaatttagagactgatatcaactgcacagttactagtaaatgtcatttcatatagtctgttctaaagatcatattagctcatccactaaaaaatcaagcttattactcatgataagagttgatatcagatctagctcagataaacttattgtactatgttgacaagataaagctagctagtcaag

SEQ ID NO: 1985 - DNA, 583 bp, Homo sapiens
agtagagacggggtttcaccatgttggccaggctggtctcgaactcctgacctcaagtgatccatctgccttggcctcccaaaatgctggtattacagacatgagccactacacctggccttaatttttattttttgtagagatgggatcttgctgttaccaaggctggtctctaactcctgggctcaagggatcctcctgcctgagcctcccaaagtgctgggattagagacctaaaccactgccccggtccaggtctgaaactttttaaaggagagtaccacttgttgacccctttccttttgatactgggaagggagtgcttaagtgggggatgcctcctttctcaatgcaaagaggagactcttactagtatatttaggggtaatggttgccttttgccaaatgaaagtttgtgtctaccgtctggggagacataaacacagccaccaataagcactgtggttacagccagaaaggcctggtcctgaggctaattacactggagaagtctgaatgtgccccagggactggagaagtcccaccttcttcttgactacttctgccagatgtctgtggggtc

SEQ ID NO: 1986 - DNA, 648 bp, Homo sapiens
cactataatgtaaaaaaacaattaggcaaggatagatatatgtaaaataggtgaagggtggggatcaatccgaggaaggtgtgccaaacgggaagacagcttcacaatccagtctgttgatttacctaggacttgtagctagggtttaaactgtttttgccttgaaggtggtatttcactgggtgtgtgccctgatctgcctaggagttgtctgccttctaccactctcaataacaaaaattgaaattgcacaaatctttcaattacggatgatgacaaaaacactattaaacattaatggagctttgccatttttagaggttggagttaaaggctgaccatgataatccctttaaagtagccactacaattaactgctacctcttatcccacaaattataaagtatcttcctattagagacatctcaaagcactttgggaggccaaggttggaggatcacttgagttcaggaattcaagaccagcctgaccaacatggtgaaactccgtctctactaaaaatacaaaaattagccagacattgtggcatgcacctgtaatcccagctacttgggaggctgaggcaggagaatcacttgaacctgggagatgaaggttgcagtgagcctagatcacgccactgcactc

SEQ ID NO: 1987 - DNA, 640 bp, Homo sapiens
tagcagggaaacctaagtccagaagtcaccccatcatgggtcccaaaatattccataggctacttatatggctgtgtgtgtgtgctgtgtgtatgtgtgctatgagtgcatgagtacgtatgttctgtgaatgagcgtgttgtatgtgactgtgtgtttgtgtgtgtgttgggcacatgatcacgttatctctgttcagagttagggatggacggtgagagcaatgtcaacatcaaaacacaggagtcccaagttgatttttcccgtagatccctgtatcatatcctcttctgggtagcttctctctttccatagtgaatctgggaagatattccattaccacagcaatctaacgtgtccacagtttggaaagaagaaactaaaagggttctgagaaaagcatcctctctttccacccctacccccatcaccaaaagatgaaagatggtaaataggatctatttttaaaagacaaaagaagctgaaattattaaatccagaaggcaacaaaaggctaaaaagggtgaatttatcattgcatgtgtgtacacaaagtatttttataaaaagggtgagtcgagatcgcgccactgcactccagcctgggcgacagggcgaaactccgtcccaaaaaaaaaaa

SEQ ID NO: 1988 - DNA, 564 bp, Homo sapiens
atgacctttccccgctttcaccagactcagtgaaggacttctctgaggtattgacagaggcctcagatggccaaggggccagatcctctttctcctgcactccacactggattgtgacacaagcaaaagatcatcctttatttatgttacttatgttaaatgactgagatctggaccttgtttgttagcttatcctgactaatgcatacaggaattttaccattatgagaaagacagtaaaaatattagacaaataccaacttaaaaattctaatatgatctaggctgggtgcagtggctcacgcctgtaatcccaggactttgggaggccaaggcgggtggatcacgaggtcaggagttcgagaccagcctggccaacatgctgaaagcccgtttctactaaaaatacaaaaaattagccgggcatggtagcacgcacctgtactcccagctaatcgggaggctaaggcaggagaatcacttgaacccaggaggcggaggttgcagtgagccaagatcgcaccactgcactccagcctgggtgacagagcaagactctgtctc

SEQ ID NO: 1989 - DNA, 607 bp, Homo sapiens
gacagaaggggttcttgattttaagaatcctagagaatcgtattttttaatactgaaaaatgattgtttactagcaattgttcagtatgaagtacaactagtttttttaaatgttatattgaaaaatgtttgatcttgtatatttggttttcaaatctgcttcctatacaataattttatattctaaatgtggaaaaatttgtattattttaaaagtagttgaaaatggtataatacaaaggcagtttaccaaatattctaggccacatacatttctatgaagtgtcgtatgcaacctttgaaatgtctgtggagagaacgtcatatggatgatattaatgctttgattaatgtagagcctttctgtgaaaacctatggccagttcaagtacccaagcctttctccttatcactaccactttttgaaattagaggtggaatgcttgaattctaataccggagtattcagatgcataaaaatggtggtaagaacataaggaatcttctcaaacaaactagctcaagttcatctgagcctatgagccttttcctagtcaggtaaaataattaatttctcctaatcagtaatactgtataagagctatac

SEQ ID NO: 1990 - DNA, 593 bp, Homo sapiens
actttcccccttaggtgttgagttcaagggaattcccagtaaacttgctgcacaaactctatttcccagaaaaccaaatctaacacactcactcaagaatatgaaaggatattccagcatttttaataaaaaactctctaacatgaaagacagtccaaatcaatgcatggagaataaaggaacttgaaagagacacatagtgtagagaatattaacattaattgtttaaagaggtaaaaattctgtattcataaaataaaaagcaggatgttataagaacagaactttcagaagacaaaaaagaggcccttggaattcaaactacagtaatgaaaatgaaaactctgatagactgattaaaagacacatttgtggcactctccaaaacatagaacaaaatgaaaagaaagagaatatgaaaaacaatatgagaaaattagaagattgagaaagtacaacatttgactaataggaattctagaaagagaacaaaaaaacaaaacagaagggcaaaatttgctttcaaaaaaattaataaagaagatgaaagggccgggctggtgactcacgcctgtaatcccagcactttggga

SEQ ID NO: 1991 - DNA, 582 bp, Homo sapiens
gtgaggtcaggagtttgagaccacccgggccaaactggtaaaaccccgtctctactaaaaatacaaaaattagacgggcatggtggcgggcacctgtattcccagctactcaataggctgaggcaggagaatcgcttgaacccaggaggcagaggttgtagtaagctgagatcgcaccactgcactccagcctgggcaacagagtgagactccgtctcaaaaagaaaagaaaaaaagaaaaaagaataatcctcaactttctccagtttaccagggataccgatacttttctctcaagcaattaaattgatggtagctcattccaactgaacgttaataacaagctgtttctcaaagcaacacacaaagaagttaattatataaatctatcacaatgggcagcatcagaacagtctgaggactataacaaatctacaatatctcatttacactataaacattccaatcaactcaattttccagttagaaaatctttttgttggccaggcgcagtggttcaagcctgtaatcccagcactttgggaggccgaggtgggtggatcacgaggtcaggagttcgag

SEQ ID NO: 1992 - DNA, 628 bp, Homo sapiens
tagtaggacttaaaaactagtgataaatgagaacaacaaaactatttaaatcctgctggaagcctgctctccaagataagtgtatccagtgtaagtcccctgagattctcctatcagggccgggtgatttacgagttgtatgatttatcaggctccatgtaccaggtgtcacctctgcattcagcttcactgatcaagaaaatgaattcgatcctggatctctgtccttccaatagcagcttgccaggagaagtcgttaatgtgatacattatcttgccggctgttaatatcatgtacccgtcttgtttcccttcttttagttcagctgagcatcaatttgtgccatgatatttacatgaatatcttcatttcatcagtaccattgtccatctgtttggctgagggctgaattacagagctgtggccaggaatggaggcattaggcagtctaaatgctaacttctcccaagagagaagggcagtcccgttttcagttttcctgcccctgcttgctgctgaaatgcagcctagcagacatagagcaggaattagaaaaatcatcctttaacagaaagttagaaaatgatgaggggccgggtgcagtggctcacgcctataatcccagca

SEQ ID NO: 1993 - DNA, 621 bp, Homo sapiens
cggtgagtgtaaatttggcactgaagtgtggatgcagactcccacgcccctttaaagtttttctagagcttccatcccaagcagagccctgcctggccatcttctttgaaggactcagcacttctgctttcataaggcttggtgggtgtttctagaccttcctaggcattgaacctatgaccacacaggacacccctttctctgccctttcagtctcctatctgcccctctgggtcagtggttctcttgtcttcatccaagcctggtcaaatgtgcaagccaccctaggtctgaaggaagaaggaaggtgggtcccagtcttggaaggtactgaacccacgtggtttccttgtttgctcaaaaacagccaaaataagggccctcattccctcgctcaggttagttagaaataggacaaatgagtaaaaaaaaatatacaaggaaatgtttttggccgggcacagtggctcaagcctgtaatctcagcaccttgagaggcaggaggatcacttgagcccaggagtttgagaccagcctggacaacatggcaaaaccctgtctctgaagaaaaatagaaaatgtgcctgacatggtggctcatgcctgtggtcacagctactc

SEQ ID NO: 1994 - DNA, 638 bp, Homo sapiens
ctgaattagaaatgaatttaagaagagttagatagacatggggttattttccatgatcagttatgaaaggaaggaagggatgatcagagtatattttttattatttaagaatagacacaaagttcttctattaaatagttcagccaataccaaattattttaattcaggatggaatttcctgcatcttataaatgagatgttgttgaaaagtaatttttaagatgatgttttattcttttccccttctgtgcatttaggtatcttatgttattcaggctgaaggaaaagagcatattattcacttggaaaggaacaagtaagacatttaatttattttggcttttcagtaatgtttttccaatagtatattggttttctttctagtttgatatggtttagtggatcctgaaccctgggattaagcagatttagctcttcatattggtgctgcacagtggcagctggctgggcaggcagtgacttctaaacaggaaagaaggcagagactggaaccaagtacctccagtttattcttttcaaatgcatcactaagggagcaaaggctacacatatgtgggggagttggggagaaggggagcctgcagtgactgaatagggtccaattactggaaagact

SEQ ID NO: 1995 - DNA, 559 bp, Homo sapiens
tggtgacagagcaagaccttgtctcaaaataaataaataataataataataaaccaacacagtgcctggaatatagtaggtacttcataaatgctagttttcttcccctcaagaaacacttgctaaatgagctgattgtcaacaattaatcccaaaccagaacgatttttagggttaaacatgcaggccgggtgcggtggctcgggcctgtaatcccagcactttgggaggccgaggtgggcagatcacaaggtcaggagatagagaccatcctggccaacatggtgaaaccccgtctctactaaaatacaaaaaaattagccgggtgtggttgtgggcgcttgtaatcccagttactcgggaggctgaggcaggacaattgcttgaacctgggaggcaaaggttgcagtgagccgagatcgcgccattgcactccggcctggtgacagagcgagactccgtctcaaaaaaaaggttaaacatgcaaatagggttacaggctatttcagaatatgagccatcacatgcttattgagttacacgaagaagtcaggaaaca

SEQ ID NO: 1996 - DNA, 538 bp, Homo sapiens
tcatgcttctcagaccatgaggatctggagttggttacaatttgtgcagggaaaaactcaagctgtgaagcaggcaaccacggcaaacttgtcttcagttctatgtaccaatcatcaagtcttccttaataggcagattcccttgtacctaagatattgcagtgcatttcataaaacacagacataccaaccataagatgaaaaacactcttgtgtaagtaataaagaataatgaaatggccatcaagctatagtctaaaactttggtcactggaccataaatggggatgccaaattgtattatgattgggattttgaagtcttctccaatagggacagaagttatgcatgtgtgtaaacattcccctccaagcaaagatgacgactagaagtcactgccacaccagctaacagaataaactaccaccagtttgatgcaaaatcctgacccaagcttttgatcctccagttgagatgcagctgccacatggcaatcttgctcacaagcaaacagaaacctacatgcctgctagtgtct

SEQ ID NO: 1997 - DNA, 518 bp, Homo sapiens
agcaagaagtcaaactgatggcctttaagtcagagaagcagcaatggagcaacataatcaaagttgaccatctttgttttcaagacagtcacattatgaaatattctgacatgctaggctaggaaatggctataactggttcacttgagactggagaaatcagctttgctaacaggtaatactttgtcaagtagtgagaaatattatatactaggtataattagttgtccccaaaatctaaataaacttgttctaatatatggaaaagggcagcaagatagagaaggtaagtttgaaattctacaatatctggatctttgtcacctgagtttatgtactttaaaccaaatatactattttactatgtagtatagcaaagattgaaatattcttggtaaatgaagccttttggatctaagccatatttttcaggaatttttgaaaaggtaacttttttttgcttcagttaaatacagtctaatgactgaaaaaaaaaaaaaaaaaaaaaaaaaaaaaaa

SEQ ID NO: 1998 - DNA, 593 bp, Homo sapiens
tttctaataaactgatatcacaagctcatcatgtagaatgacatcttactgagagtcagtctaactgcagggttactctacggatgctgccgttctgacatattccatggatcctgtacttagctcccgtcatgtgagtaaatacaacattatcaatcaattcagagatgtggaagaatatactgtgttggcaaaaataaccatgaatttttgtttcctttgaccatcctttgctttgactgaaagagtagtttcatggtgcagagttagtgcccagctttgtttaaagccaggaaaacctaaggccaattctcagctctagtatcactgctgtatgtctgaggtaggggaaatgtgcctattattttataaacaagttccttcatttataaaatgagggaagtaacaatacctaagttaaacagttgtagtaagatgaagacaaacggaagagtgcctaacaatggaacaagacgaattcattgctaggtttttttttcctatttgctcctgtctacacgtcactgctatatgaaggaaaacataagaagaaattataaaagaagccagtcattagttctaattagatgaga

SEQ ID NO: 1999 - DNA, 277 bp, Homo sapiens
aggactttccagaataacttctgttacatacaacatgcttagctttagttttataatccttaattttattgaatttgaatttccatttgacatttaattttgaaaatgttttacaacagtaccctaaatgtacttgttggaataatatacaacagtttaattatttacatgtatattcagtttctaggatggcatcccccaaactcaaaataaaatgtattgacacagttaaatatggcatgtacttaaaataattatttcagtggtagtgatagac

SEQ ID NO: 2000 - DNA, 629 bp, Homo sapiens
agtgcctaaagatggtgaagctctgccggaactgaggttagcagatccatctaaggttttttccctagactggggaggagtgatgcctacccaaggcacccagagatggggtcataaactcaggactcaggactagcccaagattctcaagtcaccagcatggcacagccgccacggaacctctccttggaaacagtgtgccacagatgccctattgggtagacgaagtgtcacctcccactctcttgcttggggttgggtaagaccctgggatgttggtgcatccctgggagggcagcaacagcaataagcactgagaggtatttgagcccatggtcagatgggcactgggaatcagacaatttgatttaaatagaaaaaaccatttcttgctcatctgagattaggaactagattcatcttccaacatttataaggttcaccttgatgcttttgtgaatttcaagaagggttaaaaaattgtagtgacgtaaacacagttgtctttgatggcagagtctgggctgtcttctcctgtatttcctctccctctcagcaatgcagaagcatagagaagcaatcagagctccctcactcactttgggatattcatggaggacaatgcacat

SEQ ID NO: 2001 - DNA, 515 bp, Homo sapiens
tagagcctctgatacagcataagcctaaatgctttttctacatcttccttttctcttttttctttaaaagaatcttctcatattactctctttctttttatcttatttctcttttatatattttatcgcccctcttggtccaatatacattttataaagaagtttctgttatccaacttatttgactctatgtccttcctcttcaccaacgtcatttttatttccttccacctccttctccccgtcatcatcaacaatctttaaaactaccatcaattcatatgttttaaattagtataattccatctgcttctctgaaatggaaaggagagaaagtactcacgtttactttgaggtctttctagccccattgtctaattagtctcttgttcaatggtcaggacggcaagaatttgttctattttttttcccccagagtatatttctgtggataggggaatatattcagaaatacttgagatcgaacaccaatgttacatattgtagtgagatta

SEQ ID NO: 2002 - DNA, 637 bp, Homo sapiens
tccaaacacagagcttctgttatcctcaggacgtattacccttctagaattgacacatgacagagtattaccaaccaaggaacgtcaatcaatctttgaagtttcaatcaaggcttcattacataagcatgatcgattaattacctgtttgattcatcacagctttgaagttgggagagaaagctccctaaatcatctagttggtcaaactggcataactgtccctcaagctggattatcaggtgtagtcagcctcactttaaaataacacttttattgggtatgacaagattatctccttaaggctgagggcaaaagcctgacctcctttgggtaaggtcaaattctttaccacacaactataaatcatcttaatttttttaattgaatatttttacaaatagtgctgatagatctctcatattatgaattaataacatgttgataaagccaaaatggtatttttcatgtagaaaacagtgtcattgggagataaggaagaaaataacttacagtacaatcagaaaatgtgtcgtggaagttttgtaaagccagtgcagagagagagagagtcttttaaaagaaaattacaaaacaattaaataatactgtaggggctgggtgcagtggctcacgc

SEQ ID NO: 2003 - DNA, 635 bp, Homo sapiens
caagaagctagaaaagctcccctgactcaaccctcttctccaaaaattcccaattcacttaaaaaaattagtaacagaaaaggatcatttgaatatccaagatcaaagaccaaatcacttataagaggaaaaaacgagattctcatcagacttttctacagcaatgctttatgccaaaacacatggaataacatatttaagatactcaagaaaaaaaatatgagctgtggattttatattaagccaaagagatctctaagcacaaaggccacaggcaaactttttatttttttaatagagatggtggttagggatagggtgtctcgccatgttgcccaggctggtcttgaactcctgggctcaagcaatccgcacgcctcagtctcccaaagtgctgggattacaggcatgaaccacagcacctggcccacagacaaacttttaataacatgcaagaattcaagaatatgtttgccataatcccttcctgaggaatgaactagaaaattagtttcaggaaacaaaaaatgactgcaaggttacctgtgtaagtactgatgatagacattaagtatgcacttgcctatacaaataagaccaaatagcaattaaaagtgagacaggatagcatgtga

SEQ ID NO: 2004 - DNA, 584 bp, Homo sapiens
attaagaaaaaagttttttttaaaaattgagccaaatattaagataatcttcatggtgaagcattactaaattaatttaacggcagtcttaatgtaatgtaattttggtttactgatatgtaatcagttaatcttgaagatttcataagttctggcatttgttctttcctcttgtttctctcttataaattggtcaattctccaaaatatgcaaattaaatttaatgttaacctatgtgtaagtcaaggcatgtgaatcccatgaccaaataaatattacaaagcaggtgtctctacactgatgctgaatacctaccatttagagaagacacctctcttccccagggtctcaaggcatctcattcccctggctttcccccttttcccttgaggactctgcatcctcctttgctgcatcctcctcagctttccaaagtcttagcatggacatttcccaagcttagtccttgcagtcttctgtcctccttctgcgtatctcttacacctcatctaatcacaagacttcaaagtctatatgccattgtttgtcaagtctctaccgatctggatctctcacctgatac

SEQ ID NO: 2005 - DNA, 609 bp, Homo sapiens
tgatcccacaggtctttcatgcaagaaatcaaaaggatttacaccattatactacagacattcatcatgctctttaacttgccccataactgagaaggtacacaattacaatgacacttcagttgaatgtacacttcacgtctcttcagtggaagtgtcctaaattgatcaccttggatatctgtttgctgaaactgagtagataatatttattattcctcacacccacgtggtgtaataatttgcctaagtttcttgtatccactcgtttagccttccaaaatttcttcatccattcatggcaccaaaggataatatattagcctcaataaaaatatcatcaattatcaattttgacatacttctacaaagtaaaactgctacaagcgttagatattaatatgttttacattcacaaatcactccaatattcattgaaaatgaccactttaggagttaattagaattccacatactttttgtttctataatagtcttgttgggagtatcatgctattctctaaagaagtttcatccaatagctattttacccaagagttagctccttgaacaatgaagccaatgtattcatattcaagtttatctcat

SEQ ID NO: 2006 - DNA, 552 bp, Homo sapiens
aacacatatggtatatgatatatgtattatgggactgtattcttactaaaaagtaagctagagaataaaaaatttattgagaaaatcataaggaagagaaatatatttactattcattaagcagaagtgaatcagcataaaggtcttcattctcgtcatcctcaggttaagtaagccgaggaggaggaggaagagaaggggtttgtcttgctgtctcaggggtggcagatgatggaagaaaagccacatataagtagattcgagcagctcaaacctgagttattcaagggtcaattgtgatttgatttcctctagcctttaagtacatccaatttactaacctctttatggctgccttacctactatgccagaaagcctgcttttctcatctaaatccttttaaattatagtcacatcattgagatgcacccatatttcattctcatcacagaaagatagcaaaacttatttttaagatcagccaggccaggtcgggcacagtggctcacacctgtaatcccagcactttgggagactgaggcgggtggact

SEQ ID NO: 2007 - DNA, 627 bp, Homo sapiens
tgggtgaaagtaaactttagagagaaggaaatgcataccataagatggtgaaaataaattcatacatataaataattacaattgatgttgaaggaatagattgtcagattatataaaggaaataaaaatccagtgctattttttttcataagagacaacacagaaaaatttaaactaaatcttggaaatagttatatcaagtaactatagacccaaagaaatgcagtatacctgtattaatacttgtcaaaacagatttttgactattttaaataagaggaactaagctatttaatagaaacctttaacacacaattcttagcaattgattgtacagaaaaatatcagtaagaatattgaagatgtttaaacataatgaacaagtttgatctaaaaaccatacacatatctgtaagtggcagtatacacatttctttcaaacataagtgaaacacttataaaaactgatcatctattagatgacatagtatgtctcaacaaattccagagaaatactatcctagagaccacatttattaaacacaataaaattaaattggagccagtcatggtggttcatgcctgtaatcccagcactttggggacccgaggagggcggatcacttg

SEQ ID NO: 2008 - DNA, 500 bp, Homo sapiens
gtgcatggagacaggaatgaagccagaacgcaggtggggtgagccgcatggcaggatgatggagctcagtccggctgagaagtgtgttcgttagcatcctgcaggagtcctcaaggtcattcgacaattggtgcttcattcatcggctcaataaatatacatgagcacttacacagttcctggtacaatgaacataaaagctaaaatccgtagcctgggccgggcgcggtggagctcacgcctgtaatcccagcactttgggaagccaaggcgggcggattacctgaggtcaggggttcgagacaagcctggccaacacagtgaaaccccatctctactgaaaatacaaaaactagctgggcatggtggtgcatgcctgtaatcccagctactcgggaggctgaggcacgagaatcgcttaaccccgggaggcagaggttgcggtgagctgagattgcaccactgcactccacctggacgacagagtgagactccgtctc

SEQ ID NO: 2009 - DNA, 644 bp, Homo sapiens
gcaagcccatctaaaatccacaaatatacttgaatttgattcagcatctgatcatatttgactcaaatatgattcaacttttttttacattgggaattttaatgtctaaggagtatttttattaagttttcttcagtaagaaactcttcccttcttgtttagagaacacaggtagtgattttcctaatcatatatctgaatctctgctgagccttctcccagcttttctccaaaaattactttgccactgtatagtatgtatttttaataaagaaattattataaaaacattctactattatttgattcactatttcatttattcattccaacatctattaagattttacaatgtgcaaatcagactttccactcattaggaatatattatttttacaaagatcaattgctttgtaaatattaatatagcagggtttattatataagaactgcattaaaaagtacagtgaaggccgggcgcggtggctcacgcttgtattcccagcactttgggaggctcaggcaggcggatcacgagatcaggagattgagaccatcctggctaacacagtgaaaccccgtgtctgctaaaaatacaaaaaattagctgggctggtggcgggcacctgtactcccagctactc

SEQ ID NO: 2010 - DNA, 604 bp, Homo sapiens
acaagctgttaaattctttacctgcagctgaacgacagttaataaggtgtgaaattttttcttttctttgaaaacatcacagagttcaattgttttccctaatctttttcttatatcttgaagtccatagaaagaaccaaaagaaaaagagaaaagatgattgagattcaaaaggttatgattttttaatcttttgggataagatatctacttgactactgtccctcagttttcaggtctgtacaatgggatgtgaacaaaaatacctcccttgctaaagactgtgaggaataattattcagcgttcgtaatgctctttgaagttggagaaaatgattcatgtgctaagtgtcataatcaccaatctaagcccaggcagaaataccaggaaaattaaagccagctttgaaggaagaaaaaaaaattattcttgatgcacatagttttatattagagttagcaaagttataaagagaaaacttttcatgcaactcaattgtatgtcccttctgatcccgaactaaacatcatacaagcaatctggtcttgaaataaaagagtatttctcagatgatattcatcatttcttactcatcagcataga

SEQ ID NO: 2011 - DNA, 450 bp, Homo sapiens
tgtgggtttatattgtgctagctcacttcagtccagacaccatctagatgccacaacccctttctagtgttgtgctaaggggtggttcacaacactagtacaagacacgttttgcatttaatacaacccccactgcagcactctcagtttgcattcttcactacaaaggatgtcttagaaaaaagcagtggtaattaaaattaggttttaatgttagtggttttaaagtatgttctaaaacaatttacactcaatagtaaatgacaaataggtcatttcccaagataatcccaagcccacgcaactaagtaaggaaaaatctaggtgcttttaatatagacacaatactatgtgtgatgaattctaatatgtcaatctggctaggtactgccatgaagggatttttcaggtgtaatgtccccaagtcagttgaggggagatggtcttggg

SEQ ID NO: 2012 - DNA, 538 bp, Homo sapiens
ctgaggccatcttaaagtaaacctcagccaatcaaccgccagatccttgatcagcgcaatcacctagatgatccacaaaactgagtacagatgcacaagtgagcttagctgagctgcaggctagtgagcagtaataaatccttaccattttaagtcagtgagttttgaggtggtttctcatacaatagctaatacagggattcggtttttttccattttttacagaaaaagttagagtcttcaagtttgcaccaagagtaagcagaggggctaatatcccactgatacactgactccaaaatatatttttttatagtatgcactactgttttccaaaatctagtgtgttattttgtttctgtaggcatactaaataacctccctaaactcaacttataaaattattagatgcaattacaagtgaatattctgaataagtactgatatgttttcataatcagcccaaaagcatcctcatcatatactacttttctaagatggaatcaaatatgctacatagtaaaaattattaagtatt

SEQ ID NO: 2013 - DNA, 261 bp, Homo sapiens
tgagcaccagtatgtcactcgaaggaaatcctcactggagtatttcggatttcggattttttggattagggatgctcaattataagtataatgcaaataggcaaaacaaacaaatccaaactctgaaatatttctggtccctggcattttaaataagggatattcaatccgtatagatattctacatagtcaaactttaatggacttactcagttgcagttaaaataggtagatctcattttaataaatatagcaatgttc

SEQ ID NO: 2014 - DNA, 467 bp, Homo sapiens
tatccttgacaaaatcaagaaaaacacaaaaactgaaaatgtgttgccttataataccctctgcagaatcacactctggtcttctgtctgtaagcctgaaaccttagggtgttactagagagccaacaagactcaggttgttgtattatgtatactatatataatcacttcagctcagtaccaacaggttagcactgacctgagattttaatggttattgtactcaaactgacaattccacaaagccctcatgtcctgaaaagttatttatttttgtagactcagggacttaacttccttttccagtttgctatcacgagatgtagttaaatgtcatggccacattatcatccctttattcaaatagcctagcttgtattcagttaaagtatataccaagggctgggcatggtggctcacgcctataatctcaatactttggaagactgaggcaggcagatcacttg

SEQ ID NO: 2015 - DNA, 563 bp, Homo sapiens
tgtattgtcctgataaaatgtcctgaattctaataagtaaatgcttaagtcagtctttgctctggagaaacaaccctggtcccagcagtgtgctaaggccaacttgtaataagcttgcaaaattgattttaaaattttcaaataattttaaacttcccacttttttgacatcatgttgataacttgaaattggttatagtgggactatttacactatggaaatcagcagcctccactaattaggcccctcaaccactaggaaccagctgtgaaacactgaccaggacaccactgcctggctcacctattttctcagttaggattgcatactttgcatgttatttatcattagtaatctctatagagaatttaaataaaggaaaattgaacagtttgttcttaaaattttacttttgtaaacgtacttaaactattcacatccaattggaaattgagtctccaaagtatgtgtgcgtggtagttttcatttggtgttaaagaaattttgaagataatgaaaatgccactggagtggaagtcaaggaacttggatttgtcactga

SEQ ID NO: 2016 - DNA, 638 bp, Homo sapiens
caagaatatagaaccagaaataccatttgacccagcaatctcattacagggtatatacccaaaagattataaatcattctactataatgatacacacatacatatgtttattgcaacactattcacaatagcaaagacttggaaccaacccaaatgcccatcaataatagactggataaagaaaatatggcacatatacaccatggaatactatgcagccataaaaaagaatgagttcatgtcctttgcagggacatggatgaagttagaaaccatcatcctcagcaaactaacacgggaacagaaaaccaaactctcatgttctcactcataagtgggagttgaacaatgagaatacatggacacagggagggaaacaccacacaccggggcctgttttgttattttctaaatttaagagcatctactggccaaagaaaacttcagcacggtttgccaattagcagccacacaaagaggggatgaagtccatgaactttgtcaaaagtcaaacctggacaatcagtcttactatttttttttcttctgagaaataagtggataatttccgattaacacatgcatcaactatgaaaacaataaatggttgacagtgctcacaaagcttgccctatctc

SEQ ID NO: 2017 - DNA, 583 bp, Homo sapiens
aaatatagaaagactatcaaatatcttgacaaaaatagagaggatgtttttcttatataaagctcatgaccaagtcttcagcaccaaatttgtatgtaaattctttgaattttttggaagaaaaatattgactagccttttatttgatttgatctttcagaacattacccactgagtaaatccatattccactctaagttttaataaaatctgtgacggagatgggtatttctgtcaatactcatttctggggatatgtgtgtgtgtgtgtgtgtgtgtgtgtgtgtgtgtgttgtatgtttcatgcctttatacaggttgagtatctcttgtgtgaaatgcttaagaccaaaagtgtttcagatttcagatttttaaaatatttttgaatatttgcactattcttactgtgtgaagatccctcatctaaaaatagaaaactcaaggtgccatggctcatgcctgtaatcccaatattttgagaggctgaggcaggtggatcacttgaggtcaggagttcaataccagcctggccaacatgatgaaaacttgtttctactaaaaatacaaacattatctggac

SEQ ID NO: 2018 - DNA, 601 bp, Homo sapiens
tatttgggaaatcacaattagctttcagatacttcaaaactcaattatagtaaataataagaatgagattgaaatgagatatttcagatcctaaatggtttcaaatgcctttttattattttattttatttttcaaagaaaatgtgaacttaacttctaggtcactgattctaaatcttctatgacacttatttcactcatcattttatcatccaaccatgaacaaataaaagcctgctttttttttcaaaaggaaattgatattttctgactttattttatttttaattgttgctaggctacagaggcattaaatattgcagtcatattatagaaagtacaatgaattgttatggttttggtagacaaataattcttaattttcaatttaattgcaacagtaactataacatacaagaattaaaagtacagtggtatccttgagggatattttgcttaggactaaaatatacaaccagaaataaaaattgtgttagtaatataaaaattcaataatatgactgggttattactaggtttgatgagaagtaggatatcaaaggcatttgctgggaggcatgagcagagaaaacgggactta

SEQ ID NO: 2019 - DNA, 570 bp, Homo sapiens
tatatgtacttataacctgcctttatagaatttgcagtcatatggatgacagctaaatattataaccattttaaatgttgaaactattttgcaatttataacatccatgtccctcacgccagaatttgctcaaattaacagggagaaaagttgcattaagaataggaaaacatgtatgtccctaatactgttcccaagaacttctcagacaaaattccaacattaggaactaaagagatgtggcagtgctgcttttaaaagaaaaaggcaggaaacaattcaaatatccattaatagagaatggttaagtaaattgtggtacaaccaaacaatgaaatactatgtagctataaaaaataagaataaagaagctgtttatgtactgacaaaatgattgccaagatacaaattaaaaagcaagatgtggtacaatgcatataaagtatattgccatttgtgtaaaaacagagggacaaagagtatgtgtgtattcgcttgtgcatacatgaaatattaccaggatacacaagacacagatattactaactacctctagaatggggaactttt

SEQ ID NO: 2020 - DNA, 531 bp, Homo sapiens
tctgtggccactaaaaggataaaaagaaatatgaaaaactatatgcattattgcaactacctacatgaaatggattaattccttgaaaaccgcacactaccaagattcaactatatgaactgaattatctgaatagccttataattactaaagaaattcaatctataattagggaatggggtattaggttaacatattttcagaactaaaaggagacatgagaagaaatcaaagctagacactgccatttaatcaagacttttctaccaatcgttttattgctatacaaaattagtagaaaaataacagaccatagaaatctatgtttttacattgtgtgtatcataattttacttatttaaaaattattcttgaagagcagatttaatcatgaatatactaaggaccaaagcaatttaacatgagtttgtgagataaaatatggaatgtctagtttgatgtaaatttcggagaaacaatgaataatatttttagaatgaatatattccatgagacatttgtaacacatac

SEQ ID NO: 2021 - DNA, 533 bp, Homo sapiens
tggtgaccaccagacctttccattttaaagatgccattttttcttttcattgtataacaatctgtggggtcatattatgtctccctgagaaagttctgttccaacaatcattccctattttaagttttagcattcattaattatccttgcctaaaataattattttattgggaattgtaaaatagtgatttttctaattctgttcattttctcaatttgttacttgacattattctatgaaaaagagcttttctttcattaactagagctcaattacagtttctccataaaggcagaatatatgtttaatctgttccctttaatgaccaatttgtggttatctcctctgtaggcaaaggagaaatatagcatttccattatttataaatatgtatgtatgtgtgtatatatatatgtgtgtgtatataaatatgcatgtatacacatactttatatatgtatataaaatggaaatgctatatttgaaaactacagtattagaaatgaagaattcattagatgggcttaacagc

SEQ ID NO: 2022 - DNA, 618 bp, Homo sapiens
aaaactggacttcctaacacaggcctatgtgccacatcaccaaaggcttccaatgcaggggtccagatggcccactcttcaccatgacgaagcccgaggccatggaagacatcatcaaaccactgcccacgtgtgcccatcaggtctcactccagatgcctcgcacctaaaagcagggatgccactgtgctctggccagagttgatgctgggggagaagagctagtaccagcctaaggagggaggccaaggttctcaggagtgcagtgctctgaggagggctgggtgccaggcaccacctctgcttgtaccttattacctgctttctcacctgcaataagagtggcccatacaccctaaaaggttttcatttcggccgggcgcggtggctcacgccgatcacgaggtcaggagatcgagaccatcctgactaacacagtgaaactacgtctctactaaaaatataaaaaattagccaggcgtgttggcagacgcctgtagtcccagctacttgggaggctgaggcaggagaatggcgtgaacccgggaggcagagcttgcagtgagcaagatcgtgccactgcactccagcctgggcaacatagtgagactctgtctc

SEQ ID NO: 2023 - DNA, 405 bp, Homo sapiens
ctatgcagcctgaagattttgccgtgtattttgcaaattagtgcaaaagcagaagagtttagactgcgactacacagagacccattgtcctggctaaaacccaggggcttgagtcaggagcagtggctcacgcctgtaatcccagaactttgggaggctgtggtgggcagattgcttgagctcaagagttcgagcccagcctgggcaacattgagaaaccctctctttacaaaaaatataaaaagttagccgggtgtggtggcacgcacctgtagctccagctactcaagagggtgagacagaaggatcacttgagacttgagcccaggaggtcaaggctacagtgagctgtgatcgcatcactgcactctagcctgagcaatagagtgagaccctgtccaaaaa

SEQ ID NO: 2024 - DNA, 160 bp, Homo sapiens
gagaatgcatttgctgaaagaaagtcaccatgtctttggttgccatccaccaattgtttatctgtacttgcagccctgtcagattcatagatgagtggttaaagggtccatacctgagatccaccaagccataagagaatgttgattttgttgggaaact

SEQ ID NO: 2025 - DNA, 308 bp, Homo sapiens
aggaggcatctggactaaaagaatcaaccacaaatgtttagctgtcatctctagtataattcctggttccatactcaaactcaacatggaaataaaacaaccataaaggattagaatgcttaatagaagatacttttgatgtctgttgtttgtaaaatgtaaaactattagccaactacactagcctctccctcaacaacttctatacagttagctggtccaattgtcttcaactatttaccaactgcaaactgccacatctaccttctgtcttggctgagctcctaagcacataggaaaaaaaaaaa

SEQ ID NO: 2026 - DNA, 623 bp, Homo sapiens
tggaattttattctgttgtgtttattttatgtggtatcatatatttctacataaaattttatcaagcttactttagtggtttagttttattttgatactctaacttatatacatgttattggaagagaaatagttcttactaacctgagtgtattggaacattaaggaatctgcatctatattaaggcagctatttgaatattaacttgaatacctagaaagcatctgaccaggatcatttatctgtgcataccaggtgatgagtgaatataattctatatgaataaccatatagcttttttcttttgccggcttaggcttccatactttcctctgtacaaatttgtagataaggtctctatttttattttcattagaagctggcaaaatttgtttctatatttccaaatgcatttactatgtctagtagaaaagtgcatatctttgtctatatctacatgtgtgtgtataatatatatgtaattgtcaacacacatatagatgagtttgagtgtcatgagcctaatgacattcatttgtaagaaaagaactctggctattaaaattgcacagatattaaagctctgctttttcttttgtttaaaaataatacacaatgcata

SEQ ID NO: 2027 - DNA, 597 bp, Homo sapiens
tttatgcaaactgaaaattacttgcccgccaaaataaccatttatgaagatttaagaaaatgtagaaaatgttatgactgtttataggttaaaattagttgcatctaccttgaatccatatatatatttttagcttattgttgctttttaaaaatctatgacatagcaactatatttaaaatagtttatactataatgggcatatttattatggttatagttaataaccatatataatgagatagacttaaatcatgtgttggaaacttaagttattccagttatactgtcataataaacatttatttttcctccatgtcttctatatatcattcatctgtttctgttttctgggctaggcttagaatgagagccaacaaaacctgggactcagtctgtcttctcaataaaattattggtaccactggtggtcatacgtgtcttcattggttcttgatatactcttctttggcaatgattatactttagttttggggcatatgtgactaactagcggcatttaataacaaaaagataacatctcataatgttacattacaatcagtccttccactaatttaaattcagattcatttc

SEQ ID NO: 2028 - DNA, 486 bp, Homo sapiens
aattaaactggtcgtaatgtatgcatttatattgtctatgtctccctcctatctactcagacttaactgggagaaaccacagcacatagtgcagtagcagagaattctgactgtccccaccatgtgcactgtgctcaaaaaagcaacagcagtttgcgcaggaaaactgttgggtccaatatggcaggacaaaaagttagtgaagtggagatatgaagaatcttctaaacccatgaaaaatcaggggtagaaagaagttttgcagaagtctagaatttctctttgggatggtaagagcaagagcaagaatgatttaaaattgtacatttatatcatctaatctttatgtatgctttcattatcattttttgcccacaagaactctgaattttgatagtgtccattggactttaaaatcatctacctctttgcttggctgtgattaatttcctcttctttactcctatagaagaaagttgacattag

SEQ ID NO: 2029 - DNA, 613 bp, Homo sapiens
acatctgtgaagagtccatctttagacatcctcagcaggaaaatcacctgctgaaatggatctggctgaaatttttctgccctgggcaaaggaggtctcaagcgttcttattattatagaataatctgacctatttagagaggtgtgggcaccaaaggggattaagtctaaaagactccaatcaagaggacattatttctccactccattcaatttaacaaatattgatggcactttgactttgtaccaggcactgtgcacgtcttgttgaagatggaaatatgtatgaaatatggtctctgcccttaagaaatttacaattaagaaacaatgtaattggctgggcacggtggctcatgcctgtaatacctgcactttgggaggctgaggcaggcggatcacctgaggtcaagagttcaagacgagcctggccaacatggcaaaaccctgtctctactaaaaatacaaaaattagcagggcatggtggcaggcacctgtaatcccagctacttgggaggctgaggcaggagaatagcttgaacctgggaggcggaggatgtagtgagccgagatcgcgtcactgcactccagcctgacagaatgagactccgt

SEQ ID NO: 2030 - DNA, 149 bp, Homo sapiens
ggatggcccctcctcaacaagaaggatgtgaagataggaagtaagataatatgttgtgtgttcattcagtgccacatttgttacatggtggctgtttagtcaaccccagcattatttccctttcagctttgtcccagcatattattcat

SEQ ID NO: 2031 - DNA, 637 bp, Homo sapiens
actttggaggagcctctaatcgttcatgaggactccagattatctcttttacaccttattatgggaaaacacagtattcttgttggcttcccattttaaatattatatagccgagagagagactgccaaagtcaggaagaaagccatgttgagattttagatcatttattaataaaagttgacagtggccagctcttcttttcctgctctaaagaccctaataaaggcagtgctgggcataggctcagatgctggaaggatgtgggagaagaggaagacaatctgatgagcttacctttattcctgtcacctggttctggcttcgtgagtatctccaaccccaacttgcttgcctctccccatctcaactcttctcattcccatgcctgtctccagagtgggcatgtagtgctcctatgtgtggctccatgagtcctctggcaaagcttccttaccaatcatcattcccatgaaggtatattcatactaacagctgatggtgttggatatttaaggcagacttgcatcccaatagcagtaaaaacctgaaatacagagtgggttattctggccagggagcttctaggtaaccagttggtcaaattttattttaaaggaattatgtcttttaagagct

SEQ ID NO: 2032 - DNA, 645 bp, Homo sapiens
ggcctaaaaaaagttatttaaaaaacgcaaatctagtgttgaaagtgtctgtcaaatggtttgatatttgtgagtaaaaggtcctccttttggcattttctagttattctggggctgcctgctttcaccgttggtctttattgttggtccaaacttgctgttctttaaatagatggttctcaaacatattagctttttgacctgtaagaacagataaattttcccattacaaattattccttttacagtcataacaatttttttgttgtgtttctcatctgttgcttctatatcaatcactttattttaccttttgggagaatgcatttgctgaaagaaagtcaccatgtctttggttgccatccaccaattgtttatctgtacttgcagccctgtcagattcatagatgagtggttaaagggtccatacctgagatccaccaagccataagagaatgttgattttgttgggaaactcaacaattctcggagaggcactgttgataatttctggaaaacaattggtgactacagctttccaggcacccaaaatttcctgatggcatactcactgttttcagattcaccacagaagtaaaaccctacagtcagtaaaaccagtccttttgataggtcacacaacat

SEQ ID NO: 2033 - DNA, 600 bp, Homo sapiens
gggggccttcactccctggaggtccaaccgcagccatccttgtccccacaacttctgcagtgtcccagggcttgcctcactctaactcagcccactcacacttatcacgtgacttcatcctaaacaacaataaccttgaaatctggaatctgtcttggtcatgttcttacaaactcatgctgaaataaatgacagcagcccaggctggctgcagaggctcacacctgtaatcccagcactttgagaggccaaggcaggaggagttcaagaacaccctaggcgagatcccatctctacaaaaataaaaaattagctggggccgggcgcagtggctcaggcctgtaatcccaagcactttgggaggccaaggcgggcggatcatgaggtcaggagatcgagaccatcctggctaacacagtgaaaccccgtctctattaaaaatacaaaaaaattagccgggcgtggtggcgggcgcctgtagtcccagctactcgagaggctgaggcaagagaatggcgtgaacccaggaggcggagcttgcagtgagccgacatcatgccactgaactccagcctgggcaacagagtgagactccgtctc

SEQ ID NO: 2034 - DNA, 587 bp, Homo sapiens
tcctatccctggcttatgtaagagccaactagaccacagagcatataaaatcaagtgctgcttcacaaatgaaataaagtgttccttgattcattactaatgcgactatccacatacatggaaaaccacaactcagatattccccttttatttttctctagaaacatgaataaattgcttttggcacacttaattggtgtttgggacatacttttcacaattgaagtccttagtaaattactcaggagagagactctcctctttcagtacgttatttaatacttaggcttgttagtgtgtgtcatttacacataaatattttgttgtgtgaatgatgatgcctagatcctctcatctgaggcctggctaatagctagtatgcttcttgttaagactggttcagtcaaaaataagtgttaattatttttacgtgtgacaatggtattatgcctatcaaaataccaatgacattcttcacagaaatagaaaaacaatctcaaaacttgtatgaaaccacaaaaggttccaaataaccaaagcaattttgagtaaaaagaataaagctggaggtatcatactacctcact

SEQ ID NO: 2035 - DNA, 615 bp, Homo sapiens
gtcatacagggctgggtgtgcgttaggcacagtaaaggggagatctaagcaaatgatatgaacggtcaggtcaagaattggccacacaattgaacgaagtacatttttagcatgttggtagatatcccattgaaaatgcttggcatggaagcatgggaattgaggaaactggttagagatccccctacggagtgaagttggaggataatttacagctgcatcagagcaacatatctatgattttatgagttttggtttctatcttaatgatctgcatgcatttgacatggttgtcatggaatgtcagatgtttcacaatgtatgtggatgatttcatgttttttgacaatttatagcagttaaataaaactgccctaaaaagttttgtccctctgggaatttggggagcacatgctgtgttcctcttcctgtccctccttaccctggcagtctacctgattattttcttctgcctcttctcccctttttataaaatattttaataaaatatttggataagcaacacaaactcatctaaatttccagttgttttaatacctcagtaacctgtaggaaaatagtgcctgtgagtctaattgaatttttcatctagct

SEQ ID NO: 2036 - DNA, 507 bp, Homo sapiens
tatggtcagattctggcgggggtcccttttctgatttgcaaatggccttctttttgttgtattctcacacagtggggaacagagagaggggggaagctctcctgtttcttcttgtgacagcactaatcccattcataaggcctccatcctcgtgatgtactcaccttccaaaggccccacctcctaattccatcacattgtgggtgatttccacatatttcaacatacaagtttaagagaaacacaaacattcagtccataacataatctgtctgtggctatactgctctaaataataagtaaacaatgtagctagtttaacttgtcccaaaactggttattccattggatgagtttgtttggaccccttatgtgggaagtggacaagggttaagtttgcaattatgatcttaacatcatcttccttcttttaacttctgttaagattaagtatgaaaatacattcaaaaccaggatatctacactgaatagcattttttatgtagt

SEQ ID NO: 2037 - DNA, 524 bp, Homo sapiens
catgagagctctatcatgactgacaattagtcaataatcaagagtttatatgttctttaagcccttttatggtctagctggatgtagagttttacctgagagtacaaagttgggtgattatgttggagaggttaaggagagcaggcatggagaagtgaatgaagatggaaagtgccctactaatgtctatgggccaaaatgggaaatttgggattggagacaatggtttccataaagatcccattacagtaaagcgaaggatggagtcttagtagaatcttcagtttcaagttaactttctgtttccatcaattccaaattaatgctacgtgactattctggtaatagctctctttaattatctgctgttgtcttaattctattcagattttaaaaattagtgcatagtatgaaatatctgagactattcttagcttctttctatagttgcaggcaaataaatgctacatgttgggaaatgttggaatggaactccgcctgggaattattatagattatgagta

SEQ ID NO: 2038 - DNA, 593 bp, Homo sapiens
ttgtccagttcctttgctgggaagagacctactccaaaaactccaagtacagattgcttttgggccacaaggaagtatgactttgagcctaactgagctgaaggccatgatgttaacccttactgtcccacagactgaggactggagactatatgcaaaaaagactccagaaccaggagtaaatgaaatgtatcggttacttactaaaattcctggagtataggctgaagataactcaccagggctggctgtaaatcaggcactggtagtagtagggtcagaaccaggaggcccccttcattgctgtggagatatagtagataaggtgttctcaagccagagagattttacagaccaacccctcagggccccagatgttgaatactttacagatagaagcagttttgtactggaagggatctgacaagccgggtatgcagtagtaacattaaactcagcagcagaggtacagtctctgcccaccggaacatcagcccaaaaggcagaactaatagccctgacaagagcccttttgctagcaaaagacaaaaaaagtcaatgtctggccagtcacggtggctcacgcctgtaat

SEQ ID NO: 2039 - DNA, 387 bp, Homo sapiens
catctaagagaaggttcctataggaaattggccctttaactcatacacagattaccctcggcactttcagaaaacaacacagtgaccagtatattctgtctttttgatacagccagaagcaccctgaaagctgagacctaactgtgcttttggaaaataagcgtttaggagttgaatgaccttgtctacttcttttagtcagaataatgttggcatgtctattttaggttaaaaaaaaatacaaattctaaaaagtgactttaaaggcccactttgaaagccttagcatttaaactaacattagatttaaaagaagggcttttctcccccattataggaagctgtgtaaaatcatgtgtgaggttgtgagggtcaaatggaagtcta

SEQ ID NO: 2040 - DNA, 415 bp, Homo sapiens
ataccgctgctatacgactacctgcaattaaagcctgataaataccatggggggtttttttacttgaacacttacagtgcattttcctttaggaattgggcatcccctgctagctagtgtttcaacctaactatcaaagcttattgaattcaaaatgtagctgatctataaattacaaaaactctattctacagtcctacaagagagtctacagaaaacaatgccttcttaatcctaaatttgaaagttaagcctgggtacagtggttcacacctgtaatctcagcactttgggaggttgagacaggcagatcatgaggtcaggagatccagaccatcctgtccaacatggtgaaaccctgtctctactaaaaatacaaacattagctgggcatggtggcacgtgcctgtaaacc

SEQ ID NO: 2041 - DNA, 621 bp, Homo sapiens
acaacaaaacaaaaccaggtgtagtgtggctctaaaggaacatctgaccaggttcctggggaaccagggccatgggaggaagaagggactcttctcccatgagaagggcctggagatgcagggactgtcaagtcactttggccaactttttttgctcccctagaatgaactctgcactaaaagtggagaatcacttctatgagagaaagacataaaaagaaaagatataaggtaatgttacagtaagttgggcaaatctatcaaaatttaaaaacatgtatactctttgagtaattctattttttcagaattcattctgccattatagctatatatatataaggatagtattcacctgtatttgcctgtaatcccagcactctgggaggccgaggagggtggatcacttgaatccaggagtttgcgaccaacctgggcaacatagtgaaacttcatctccacaaaaaatacaaaaaactagctgggcgtgatgacatgcacctgtagtcccagctactcaggaggctgaggtgggaggatcgcttgagcctggaaggcagaggcagaggttgcagtgagccgtgattgcaccactgcactccagcctgggtgacagaatga

SEQ ID NO: 2042 - DNA, 630 bp, Homo sapiens
ctatttccaaaataggtttcattcataaacttccctccatccacactactcttagtcaaactgtcaatatttcctgcattctagaagatcatcttgactatatccctggcacctctattcttttgtgaatgcacattggctcacggtggtcccctagagcccaaatacatgcaatggttttccattgtaattaggacaaaacacaaagtaagtcctcacgattgcctaaaatttctgcatgaactagtcccaaagagccctacaattccatttcctaccgctgatggctactacccagccatgctggcttgctttcttttgtatgaatatgccaagctctttcatttctcaggggcttggcacttgctattctttctgccctagggccctatctccaatctttgcaagaccttaattgtgattcagatcccacttgcaatggactgcatgactgtaccccctacccccaaatccatatgttgaaatcctaaccccaagtgtgatgattttaggaagtggggcctttggaaggtaatttaggtcataagagaagtcctcatgaatgggatgagtgcccttatgaaagagaccccagcctgggtgcggtggctcatgtttataatctcagca

SEQ ID NO: 2043 - DNA, 549 bp, Homo sapiens
tcttctgacctcgtgatccacccacctcggcctcccaaagtgctgggattacaggcgtgagccactgtgcccagcctaggcttcatttttgacccctccatacccattcacacaaatgtggttccattattttgatggatcaatttgttccgccaggacaactgtaatatgtctggcagtgctttcactttgatcatctaattagatttgctcctctcacccaccctgagagataggtaaggacatggattctccctaaattaactggctggcaacaagataattagtcacaatgtttgaactggcttattaccgcctgctcaggcattcacaatggaggcaattttcttaagtacatgttcaaggcaaacaagggtcacctggtatggatgtagctgttgagcgttagctgagcctcatcttgaagggctgcaatggcggcagcattccggaaacttctcagttcagaaccactatgtgtaggaactagaaatgaagaccaggaaactgtgatagacagcatagaaattgcatctgggagccgagcgc

SEQ ID NO: 2044 - DNA, 607 bp, Homo sapiens
tttatagattaaaatatacaggcgcatctacttcatttccagtagggccacttccaccatcagcaaaaatatttttactgaccaggtttttatataaatctaagtttgtgctttggaagataatgtaagaacgtaaagtagaatagatatttaccagtatttcttgaaatcatttaagtagaaacttgcatggaaaaatggcctaatggattacaagaaaatgaccacaaagctctgtttctgaaaatctgaaattctccacagagatttctcatctaacaattcatctgttaaccttcatgtttttaatccatttaaatctgcttgagactctagtgctgaatttacataagccaaaaatactctgaactgcttacgattttagttttatgtgagaatttttatatataaattagagtttccctatgagtttttgacaaattgaaaatagttctatgattaatcaaattttggaacataacctatttcaatcctttgattatccatctttcaaagcaacggccacatttagccagttgcctgttttgctctttccttccctcttttggtgacaggaaaagcaaaaacaacattctaaaaagttagt

SEQ ID NO: 2045 - DNA, 473 bp, Homo sapiens
ttatcatggtgcttggcatattgtaaatactcaataattatttttttctaaaaaggttgaatgaatttctactgcaggttttgggcttttaagattttctgaattcagtttcttaaccaagctaactctagataatagttccagtcaagtacactaccttcactaattttctcccagcaatttaaaaactgccaagcagatgaagtttgaagtaagttttgtaattttcaagaattatacaggccaggtgtggtggctcacccctgtaatcccagcactttggaaggccgaggtgggcggatcacaaggtcaagagatcgagaccatcctggccaacatgttgaaaccccgtctctaataaaaatacaaaaatgagctgggtgtggtggcgtgcacctgtagtcccagctactatggaggctgaggcaggagaattgcttgaatccgggaggcggagattgcagtgagctgag

SEQ ID NO: 2046 - DNA, 491 bp, Homo sapiens
aatgatttaactccctctatccctgtttacctgttattattctttaaggctcagtttaaatatcatcacttctgggtaatctttgtgctgttttctccttctcccaagtctaacttaggtctctcctgtgtgcttccattttactgtgtgcacatccatcatatgacatatatatatttctttgacatgaacacaaagttttaaaagacatagacattgttccattttatattctttgcatttggctcaacacctatgcatagtatacctcaataaaatttgataaatgattgacttatttctcctgagattgatttgtcaagatcacacagattaattattgaaatgagccatacgtttttggtatattgttaccctctccccagtttccctcaaaacagcttgagacactaaaggactgacttagagtctgatctatttcgctttttcaacctgtgatatgtgtgtgtgtgtgtgtgtgtagggggatg

SEQ ID NO: 2047 - DNA, 589 bp, Homo sapiens
agcctgttcactataacctttgtttcgagaggagtttcactcttgttgcccaggctggagtgtaatagcgtgatctcagctcattgcaacctctgcctcctggttcaagctgttctccctgcctcagcctcccaagtagctgggattacagttgtccaccaccatgcccagctaatttctgtatttttagtagagatggggtttcaccatattggtcaggctggtctcttaactcctgacctcaaatgatccactgcacccagctcattgtaacttattaatgtggctactaggaagttttaagttgcatatgtggttctcattatatttctattagcactgctttggaatattattttgaataacatccaaatttcagtattagccaaatgattatcaaccaatattgttcagtctggacttagttctatttgattaaatcaactaagtaccctctggtttgttaataatttctagagtgattatgaaacaaaataaagctctgaactagaagttgtagaagaagacaaggagggcactgccaaaatcataaaatacaatcctctttctttaaaaagcttacaatcga

SEQ ID NO: 2048 - DNA, 409 bp, Homo sapiens
atgtcctctccacatgaagaatcaatctgaattcttcaccactgatgttttccatctctaacttgaagttacaaactaactttagcaggaatacttatggcttacttcggagcatctgttacaaggcaagaactatcatgtatgtttgctacatttatttttattttttatttttttttgagctggactctcgctctgtcgtccaggctggagtgcagtggcgcgacctcgcctcactgcaagctccgcctcctgggttcacgccattctcttgcctcagcctccccagtagctgggactacaggcgtccgccaccacgccctgcaaagtttttgtattttttagcagagacggggtttcaccgtgttagccaggatggtctcgatctcctgacctcatgatccgccgg

SEQ ID NO: 2049 - DNA, 545 bp, Homo sapiens
tcaggttcacagaactgcagcatttcctctgaggttctgttgtttttatcaataaaaagctaagggcattacactgcattaaaatgtcaaatagcaaggatatttcctcaggttttcacggacaaacatattctataaagttagtttgatgtcttaactgttgcacctatctgaaaggatacttgagacaaaacaaaaatttttttttttgcctgtcacatctgatgttatagacaactttgaatgcaatcttagtgtatgggatgacaatatttaatattgctcgtttgatttaaatgatttgcgagtaaaattcttcaaaattaagagaaaaaaatcagccaacaccaacattttggtgctttgtctttgtcaatattctcatcaaattctttaacttcactgtattattctcttgagaagaatctatggtcagactagttttcaaatatggttctacttctcatttttgaacttgggactttagctaccacctctgacactcagtgttcttacacattaaatgagatttatactagtaagac

SEQ ID NO: 2050 - DNA, 509 bp, Homo sapiens
ggagtttgagtcataagctgaatcacatttcagcagattgggccatcaacacagcccagtggccctggacacacactatgccagagttatgcagaaaaaggaaatgttcaacatgttgcaaatggaagaaactagaggaaacgatgttctccattccacccaatactacctcccttagtactatttgtgggaataatggatgtggcactgtcagagccagatggatgcgtccctaaaggacgtgcaagcttggctgtgggtccgcaaatccctcactgttgagaactacccagggcatacgttgctttgaggaatcactgcaaatggaatgttatggactattacgataatcaattaataatcaattagtttagtaatcttctcttgtagaaaacctgcttaaacaatgatgaatcatgcaaactcactcagggctgaaagatgatagagtggaggaaaaagtagctttgcggtttacacacacacacacacacacacacacacacaaa

SEQ ID NO: 2051 - DNA, 574 bp, Homo sapiens
cttaaggtttgagatatgaattttctccagcagtcctcagcaaccagcaggtaggagtaaataactgaatgattccaggatggaaggtggagccccagtaatgaggaggtcctagatgtgagcctcacgcttaaatagaatgacacagtcaagtaactgagctatatgtattatctgacaaaacatttatagcttattttgtacaatttttatgtgatgaaaagttaatttgagagaaaagacctaattagctggaattagtgtaatacagaaactcttttcaactcccaaaatgatgggcaatatcactaaatggtttagtggttttatcaatgaataatttttcattatcagtgagacctggaaacaaattggcaaagcctctccttaaatgacaatttgataatctttgtcaagatataaaatgtgcatattattagggaggatgaggcaggcagatcacaaggtcaggagtttgagaccagcctggccaacatagtgaaaccccgtctctactaaaaatacaaaaaattagccaggcgtggcggcgggtgcctgtaagcccagctactcg

SEQ ID NO: 2052 - DNA, 509 bp, Homo sapiens
aaaacagactcttaaaaaataataatgcaaaaactcctatatttgaaaccatagtttaaaattataaagaaaataagagtctcaaatgatttacaagtgggttctaccaaattttcatggaatagaccattgtaatctactagaaactcctctggacaattgaaaaatagactatatctcaaacctttaaaataataatacaacacgtacacaaaaacaattataggctttccttatgaatgtctctctctctctctcatatcatgtaaaacagatcacatacgaccagataggtttatcccagcaatggaactatgtaaggatgggtcaatattaggataggttaacatttcatatataaatgccattcttcattgatcatctcaatagaaagagaaaaagaataaaagtctatacaaaaaatttgataaaatgtagcacaaattcttgataaaaattattagtagctaggtgcagtggttcacgcctgtaatcccagcactttggga

SEQ ID NO: 2053 - DNA, 587 bp, Homo sapiens
aaaataacattacttataatattgtcaacagaaaaagaaattactttgagcagatgccagtatttcttctcaatgagatttcaaagaataagaaagctaaacacagtattatcaagaattaaatgtgagcattctgcctactttctgcaagtggcctacattcaacctttggaggtatgcttatacgtttaacgactaaagtaacataacataatacttaacagtgccactcaggggttttagctgtgaaaaagcagtggatcctaagaacagtgggcactgaagttgcctgtctctatgtcaggttacagctcaagctttgtatatgctgcagacgcccaagctgaatttaagagaatccgctctaaaacattacttgctatttagacacatgcttaaagttatttccttttaaaccttaggcagattgtgaaatattcccgatgtattgtctcacaatgcataacaaagcttttcacatattttcagatatttgggaatgtttccatatgtctggcatgcctgtaatccagcactttgagaggtggaagcaggagaatcacttaagcccaggagttcaaaatcag

SEQ ID NO: 2054 - DNA, 594 bp, Homo sapiens
tctgtatgtgtgtgtgttgtgtgtgtgtgtgttcgatgaaaaggatgtgcacatttaaacatgtttgcattgactgaattttaaaaaattcataataaaagagtcaattccaatgcctgtcaatgcataatagttctcactttagagtccttgatatttctcttcctgattagtgtcaccacatcattcctttaaacattttgataaaagagatatcaattaatggtgccctggtaaactgtaatcagaatagattcccaagatgaagttggttcttttacttggtcacaagaagcatttttctttctatttggttgtacctgtccctttaacaaccagctatttaggcgatcaatgtcagaaaactagaacaaatagaaacacattttccagtagagagacattcagttgactccattttggttttctttctcggtttaacttttgatttacccaagaaagaccaggaaatcagtgattgcctagagtgaaaactgctagaagaagagattatatacaaagaaggataaggaatattttggatatgatgaaaatagtctgccctggttgtggtggtggtttcataggcatata

SEQ ID NO: 2055 - DNA, 311 bp, Homo sapiens
gggtgaggctgttctgtttcaaacttgacactcaaaaactaacttctgtgttttctattttaaggcttactacaggtagactacttcagccatcaattaaaataagcttttcttaaaaatgagatgataattagtgacagcattagaatccctaatagtgcgtgtatgtgtgtgcatgcacgtggatgcagtatgatagtggctgcagcgacagaaaaccaaagtaatgtggcttaaccataataggcatttatttctctctcatgtaaaagcccgaaaagtggtctatatttatcagacttttttgagac

SEQ ID NO: 2056 - DNA, 521 bp, Homo sapiens
atccattctttctcttgtgcctacaatgccttctcccctttctttgcctggctaactcctacctttaagactcagctcagtcttaaagtctgcctctaccagaatatcttcctaacatcacaggcataacatttaaacatttgtgccttcttctgtaccaccatagtactttgtacatatcttttccaaagtacttatattatagttaaatgctcatttatatgtctgtttacacttacaacttaagttcctagaaggcagcagctgtgtttcaccgctcttccattcatagtgcctaattagcaagacttaaacaaatgatatttgtttttatgtgattggttgtcaactgattttatatcctgtaagtacagatgactcctgggaaatcttcagggatgatattggagttaaattaggtgttgaaaggtaataattataatgaaatttgcatactgagtacttatgtgccaggtgcccacttggtacttatcttgtataatctcatgttatacccaact

SEQ ID NO: 2057 - DNA, 655 bp, Homo sapiens
atatttaccttttaaagaatattgtgagcaaatatatatctagcataaacagctgtgttactacacacacacagcaaatgtcacaatactgttttagagttgcattccagagagaaatatttcaaggacaccatggcagttgacgcaggtgaaaaaggaatggtggctactacgtgaagagaatttttaaatccaaatatgcgcacaatgttcaaataccatagcagcacagagcagctgctcagggaagtcttggagggttcttactttaagtttattcggcccttccttttctatctttctaaggtgttggtttaaaacttctgactttagacctttcttattttctaatgtaagcattgagatctctttagtttctcttgataatagtttctgtatacaatttttgctaatattttatttgattttctcttaggcagttggaacattttttaatgttactctaaatattatctttcaacatcatattttgaacgtttaaacggaatgagctggagaaacagctttcaattagattacataccccagtattttgttaatactaaaattctagaaagaatcttctaacaaatattcataagtgatgatgaaatttaaagaaaacaaaatacttcccccccaaaaaaaaaaaaaa

SEQ ID NO: 2058 - DNA, 519 bp, Homo sapiens
tggggtacacacacaggagtgaggtagtggagcaccggctaggcgcatttttagcgttaatcgatattgccaattcatttccccagtttacgtgcccaccagcgttgtagacaagttccagtttctccacatcctgaccaacgcttattagaataaacttttgaactgtttttgcttttagttcttccgttggtgacctccccacttgcagatcagcagatcaaatccccatgctgttgacaacacgctgggagcaaagagccaggtggagcttctaacgaagtcagatcttctgatattttaaaagctgagataaaattcacaggccataaaattaacccttggtcgggcgtggtggctacgcctgtaatcctagcacttcaggaggccaaggtgggcagatcacttgaggccaggagttcaagaccagcctggacaacatgacgaaactctatctctattaaaaatacaaaaattagccggggcgtggtggcacatgcctgtaatcccagctactca

SEQ ID NO: 2059 - DNA, 540 bp, Homo sapiens
caactcagaacaccagtagatgctgcataaatgctaattcctgtctccgactctagtctcatagcatgggggatggctatcatgtcttcctatgaaacattctatggtgtcaacaggaaaggaaaaaaaacccaagaggaaataattttgctagaatttaagtttcatggagtgtcaggaattagtctgttttgttcaccaatattctaaactgttagaacagtgcttggcacagattaggcaagataaatatgcgtagaataaataaatgaccaaattatatttttacttccattttgaccctttttgaccacctaaagtctgtcaagcaacttctacattaaaataagttttatgaattcacaaaatatagaattataaacagcctccaaatctgcctacttttttatcattgttgcttttctcaggcaagaaaaatgactcctttagaacaaactacataaaacaagctcctgaatatcaactcactgagacagaatcccaatcaatattagtttaaattacctgtctcccacacct

SEQ ID NO: 2060 - DNA, 505 bp, Homo sapiens
gtattaaaagaaattgtattgtccagtgaagttttaagaaacagaaaccataaggtgattattatttttcaagccccaaaggagaattcattagatgacatacttttaaagttcatggatcagggtcgggtgcggtggctcatgcctgtaatcccagcactttgggaggccaaggtgggcagatcacctgaggtcaggagttggagaccagcctggccaacatggtgaagctccatctctactaaaagtacaaaaaattagccaggcgtggtggcacatgcctgaaatcccggctatccgggaggccgaggttgcagtgagctgagatcgcgccactgtaccctagctcgggtgacagagtgagactctgtcttagaaaataaagtccatgggctggtcgcagtggctcacgcctgtaatcccagcactttgggaggccaaggcaggtggatcatgaggtccggaaatcgagaccaccctggctaacaggtgaaaccccaaaatt

SEQ ID NO: 2061 - DNA, 240 bp, Homo sapiens
aaatgtgttattaaattaagaaaacaagctaggaatggccactggctttgttaaaagagtatcacatctaactgatctaagcctcccttttgataaggtgaaaactgaaaaaggagcattagttaaaatctacctcaagagtaatgagcccatctttatgacatactcaggacagagggagaaaagtgatctaacttgaccacagtgaactgtctggaaaggtaattgagctgacaggat

SEQ ID NO: 2062 - DNA, 465 bp, Homo sapiens
agagggccttctccctccccagcctgcttctagtctgacccctactctccttttagactcagccccttctcctccaccctgagtccacaggccccggagcgctaagcacatggtgttatagttaactatttacttttctatcttttcctggaagacagacacgatggtagatggtaattatgcgtttaatgtctgtctcctgggacggtaaacccctgtgagtgtgggctgtgactgtcttattcaccactgtgtttttggcacggggcccagagtaataaacatgggtaacacttccacagcgctaactgtgaaccggccagaagtgtcctgagagccttacatgagtttacaactttaacccttaccaccactcagtgaggtactgtgatattatgagatatgtatttggtcttcctctgggttcctggcatacaacttctaaaatccttggaatctccaaag

SEQ ID NO: 2063 - DNA, 501 bp, Homo sapiens
taaatatcagtacaataaagaaagctagaaacataagtctaataatattggttggaagctattttaatgactatttaaatattttaaaggtgaatagtcaatgaaccaaacacttttgtaaggccactaagatgcatgtgtaatgtgtaatgcctccttttataaggagtcaatctgtaacatcacctgggctatttgacagcttcaaagtgaacgtgagaaggagagaaacagtgagagagatatatataaaaccagtaaaataaacataaagaatgaaggaaatatccaggcgccatggttcacacctgtaatcccagcactttgagaggccgaggcaggtggatcacctgaggtcaggagttcgagaaccagcctgtccaacatggtgaaacccactctctactaaatatacaaaaattagcctggcatggtggcatgcacttgtaatcccagctactcgggaggctgaggtgggagaattgcttgaacgtgggggct

SEQ ID NO: 2064 - DNA, 125 bp, Homo sapiens
atagctgccattatattctcataggcatctatgactgacccctcccaacatttgagaaccattagtcttaatctgtgctgaattctcttttgttaattctttcatgacctgaagttaaaaaaaaa

SEQ ID NO: 2065 - DNA, 597 bp, Homo sapiens
aaaacagactcttaaaaaataataatgcaaaaactcctatatttgaaaccatagtttaaaattataaagaaaataagagtctcaaatgatttacaagtgggttctaccaaattttcatggaatagaccattgtaatctactagaaactcctctggacaattgaaaaatagactatatctcaaacctttaaaataataatacaacacgtacacaaaaacaattataggctttccttatgaatgtctctctctctctctcatatcatgtaaaacagatcacatacgaccagataggtttatcccagcaatggaactatgtaaggatgggtcaatattaggataggttaacatttcatatataaatgccattcttcattgatcatctcaatagaaagagaaaaagaataaaagtctatacaaaaaatttgataaaatgtagcacaaattcttgataaaaattattagtagctaggtgcagtggttcacgcctgtaatcccagcactttgggaggctgaggtgggcagatcatgaggtcaggagatcgagaccatcctggctaacatagtgaaaccctgtctctactaaaattacaaaaca

SEQ ID NO: 2066 - DNA, 589 bp, Homo sapiens
tacttgatgtgaggatgggctggcgtcccagatgtcaaccctttaaggtcatggtcccccaggccctcctcgtttacctgaagaatccattggggtaaatccgaccctatgagttctaaaccttgtgaggaaagagctgcataaaattgctttgaaatggtcatggtggaagctcctccaaagcagctcattctggagggtgggattcctgagggcgtttgtttctacatcacatgtttctttaatgatttctccctcccttaacttcttccccccaaaaaaattacctttgtattaagagtaacaaagccagccgggcatggtggctcacgcctgtaatcccagcacttttgggaggccaaggcgggcagatcacaaggtcaggagtttgagaccagcctgaccatggtgaaaccccgtctctactaaaaatacaaaaattagccaggtgtggtggctcacgcctgtaattgcagccatatgggaggctgagtcaggagaatcacttgagcctgggaggcagaggttgcagtgagccgagatcgtgcattgcgccactgcactccagcctgcgtgacagagcgacact

SEQ ID NO: 2067 - DNA, 591 bp, Homo sapiens
accacagctagaccagtgggtgccacaatcactgtgtcaactatggaaagggcagctgagatcacatcaaagattccggaaagaattggcacaggatcattcgggatccatctgtcccttgcccctgttcctggctttccttacagctctcgacttcctcaaaggagtcatcaattcggggtttggcttccattcctattgaggaagctggaaagcgtttcaaaaatgctcctccgatgtgcctgtggttaagacctctgagctctgttgaaaacttttggaagctgggagcggtggctcacacgtgtaatcccagccctttgggaggctgaggcaggcaaatcacaaggtcaggtgttcgagaccagcctggccaacatggtgaaaccccgtctctcctaaaaagagaaaaaaatgagcctggcgtagtggcgggcgcctgtaatctcagctactcagcaggctgaggcaagagaacagctggaacctgggatgcggaggttgcagtgagccgagatcactccactgcactccagtctgggcaacagaatgagactccgtctgaaaaaaaaaaaaaaaaaaaaaaaaaaa

SEQ ID NO: 2068 - DNA, 501 bp, Homo sapiens
  misc_feature 312: n = A,T,C or G
ctgtcagcaacatattactattacaaactctgtaaacatgcttctgaacaaaatggtgtattcacaaaaaattttaattacttaagtcataaaaaatcagtctagcatcaactcttctgaaagtttggttctatattaaaacataaaaattagctgaagagacatcttgctaagcttctcagtcactgaagagcaagtcaagaagtccacaatattcttaccaatatataaacactggaaaatgttccttctaagcatgataaggatgtgaacaacagcacctctctaatgactaaaacttctgttcctcanaaaatacatcattagccaacaactttctggcagaagttgcctttaattggcatttgtacataaccaagtgttagtctgtatttacaccgtaagttaatttggacaaaattaaaagctaattgatcacatatctcaacctcagtcataaatagtgtgggcccaaatatcagtctccccatggatttatgc

SEQ ID NO: 2069 - DNA, 454 bp, Homo sapiens
gtgggggcgggtggtgtgggtgtgtgtgtgtatggttgtcactagaacaaattgtgcagctgtgtaccttggtatgtcaaggttaccatgatttataggttgtatgtccaagttcacaacaccaagagaggagggagaactgcaggaggaagtcttagcgacagggctttaagaatgtgtttcatgtttaatgcttttaacatgggtgccttgttcttgcttctagaaagcactatagaagatataaccccaatccagattgctgtctgtagctggccaaacccatgtgagggtgaaggtggggtttgtgtgtgtgaatgttgttatggttgtttatagttgttgtgttatatctgagctgtaggagagtattttacaacaagaggtatgagttctgtaatcccagcacttgggaggccgaggcaggtgcagcacttgaggtcagtagttcaag

SEQ ID NO: 2070 - DNA, 546 bp, Homo sapiens
aaatacatgtgaaaatcaagatctaaatacacatttgaactttagaagaacttaacttacatattgtaagatgaaaggtttagtttctaattaaagcaaatttggttttgtaagagtagtatgtaaaacactgccctggccctgtgcggtgactcacgcctgtaattgcaacactttaggaggccaaggtgggcagatcccttggggtcaggagttcgagacaagcctggccaacatggtgaaattctttccgtattaaaaatacaggccaggcgcggtggctcacgcctgtaatcccagcactttgggaggccaaggcgggcggatcacctgaggtccagagttcgacaccagcctgaccaacatggagaaacccgtctctactaaaaatacaaaattagccgggcatggtggtgcatgcctgtaatcccagctactccggaggctgaggcaggagaatggcttgaacctgggaggcggaggttgctgtgagccgagatcgcgccattgcactccagtctgggcaacaagagtgaaactccgtct

SEQ ID NO: 2071 - DNA, 608 bp, Homo sapiens
tatcacagtaagaaaaatgggagtctgtagtgttttgttctggaagcgacttctgcaattcttctccctagtacagaagttctactaggttgggacaggcagagcagactagtagagcaagaagactttactggaagcaaagcaagaaaaattattatatacccagaattgtcaaagattatagcagtaccaatgtcaatcaggaaagaccaactttacaattagccattacaccagttcagtcaaaaagtacaattgcagaaaagtcaaatatttagaatgtaaatgaaaggaaagagacaaagattgtcttaacattctacttatcccagccttctataaaacctgtggacacacaaagctaataaccttaagagagaccagaagggacctttgtaatctactcttccatggataaacatgtacccttttgaacaaagaaagtaatatgtgtgaaacacttctaaagtctgagtttttaataaattctccaacctagtcataattcaattggccgatgatgaaagccattgttgactaggcagtgtttaagctccaagtgttaaagcacaacttataactaatcataggctaaaaaataagctatg

SEQ ID NO: 2072 - DNA, 528 bp, Homo sapiens
gatcaataggcggagggaaattgtttctatatgcacttattaaataatttttgttaacaaccctgccctgggataaaagtgaatggaagtacatgactgagtaacagtaattaattctttgccctgatcgtttatttggggactgtatatgctttcttgactgacaatagaatgttgtattagttttcattgtgtctttatttgcagttcacagcacttttgttttgcatatgctacaaactaaaagtttagcaattacgttatattccaattctggagtccagattgtacaaattagatgaaattctaattcgtcattttaggaagaaatcaattacctaaaattactggctcttttcaacataccctttagtatgtaaaaaaataagcttcaaatgcgtgggttaaagttaactatcaatcccagtttaagaatgatatttctgtaagaaaactgctttattttccaagtcgtagtatttaacataggctgagtcacaaataagttttttaattgtatcttaatgc

SEQ ID NO: 2073 - DNA, 609 bp, Homo sapiens
aaatacaaaacgaaattagccaggcgtggtggcgggcacctgtagtcccagctacgctggaggcttaggcaggagaatgcgtgaacccgggaggcagagcttgcagtgagccgagatcacaccactgcattccagcctggacgacagagtgagactccgtctcagaaaaaaaatagataaataaataaaataaaaataaataaataaataaagagagagtgagaaactggagataattataaaataaaacaagcagaattttattttctaaattcagtcattcagttgaagagcaggtgtcctctccccacatgcacaatcaatgctatttcttcactctaaatgtttcagtctcttacctgaaacatgtaatattactctaatagaaacagttttctcggctggccgggtgcagtggctcacgcctgtaatcccagcactttgagaagccgaggcaggcggatcatgaggtcaggagatcgagaccattctggctaacacggtgaaaccccatctctactaaaaatacaaaaaattagccaggcatggcggcacacgcctgtagtcccagctactcgtgaggctgaggtagaagaatcgcttgaaccc

SEQ ID NO: 2074 - DNA, 166 bp, Homo sapiens
gatggaagaccaaccaagagatcaagctatctctgcgaatcaggacctcaggctcatgctacagacccgggtatattttcttctcctgtttacacaaatatgcaacagaacttgctgcaaaattgcttgcaagaaaaagtaacttctgaagaactgaatattataa

SEQ ID NO: 2075 - DNA, 409 bp, Homo sapiens
attattaaagctagttctgctactctagaatggcacttttacatgatggcttttccaatatttgcaactgtggtaatcttaacttttctcttctccagatgaaattttgtctgttccattcagagcttcctctcgtgttttaattccaggcttcttccacattctggtcacctccttgtgaaaacattctgattcagtttatccttccagaactgaaaacacactactaattctgtagcccgagctaagtataaagggacacagcaagggtttcctcactttgcgtaatagtggaggactgaaaaatgactgtgaaacctgaaataatgcaaagtgatcctagtgggaaaaatgatgatcattctgagacctttataaactgctttttttttttttttttttgaaaagg

SEQ ID NO: 2076 - DNA, 542 bp, Homo sapiens
gcagcgtgatcatgggaataccgcttaacctcaaatccttggctttctctgtaaagtaaatgtaataagatctccacagggtttgctgtgagggttgaacgagctcagtgcacatgaaaatgccctatacactcgaaaccagctataaatattggttattattgttaggatgctgacgttcaaatataaattgccaaaatcatttgggaagcattgcatactccattcccacatggagagttgcagggcatgtgattatctgtttgttcatttagtcacaatattgatcaatatagaacaaagcagtatattttaaaaatcaaccaggagcagccattctttgaagtgttatgcaaccattaaaaattaggtttggccaggcgcggtggctcaagcctgtaatcccagcactttgggaggccgaggcaggcagatcacctgaggtcaggagttcgggactagcctggccaacatagtgaagccttgtccttactaaaaatataaaaatcaggcgtggtggcaggtgcctgtagtcccagcta

SEQ ID NO: 2077 - DNA, 616 bp, Homo sapiens
catgtattaaaacttagatatcgcctcaccgtgaatgcatcagacactgtactgttctcaccactagggtgggccctctgcagccacaaatagaggagacagttggggataaaatcataactgatgaatagagagactgagtgcactagcaaacctgtagaaattctaggctcacaggaatagcaaaagacagcccactaaataaagagactgtcaagaagcatttcacacctaacatgagcaataaatggattcccatccaccaacaacgtttttcatgattttcctcatccacaggttcaatgagaagctttgtaaatttattttgtttaactgcagacaataatcactctcagggctgggcatggtggctcatgcctgtaataccagcactttgggaggctgaggcgggcggatcacctgaggtcaggagttcaagaccagcctggccaacatggtgaaaccctgtctctactaaaaatacaaaaatcagctgggcgtggtggtgggcgcctgtagtcccagctactcggaaggctgaggaaggagaatggcttgaacatgggaggcagaggttgcagtgagctgaaaatgcgccacatcactccagcctggg

SEQ ID NO: 2078 - DNA, 610 bp, Homo sapiens
ttaggtaaatggaaaggaataatagcctcaattcttatttccctcgcagccgttataggtgtacttattcttgtcgggtgctgtgtcataccatgtatccgtaagttggtgcagaggctcataaaaatggcacttactaaaaccttccttaactgtcctccaccttatccagagaagcttcttcttttagaaaatcaagcaaaataactaagctatgtttaaaaagtttgaaaagaaagctgtaaggaaatacaagaggaggggttgttagatatgaattctaaatttcttttcaaagaattaatatgtcattatgttcaattctttgccttctacttttaaacttaacttcctcgtaaagcaatcttttttgattacctactccaccctgactcattctgattacctgctccaccctgactcattccaatcacctgctccaccctaactcattccgattacctgctacctgctctgccctgactcccgccaaagcactcacctcgtcattctctttaaattagccaatcggaattagtttagcctgtgcagtctaaccctagccaatagggaaacaacacagcagcaggagccacatgcgtcagggata

SEQ ID NO: 2079 - DNA, 561 bp, Homo sapiens
tccttacccttcgagcagactgtgcaactttccagtcattcttactttccaacattaaaaaatctaagctagtcatatgttcttccaatttaaatcttctttctcccaactcagacctgatctcgtttcaagattctccggaggagaagggaaacaaggactattcttttagtatttatctcctccaacaacctgagatttaggcagttctcttgaggtttctttactgggcttgaggtaagggaaggagtttcagtctcttttcctgataattcttgccatttggatgatacagtaaagatttcagaatcagtttgcatccactttggcaattctttcataggtaatctaaaacctctttttggaataaagaaaaattatcacctattgttattagttttaggacattaactcagaccagaaaaatgtcctatttaataatttgttatacatattttaaattttaacagatattaataaatagtagtagtttaacaaattttcacttccactaaaattatatcaaacacaatttatcctcatccaaattttgaatctttg

SEQ ID NO: 2080 - DNA, 380 bp, Homo sapiens
ctgtattaaaaaatagaattggcaatggcttttgctcccgcttgagcttgccaaaaaaggttggaaatgagcatgcctcttcctgtctctcttggctctgctccctattaggatttgatagagacagaatctttctcttcctcaactttccctggagctgtaagtgggctaaggggtggagtttgggagaagggcaccacctttcacaatccagaagttagggatgtagaaatatcaggtgctggcgacaacattttggagcttctgagcaagttcccatgctgttgtttaatccttaatcatctctcttggcatacttcccattgctactgcttgcataaaattggaaggagctgattgcctcaatctgtattttctat

SEQ ID NO: 2081 - DNA, 142 bp, Homo sapiens
aattgtatttaatactaacgatctcttgaagagttcagatgagaggctaaactagctgtgtaatctaagctaaatcttgagagatgactgagattttcatgtttcaaaaaaggggacagacctgggagcagtaccaacactc

SEQ ID NO: 2082 - DNA, 559 bp, Homo sapiens
gaaagaataaaaataaatgtgaaacattcaatctaagaaatcaggagaagaacaataaaataaacacaagaacaaaaagagaaaagatggaatgggaattacttctggtcaagatactgaaaccatccagtggttccagacagcgacctttgaggaaacccctggaaagggggaggggtgctcttacacgcacacacaccccacacgtgcacacaccccacacgcgcacacaccccacacgcacacacacgtgtcagggagcacgtctgacatgccccgtaagatctccagaagagattagacagaaatggaagaaagcagtgtttgaaaaccaatgactgagaattttaaagaatagaaaaacaaccagccaaccaacctaaaatttggtcctaaaatttaaaaaacatactgattcctgagcaggattcagggaaacaaatccacacttagacacaacaatggtaaaacaggagcacctaacagattgggagaaaagtctaaaaacagcttccccaggccgggcgcagtggctcacacctgtaatcccagaacttca

SEQ ID NO: 2083 - DNA, 596 bp, Homo sapiens
agtattagagtaacaaataatgaataaacatagtggttactctatagactgatatcttcaattactgttcctgctttttgtaagcttttaaatggttcccattcactgaacacttatgtatccagtaaagtagataacataggtgctttatatacttcatatttgttagtccttaaatctgttgcagatattaatagtcctcttttttcagatgtgtaaaactgagtttcagtgtaaactgaatctctgagagattaagtcattttctcaaggttcagaacagtaagtggcagagtaagtgcaggattgaggctagggtctttctactccaaagcctaaccctgtccgtcccagagtgatacaatattataacctacgccctgatatttaacaaaattaaagcattcttgggaatacttctagttttcatagaaagatcctcaatcaagatcattctggaatgtgcagaagataaaaagaaatgggatggcaaaacgcagagaaagcaaggcaaatgaaagctacaaacctctcccttagataaatgtacacatgagccgggagcggtggctcacacctgtaaccccagcacttcg

SEQ ID NO: 2084 - DNA, 532 bp, Homo sapiens
tcctctttttttgtgaaatgttttaacatgacttctaagacctaaatttatgtaacaactacctgttttcccaatccttcattgtgttaatcattcacatgtgctcattcttttttatagaggcttccatgggtgatctcctgaacacttcatccttaccccttgcctttttgaactcatggtatgctctaggcctggattccctgcccatctcccttcaccaataaacattaaacctaagctcctatccctcatctttgtcttttatgaggcctactcttgtaataacttcacggggtaatctcacagccaatgcctttgtcattcattctttcagctatttccccccttcgattattatgtaagtatttctccctgagtatcttctaaactaaaaccttcccagcatttctatgtatcttgtactcaaatcatccagcaaaatgctggggttgtggaagaaatgtatgcttagacgcataagcatagatgcattgatagatgaaaatgtttgataatgagatactctaat

SEQ ID NO: 2085 - DNA, 644 bp, Homo sapiens
tagtgcttaattgtctcattcaactataaaattttaacccatgttgggagttaaatatctgggagtgatagaacccatctgataaagcactggagaggtgtggccagtgaaacaggaggggacccatcagggaagaggggcagcttggtcagtggaaagcacagggcgccacggcaaactgcccgccaaatccagacaaaggcttggcaagcaggaggggaaactcagataaagcccaggtgcatttcattcaaagcgtgggcagacgataacaatgacaaatgcagggcaggcggaccacacttgaaaatgtaaagcatgtaggccaggcatggtggctcacacctgtaatcccagcactttgggaggcagacgtgggtggatcacttaaagtcaggagtttgagaccagcctggccaacatggcgaaacctggtctttactaaaaatacaaaaattagccgggcttggtggtacacacctataatcccagctacttgggaggctgaggcaggagaatcacttgaagctgggaggcggaggttacagtgagccgagattgtgccactgaattcgaacctggccagcagagtgagactcgatctcaacaacaacaacaaaaaaaaaaaaaaaaaaaaaaaaaaa

SEQ ID NO: 2086 - DNA, 508 bp, Homo sapiens
caaatgattgctaaaggatgaattaagatatccttctcattagcccaagtccattttttcagtctattaacttgcatatatgaaagttctagcaatataaaaccacattttgtcacatgctcataattttggaattagggaattttggctccaaaagccatgaggctgacagatagctgtagtaattccaacaaatctatatttatgtgtttctcagaagaacatcgagcatttacattttctaccacacactccctatctggttgatgaagtgaaagtcaaatttggagggatgaagtacaaaatttacaggacatctttaggattccaaaaattatgaagagcaacttcaggtcatataaaagctattttataatgaactattttaatatgaaaaagagcttcagaatatcttctatctacttaaactggtcaaacacatagtttagttaaagaacacaaagatgtgtgctgttcagaacaaaattagtaataagaatgtgctatg

SEQ ID NO: 2087 - DNA, 586 bp, Homo sapiens
tcagggaagttagaaaaacaacgcccaagtagatgtgtctggctgacctacctcctggactatccaggtggaggagaagcatacatctcagatatctgcaccaatactttcagcatgtaaactgatggaagacatcaaacaatgcatcaaagacatatacccctctcatgaagaagagagctggctgctctagataccacagccatctcttctagcaatctctgccagctcatttccagagcatctgaacacaaccatctacttcctaaatcacaacatggcagtgactagagctgccaccatccctttctacctgtcagatgcagaaggatgcacagccaacagtaacaggaccacagagctgtttctctaatatcacaaaagctttcaatactgttaatgaaatggctctagcagccaccaaagaaatctgctactggactttgttgtccaagaaatatgaccttatggtactgaggtcagagaacaggacactcctcagcactattcagtcaacaaatattagtgaaacacagcactgtcaggtactataaacaacagaaaagacaagactcaacctttatgt

SEQ ID NO: 2088 - DNA, 567 bp, Homo sapiens
attgagacagagtcttgctctgtcgcccaggctggactaaagtggcacaagctcagctcactgcaacctctgcttctcaggttcaagtgattctcctgccttagcctccaaagtagctgggattacaggtgcccgccaccacacctggctaatttttatatttttagtagagatggggtttcaccatgttggccaggctggtctcgaactcctgacctcaggtgatccgcctgcctgagccttccaaaatgctgggactacaggcgtgagccgctgagcccagcccaaccctagaatttaatagtgaggggaaactgaggccgcagatatggaagagacaagcttgtcccagaacgtttctcatccttctcatgcagagccttttctcccaggtcatgttctttattgaagcatcacttctacaggctgcaagacacagaagatcagggaccaattgataggagcaggagcaaaggaagtaatattattttgtggcttccaaaaccacaaggaatgagagttgcaaaatgtgttcattcaatccattcaacaattatttattgagta

SEQ ID NO: 2089 - DNA, 487 bp, Homo sapiens
aagaataaaaattaaaagtagttaaaataattgttaagacgagactacagttgcctgaggaaaactagggatacacattaactcaatgatggtaggtatcacctggactgttgtctcttgctgtcatctgcataagaagtgccatctgttttcgctcagagagtggataaccaaaaagaatgctaactggtgtggatttcttatttccagcttccttttttgtcttcttcttttctggaccttctttctctggaattattaacaaatatgtaagaatttgaaacaaatccaagtactcaaaagcaagtttaagatgaattttttgatagatgctgtacatatatatgagaaatgtgtacaatatatgaactagtagtagccagacaaaagcacaatgggttttatattatataaacaattttcttcctgactgctttgaaaaaaatatattcttaattccactgttttcagaaaattagtaatactt

SEQ ID NO: 2090 - DNA, 587 bp, Homo sapiens
aaggatgctgaaatctcaggaaatctggaggattgaggaccagtttcagggatgccaagaagcagaggtggttaattgtggattagggcacaacagactgtgttgaggactgttgtgagctatgccacaagtcattgataactagacaaaaatcatttacctgattacaataaattacaggtattcaaggttatgcctataaaaagagttatctcactcttgtgcattcagtttgctttctaaacaggcacggaaatgggtggaacagcagctagctccctggatgtttctgtatttgggaaacaactatccctgctgctggaagtacacgcatgcccacaactgcacacacaggcaagcacgcacagaacattccacagcccaggccaagctcctttgagacaatgaagtgcaaggtagccacctgaagagaataaagccttaattaaaggaggaggaagagaaagaaaaggtctcaatggtgtgatttaataaaggccaagggacccactgccttcactgcactatcaggtgggaagtacacagcctcatttctaaaattctaataagcaataagcagtcttagc

SEQ ID NO: 2091 - DNA, 392 bp, Homo sapiens
tggatacattaattcacttgagtgtggtgatcatttcacaatatacacatatatcacaccatcaagaagtacaacttgaatatgcacaatttctattgttgagtatgttgcaaaagaaagcatgagggaaggaaatataactttatcttgctttaccaaagagatgttcttggaaacatgtatgcaaatcacatttattaccaatcaaattacaaataaatactactatttcactttaccactgaaatttatttatttactttgcagaagtgattgaggaaacatacatgaagtgcccactttgagctaggtagtagacagtagagataaacctggctaaaacatgatccctctgcacaaattgatatctgaaccaatgtgatcattcagct

SEQ ID NO: 2092 - DNA, 501 bp, Homo sapiens
ttgttcatgggacagagggaagtttagaggcaactgaccatttggagctttaggacaattgatggaagagggcttggcatctggatgagaagtggggtaattttccttgcattttaaactcagaccacatatcacatcagaatcacctaagggagacattttcaatgcatattcctgggtttcttctcttggaaatttttatttcttaaatcttgagttgtgctgatttatccatatttatcataagaattttggataattcttactttgggaggcccaggcagtggatcacttgaggtcaggaattcaaaaccagcctgaccaacatggtgaaacttcatctctactaaaaatacaaaaattagccaggcatggtggcacacacctgtagtcccagctacttgggaggctgaggcaggagaatcacttgaatcagggaggcagagatgacagtgagctgagattatgccactgcactccagcctgggcaacagtaagact

SEQ ID NO: 2093 - DNA, 655 bp, Homo sapiens
gacatttctgagttctgttaaattattatgttctttcaagatagaaattacttccagaatttttcccctttgcctgaaatactcttcgccctcattatcttactgtctttctctagcaaatttcctttcctgaaggaggtctcccctgacaagaattacacaagggtttccctccccttacattgttttatttttttcatcacagtatatctatcacaaataataacactctttttttgttcagttttgtctccttcactagaaattaaacttccagaggtcatggtgtttgtctttttccttggtatgttcccaatattttacaatcagccaagcctgagtaaataattaatgaatgaacaaaattatatccttaagtattttatagtgtaaattttaataattcctaaaataaaaacctagtggaataactggcaagatggcaaaatagaagtttgcagctcttatcttcccaacaaacatcaatttcgacaactatacaaggatgagagtatttttgagggagaataggaggccagtagagagatgccagcaccctataggtgtctattctaatctatgaatagacacattgaagagggtaagagaacagtttcactatatcctcatcacccctccaccaaagcagcacagc

SEQ ID NO: 2094 - DNA, 485 bp, Homo sapiens
tgtttactcagcacatttcatcctcagctaccaaaggtaagttattgttttaggtcgttttccagtttctatttagcctaagaactccacccaagttagaaaagaataaaaatgaggtaaaaataaagcagcattatgaaacttaaaaaagggaaaggtcacacactaatgcttttccatcctgggcactggggactggggtgaaggctggggggtccattttcattattatctttgcatttacaaacacagcctccgacgtttagtatttgctttgaatgaggaaccgagaaataatgtccaagatgagttcaaaaagaggtgaatctagtacttggtagctaaagtaataatccagttgggctatattactctgggtattaagaaacaatagctaataagaagtagtttcagccaggcagatctcctgaggtcaggagtttgagaccagcctggccggcatggtgaaaccctgtctctactaa

SEQ ID NO: 2095 - DNA, 473 bp, Homo sapiens
cattctaaacataaatagaaaaagtatccataaactgatcactaataaaatagtgtacacacatataagacacatgaacaatcaagattttttccatccgaaaatggagatataatgattcctcattgccagtagtcataatgcctactgcatttgtaactcagacccatattttttccttttggctcttccaaaatacattctgcacctaggccataagcatgcatttgtagattcatagcttcaaattttggcaatttgcaaaaccacatggccagatttgggccacttctacttagttgggaattccatcatagaaatgccagtcagggtgccgaatgaacctactgttcttttcttgccaacacagtggttgagagccggtatgtgctatctgtctcggttttatagtctggtacaataatgtcatgtttgtctatgtgattaagacattgctgcagtgtacagcacca

SEQ ID NO: 2096 - DNA, 304 bp, Homo sapiens
atatttaccttttaaagaatattgtgagcaaatatatatctagcataaacagctgtgttactacacacacacagcaaatgtcacaatactgttttagagttgcattccagagagaaatatttcaaggacaccatggcagttgacgcaggtgaaaaaggaatggtggctactacgtgaagagaatttttaaatccaaatatgcgcacaatgttcaaataccatagcagcacagagcagctgctcagggaagtcttggagggttcttactttaagtttattcggcccttccttttctatctttcta

SEQ ID NO: 2097 - DNA, 353 bp, Homo sapiens
  misc_feature 8: n = A,T,C or G
tacggctnggagcagtgtccccctccaaatctgcatgtctgaaagcattcatgcaggttcattgcatgggtctttgcattttacttagacttagcaaaaatcaggtatagtctttcctgaaaacaaaagtgaccattgtttttaatcaactgcagggtgtttggagttgtgaaatatttagggtcccgagtccattccagattcaacattgggaaagaatgagaaagctgaagcctggggcaggctctgtctgcagaaaccatgggctatcaccccctctccttagcagcattgtaaacaaacgtcatttgtaaggagcatgtcccaactgagcttgtaattataggggcaag

SEQ ID NO: 2098 - DNA, 631 bp, Homo sapiens
gaattgagaatataaaagtgggtacatgttgttccaaattagtgggaaatttatattgtaggctctaggtgcattttgctttagaatgagactcatcaataatatagaagacattccatagtataagagaacaagtactgtgacagattctcctaataacataaatttgattttttactgattttaaaattaaatacattaatatatcactaaaatagctagagatatgtaatttctaaaagtaaagcatactattattaatataaatattgaatatgtataattgttgtctggtaaaaattaaaaatacagtaataagtacataatacatataaaaataaattctatggccgggcgtggtggctcatgcctgtaatcccagcattttgggtggccaaggtgggcagatcacctgaggtcaggagtgcgagaccaacctgactaacatggtgaaaccccgtttctactaaaaatacaaaaaattagccaggcatggtggcacatgcctgtaataccatctacttgggaggctgaggtacgagaatcgcttgaacctgggaggcggaggttgcagtgagctgagatcacgccattgcactccagcttgggcaacaagagtgaaactctatct

SEQ ID NO: 2099 - DNA, 642 bp, Homo sapiens
agatcaatttttatttttattgggcaatttgaaaaatgatctgtatcatagtaagaatgatttcttttacagctaagttaagtcacattgatcaaagggaaaagataaaagacatttccagagaatgtgctctgaaagctattgaacagaaaaacttactttcttcacaaaggaaagatttagagaagggacaaagaaaagatttaggacgacatagagatttggttgatgaagacctttcacatttccaatctggatcacctcctgccccaaatggttttaaacaacacgggaatccacatctatatcatagtcaaggaaaaggatcatataaacatgaccgagttgtacctcagagtcgagcttctgcacaaataataagttcaagtaaatcccagattcttgctccaggagagaaaataactggcaaagttaagagtgacaatggcactggatatgacacagacagcagccaagattctagggatagaggaaacagctgtgatagcagcagtaaaagccggaaccgaggttggaaacctatgagagaaacattaaatgttgatagtatttttagtgaaagtgaaaaaagacagcatagtccaagacataaaccaaatatcagtaataagcctaaatcta

SEQ ID NO: 2100 - DNA, 511 bp, Homo sapiens
tccttctctgaaatgcagctgagaactggtcagcctcactcccttgctgagaccaatagcaatccctgatgatctcgccacaggtccagcaggtgccccatccacactttgtccccagcccctaccaggaagctccaaacacctacctgaggggccaactgtgattcccaaggaggtgacacctcctgccccttgttgatagaacattgataaggaaataggactgagttttaagcttctttccatgtcaaatatttaaaggcaatataatgttcacgtttaaataatatttcatgtgtaattaaacaatcccttattgttaaatagatgggttccaattttgaactgctataatctgtgtatgtgtccttgattaatccttaagagaaatccctagaaacattatcttagggtcaaatggcttggatattctgtaaactgctgataattatgggaaattgccttccaggaaggttataacaatttgcctgatccccagcagcaacagact

SEQ ID NO: 2101 - DNA, 400 bp, Homo sapiens
ccgaaatatataaggaactcctacagggagtgcaacttgtagtagcaggctaacccttgcagtagtaggttaaccaagatcacacaactaactaaaggcagagctgggacttcaacagagtctattgacaccaaaatctttgcgcccttaaaaccttctcaaaacttttgggaagggctaacttttgaggtaggcataggaagaggaactagtgaaaagtggccaaggcagagtttcaaggaggtaggaaacctcggaattactgataatgaaggaagaggacatcccaagtggtggtacagaaggggctgttcagggctgtctcaaggagagaacaaaagagtgagtgtcgcctgtaatcccagcactttggcaggctgaggtgggcggatcacctgag

SEQ ID NO: 2102 - DNA, 564 bp, Homo sapiens
gcatctagaaaggaaggagggatgcaccctcatcccaggcagaggaaggaggaaaggacaggagggaattgtaagagggaaagaaccatagctatttctaagtgaccagagcaaaaggtgggcagtgacaatagcaacagagaagactgagagctagaaggacccagtgtccggttttgttttgttttttaaattaaaaaaaaaaagtttttgggggccaagtgcggtggctcacgactgtaatcccagcactttgggaggccaaggcaggcagatcacctgaggttaggagttcaagaacagcctggccaacatggtgaaaccccatctctactataaatacaaaaattggctgggtgcagtggctcacacttgtaattccagcactttgggaggccgaggcgggtggatcacctgaggtcaggagtttgagaccagcctgaccaacatggagaaaccccatctctactaaaaatacaaaattagcttgggcgtggtggcacatgcctgtaatcccagctacttgggaggctgaggcaggagaatcacttgaacccaggaagc

SEQ ID NO: 2103 - DNA, 553 bp, Homo sapiens
aacacattaaaagccagagttcagggatatcagagctagagaaaaactgtcaaaaagcaaatgcagagagccttgaggttatgtgtggaatacccacgaggaggaagtccttaatcagttatcttgcaaagactcagcagaacctgggcataaacccagacttgagcaaacactaagacaatggctcctgcaagaactgtctcctctcaatatttggagtatgtcagatacagcagtgcctttcagaatgtgcctaacatccctaaagaatttgaatatgccactctttttttctgatttaaaattttcttactgttgcaaattaagaaattaaaaagatgtttaagattttccataaaaataccaccccccaggaaaaactatagctaatatttggtacaaaattagggtcatatgctgtgcatttattacagtacatcatctgcatctttccatgtcaaatttatatatctattttttaaattttctttatcaaggtatctaacaattacagttttgagaaaagcaattaaaatttcttcctatctgctag

SEQ ID NO: 2104 - DNA, 536 bp, Homo sapiens
gaactatccttatagtttctttttctgtttccttgtgtatttactcttgcatctgtcatctgtattttcctcatgttctgattcttctttatttaccctcttgcctgcctaaagagtttcatactaattggattgttattattattttcaatgaagctatttgttgaagaatcacttggggagaaatagaaatagtaaaatgagccagtcagcatcttcttggaattgctgttgcaagtatcctcaataagtttattttcctttgtcctgggggcaactttcctgtccttgttattgttgttaatgtaagaggtttattgaagacagttttttggtcacagctttctgggttactatcactttgtacttttcttccttgatcctctaagacaatgaacttacaactttgtgaccagctcagtttccccttcagctccacgttcatttgtattttgtgatctcagacaaggttttaccagggtcttatccattctctcagggtcttatccatatctatgtgatatagatatactcct

SEQ ID NO: 2105 - DNA, 537 bp, Homo sapiens
tgagccactgtgcacagccctattaatttatgattaaagatatgtggctggttcatgacccaaccagtcatctactcttagtgagtccagctaggggcaggttgattcagtagtataaaatcagaacggatggaatcagatgttcctaagaaatatttccagcaaaatatttatgggcagactacgttcagttgtgaggcagagaaaaacctcatatactaatgatgtcaagaagacagaaattagttttgtaaacgaggtccagagataagcagttcaggcctggtaaggtggcttcacattcatcaggaatctaggctccttctaacttgttgctccatcgtcactggcacagagtgccttctcctttatggtccaacagtgacaaattccagtcatggaattctagtcagcggggtgaagcctacattctagtcaggagggtgaaggaaggagatgggctcactcctttttaaggataagtcctataagttactcaggtcccactggctaaaatttagttagtgggttacacct

SEQ ID NO: 2106 - DNA, 572 bp, Homo sapiens
tagtcattttctatgttgctctaaaattattctaaactcctctaataaaaacttacaaagaaaccagacaaatgtgcatatggatatgactatgaactaggaaacatccagatgccttggaaaaccctaagagaagaaggaataactcacgatatgtggaaatgcaagtgagataggtgagctggaaaatatatcatcagtataagccttagatttattttgcataattgaataaaattctttaaaaataaaaaggtgagtgttttaattaaacttgacaagtgacaattaagttaaacataatcttttgtttacaatcactttgattggagacagaaggaaattagaaattaaagtttgttggctgggcacggtggctcacgtctgtaatcccagcactttgggaggccaaggtgggcggatcatgaggtcaagagatcgagaccatcctggccaatgtggtgaaaccccgtctctactaagaatacaaaaaattagccgggtgcagtggcatgcacctgtaatcccagttactcaggaggctgaggcaggagaatcatttgaacctggga

SEQ ID NO: 2107 - DNA, 561 bp, Homo sapiens
tccaccctggggaacagagtcagactctgaaaaaaaaaatcctatgagattttgtagagtctattgatgaagatttaccctgggtgtggatgaccaccacccacttatgcctagtgttccattattggaacgctaagcatgtgggaattacttatatcctagtgctcaaggtcatcaccaaggtctaattgcaaaaattcaaaaaattgcaacctcagacataaatgggttaagggaagaaatcacaagataaaagacctcttctgccttatcctcaattgccaccaccatggcctttgctcgtatacaacttagttttactcatgagcaccttttacttctttatgccccatacatactgctttgccctataataattttcattcttgccttgactagcttcaaaattttgtttaatgagcatcaccttttgagtaattttcctgatgttttaataacatcatagcaatcttaacagtattctataatcaattatttaattgaattgatgttttgcactatatcctaaactcaaggacagtgatcatgtgttctttttct

SEQ ID NO: 2108 - DNA, 556 bp, Homo sapiens
ttccctatgttcctcacaacgtagctagaatttgtggtggctttatttctatgaaagctattccatactttcaagttgtaccctttctgattatgtttacttcagtcaagtctaaattatatggagtttatttgtgcacctacttaccacttattcgaaaagcatttacaacaaaacaatgcctagggagggttcccattagacccatttttaattacctagttgtattacttttgtggaacagatactgaaattgggaaagtgattggtgagtacttaaagcctttgaataggagatgagttatctcaaaatcactcagaatagttcaaaatacatggctccaaattggtagtatgaatcaaagatcaattataattatcataataaaataacattatttttaatttccttaaacaacagagaaaatgaagtatagaaatggccgtgataacagaaatcaaatcatgtgatagttacaagaattagtacaggagtgaaattgaagggtcttggtgactctttgagcagatagtgatgtaagaatcaggataaaaa

SEQ ID NO: 2109 - DNA, 603 bp, Homo sapiens
gctcattcaccacatttcaaccatgcttgccttttctctgttctctgactgtgctgtagggctcatgcccatgctgttccctgtacccccaaatcactgtaatgctgtctctttcttgttgctcatatcctagttcaaacctcctcactggccttccctcaacaacccaatttatttttttattttttgtttttttgagactgggtctcattctgttgcccagaccagagtgcccaatcatagctcactgcagccttgacctcctaggctcaagccatcctcccactatagcctcccaagcagataagactctaggcacacatcagtccattattttttgtaaagatggtgtcttactttgttgcccaggctgatctcaaactcctgggctcaggtgatcctcccacctcagcctcccaaaatgctgggattacaggtgtgagctacaactcctgtggcctgaccacccaatttaaatcagttcctcttcctgttttcttctttcacatcattctttgatatctcaccacatgcctgtttgcctgctatctttcaccactagaatgtaagtgccataagagcaaagactcctttggtcactct

SEQ ID NO: 2110 - DNA, 614 bp, Homo sapiens
acactggcattgcagatgtaagatttctgtagtcaattcttattttctttaaaattgcttattgggttttcaaataataaaaaatacaaagcaaggtagattatagaaaataactaaagaaatagggccatttagcatctatcactagctgagtgacttttaacaagttctttagccttcctgtggctttatttcttttgctgtaaaaggttccacttgtgagatgatgcatataagacatgtaatacaatgcctagcacacagtaagaactcaatagacttaaattttaagtaaattaagccccataccagatgtgtgaaatacaaagaaatcatgactacattctatactgaatatagagaaaacttaaagcaataagatttttttgtaggtttaatggagagttatcaatagtattgctttctactttatatgaaaaataatacatgttgaaactcctgcaatcttcggttgaagtaagataaatatgacataaaggaagatcagctggctgctgacatggcacctcatgaggtggaaatttattagtggggtcactgggctctggttttgtaagtgaagaaatttgattttatgcagatcagaataattc

SEQ ID NO: 2111 - DNA, 617 bp, Homo sapiens
aatagagagggcaatccatgcagattgtgccacaagaactagggcatgttgatgagggaaggatgtggtatccacagagctgtgcagaaactgcttgagagagaaggtctgagtggacagtgtgcaaaataccttgcaagataacacctatttttatttctttgagtgagtttatctatttggacaaatccagtgggactgctaaggagtggcatgtaatggaaagacaaaggaagggagacagaaaaggctctaaaaataatagaataacagcaaatacttgctgaaaactacatgctaggcactgtagtaagcactttttccattgaattctttcagcagaccatgaggtattatcacatctccattttaaaatggggaaactgaggcacaaagaagatgtccaaggtggcctatttaataagtgccagagctaatattttaacttgaacccccaggctgtctgactagagcctgcattcttaacctacctctcctggctctgcagacatggtctctgccttggggcagccaagggccagcgtggtagtagggggaaggggaaggggccagctatggccaaatggggccacaggagaacacagaagtcaaatcat

SEQ ID NO: 2112 - DNA, 516 bp, Homo sapiens
aggctaggagttttgagaccagcctgcacaatgtaccaagatcccatctttgctaaaataaaaaaattaggtaggcatgataggcagctctatagtcccaactactcgggaggctgaggtgtgacaattgtttgagccaaggagttccaggtggtggaagtgaagtgacattctgagacttgtgaggttaggccattagaactcttgcagtttctgcctggccctgctgaacatgctctctaggagccctgaggccaggtgaggagtccaagcactctgcaggtgctcggcctaagcctcagctaagcctcaccctctggcatccacttcaagtcaccagacatggaagtcaacagccactcaaatactctaaaccaacccattcacagctgaatataattaagtgacttctgttcaggacgcctgaaacagaagaatcaccccgccagtccctgctcaactgcctggctcacaaaatcatctgtcagtatgagttcatgatgcatttgatctcaa

SEQ ID NO: 2113 - DNA, 563 bp, Homo sapiens
gagatcacgtgtgtgaaatgtctctgaggactgaaaagtgttaaatgtagcagtaagaactgattatcttggcaagagcaggtttaggggagtatggaaggtggaagccaactgcaggtgaggaagccgagtttatgttttattagttgatgggaaggagggagggaacaggctgggagattgtctgtcctttgtagttaggatccagcagctcagggcaagaggtgtggagggtccttcctcttggtggtcactgaagtcccctttggtggagaagaccaacccaggagagtctacatagtgataagggaagacactgatgatgaccccaaggggtaccaggcttaaaatctggattgagagagagagagccctgaaaaaggaatagaaagaatcctcagagcaggaacaccggctgagtgtggcctcccggaaatcagagagacagactgaaggaggagatcacgtgtgtgaaatgtctctgaggactgaaaagtgttaaatgtagcagtaagaactgattatcttggcaagaacaggtttaggggagtatggaaggtgga

SEQ ID NO: 2114 - DNA, 538 bp, Homo sapiens
atatatcattaatatttaactaaaaaaaaatcaaccatgagatatagaaaggggtgcagtggtttaatatgagagactagaaaagcagacaatctaccttaaaatctaatgaacatatttattttaatgcattagtacaatgtatgaatggtatcttaaaatgacttttatttaaagcttccataaaggaatatattaagagtctggaatatacccatgattatctggaaacagctggttccgtttcaccatcgtttcaagtgaagccccagttttgtgcttttctgccagaaataacgtcagcccagaagccctgaatcccaacagcactgaactgccggagttccacccagtgtgggcacataagtggcttcctcaacccacagaaagatgtgttgctaagaccgtaaggtgaccttttaacttcttcagagatagtttcagtcatgcatatctttaaactgctacatctcacccttgtttaagccattttttagaaaattatgagatctaatgttgtcacctagtctgaaatact

SEQ ID NO: 2115 - DNA, 532 bp, Homo sapiens
tgtaatcccagctactccagaggctgaggcacgagaattgcttgaacttgagaggcagaggttgcagccaagattgtgccattgcactccagcctgggtgacaagagcgaaactccatctcaaaaagaaaagaatagcaagcccgtaaatgctgaaaacagagctgatgattcaagttgcataaattaattgtataagtgagagaaaggtcagggacctggtgacagcatgtggccctgggctgaaagacggcctgctcatcccaggagggcccggggagctgggaagatgtgggtaacggcacgcccctgccatgctcctgggccttgtccccagccaagccaccccactgaggctgccagatccacaatgtgaggagacacaacttcacatggagttttcacaccttgtggctggaaaaagttctggatgcaaatacattctccccagagctctggtggattcgagcaggcactgatgtgagaggacgggaaatggaggaaactaaataggtcacagccttgatctcgtc

SEQ ID NO: 2116 - DNA, 618 bp, Homo sapiens
ggttgttttctaaatctgtatagtattcactttttttgtgccctgttttattttataatttataaattcacagcaaacaactctaactctattggaagctcaccgtaacaagtgctgtgataggcactttcatatgcatatctcatttaatcaacaagatatgtacactgtcacactttgccaccattggcttacatattggatatctcagcatacaaatcttaaattataagttgtatgttccatgaaataaagtgctgtttcctactcattataagttttaagttccatatctttaatttgattaaagtgctttctgaatgtctaaagtgtttattgagtgttttaaaatatatatggaatgtgaaaattattcaactaaatccatgatctatttgtttgaaatgtgaattttagcattacaatggagagaatcctgaaacctcataagatcttttgtttatgatcatatttatagatcagatacatgatatctttgaggaagaagaaatgtacattttatttacaaccacaaaccagaaattcctaattccttggaagaaaacaattttaactaagactcaatattatttgagggatgtgaaaaataagttatgt

SEQ ID NO: 2117 - DNA, 641 bp, Homo sapiens
tggcctcctgagctcaggcaatcctcccacctcagcctccagagtggctgggaccacaggtgcacaccaccacacccagctaatttttgtactttttgtagagatggggtttagctatgttgcccaggctgctctcaaactactgggctcaagcaatctgcccacctcaacctcccaaagtgttgggattacaggcatgagccactgcacccggcccatctggtcttattaaatacttcattctctgcaaatgcagatgttttctcagctctgattattttttctaaagtaatgaccctccacctggctagacaaatgcttctagcaaaggaaaagaccagggtgtgaaaactgtactgcaatagaacataaagcccgtccaacccccacctcccatcagacctggggtggtggcagcagcaggcatcggggctctcaggcctgcccattagtcatccctaaggcctgttagcacacaggttaggaggagcacacactctggaatcagaaagcccaggattgagcccagccctgctttcagttaaggctttgtcagtcactatcactcccttgacctaggacctcacaaaaccttgtcatctgtaaaactggggataataagttctaccttgagtgttatt

SEQ ID NO: 2118 - DNA, 580 bp, Homo sapiens
acatagatccagatgattgaaaaattcatttctctcctactggagaaatggttaaaggatatgaacacacaggaagaaatgtgaagagccaattaacaagtgcaaagaggctcaaccctgtgaatgatctgggatgtgcacacttaagtaggagagataaaacatttcacacccatcagatatgtatacatttaaaagtttaaaattactcagtgatgctgataatgtgccacagctttcaaacactgctgatgggcatttctgtcagcacagggtctctacagagccatctcccagttgccagtgtagttgagaatggactgtccaagaatccactgggctagtgtataccactgagaagctagcatgtatgtgcccagtgaaacaagtatagtacacacatgttacagtttcgttttaatgtgaaaatttacaaaactcttaagtgtctaccaacagtgaaatagataagtaaaaagtggtatagtcagaatactttatagcaatgaaaattaatgatctacagctgctgtgtccttgcaaaatagttcatttgtatgtgtgctattaaaaaaaaaag

SEQ ID NO: 2119 - DNA, 617 bp, Homo sapiens
atggtattaaactgcgttgcgcctcaatttggctcctaaaaaatggacatactagtgcatttcacataagtttgctgacagaatgaaatgagatactatatacaaagcacttatattgcttgagatctcacccgtttacaggtagttattatatcatgctacctcaggaagaggtgagactttaaggagtgagaaacacaaaaaatttattatcaggtttccaacttgagaaacaggtggttcaatttcccaacatttaaagtatatgttcctatagtatataaatatgtcatttccctcctgctattatccctttctcacccttgaggaggaaatgctataaatcaagtgacattccattgccccccacaaaaacaaatggatggacactcaatagaactggattggcaagtaactagaaatttgagattgagacagaaagtgtgactaagcattgctgtgggtatggtaggtgttaggccatgtaaactagggccttacatcattttttcttgacaatatactgtctctcaaataaaccgagcaagacaactgtcgtggagagtagcaggagagtaaaacagaaatgcagagttaagctgaaaggacagaacatg

SEQ ID NO: 2120 - DNA, 575 bp, Homo sapiens
aataatttcttggttaaatgtaaggtaagtagtcaacacttaaacgatgctacaggccaggcgcagcggttcacgcctgtaatcccagcactttggatcacgaggtcaggagatcgagaccatcctggctaacacggtgaaacccctgtctctactaaaaatacaaaaaattagccgggcgtggtggcaggcacctgtagtcccagctactcgggaggctgaggcaggagaatggcatgaacccgggaggcggagattgcagtgagccgagatcgcaccattgcactccagcctgggggacagagcgagagtccatctcaaaaaaaaataaagaaagaaagaaaaataaaaagctacaactgacttgaatttcttaactgaaatgactgactcttccctggccatggctacatgaagaaggaaaaaatactggagaaactactaagggaactagtcacatatacatttatctattaggaaacagagtttcgatcctagaatatattctatctcacttttgattatataataaaatacatgctttaggaaaaaattactagcaattcttaaccttt

SEQ ID NO: 2121 - DNA, 577 bp, Homo sapiens
gaacccagcatctaggaaaactcagcaggcttttagtgacttttccattcagcctcaatgcagaagaaaggcagtcttttgctcagaggcacaagaaagtgaagcatcaaggaaggaattctgaagaagtttttacaactttacatgcagctgggttttgtcagataaagaaggaagagaacactgcaggtgtaaagacaagatgaagaaagcaagaaggcgtggcgaacctatctggtacgaagtaagtagggcagtttaattaaagtgccagggaaaggtgcagaaaaagaaatccctattctggggcaagatttctcagtaggtcactcacatctcagttcatccagaacagtctcattttgtctctatcaacctggcacaatgattaatatctcctctttccgctcttgaaagtaactgggtttgggcaatatagtcattccactcaataggcaattcgagcatacagttagggcattaaaaaaatgcactcttggctgggcgtggtggctcacacctgtaatcccagcactttgggaggccgaagcaggcggatcacaaggtcaggagttca

SEQ ID NO: 2122 - DNA, 610 bp, Homo sapiens
accaccacgcttcaattcaatctaaatcaattcaacaaatctgtgctgaaagtataacatttagttttcttagacaccaaatgaacaatacaaaatccctcaagggacttagaacattcaagttttctatatctgtggttctaagtctgttaccaacttccaggactctgcttctttccctctgcccattaacaatgcggtgttaaaagtgacttcctaccactatgtttcttacagctgattcaaccactcatctcatagccaggcatgaaagaaaggagcatacccctaaccgagaactattttttagatggtagtcatatatttatttcatatttagtaagtattatttcaggtcttattaattaaaggaaaaaacttctctggctataagatgcaaggatgatatgtgaattcatgaattgttccatgtttttcacccagatacaagaaattcagagaacacttgagagatgctatgcaagatgaacatcaccaaggcacacagtcatcaaggtctatcctaaatatacatgcacgcaacatcagagcacccggattcataaaaaaactactactaaacctaagaacctgagcaatacactagtgg

SEQ ID NO: 2123 - DNA, 613 bp, Homo sapiens
tgtggtattatactgtgagaaaatccaaaatagagtctctataaatgtcaagattacctttaataaaatatgtgattaagtgacacattcagtatattatattttaatacttgtagagaactaattttttataaccttacacagaactgaatatcattttcagctttattactgaattcataatcaaattgtaccatttttctcctgattgtgtaggttctcacccttagtttaccctttgaattatgatttatcatctattttattatatgtagaaatattcattaattgactatatcatgattatatgtatgaagtaaaactagttgtgacagtgttgcaattagtagttttttcttggaagtatttcacagcgtttaatacttgtttgaaatggtttatatgaattaaatctgtacaaccatggggtaaaatgtaaacaactgcactattaggaagatattaaagtagaggctatatttacagtgtcgtctttcaaatctagctatgctgtaaactgatgtttgctgtatgctcctcctgatttgaaatagatgaaagaaaatgaacctattatcaccatggttcacacaatgattgagaactcggcgct

SEQ ID NO: 2124 - DNA, 614 bp, Homo sapiens
ttcccacaacctctgcctcccacgttcaagcaattatcctgcctcagactcctaagtagctgagattatgggcgcccaccaccagtcctagctaatttttatatttttagtagagacgggatttcgccatgttggccaggctggtctcgaactcctgacctcaggtgatccgcctgcgttggcctcccaaagtgctgggattacaggcatgagtcaaagcatccagcccaaggctacttcttcttagatgacgcacttcactctcccaaaatgattactatttctttggattatactttgagaatactttgagaaatgctgaactcttgaaatgagcattggtctgagagtcaggagacttggcctctagtcctggttgtatacaagtaatgttacctctctagacctcagtgtcttttccaaaatgggagggttaggccagagtctctcctccaacatctttttggatctaactatctacaattctatggcttctgcaaagtatactggaatcagtgtgctgctttgggagagaggtgggccagaggacctccaaatttctaaataattcttcagaatatccatcttttaagctacagatcttaaaacagaaa

SEQ ID NO: 2125 - DNA, 411 bp, Homo sapiens
tcagcgactggtgtgcaattctctttcaccccgtcagggtgagggcacatgtcaacaactctggcagggtgaggggaccagctgcgacctggatcatctatagggtggtggctcagcctctctaagcctcagtttcctcatctgtcaaatgggcagcaacaactatgtcagagagttgatgggacaaatgaatcaaccgcccgggtgtggtggttcatgcctgtaatcccagcactgtggggggccgaggcgggtggatcatgagatcaggagttcgagaccagcctggttaacatagtgaaaccccatctctactaaaaaatacgaaaattagccgggcgtggtggcaggcgcctgtaatcccagctacttgggaggctgaggcaggagaattgcttgaacctggtaggc

SEQ ID NO: 2126 - DNA, 517 bp, Homo sapiens
caagattgcttcccgccagatggcatgtggaggtgggaggcacatggaggccaaagcaggcgcacctggttcgggtgtaggggtaggcattccaagactcctccaccacccgcagggctgccttgggcaggatggagcggaaccagctgggaatgtgcatgcccacatgatacaccttgtgtgtgtactgcccagagccgcctgggccatctgtgtacggccggttctccaggatctccacgccgctgccttcgccatatgtctcgttacggctcttcttctgtggggacaaaagcacctgcaatgtgtgtggggccagagcactcttcaggagggaaggggcacaggagactgggcccaggggtgtggaaagggaggaggggctttggtcaacgaggctggctcctcctgtgtcacttccagggccccaaatctatatgccagggcttgtgcaagaggctgaaggggccacagactccctctcccagacctagtgctgcacacacaagtcctatat

SEQ ID NO: 2127 - DNA, 568 bp, Homo sapiens
tcctcacagtcctgacttgctgctcaccaatacaaacaaacagaaaaagattagtgagggtcctaagatagcatccttcaaggctttggacatgaaatgaagggggataataaaaaaagactcaaaaaaagacatgaaaacccacctaaacccacctttcttttctcccctacaaaacaaatgccttcaagtactggtggagggtcaagaaagatgtgcacccttagggcactagtgaaaatcaactgaagctaggagaaaagaaaaggaaagaaaactccctatatctcggggaagagcagtggaaaatcaacagaagctagggaaaaagaaaaggaaaaaaatctctctacatcttggagaaaagcaggaatacaactaggagtggcgtaggagcactgagaaactcataaccctaagaaatgagtcttagggcacagtatctgcctaaaacagatgcttaattagaactataataaaaatcaccccaaccctcaccacgaggatagcaggcatcaagtaacaatggtatactgcagggagattaagcaaaaaaggggagagaaat

SEQ ID NO: 2128 - DNA, 637 bp, Homo sapiens
atattaagtaaagttaaaatgctgaaaaagatcatcaaatttccaacatgaattgttctgtaaagcaaaatagaagataattaaaaattggcagggtgtcaccatttaatttcatccactgaatttaaataaccagtattttggccaggtgtggtggctccacctgtaatcctaacactgggaggctgaggcgggaggatcactcaggctcaggagttcaaggcaagcctgggcaaatagtgagaccttgtttttattttaaataataataaaaaataaccagtattttcaaattcatgtaatatggttaatactgtgctaagacataaagaggtacaggcaacccataggacatggcttcattctaaatggctttactatctagttaggagataatgctaacaaccaactaaggttgccaggaagtttatcaaatgtcatattgtgtgacgcagactttacagattatagatatctggaaatggggctagagaatcaatacttacttcattcattgaatattggttgagaacctattatgattctctgtgaataagagcgtatgttcggagtttgcaatctaatagagggagacaagggaaataactaatacagaataatttaagtggacaggtat

SEQ ID NO: 2129 - DNA, 244 bp, Homo sapiens
gcaatgatggtggagttaggatttagatgctactgtctctaaagattgatgttttctttgtttggaacagagtggggtgtgtgtgtgtgtgtgtgtgtgtgtgtgtgtgtgtgtgtgtgatactctttaaaacgcagggaagacacaggggtttatgtgcagggtgtacttgtcaggctctcactcttgcgggtctggcacccatctgactctttgtcaaagccatcactctctttgttaatga

SEQ ID NO: 2130 - DNA, 609 bp, Homo sapiens
ggatgacgtcgtggttgcggtgctctactatgcacaacaccgtggctacattaaaataaaagaagttttaagccctactccccgcacgaagcagaggaagggtgagcagggaggagatcctcctgtcgtgtccattctgagccttaagtatatttctgtttttcaaggcaaatagattctggtccacttttagaaaccttaatctcggtcttcgttgtgtctggtgaatacatgagtgaccagcaggtggtgccagagacagttggtagccagggaatgccctaactgtcctcggctgggatagctgaggtcactcactggctggagttgagcatctggggctcacatgcagacgtgatgggaaactggatccttttaatatgaaaaatgggtaactgtagagctaattcttattgtatattaatagatatttatcaggctgggtgtggtggctcatgcctgtaatcccagcactttgggaggctgaggcgggcagatcacctgaggtcaggagtttgagaccagcctttccaacatggcgaagccctgtctctactgaaaatacaaaagttaggtgggtgtggtggtgtgcacctgtaatcgcagcta

SEQ ID NO: 2131 - DNA, 652 bp, Homo sapiens
atagcattggtgtcatcatttatgcttatatctggcacttgttgctacaaaggtcctttgggatcgcatgctaaatgcaaagatagtaacatggtacataattgctacaattttgtttttagaaaatcatttactgtatttacttaacctaacattttaaataccccaatccagtatcaaaacaagattaaaccagcagttgcatgatttattaagctagtattgcagaagaactctccatgtaatctgaaaaatcaaatgtagtaggaaaaaaaataacttaggcaaacgtaaatgataatgttaaataaaagaatacaaaaaagctctccttccaacctgcacctgcattttaggtggactttagaagactgtggtgtttctgtaactgttaataagcattcataagaccccagaacagagcttcacagccaagcagaaatacataattgctacaattttgtttttagaaaatcatttactgtatttacttaacctaacattttaaataccccaatccagtatcaaaacaagattaaaccagcagttgcatgatttattaagctagtattgcagaagaactctccatgtaatctgaaaaatcaaatgtagtaggaaaaaaaataacttagacaaaaaaaaaaaaaaaaaa

SEQ ID NO: 2132 - DNA, 261 bp, Homo sapiens
gatcatacaatctagtagcctgttagaatatggagtatgacagacagattctggaagtcacattattagtatcaacctttaaagaagtacaaaaacataacccataatcaaaagagaataagatcaatagaagaatattttgaaataatcaaaccaaacatttaaaataactatgcaaaatattagataaatgatctattagaaagttacatggataaacagatgacaatttttaacacataaaatgaagatataaaaagc

SEQ ID NO: 2133 - DNA, 561 bp, Homo sapiens
gagctagaatgcctgccatttatcacccaagataaaactctcagcaatcccctcatgcaaatggaaccctgtttgcggaaaggattaatccaaattgttccgcgttgttcaaagtgtctctgtggagttcgttctgtctcgtctgccccaaacaagcaataaattatccacacgtgagccaatttcccaaccaaaaagagacaatgtgggcagaagcggacttttgatgcccactccccgcaaggggctgccccacctgggctcaaaatagcaagcaggtcacggagggcagccctgggcacataggacaggagtaaacacagccaggagattatgctgcagctggttaaccacaaggataaacaagcggacaaagtagggagaaacccaaagcactccacttcagtatttttaaatgacactgaaagcaatttcatggcttccatttaaaaagaagctgctgagacacagaacatccccaatttacaaagattccaggaaacagcctgagcttgtgattggagggggttacggcggtgaacagactacatggaaatgctt

SEQ ID NO: 2134 - DNA, 537 bp, Homo sapiens
caagcagtacttagttactgcaagtgctacttctaccaatatttttcttcctttctgcccctttaaagagaggttgtccctttttaatagatatatgacagctctgcttcctttcttaagtctaagatcaaagaaatgttgtaataaaggggagtcactccctcccattccttctctctttttgtggatgttgttctgttttttaagagcgatcaggtcttgacattagtggatgcagctgttgggctcccaagctctgcctttcatctctgggtcaccactgcagacagcatccttcatctctgtcatggtgtaaagacaccactgtgggggaacagtgcgttgcaggttaagtacatgaagtatttctagagatcctagccacctttgccgttcattgttgtttggatgcacttttctttgaaatgacatggaatgtttggcagagatgtcaatcaatagaagagtttctctgctttagaggtacctaaacctcaccaacttcttgtaaattggaagactagctccaaaaaagta

SEQ ID NO: 2135 - DNA, 575 bp, Homo sapiens
aaaactttcaagagagtattgcattatggaagggaagaagagagaacattttaaatgatacgcaatgctcaataatggtatccgctttggagaggccaagtaagattcctaagtacccattggatcaaggtccttaatcttacaaaaacttatacaaatcaataataaagagatgataacccgataatcaaaaatagacaaggcatataagaagaaaatgaattaaaaatattcaaagcattcaacatatacaaatgcgctcaatctgatatataatgaaagaaaagtaaattaaaacaacaatgggcatgactaaataacagtatgagggagcctgaggagaaggagcatttgaaatttcagtacagaagagaaaaggggtgacttatagaaaaaggagacagaaaccatagaacatgtttggaggataagactcaaacaggtagtggggacccttttctagagtaggatgaaaacaggtaatgtgtgtggatgcaaatatgaggtaggatgtaatgggaagttgagcgaattcatatttagtcattcattcaaaaatacttaattgagttact

SEQ ID NO: 2136 - DNA, 654 bp, Homo sapiens
tggcaaaccaaaagcattccaccatttattttaaaacttgtagtcaacacacatcagacttttatattgcctcaaataaaaattctctaaagaatcaaatctaaagctgtgctataaatttccctggggaagttaatcctaaagttcttagacatcaatatatgctcctgaccaaaggttggatttcagaggtcatgatgacatagattgataaaatcctgctgcgtaatccagccacgaattacgtgttgacattgataagcaacatttttcattgcctattaaataaaggtcatattcttcagcctggcattaaagatgaccccagtttgaatttcgaactttatttccctcgactctagccaagtggaacaaattgtgttctgtgcatgtcctttaatttattgtctttatggttttgcttacagctcctttcacttgtaattctctttctttctatatctgtggatcccaaacttatccagtaattaaggaccagtgcaaatgacatctccattgggcatccaaatacccaaagagctgaaaatgtactctttcaattatctcctagacacctgacaaacttcatctcatgttatatttatttatgtatgtttaatgcaattcactagaggtaaaccttcctgacggaaa

SEQ ID NO: 2137 - DNA, 606 bp, Homo sapiens
aggcaagagctcatgacaccagcttccatagactgcagctccaattgtttgtttgtttgtttttttgagatggagtcttgctctgttacccaggctggagtgcagtgacacggtcttggctcactgcaacctccacctcccaggttcaagcgattctcctgcctcagcctccagagtagctgggattacaggtgtgtgccaccatggctggctaatttttgtatttttagtagagacagggtttcaccttgttggccaggctggtctcaaactcctgacctcaggtgatccgcccgcctcagcctcccaaagtgctgggattataggcgtgagccaccgcgcccggcctgtagctccaattgttaaggaacagtttgtcattaaatcccctccctggaaagagcgttgagaggtgattctaatatgtccctgtgccttatatttaggatcatttccagaaaaaaaaatatgtcttttatcttaagtcagtaagcttaaagaaaaggaaaacccacaaaaacaaacagaaactcctgatgattatgctagcagaaaagtggacaaatacacaagcaggcagtttatatgaaaagaagtataagtggt

SEQ ID NO: 2138 - DNA, 584 bp, Homo sapiens
accatggggtgtaggtgtgagaagatgtactggcgtatggggcaatggaaatttcaataattctggctgttaacaattgtcatagaactctgaaggaagaaaattctagtctcggttttgataactattaacttagggcgcattttaaaaccaagtaagcctcagtaacactgtttaaaaagatttcatcaacacctgaaagacagatgttgctggatatcaaatacaaggtttaattaccagggttttggagttgggatgaaggctgaattcagagctccaacaagtcttctacagtaaagtgaggttcatgataagaagaaaaaactctaggccaggagcagtggctcacgcctgtaatcccagcattttgggagtccgaggtgggcagatcacgaggtcaggagatggctaacacggtgaaaccccatctctactaaaaatacaaaaagttagctaggtgtggtggcgggtgtctgtagtcccagctactcgggaggctgaggcaggagaactgtgtgaaccaggaggtggagcttgcagtgagccgagactgcgccactgcactccagcctgggcgacag

SEQ ID NO: 2139 - DNA, 628 bp, Homo sapiens
caagcagtacttagttactgcaagtgctacttctaccaatatttttcttcctttctgcccctttaaagagaggttgtccctttttaatagatatatgacagctctgcttcctttcttaagtctaagatcaaagaaatgttgtaataaaggggagtcactccctcccattccttctctctttttgtggatgttgttctgttttttaagagcgatcaggtcttgacattagtggatgcagctgttgggctcccaagctctgcctttcatctctgggtcaccactgcagacagcatccttcatctctgtcatggtgtaaagacaccactgtgggggaacagtgcgttgcaggttaagtacatgaagtatttctagagatcctagccacctttgccgttcattgttgtttggatgcacttttctttgaaatgacatggaatgtttggcagagatgtcaatcaatagaagagtttctctgctttagaggtacctaaacctcaccaacttcttgtaaattggaagactagctccaaaaaagtaaaaggggttggggggaagaacaaaacttttactggcaggtttttttctagacataaacacagttgaatggaaaggataatagggatcgaag

SEQ ID NO: 2140 - DNA, 122 bp, Homo sapiens
tatctgtgtggtttttaagtttttaagttagatacttaccttgtttttggacttttatatgtatctatgcattgaagccataaaattcctaagttgagcttatgctatattccatggcactc

SEQ ID NO: 2141 - DNA, 541 bp, Homo sapiens
ccccaaaccatttctgcatggcctccgtgggaccaggggctccccagctccacaatggggagagccccccagggtagagccttaaaggcccatgtgactcccaccagtcctcaccctgcaccacatggctctgggacctctcctgggtgcaacctctcttgttccctgccacacttctgcctcagtgcctttgatgaattctgccctctgcttggaatactcaccacgtccagacacccacctggcttacctcctcacatcctttcagtctttgctcaatgatcacctttcccgaggtctacaagacccctgtgtttaaaagagcaacttagcacacttcccttcctctgctttgtttttctttgtagtaattaccagcttctagcatcctctgtcacttacttatggatcatgttgattgtccgccccttcctcttcgaatgcaagctccccaggggcaagacttggttggtttttctcactgccacattcctggaatgttcaaagcataccaataggtatgtgttgaatgattgaaggg

SEQ ID NO: 2142 - DNA, 603 bp, Homo sapiens
actatcactagaacagcaccaaaaaacctgcccccgtgattcagttaccttccatcaggtacctcccatgacacatgggaattatgggagctacagttaagatgagatttggctggggacagagccaaaccatatcatggaacaagataaaggggcctttgcatgtcagaaatagttccagataccagcaagacagacagtttcttgagttggacttattttcagctttcttagcatctgttatatggtaaatagtgggcgcatccccattgaaaacaatgtgaaaggagaaagggaaaaaatagtgaagaaggcagcagcacgctgaagactggtgcatgctggtgcgtgtaaagttcagatggaatctgctgtgctttctagaatctcctactttctcactgtgttcagcaggagagaccctttttatcttggcaatcatatttcccatagttagtcctctccctaaccctgtgcaggcaaggcttagctgctcactccttcacactgttgccttctttgtcctctctgagtcagagttctgagcctgtcgcagatccagtataaaactccaccttctccacatcagttcacgttgagccc

SEQ ID NO: 2143 - DNA, 551 bp, Homo sapiens
gtttgaagtaaaatacagcaaccttacatagagctttataataagcttcatgtgttcaaatataattggtacttttataaccgatgctgtttgtgttatactcagaaagttatttcttatcgtaagattaccaatatagtcaccaaaatttttttttatagtttgaattaattttctacatttaaataaaacaagcgctgctgctgttgttactattcccttttaacatctccccaaattagtgttttattctgtacactttatgagatgccagcttaacaatacccttaatatggcccaaggattttacaaaaggaaatgctggtgtgtttgtcaaaagtgttttctggctgggcatggtggctgaagcctgtaatcccagcactttgggaggctgaggcaggtggaccacgaggtcaggagttcaagaccagcctagccaatatggtaaaaccctgtctctactaaaaatacaaaaattagctgggcatggtggtgcatgcctgtagtcccagctactcgggaggctgaggcagaaggatcacttgaat

SEQ ID NO: 2144 - DNA, 351 bp, Homo sapiens
tcactttgtggacttgggcacctgcagagtgcctggcatggtgagcaggagttggggcatggcgtgatctaggcagggtttggaaggttctttgaatagccaagggggacagtctggagggtgccctccagacacctgagaatgcattgaagctagggtgactactgcagcatcagaggcctggtgacacatttaaggcctcaaggggcccatgtgactagaagtccaggatgtggctgaggtgggccagactggatggccagcggccacctaaggacaattggctgtgcgtttgggaagcatgggtggtccccacctcacagcagtcgcacaggcagacagtgggcagat

SEQ ID NO: 2145 - DNA, 579 bp, Homo sapiens
atgtctgtatgaaataataattattatatcccttatatggaaacagatccagagaggaagatacactagcatgtgtaaatagaggattcaagaattaaacatccatctgtccaactgactacaagctctttcataaaatgctaatttctctcctgcttctaattttcttatcaaaaattgtcatctattgttatttttgggtctatgggtgggtagtgactccttggtttccattttgttctagcggattactgtctttatttttgttctagtgtttattgagagtcctaattaattaacctggctgctctgacttccatcagctcaccattgtctcttcttccagctcataatttctgtaacagagctctaggctatgctaaagttctgctatatgctgccagtctctctagatccaagtgcctcttgtcggccaagtttatatgcacgtgtttaaaatcttcttattgactctatatacaaagtcttcacatgccttcctccttaaaataatagcattgtgagaagaaaaaaaatcatcattctttttaaaactaattcaggatgtctatgtaatac

SEQ ID NO: 2146 - DNA, 367 bp, Homo sapiens
cagttatgaactagtctgttttgaagaaaatggtgatggaaagctaaaagtaatattttcactttattcaacaaatcttattgaggtcttattatgaatcaggggctctcctaggtacgggcatacaaaattgattaagaccatgcttgcgtgcagaaaacaaacagaaaagcatctctataataaaaaggaaaaagaggaatcccctttgtaggtttcatagtttatactgatatttctgatgtcgctcagagaattagtcacaattataggaactcagaaggcattccgtggagatgaaatagagactaaactagcagagattacttagtgaaatattgtgataccatttatttcaattagaaaa

SEQ ID NO: 2147 - DNA, 468 bp, Homo sapiens
cagggctatcatagtgggctttaattttcctgtatgtctaagtaatattgcaacgaaaaggagacacattgaagtttgacaacaatagaagtgtcttttcagcaatataattttaactatacttctataagcttaaataagttcccctcaagctacagtaacctctcataatctttgttatatggtgttaaagaagctagagtgaaaagacatttgccatctgttaagtgacctcaaagctacctgaattatttggaatccatgagatcatggggcgatcactgagactacagacataaaacactgtactaactagataatgttccaaacctaagaggctgggggcacatgaaatcagacacctgaatttgttgttttgtttttacaatgattttacagccgggcacagtggctcacgcctgtaatcccaacactttgggaaccaaatacaggtgaatcacctgagat

SEQ ID NO: 2148 - DNA, 360 bp, Homo sapiens
gcatttctacttgtaaggtatgagaataactttttccaagaacagtctatattgaggatccctcttcccatctttctcctcccatctactcctcaactgcttataatttgggttttgctccagctactctattcatattcttctccaaaggccactaattatgtgctattgctacattaattgttcttttaaaaatattctgtttgcgttttgcaacatttgaagctcctggagactggttttgtatattacttctcctgacttccttaagaatataccctaaccaccatttcctgattcttttgcctcatcttcatctgcttgctgcttggatgtaggtgcttcactagattccattct

SEQ ID NO: 2149 - DNA, 528 bp, Homo sapiens
atcttgcatatgttactctttttctaaaataaaaaataaattcaacattggttgtcaagtgtcttcattaatcatgaatgccccaatgcagtgtaatatagaaagcatggttttcttttttttaagaatgaaatgtaatctttaggggtgacatttaaaatatgtttctttttagcaaaagtcttatgatctttctttgacatattctcacctggataaatttaattttaaattaggaatggtaaaaattgaaaatctttttatttaatatgtaatatcttaatcatgaagataaagtttaataggactgcatgtttatgtttgtattaatggtaggacatggagatgtatcaatcaaaccaataaaactccagtacacataatataaatgtcatcttgctttggtgggtgagtagcattgtgaacaggatttcttgtcaagttggtgctgttattgaggatatgagaagcaaagttcttgagtaggtaatattcatgcaaaattttctgtttctaaatatcttctaa

SEQ ID NO: 2150 - DNA, 333 bp, Homo sapiens
ctctctgcctttaccataatcaaaatttctgggcactcaaaattggaatctgataaggctaagaaaacaacttgactgatcacacagcagaagtagctgtcttgaactttttctcatgtacttattgtccacatgtatgtcttcttttgaaaaatgtttatattctttgcccactttttaatggggttgtttgtttgtttcttatatatttgttgaagttccaaataggaagagaggaagtcaaactatccctatttgcagatgatacaattctatatttagaaaacctcatagtcttggccccaaagctccttaagctgataaacaacttct

SEQ ID NO: 2151 - DNA, 397 bp, Homo sapiens
atgagttgctataatatgagctgtcatcacattttaacatgcatatgtattttttgatacctgaattacattattagaataagtatccatatacattttcactccaaaaacacaagcttaaaaactttaaagtacatctagggcaaatggtggctgaaagtgaataatattcaaattactgttgcttgtactgtataaggaaaactgcttttttaaattgggtatttgctaatttataattactatttatacttttcaacatttttaataactttttttattgttggctataacagaaggattcagatatctaaatatcatttagaacatagaacacattggtctaattcatcgaaagcttagttatgagcattaatacaaccatgtagtagagcaa

SEQ ID NO: 2152 - DNA, 483 bp, Homo sapiens
gccataacctccaccatagtagattgtatccaaatatgctctgctgaacttaaggagtggcctttgttgtctaagtttctttgtaggtgaaagagaggttatatttgaaaggagttatgataaatgatctctggggaccatatgggtactgtgtgcactttaaaccttattcaatagggaggcaattcattaagggaaatgaaagatctctcattatcaaaaacaaaacagaggttttctttctatttagaaacattatttagtattttcccactgtaaacttgcatattaacttgagcccaattttgtatctttttctagcctgttagtattcaatatagaagcacatgaaacagggagtagtaatttacagaaacattttccagtaaacataaaccctgttgacattgtgattaacataaaatctcccattagtagttttccgtggagatgactgtacttgttgaatgatgatgcatttgc

SEQ ID NO: 2153 - DNA, 316 bp, Homo sapiens
cagtggagtaaatttcataaagatcagagtacaagcaaaccacagaaatggacccaaacagagagtcatgttgccctgctaatggaagcactcaggtcttacgggggtagggagtgcgggtgtgttaagaatcaggccacctggagagtgatatttgctgtcttggattagtaaaataaaaatgcccattagtcttccacagctaccaaaagccagtgtgagtccaccttggccagttaggtagggccagtgaccaagcacacctgcagcaggggttcagggccaaaggagacattgtgacgctcatggatgagtc

SEQ ID NO: 2154 - DNA, 627 bp, Homo sapiens
  misc_feature 192, 193, 194: n = A,T,C or G
ctgtttttcagatgggaaaactgaggcccagaaaagttaaataaatcatccatggtcacttgtttaataagtgacagagaaaagttttcaacatagactatttgcttctgaagtctgtgtttttaatcacttttaatcattatgctacactgctggggagaaagtttggcttgcatttgagatccttatagnnncacatctaattgtaaatttccaaaaggcaattggaaatatgataataatggaacccaaatgtcagagctgaagatgtggatttcttcagcgtatgaatgttcattggagttgtagacactgtccaacaaataatgtataattttattggcccaaatgagagtaatagggacttcaagacagcttgatgccatcaagagtctacttctagaccccttttatagcgttaatacaaagcaacaactactgtattatttcataaatatatttggtttcatggttgtttatatattcaaaacaattatttgactgtggtacttgcaaattcatagaactcttttgcacctaactacattaataccagatactaaaagttaacttaagaaaataaaggaatcctaatcaacatttatctattattaaatttggatttga

SEQ ID NO: 2155 - DNA, 550 bp, Homo sapiens
gaggagactttaaaagtttcctcactgcaaaaaacaatggtaaatatgtgagataataaatatgttaaatttgttagcttgatatggtcattccacagtgcatcaatttattgaagcatcacatgccacaccgtaaataagtaaaaccattttttgttaattaaaagtaaattgcttaaaatgtgaaaactggggcttgaccctttaatgctttgcagcctacattgtagaaataatctaaggtattactgataggtgttatctaactggtgtatatattttactgtaagagaaagacatttacccatagaaaaaaacaacactgaacttgggaagacttcaacctcttcactctccaacctccactcccttcagaggtagaatttttctgaaaggatcaggaaaatgtatttctctgcacaattttctctccaagaaaagcatactaagaatgtttgcttcttatactccacatagccatcatctaccacagtcattcatctggacttcaagtctgccctgctgggaagtaggtcaccacctctacact

SEQ ID NO: 2156 - DNA, 343 bp, Homo sapiens
ctttatttcgtgaataagaatgttttgattttgatcatacaaataacttttgtagatttttgtttacttttgggggggttcccttagaagacattaaaaaaaaatactgccttggtctgtgcaggctgctgtaatgaaatactatgaacttggcagcttataaacaacagaaatttatttctcgctgttctcaatggtgggaagtccaagattaagggatcaacaaattaggcctctggatcatacatggcattttctagctgtgtccttatacataaaaggaaaaaggtagctctctcgagtctctttaataaagatactaattctcatgactgaatcaccc

SEQ ID NO: 2157 - DNA, 93 bp, Homo sapiens
tacagaagagagtatttgaaccttggagaaaatataacttctcatattgcagatttagtaattggaactgctgtgcaacaggcttttggagca

SEQ ID NO: 2158 - DNA, 311 bp, Homo sapiens
cttcctcaacctgctatgaatatggctattaaattaagaacttaatagatctcttgctcctttttgatctcaaagtgtcttttggagctaaatttgcaaagaaaaggccctcattaaaaaaactaagtaaatttaaggccaggcacagtggctcacgcctgtagtcccaacactttgggaggccaaggcgggcagatcacttgaggcgaagggtttgagaccagcctggtcaacatggagaaatcctgtctctactaaaagtacaataattagccagacatcgtggtgtgtgcctgtagccccaactactc

SEQ ID NO: 2159 - DNA, 202 bp, Homo sapiens
gcaggaataaacatacatgataatgtaaattggaaagaacttttgctttttttgttcacctgttctatgatatgcttgctgtagtctggagttaatttccacacttgcttttaatgtaaacattgtttttctatttgtaggaaagattttcccttttgatctctcacatattatcttctgaattaaagttctctagagaact

SEQ ID NO: 2160 - DNA, 579 bp, Homo sapiens
ggtgataaaaagctaagagttttaaaattaagcagatttcatttgacaactgagctaaaattttgagtcagccctaaactccaatctgctgtgtccttttcacttttggtgaccttttactatgctttaactttagtgccttaacttggtaaaattgaaagaagaacaaaataaatgttgtgagagaaacttgccatttctctatattataatttgattgtaaaataatcacattaatgattctaagtcccttaataattgcttactagcagatatattatcaagcaaacactagttaatgttactttgtcagatataattacaatgcaaattaaacatacacaatgcatgccctcaaggaatttatataccacgacagacataatcacaaagatacacataaatgtatatacatcatatgaccaaatttatatttttgtgttgaaattattggtaatataataaatatacaaatcaagtattatttctataatgtataaggttattaattttaactagcatagtacccatgttatttttattttgagacacatgtatcatatattactgaagtataac

SEQ ID NO: 2161 - DNA, 235 bp, Homo sapiens
tcataaactccagtcattacagatgtcaacatgtgcaagaaacagtacagtcaaattataacagcaaatttatatcaactcttttgtttgctttttttgagatggcactctgtctctcccaggttggagtgcagtggcatgatcttggctcactgctgcctcccgtattcaagtgattctcctgtctcagcctccccagtagctgggactataggtgtgcaccaccatacccagc

SEQ ID NO: 2162 - DNA, 448 bp, Homo sapiens
ataaaatgagtatcatcatagtaatcactgagacggcaaaaactattagctcatacccctccttctacttctaatgtaggcttggtccccatagcctactgtattttggagtacttcagtccagtctgactttaaatggatcacgtaatgacttcttccagagtctttgaaagactatttcagtctaatggttctccctattaagaacttgttgtgatattcagcttaattttctcctgattatattttatcttgttacttaattcctattataaaccttctggactagttcatcctcttgtctgattcagattcttcatccaacatttctctaggacttataaaatacaaaagcttcacacagttacaggagagaatacaaagatggcaattctatgtccagacatctttgctaaatgtttaagacattttttgcacacttatatat

SEQ ID NO: 2163 - DNA, 178 bp, Homo sapiens
gtttcaggctggtctcgaactcctgacctcaagtgatccacccacctcagcctcccaaagggttgggattacaggtgtgagccaccgcacttggccttcagcctatgttttcatttgagcacttttctttataatttcacgttgtcatcctcatctaaaacccaatttcctttaggga

SEQ ID NO: 2164 - DNA, 534 bp, Homo sapiens
cagaagggaaaccaataacaaagaaactatcttcaaagcagccagagagggaagaggacataatacatagagaaatgaatgaagataggaattattactgatttctaatataaacaatgcaagtcaaaagataataaagtttttttaatgctaaaaggaaaggaaaaaaataactttatatctgtaaataaagctgtattcaattcaacatttagacctatctaaatctgtattctattctgttctataggtataactattctattttattcacatctggctaaaatatccttcaaaaataaagacaaaatgaaaacatttttagaaaaggaagaattgaaataatttgtagaactgcaccataagaaatgttaaagaaagtgctttaggttgaagaaaaacaatactagaaggaaatttaggtccacatgaagaaatgaacagcattagaaatggtaatgatttttacgctttacatgaaacaatagaatactatttattaacctataataacattattaacttatatataat

SEQ ID NO: 2165 - DNA, 341 bp, Homo sapiens
aaaaaattttatccaatgccgtgaatgagcaaaacatattatccaaagccttaagaatgagataactaaaaatatactgtaacactattaaattatatacattaattgcatacagaaataaattatatacaaggaaacatgtaaactaacacacacatgttcatattcaagggaacataaagaacaaaacacatacataaaaaacaaacagtcacatatgcaatacacataaaaagaagaatagtcaaaagatagcagaaaaagagaattgtagaaaactcttaacacgaaagtcaaaaattacctccaaaccaatatttctgtcttagtaatatagatac

SEQ ID NO: 2166 - DNA, 429 bp, Homo sapiens
tatagagttgatggatatgttaattcacttgaggtgatggattcattaattcacttgagtgtggtgatcatttcacaatatacacatatatcacaccatcaagaagtacaacttgaatatgcacaatttctattgttgagtatgttgcaaaagaaagcatgagggaaggaaatataactttatcttgctttaccaaagagatgttcttggaaacatgtatgcaaatcacatttattaccaatccaattacaaataaatactactatttcactttaccactgaaatttatttatttactttgcagaagtgattgaggaaacatacatgaagtgcccactttgagctaggtagtagacagtagagataaacctggctaaaacatggtccctctgcacaaattgatatctgaaccaatgtgatcattcagct

SEQ ID NO: 2167 - DNA, 561 bp, Homo sapiens
taaatacaaatgttgtccaggagtgacagaagctggagaattggactacttgatggaggctttgtacaagctttgaacaataataacaacaaaattgaaatgccaaaaatattgtttaattagcagttaaccaccaataaaaggaagccagccatttcacacagaggattttgttaattgattgcatgaattttcaaggaaataatattattaggtgtgtattagtccttattgcattgctataaagaaatacctgagattgggtaatttataaagaaaagaggtttaactgactcacagttctgcatgctgtacagaaagaatgttgcatctgctgggcatgtggggaggcctcatgaaatgtataaccatggtgggaaaatgaagagggagccggtgcttcatatagctgggagcaggaagaaaagtgagaggtgaggaggtgctacacccttttaacaaccagatttcataataactcactcactcactatcataagaatagcaccaaggaaatggtattaaaccattaaaaagaaaccactccacaatccaataacc

SEQ ID NO: 2168 - DNA, 316 bp, Homo sapiens
tgcgcagggccgtcaggctggggacggacatttgaattcagttgactgatggaggagcagtgagcctgtgagccagcctctggggtcaaggctcccagacagtggctgctctgttactccatgtgttccctaccagctcccccacggtggctgcggggactgagcacacagaccctgcaccttctggggcatctcccctgcctctcacaaagtcctgctgcttcctctgctgtattcatcacacgcttcacaatagtcatgtcaccgatttctcaagaatgtgtaggaatcatgccttgccccatgccctcagcat

SEQ ID NO: 2169 - DNA, 82 bp, Homo sapiens
tgacaccatctgactgtagagcctcagggcattcagtgaacataggtagtagccagggagtagttacatcaggccttgggtg

SEQ ID NO: 2170 - DNA, 431 bp, Homo sapiens
atattgttggcagattaaactcccttgtgtaaataagtcttataatactgattgatgattatatgtattgtgaaattgagttgaagcctcctcaggatataatacctatggaaagtgactggcttgaggaggaactggatctcactatcagctgatttccatcctgaatagttctgcacaaggtacaaataacagtagatcaagggaaaagaaagctggtacaagatgataaagatgtttctaatggcttctgtcaacctaaaggaagaaactaaggtacaaaatacaattttaaagaatttatttgcaccataatgaggacagctgcccagcagactcagatccaagtggatttgagctccatttggcccttgttacaaacaggtttttaaaggccaaaaattcgggacaggatgtgggctgatacaaag

SEQ ID NO: 2171 - DNA, 368 bp, Homo sapiens
tgggtggagaaacactttaaaataagaagccttcataaaacatggaaagtaattttgatgtgttctctactagttttagaaactgctaagaatatgaagaatccaagggattagttggtcctaaggtctgttcaacctgaaataagacagagttcctcatgtcagcattattgacattttgagccagataattcattgtgatgggggctgtcctgtgcaatgtaggatgcttaacagcatctctgatttctacccactagatgacattagcatctctgccaccaattgtgacaatcaaacatgcttgcagacttagtcaaatgtctcctagggaacaaaattgcccctgattgaaaacctctgatcta

SEQ ID NO: 2172 - DNA, 567 bp, Homo sapiens
aagccacaaagtcatctctgccaaacaagaagtcaaacagtttgtctctagttaagagtttatgtgccatggtaatggcagagaaagctgaaaaaacagaagactggccataaatgaatacccaaaagatcccagaattgaagccttcatctccattaggaatagagctttttaataagaggactgtaagtttaagaaatgtgaaggactaccttccctttactgtggtatttttatagtacattatccagctcttggttcactctacaagtgaaagagaaatcagatgataattacaaagaattaggattatgcgtccagagttctaaacacaagggtgaattgaatggtgtatataaaaaatgtttttattaatatggtgaatgaggccaaatgcggtggctcacatctgtaatctcagcactttgggaggccgaggcaggtggatcacctgaggtcgggagtacgagaccagcctgaccaacatggagaaaccctgactctactaaaaatacaaaattagctgggcatggtggcgcatgcctgtagtcccagctccagctactc

SEQ ID NO: 2173 - DNA, 528 bp, Homo sapiens
gaattgttcccaccaagaaatcagtccgcccggagctggccccaactgtcagaaagcagcccagaatagaggtacattgtgaatcacaggccacgggccacatcgggagggagaaagctgccggcagacggactagaacgtgtcctccacctgccccaccacccctggccagatccctgttcctaccccagaccttggtggagccccccaggtgctctgagccctgggaaagctttggctgtgtggcttctgccaggacaagttggcttctaagcctgactgtcccctgagcatcagttcaagtgcagcctggggcctgtgggcatgggagggcccgagtgcctggaggaaaatgttttcatgatgccagtctatctgaatctactgactgacagggctgcagggtgcacactattgtttctgggtgagcaggacctcactttctattctttgggactttcagtatctgaatttttccacctcatttcttgggctcctccctcccaagggaggatgaggtgggacgtg

SEQ ID NO: 2174 - DNA, 464 bp, Homo sapiens
ttttagtagaggtggggtttcaccaggctggtctcaaactcctgacctcgagtgatcctcccacctcagcctcccgaagtgctgggatgacaggtgtgagccacctcgcccggcctggactcaatttggattgcaatgccccacaatggtgacctccctcttctctgttaatgcatcctcttccctcttgcttaaaaatttccccagtgccgtggcatcttacctcctgctgaagtgtgtgctgatgctttgctgggggctggaccccgtcccttggagcctggcccaggccctgcctcccagtgaaaccctagccgcctttccaacctcagaggctctatctcctcccaaaccctgtagcccttccagttgctggtcactgacttccattaattggcccggtggccttgcctgccagggggaccatgaggtgaggggccgtgtcctccgagtggtctctttct

SEQ ID NO: 2175 - DNA, 583 bp, Homo sapiens
aaggcaacatttttttctcttaatttcaatctaaaaaatattgtagccatgctctttgacacagaactttgatgtctaacttactcatcatcttgaattcagaactacctcaaactgacctgttggtcacaaggtatacctgagcccacctctatatggaggtgaactggctttcatatatttcattgttgagctactcagtgatcctaaaaaggaagccagttgtaatgccatctcattagagttgatcattacagcaatttgctgcacactttaaatagttacacttaaaacacttggtaaaatatgtaaccttgaactcactactccttaatacttatcaaaagcttgaatgagataaaaaaaatatttttggagaattgcctgttggataagtagcctacccatttctctccatgttaaagaatctatccctataaaaagacagatggtcagaaaagttattacttaagctctaatatatggcttacctgcctcatccgatttgtttattcaacatatatctacttcaggcacggtgcttggtgctagggatgtagcaataaagaaaatacaaactcct

SEQ ID NO: 2176 - DNA, 459 bp, Homo sapiens
tagatgtaatcaataattttcttcaactattatttcatttttattgtgactgatgcagaactagtgggtgaggttaaaatataaggcaaagggcaagagtattatgacttttttctttgacgttttgaataataggcataattgtgagctcccatgttagtaattaactccagaaaactgttaatgaaaattactagcactaagattttctggccaaataataaataaataaataatgcacacatagaaacacacatattacacacacacgcacacacacacacaaaatatgtctctaaatatgcaaagtatttcctatgctgggatttcttacttatttataggtctcatatatgactgcattggtaaaaaccatgtaaagttaggattcaaaatgacattgccctttggacacaatttaagctctctcactcaccgtcttctctagagataaataat

SEQ ID NO: 2177 - DNA, 564 bp, Homo sapiens
aaggtgacccataagtcctacaaggtgtctacctctggcccctgggccttcagcagccactcctacacaagctggcctggtgccagcatcagctccttgagcttctctcgagtgggcagcagcagcagcttccaaggtggcctgggcaccagtatgggtctgggtggaggctatggcgggaccagtggtatggagggcatcacagccatcacagtcaactagagcctgctgagcccccttaagctggaggtggaccccaacatccaggccatgtgcacccaggagaaggagcagatcaagaccatcaacaacaagtttacctcctttatcaacaaggtatggttcctggagcagcagaacaaggtgctggagaccaactggagcctcctgcagcagcagaagacagtttggatgaatgtggactgcatgttcaagagctacatcaacctatggcagcagctggacatgctgggccaggaaaagctgaagctggaggccgagtttggcaacacaccagggctggtggaggacttcaagaacaagtacaaggacaagatcaataat

SEQ ID NO: 2178 - DNA, 476 bp, Homo sapiens
agtgattgtggaggcagccaggacagaagctgggaggcatattgtacagtgacaaagaacaaagacgttggagtcccacggcttcaggttcgaatccagactccacttcttagcagatggatgatcatgggaagtcattgagtctccctgtgtgccagtgtcctcatctgtatactgggataggacagcacctcccacaggggttctgaagtgatgtaaatgcaatgcttggcctgtagtgattgccccatccatggttgataccataaggggttagtgaaatgcactgttttttgcagctgtggtgccatgcaaataaaagttattctcaggactgcatatcgctttcaccctgtcataggtttcacattttattttgcttatttcctgtctcccattcggaatagaatctccatgagggcaaggatttaagactattttgttcactggtatgtcctcaagtgtctacaagactc

SEQ ID NO: 2179 - DNA, 650 bp, Homo sapiens
cacctgtagtcccagctacttgcgaggcagaggcaggagaatcacttgaacccaggaggtagaagttgcagtaagctgagatggcttactgcatccaacctggatgacacagtgtgactccatctcaaaaaaagaaaaggacaaagtatattggtccaaaaaagaagaaagaatgaaaaaaaggacaaagtatactggttagtatcgtaacagtgagatagtccccctttgagattagaaaataacagtatactcaaagtaacatcaataagaaccaacataaaatagacaagattcactatctacaaaagtaatctgcaccaagtagcaatgtatgagcatgtggtggagaatattgtctataatatgtgtactagaaggaagagacctcaagaaaaaggtcagagctggaaatgtagattagggaatctaggtcaaagttttgagatttcaggagtcctgagagaatttaaaaagcgaaatagccgccgggcgtggtggccacacccgtaatcccagcactttgggaggccaaggcaggcagatcatgaggtcaggagttcaagaccagtctgaccaacatagtgaaaccccgtctctactaagaatacaaaaaattaagctgggtgtggtagcacatgcctgtaatc

SEQ ID NO: 2180 - DNA, 575 bp, Homo sapiens
taaaatatcctaatttggcaaaccagactagttttaattacccatacaattctaaggtttatgacctctgaagtaatattccacaactgttttgtaatcaatctgtaattatttttgtgatgtcacagagtagctgatccccctccaaaaaataaacagctttcaaaacatttgttattatttatcattgtctatgcatgtattcattttgtgctgctattatggaatacctgagactatgtaaattataaaccacataaatttatttctcaccattctagagaccaggaaatccaaggtgaaagggctggtaaaactttcaagggccttcttgatacataatgccatggcagaaagcaaaagggtgaagaaagctgggtgcggtggctcaccctgtaatcctagcactttgtgaggctgaggtgggtggatcacaatgtcaggagatcgagaccatcctggccaaaatggtgaatccctgtctcttctaaaaatagaaaaattaactgggtgtggtgtcgcgtgcctgtaatcccagaaacttgggaggctgaggcaggagaatcacttgaacc

SEQ ID NO: 2181 - DNA, 606 bp, Homo sapiens
ctccagcctgggtgacagagcaagactctgtctcaaaaactaaaactaaaaataaaataaaataacgaagagtataagtggattgtttgtgacacaaaaaataaatgcttgaggggatgaataccccattcaccttgatgtgataattatgcattgcatgcctgtaccaaaacatctcatgtaacccagaaatatatacacctactaggttcacccacaaagctttaaaaatatacatataaagaaagaaaaaccccagcccagatagttctaggtgtgggaacctccatgaacctctctgtgttcaggtgaggtgaaagtgactatcccataggttgtcatcaggagtgaatgagaaaatgcaaatggagcccacacctcgaatataattaatgtacaaaaagcattaactaatctagctggtccagatgaggcccttgttgcaccacaagcttaagacccagaatcctacagggagactcttccccaggtgcactcctctcgttctggggctctgtctttaccccattctctccagctgggggcctgtagacctcatccccaccctgtgtccagcttcgaagtcaaaaagcttgtaagtaggcg

SEQ ID NO: 2182 - DNA, 632 bp, Homo sapiens
aatatcttaatatattgcccatgtgaagctcctggtgttacaaaaaaggcagtttatattcaacatacttcaagtttagaatagcagagcattttgtaatttagaacaaaggcatgttccctctagtagtttctgatatcaactgcaacttataaatttgccttgagacatgtttgcaataaaaattacaggttttctgattcagcatgttccatcatagcacactaagatagcaccaaagatgacaaaaataaaacgactgaagcaaaatgaagtgaacacaaatagcttattaccaaatgaaaaggccatttcaggagcccaaaatagaaagggagtaactattacaagcggtcactttgtatttttcatactaagaagagtttagaacaagattagcagaaatgctgtagcctatattatgagcctttaaaggaaatatagtaggtcattcaacaaatggtaatcttcaaaaacttgtatctgaaggtcaaaatctgagtgtataatatttagacatgcctaatcattgttttaaaatgtaaaacaatcatagaatcattaataggcatctaatatatacattaatataccatgtcaaatacagacatttcttttttaacaatagacat

SEQ ID NO: 2183 - DNA, 334 bp, Homo sapiens
tgccagctcactttccatttggatcagttatcttttcatttatcgtcccatagattcctttttgaaaaacaactttccagatacctttatacagcctcctgtgtcctgtggctagtcattcccctgaagtgcaccactgccaagcttctggaaaggcattggcctccttgtacttttgcaggatgtttcaccacctctaggttgtgcttcttacctgtttctgctcttccaacttcttttcctcattttcttttggtctattcattttgaatcatgagagctctatcatgacttacaattagtcaataatcaagagtttatatgttctttaagc

SEQ ID NO: 2184 - DNA, 555 bp, Homo sapiens
ctacaccccgtctgcatatttatgataaccctgtcacaaaagaaaattctagtccaccctgacgtgttcctagtgacttgtggagctccaggtgactccactctgttttctaaatactcccaaacaatctttttcacaatccatgtagggatcttgcccaggtctaatgtcaagatcacgagtctgtccgaagtctctttccatttgaaaactaaacctctagtcttctggtccttcttttgttttatcacaattcctcaaagactttgacaattgttcagcaacttcatacacaaattcactcttgaaagaagttgcattggatacgtactaaagttggcagagaagataaaacctgaattgtatcttgaggctatgtattggctttgactaagctgagaagggtgaggaccaagaaaataatgagattaaaatgacttgacccaagcaagctatagataaatgtgaaggcagcaggcaacaaagagcacagtcaagagcactgggtcagaaaacagtgttattcatgtaactacagggcatcattcagctgct

SEQ ID NO: 2185 - DNA, 535 bp, Homo sapiens
accacagcagagttactgaaactgagaacagatttttgccaaagacagagcacagatgcagactggcccctacatctgtgggagaatgcagcagacaccacggcactatcaggcacagaaacgcattgcatccctacacgagcaggaaactgtcatgagctattataaaactaccaaaccataaaccattagaaccacaaatcagccaaggctggatgtggtggctcacgcctgtaatttcagtactttgggaggctgaggcaggtggatcacctgaggtcatgagtttgaaaccagcctggccaacatgatgaaactccgtctctactaaaaatacaaaattagctggatgtggtggcacacgcctgtagtcccagctactcgggaggctgagacaggagaatcgcttgaacccagggggtggaggttgcagtgagccgagatcgcaccattgcactccagcctgggcaagaaagagtgagactccaggccaggtgtggtggctcacgcctgtaatcccaccagcattttggga

SEQ ID NO: 2186 - DNA, 557 bp, Homo sapiens
agtggatctttatcaaggtctttccaatgatcttgtggccctctacagcctgccctttgaccatctaattgctaataaatctggaatggatcaggagaaaaggaagaaacaagtcaatccattgtgcttcccaatcagatttgtggtaaagattttggaggaggccacataattagagtcagatatttaggattatcgatggattacagtactccatgaaacacatttcctccattaccatggttaattatgagtagaccgtaaaagcattcctctagaaaggctattaaaaaacataatgtaatgtcatgtgcaatagagaatgacacatatcatgacttaagaaaataaagaccatttattccctgtgagtttgaagtatggtgggtatgcccaagtacaaaattttttagaatgctagagatggctttaaaaattgtttatgtcttctcaggctttgcaacttttctctaattctgtagaagttggcagtgataacagacatgactagaagtcagaaaattattttagtcattgactactcattaatctgtatc

SEQ ID NO: 2187 - DNA, 589 bp, Homo sapiens
gcaattactcagtagttttattaacaacttgtaaatattcttttgattcttggaaacacctttatatgggagacaaaataaatatattgtttccagtaacaaaagtacatccccatggaatgacatattttacagagttcatcctatacctttttgttggtttgttttttgttaacagttgtttaatacatttagtgagccaggtattgtgtgagtcactgagaaacacaaaaaagaaatgagaatggatggcaagcctcagagctcagtgaagtggttttaaaattctatgaaaataactctgtgaggccaggtgtggtgacccatgcctgtaatcccagcatttttgggaggctgaggtgggtggatcacctgaggtcaggaattcgagaccagtcccaccaacatggtgaaaccccgtctctactaaaaataaaaaattagccgggtgtgatggtggacacctgtaatcccagctactcaggaggctgaggcaggagaatcacttgaaaatgggaggcggaggttgcagtgagctgagatcacaccattatactccagcctgggcaatggagcaagactccatctc

SEQ ID NO: 2188 - DNA, 640 bp, Homo sapiens
aaacataaaaatgaagttgtttttccattccccagtctattccaaatcctcatctagaaaccctgtactaatttgtatgagtgggttacttgaatctctttgataaatgtacgaaagaccattacttacgtttttttgcttttgtaattgggttctttcctccttggtactgtcccagggaaaataacccagaagaaatttccatgcttgctttctcaatgcatgactaagtccctgaagaaagcatacatattaaatacatgaatgaaaaagaatgtaacactgtaagttcacaaaacttgcatataaaaaggaaaactaatctttaagaggtagtttcatatatgtaaatagttcaattcagtgaatatcatcttgttttttttacttctagatccaaaagatgtaagcagctgccagaaagtttaaacagtgcacagaatacagtagactacagcagacagacagtgtgactggtgagtctaagcccaatcttacagaataaggcaaatgccactggaatgcaggcctccttcacaaaacccacagaacttcaagtacggaagaattcttcccccagagttaagggtctacccaacccccaggaacatcataagcacctcactctgtcctactcaat

SEQ ID NO: 2189 - DNA, 572 bp, Homo sapiens
gatcatgaggtcaggagagcgagaccatcctggctaacacggtaaaaccccgtctctactaaaaatatatttaaaaaaaaattagctgggtgtggtggcgtgtgcctgtagtcccagctgcttgggaggctgaggcaggagaatggcatgaacccaggaggcagagcttgcagtagccgagatcgtgccactgcactccagcctgggcgacagagcaagactccgtctctaaataaataaataaaagttgcttttgtttatcaacagtgtatcaaacagtgtatcagagagaacaccatttgtcagtgtatttggaagtacatgcttcattcttatctgcaggatagcatctcctggtatggatgttaccgaaattaactcttactctgtttataggcatctttctccatttttttgccagcttaccacaagtgactctatagaaaacatccagctacttgggaggctgaggcaggagaattgcttgaacccggaaggcagaggttgcagtgagccgagatcatgccactgcactctagccctggcgacaatgtgagactccatctcataaa

SEQ ID NO: 2190 - DNA, 631 bp, Homo sapiens
gattggcagatcaatcaatagatattttaactagatagatatggatcaatagacaggcaaataagtattattacatgattttaccaaatttcctcgtttccaaaatgtggaagtcatgatcaagataattctatgagttgaaaagctatgcctgaataatgtttgcatggtccatgtactggtaaatgggaaaagcaaaatgattgaaagctttaggaattatttctaacatccggatttggacaattagtatttgttcttgaggctataaattggtactttttcacattattaaaaagtctagtgactactggagtttagggagatcattttccctaaaagttaaaaaataaattgttgaaagtatttcttctcccagatggcacatgatggcatctttataaaagcatcaatatttgagacactcaatgtccaatgtttcattcatgttctgggattgtgtttttattagtatgtatgatatgaaaatgtagattatatttctaaatttaaaattatattcaagttataaatttaataattaatttcctgaaacttttatgaaaataaacccataaaatcataaacattttaccctaaatatttatgcaatattttatgtatttatata

SEQ ID NO: 2191 - DNA, 455 bp, Homo sapiens
cattccagaaacatttagagacgacccaccatgagatgaccttgaccaggcgtggctgaacatcttcattatagctacagcagaaacatcatgtggtattcttaagacaaatttcagggcccaaagaagctattcaggatccttttttccacttgcttcaatatatttaagctccttgaactatgacatcctcccaaataggttcgctgacttccttcactaaggcacccaccaaatatttgttgagcgcttaccatgggtcaggaactgttcaaggcactgggcatagggtgttgaacaagaaagaaagacatgatccttgctgtcatgaagcattcatttcagagtcatacttcttatgttcacacacaagtgaagtggtattggtatttcagagtgaatgtgttttataaccaatattgatatttttcttctctagaggctccctttatttc

SEQ ID NO: 2192 - DNA, 642 bp, Homo sapiens
cagcacagcactaattagagccaaagtactgtgggtccccaatactgaagtctacttcctgaggaaaggatggtgcagcacacccaaaaggtagcccagggacaaaggaacccaaaggttgcactttttccagagctaagaagcaaccatgcccctagtagtggcacaaattctgtgtttggtctcctgagaagaaagtgagacctcctacaaatactgcttcagcagttgctgccactggtgagcctgacaacagactgtcaggttgggtagagtgaccccatccccaccagtggagcaacctctgtgctcaggctcacataaagatcatagagcacaagacacctttcccccatctgcacagtgctgcagctgtagccactgctgctgccaccaggggctggggcaggtgagcagaaggctgccagtctggggctgtcagtaacaaccttgtctcctctgtcagcatgatctccaacctcaggctcaagtgtgaagggcaagatccctccctcccttgcatggtgctgttgcactactgccactaagggctggtaagtctaaatgctgcctagggttctctggggccgtgggtagtgatcccacatcacagccactgccaacaccagcacacactgctga

SEQ ID NO: 2193 - DNA, 84 bp, Homo sapiens
tgtctgtttcattaaatcaaactaaccttatcctttgatgtacattatttcttagaaatctgagaagtcttggcaaattcatgc

SEQ ID NO: 2194 - DNA, 635 bp, Homo sapiens
agaaagaagtaatttgttttatgtcgtgctttctcctttcctgtggagagtgatcatcagcctgaagggttaattgaagggactgaatgagagcttagggcagacaggatttaattgctcaatattgtggataattgtggtacagtagtagcatacactgatgtttataagtatgatggggacaaaataatttaaaagtttaagttaaaagtgcactggcaaattcactaaaaaactgttggaactactaaacgagttcagcaatgtggcaagatacaagatcaatatacaaaaataaatcttatttctatatactagcaatgaacagtctggaaaagagattaagaaaataatcttatttataatagcagccaaaaaataaaatatctaagaataaacttaacagaagtataagatgtgaaaactagaaagtagttgaaagatattaaagaataaataaatggaaagatatgccatgttattggatcagaaaacttaacatttttaagattgcaatactggccaaaatgatctatgtatttaatggaatccctttaaaaatcccagctgtttttttatttttttccccagaaagtgacaagctgatcctaaattgcatgtggaactgcaaatat

SEQ ID NO: 2195 - DNA, 481 bp, Homo sapiens
tgtcaggacttaaatagtagctgggattacaggcacccaccaccatgcccggctaatttttgtatttttagtaaagacggggtttcaccgtgttgcccaggctggtcacgaactcccgacctcaagtgatccgcccgcctcagcctctcaaagtgctgggattacaggcatgagtcaccacgcctggccaggaagcagtcttaagggcgaaagacgctgtactgaaacagagctaggcttcgtctcccttcctcctttcaggtctgtggctagtatatagttaatgtgccaggacttaaatgctgagtcacctaaaaagctgagcctcaatcctcaataaccaggaagactcatataggctgcaactcccttccagaggagactgcccgtgttgccttttgctttcatctaatgtctctttactttacaaagaataatatgatctaaaatctgtctctgttgtaagcagtcactgaatatt

SEQ ID NO: 2196 - DNA, 562 bp, Homo sapiens
tgtattcttcaccagacttgtctcagagcagctgctcacccaggagctccatggccacagggatgcccaggacagggacgactgcttgcccactgccgtgctctggggctctgggcagtccctcggcctcacccactgctcagattttctgcaggaaaaatgggagagccaccctttcaaagagtgacccgggcccggttcctcctcaaagcctttcggaatgaatctcccagttccccactgactggacatagaacctctgctctttccttctctaaggctgtgctagtccattattcattaaaagacaaaatgaggccgggtgcagtggatcacgcctgtaatcccagcactttgggaggccaaggcgggcggatcatgaggtcaggagatcaagaccatcctggctaacacggtgaaaccccatctctactaaaaatacaaaaacaaaattagccggctgtggtggcgggtgcctgtagtcccagctactcaggaggctgaggcaggagaatggcgtgaacccgggaggtggagcttgcagtgagccgagatcgtgcca

SEQ ID NO: 2197 - DNA, 599 bp, Homo sapiens
gagagcagggatgaggccccacattgtcaagcccaagaacactggtattcagtcctaactcccatcaccactggtgctctccagactggcagacttagctagagatagtggctgctaaaagaggaaattactaagacagtggcattcaggggtccctgcaacttccgggcttggctcctgttgtattactctccaatgaagcctacctagacaatgaaggcatcagcacaaaatataaaaagaaacagtataatatcctaagggagatattatattactacaaccataaaataagaacagcatgttattaaaaataataaacaatgagctcagaaaagactcactgtaaattaagaatgatacacaggccaggcgtgatatggctgacatcagtaatcccagcactttgggaggctgaggtgggcggatcacttgaggttaggagttcaagaccagcctgggtaacatggtgaatccccatctctactaaaaatataaaaaaattagccaggcatgatgacgcatgcctgtaatcccagctactctggaggctgaagcaggagaatcacttgaacccaggaggtggaggctgcagtgag

SEQ ID NO: 2198 - DNA, 76 bp, Homo sapiens
tcctctgatatttaacttcatttactacttcctggtgacagctgtttacataacaagtcaggtaccctctcaatac

SEQ ID NO: 2199 - DNA, 391 bp, Homo sapiens
gggagagcatcaggaagaatagctaatgggtgacagacttaatacctaggggatgggttgatctgtgcagccaacaaacatgacacacatttacctatgtaacaaacctgcatatcctgcatatgtaccctgggacataaaataaaagttgatggaaaaaaaaataaaagaaattctataatgtttctatggtgtatggttaaggaaggcaagtaagactcaaattacaagaattaaatggaaagaatacaacataaacacccttttatcaagtgagcatctacatattatttatgagcttaaggctggacgtggtggctcacgcctgtaatcccagcactttgggaggccaaggcaggcagatcacctgaggtcaggagttcaggaccag

SEQ ID NO: 2200 - DNA, 163 bp, Homo sapiens
aaacaatctagagcccttaaagcagtgcctgacatacaatacacgctcattatcagttattcatatgtgactctattaataaaaatgtaacaattttaatacaaatgaagttggtggtgccttagacagcatagaaaattaagtaaaaacctcagctgctggc

SEQ ID NO: 2201 - DNA, 579 bp, Homo sapiens
ccacccacctcggcctcccaaagtgctaggattacaggcgtgagccaccgcgcctggccctaagtgtgtactcttggggcgctcgtttagctttgtgggctagggattatggtgcattatctgataaattagaggaaaattttactttatctgagaaacatatttgcagccagtctcagacacactaagtcacagaagaaagaagaatcaaaataaagagaattctgctgtcagctgtttcccctcttgctttacctaaaaaaagcagccatctgtgccctgaggcagacatggcagaatgtgcttactcaacccctgacccccgactcctgacccctcaaaacacacactgggagcttagagcctgcccccaggctgcctctccccaccctttactcctcaaaatacatactgagagggaaggggatgcctgcagctggtccaaactgcttctcttggactaagatatatttacccgggggtgtcaacagcgtgggagtggagagagcaggcaaaggggagcagggaggtcctatggccttgcagaggacaaaaccacaaatccctggcaagtgacct

SEQ ID NO: 2202 - DNA, 586 bp, Homo sapiens
gtatctaatttacttcaggcataacatttaaattctgacatatgtgtcaatctaaaattaattctgacatatgtgtcaatctaaaattacagacaaatttgaaatagaaaatagaaaaatgaatagagtgacattagtttgacggaaaaataaaaggtgacctattttcttaacccgacagcaagaaaatttgtcaggaattcctgacaaaaatgcctttatgagagagccaagcatcatgtctcacacctgtaatgacagctatatggtacactgaggttggagaatttcttcaggccaaaatttcaagaccagcttggggtatatagcaagtcctcatctccaaaataagtgcctttaagagagctttaaaggccgagtgtggtggctcacgcctgtaattccagcactttgggaggctgagacaggtgggtcacctgaggtcaggagttcgagaccagcctggccaacatggtgaaacactttccctactaaaaatacaaaaattagccaggcgtggtggcgcatgcctgtaatcccagctactcgggaggctgagacagcagaattgatcgaacccagctgg

SEQ ID NO: 2203 - DNA, 592 bp, Homo sapiens
gccaaataggttgtaagcagttcagcaccttttgtcttttttagtaactaaaatctgcatttgatacagaatttccttcagtgtggtttctgcccttcacactttggtaatgagttttcctgagagccattctaggcaggcaaatgtctggttttaatagacagggtctttcagtcctttctgcaacttactagctgtgtgctcttcagcaagttgcataacttttcgaactcttaattttcttgtctgaaggaatgaagacgatgataatgatgtccatgtcataggtttgtcagggttaaagaaacaacgggccgggcgcagtggctcacgcctataatcccagcactttgggaagccgaggtgggtggatcacctgaggtcaggagttcaagaccagcctggccaacatggtgaaaccctgcctctactaaaaatacaaaaactcaccgggcatggtgtcaggtgcctgtaatcccagctactcaggagactgaggcaggagaattgcttgaacctgggaggcagaagtcacagggagctgagatcaagccattgcactccagcctgggtgacgagcgaaactttgtct

SEQ ID NO: 2204 - DNA, 563 bp, Homo sapiens
gtgtgaggattcaggggtgaggtggatgcattctggggagaagaatggcatgagaagcaacaggaatgtgtgaaatgtgttcagggactagtggagagatacgcctgactggagaagaatgttctctaaaaaggaacaatgagagattatgttggaaaaggtggggccagttcatgaagggcagagtggggaaaggaaaggaaaccaaccattataaaggccctgcggtatacctgtgctttcccattcagtccttcagaaaagctcagaaggttgtacagcttagagcttaagagcctggactctggaatcagagtgtctgggttcaaatcccagctctgccagtcattggctgtataataattttgggaaagttatttaaactctctgtgcctcagtctcttccatctgcaaaatgagggtagtaatgctaactacttaacaggattgatgtaaggattaaatgagttaatagctatgaagtactgagaatagtacctggcagatatgttataaatgtttatattatgattatcacctgcagtttacagatacattggaat

SEQ ID NO: 2205 - DNA, 600 bp, Homo sapiens
aatgtacaaccctatcagacttcaatgggtgcataaaatactctaaatttgagttattttctcatattttatgtactagcttgtcttaatcaaattcatttattttctggaccatgtacacctttgggttctcctcaaacctagagttgtgtctagaaaatattaaggtattatcattaagcccacataagcagatgggaaagctttatcataggatggcatctatctatcattaattggtcttctgctatgaggctggtgctgtactgagtgctttacacttagatagtaagaatataaagcacttagtacttaggctttatagtagccctttgatgtagggactattacacccatttcacagatgaagtaacagagaaataagtaactcacctaatctattatgtgaagtcaggggtgaaaacccaggtccctttgaccccagagaccaaattattaacaaccaaatgatatgtgctctgttgggccaagaatcaatgcatattgcatgtctctcatggccattttgatcatgataacctggacaccgattggtttttctgaagcaacttgagacttaatagaagcctcacctctcat

SEQ ID NO: 2206 - DNA, 633 bp, Homo sapiens
tggctctgggagaggtgatggcttgtgacgggaaattgaattcaatttgcttcaccaaacttgtcctggagaggggggtgaagcagttcaaaagaaatacaatgaaactactggtgagcacattagtgtcagaatttacagtagatacatgtgtcactcctgaaggtatccacagagacactgaacaataagagagacggggccatggcaggacagagcagcatgctccggacccatagggcgagatggaaagatgctctgggctctacatcactacatgatgctgcgtactctgggtcctagtcctcccatcagcaaattaagaatatgcaatcctccattcatcttatgaagatatcatgagcagatatttgatgcttattagcattttgagtttttaaagttcttaaaggaaatccatgtcaggtgggtgcggtggcttacgcctataatcccagccgtttgggaggccaaggtgggtggatcatctgagctcaggagttcgagaccagcctggccaacatggtgaaacccctgtctctactaaaaataccaaaattagccagggtgtggtggcacacatctgtaatcccagctactcaggaggctgaggcaggagaatcacttgaacct

SEQ ID NO: 2207 - DNA, 612 bp, Homo sapiens
gtgtatataattacatatcccagagccagagaggattagaagtgctacagaagtgaatgtcaggcaatatgatattccacaggtgtgaaagtagcgtttctacagagttggccaacactctctaaatcaaaaatatctgctgccgaatggggggagaaagaaagtgaagtgaatcataaactagagtcaaatgggataggagagacagtacagagtagtcagcccagcagatcatacaaacctgactgcccacaccttgctccaaaggttgagtcctttatcaaagggacgtgtgatttaaattgaaataatacgtttaaaaaaaatgattttaggcccggcgtggtggctcacgcctgtaatcccaacactttgggaggctgacgcgggcagatcacaaggtcaggagatggagaccatcctggctaacacggttaaactccgtctctaccaaaaaatacaaaaaaaaatagcagggcgtggtggcaggcacctgtagtcccagctactcgggaggctgaggcaggaggatggcgtgaacctgggaggcggagcttgcactgagccgagatcacaccactgcactccagcctgagtgacagagcgagactc

SEQ ID NO: 2208 - DNA, 506 bp, Homo sapiens
gagtggaagaaaaggcaaatctgtattggatagacatcagtactatctgccacacgtataactgtgctgtgttaaaactgctaatattttttccaaagccagtttaaagaaatgcagttttttagatgttttgaacaattgatttaataatatgcaacgatagatggaattttatatttaccataaaaatcttggaattctggccgggtgtggtggctcatgcctggaatcccagcactttggtaggccgaggcaggtggatcacctgaggtcaggagttcgagaccagcctggccaacacggtgaaaccccatctctaataaaaatacacaaattagccgggcatggtggtgagcacctgtaaccccagctactcgggaggctgaggcaggagaattacttgaacctgggaggcagaggttgcagtcagccaagatcatgacactgcactccagcctgggcaacagagcaagactccatctcaaaaaaaaaaaaaaaaaaaaaaa

SEQ ID NO: 2209 - DNA, 629 bp, Homo sapiens; identical to SEQ ID NO: 1945

SEQ ID NO: 2210 - DNA, 645 bp, Homo sapiens
actaggcagcacaacagagataaataaaatacacggtaaagagagaaaataataaaatactgtaatttggcctcccagcatgaaggagggaagctgagactagaagaatggattagaattcatgagtcatttgttcagcttggaattgaaggaggcctggctgtctggagaggctggagcaagttggttgttcttccttccaaccctgagatcccagtacaatggacctgcactctcactctttctccttcgaggttaaccgttttttaagcaaaaatcttgggcttggcactgtgcctttcatcttcacaaagccctgcaaggaatatataaggaaactggagctcagagatgtgtcgcgacctgctctgaggtcactcagctggtacagaggccacagctaatcccaatctttgtggctgttactggtgctcctcttcctgcagtctagtgcttctggtgtcctttgacatttgacaaatgacctctgtttgagaggcaaagcgaaagtctcaccaaagtgagcaccagggaaccaaacagtctagaaatatccctttccatggacaaaaggcagagacatgcttttaattacctacttctgaggctgccttgagtcagagtctgctatacgaatgatttgag

SEQ ID NO: 2211 - DNA, 578 bp, Homo sapiens
tgtgtatatatatatatatacacacccatatatacacatatatatacacatatatatacacacacatatatatggagattatctgattaaataagctctaattttatttttaaaatgaaagatttctgaaactttaagtttacagttcaacttattgttttgtaaaacaatgtagcagagactatattaaaatccatatgagaatgtgtatttgatagtttagtgaaaagctgttagcctaggatataggtgcaagtaatggaaacattttcacattaggtgaagagctcaaaagaaaaaggattagtggccaggtgcggcggctcatgcctataatcccagcactttgggaggctgaggcgggcggatcacgaggtcaggagatcgagaccatcctggctaacacagtgaaatcccgtctctactaaaaatacaaaaacttagctgggcgtggtggcgtcgcctgtagtcccagctactcaggaggctgatgcaggagaatcacgtgaacccgggaggtggaggttgcagtgagctgagatcacaccatggcactccagcctgggcaacagagtgag

SEQ ID NO: 2212 - DNA, 78 bp, Homo sapiens
acatatacagtcagtgtgtacccataaaaatttaaaaaggaaaagataaacaacctgatattacaactctagtaacta

SEQ ID NO: 2213 - DNA, 571 bp, Homo sapiens
taggcacacaagactgcccgatgagtgtcaattgccatccttgttaactggacgcctattactaggccaggtccaggcttaggtgtatcccacacgaagccaaaccggtgaccaccgcccacatggagaaagcaagtgattggctgcgggtcttctgtgtgttcctcctcccacaggaagctactttcgcctaaacaaggacacttgccatccctggctgaccatttctgaagacggacttacggctgtacgaagtgaaaggagaacccccgccagggagctgtcacccagcgacactcacttcaccaggtactttgtcaaccgctcacaagggcgttctgtgaacttcccgaaggtgcactgttattcaggtcaaatccgaatatggcacggaggcagcctcgagggaaaaggaatcctacaaatgagtgaggagggaggagcctaatggggaggggacccagaggagtgtgggcaagaggggtcaggcaggtgcaggcagaagagccccctgggacggtgaggtcaggagagggcgcggtcccctgggagggcatggtccctgggtcct

SEQ ID NO: 2214 - DNA, 421 bp, Homo sapiens
cgcagtgggtgggtgctagggcagtggtgacttagtagattggggtgttcctgcaccccggattttccagcacctccaacaactaaataatggattaactgattcattgcattttcctctcccttgcgtggggaacacttttctctgccccgaagttcccaatttggcccataaataggaagtgatgtcaccctctgcctcaccagggaagtgctggccaccttcctgcaacacctcagccgtttgcagggaggactgagtgggagtttcccttcctctttcctcccctggggaaaagggtatcttgagaggtccaggccatgggctggggtctctcttgggccaggttaataggacagaatcgctgctcctccatggcccctcttgttttatccctttctttggatcagcagtggctcgc

SEQ ID NO: 2215 - DNA, 612 bp, Homo sapiens
tattaataatgctaaacacttaccagctttgtaactttagctatctatcaccattgagttgtttcctaatctataaaatggtggtaatccctcatacgactgtggaactgatgaaataatatggcatatgtaaacatttggttcaagacctgctacattggatgaggaatgtcaacagtaaagtaaaattttgatctttgagtgtgtagtgagcttgttatgtcactttctgtggattctatttgacactcataaagaaaaactctaggtttaaaaatggaactaggccaggcgcagtggctcacacctataaccccagcactttgggaggctgaggcaggcagatggcttgagcccaggagttcaagaccaacctgggaaacatggtgaatctccatccctacaaaaaatacaaaaattagccgggagtggtggcacacacctgtagtcccagctattcaggaggctgtggcaggaggattgtttgagcccagaaggttgaggctacagtgagctgtgattgcaccattgcactccagcctgagagacaaagcaaaaccctgtctcaaaaaaatttttctgggctgagtgtggtggctcacacctgtaatc

SEQ ID NO: 2216 - DNA, 612 bp, Homo sapiens
gagctaccaaagaagcacctgacaatgagaaaatgctgatgagatgagaatttaagatataaacatctcctgggagtatttgcattataagaggagattatagaaggcccacctttcagaagatacacaaagaagtctgtggccactctccccagcaaaacagcaatttagtaacaatcataaaaacattttaagtctctgagaattgtcctaaggggataatgacaaatagagaaacagtcatccaagaaaatctaccaaatcttggcaagaaccatgagagtctgtggcatctggtccctgacctgttccatgaccaacccctactagctctgccttacaggagctttactctggggcagtgcagtcaggaaggctgggctctccatccccccaggtcccatcaagaaagtgaaaaagagcctacagaaagagagaaccaccgggcatggtggttcacacctgtaatcccagcactttgggaggcccaggcaggcagatcacctgatgtcaggagattgaaaccagtctggccaacatggtgtaacctcaactctactaaaaatacaaaattagctgggcatggtagcacatgcctgtaatctcagctac

SEQ ID NO: 2217 - DNA, 602 bp, Homo sapiens
agttagcaatgattgcatacataagagaatagaaaaatatagaaaaagaataatgaatttctctatgcagtttgcacggcttagttggcttctgctgacctaaatgaagtctaaatggaagaagcttatatgttccaaactctgacgtaaattcaaattcagaaaatgtaataaggactataaatccctttattcgtcattgtgagtcactaaatatgaactttatttatagctgtgtataattatatagtctttggcttgccataagcaattttgacaggagtaaatatcattagagtagaaaatctttcacctacacagatctatgcttcccagttaatattcgtgactaatatattgtgtagcactatggatgttaggaagcttttctccacgtacacagcaatggttcttgtattatagatattttattggctgataaagtatttttactggtatttatgtagtcttatttcccacatcacaacttccgacttaaatgagtgaagacagtttatttttttcttcagaactaattgaatgaattctgaagacttgctgtttaaattatgcaaacataatattttctcacatttatggct

SEQ ID NO: 2218 - DNA, 494 bp, Homo sapiens
tggcgttttgtatagattttccaaaagcatcagaaaaacgaagtgatgaaagagtgtctagcaagcgggttctcgcacccctcagagcacaggtcattatcaacctaggggaaaactgcaactgagttttccttcattttcttttcctattcaggaagaagcaactagaaaaacaaatgtaatttttgtttctttttagctgtaattgctggagttaatcttcattttcactactagaaaataaaggggccaggtgcagtggctcatgcctgtaatcccagccttttgggaggccgaggtgggtggatcatgaggtcaggagtttgagaccagcctggccaatatggcgaaaactagtctctactaaaaatacaaaaattagccaggtgtggtgtcgcgtgcctgtagtcccagacacctgggaggctgggacaggagaattgcttgaaacccggagcggaagtttcagtgagctgagactgcgccactgcact

SEQ ID NO: 2219 - DNA, 615 bp, Homo sapiens
cctgacctcttatctctcatatgacctggtctcggtccccagaaatggcaatctgaccttcaactatgtgtgctaatgtttcctgctctgattttcaatttgaccatagtgggtttcttctaatcatgtgtctatgttgatttttaaagctttaattattgcaggagaattataatacctcttccaagtatttatgatttctcaactgaatctcttttttcaagattcagtatttgaaaaacctccaaatttcccaagaaataatgtgaagaaactcccacatggaaacattatccacggaccatggtatgaataaccaggatccagggtttagaaagatcttttctttttcacttttcagagtaagtgtctcacttatgttgcgcaggctggccttgaactcctgggctcaaatcttcccacctcagtctcccatgtagctgctgggtctacagttgtgcatcaccacagctggctatatgggagaacttttctaacataaacaacatagattggttagtccagagaaagcaaggtaacaaaagtcattgcgaagattgcaaaaagtctgcagagccccgctaaaacacacacacacacacacacacacacaca

SEQ ID NO: 2220 - DNA, 597 bp, Homo sapiens
ccactgcttcctactgcagttgcagtaagttagacccttcccagtggtccaccctgtctttctctcatctcatttcatcccagtccccctgattctctggctttctctgggttccttgaacacatcaaacacacttctaccttaggacactccctggtgttcctccctggaccactctacccagaaatttgcattcttggacctttctttttatttaaatcttctcaaatttcattcatatcacctctgcagccttccctgagccccaccccccaatccaaattagcaccatctccagtcatttgttcccacaccccttgtcttactttcctctgtgaccctctccctatctgtatttgcttcctggtctgttgtctgtctctctccctaaactatagatctgtgagatcacaaacctgtcctatccaccactctatcccgaacagctagaatagcacctggcatggactatatggttagcatatatttgttgaatggataaataaatgagtgagtgaatgaaggtgtgaaaaaatgaatatcctgagagtagattagagtgaaccaaaattcaactgccattcattccttgcacag

SEQ ID NO: 2221 - DNA, 486 bp, Homo sapiens
  misc_feature 273: n = A,T,C or G
gacacagaagggattccctaatatatttaatgcctatgctatattctgatctatccttggttctttttaattgtgttactattttataggtcctgtgtgattgaaacagttatagaaacaaaattgccaatacaaaagtccaggaacagagggatccacagcttaatactatcaggcattcatagaagaattgatattaatactactgaaactattccaaaagacagaggaagtgagaatcctccttaaatcattctgttaagccaatatcanccctaataccaaaaccaggaaaggacatcacaaaaaaagaaaactacagaccaatatccctgatgaacatagatgcaaaaatctcaaccaaatactagctaactgaatcaaacagcatatcaaaaagatgataaatcatgatcaagtgggtttcatgccaggaatgcagggttggtttaacttatgcaagtcaataaatgtgatgcaccacat

SEQ ID NO: 2222 - DNA, 474 bp, Homo sapiens
atattcaaagtgctcaaagaataacctatcaatcaagaattctatatccagcaaagccatcctttaataatggaggagaaattaagtattttcacattaaaggaaatctgtcactatcagatatttcgtacaagaaatattaaaaataatcctttgaaaaatgacaaggaattaatataaccagaagatatctaacacaaagcagtttgtgttgaataaaaaggacattatagaagttgaataaaaaggacattatagaagttgaataaaaaggacattatagaatgttaaggctaggcctgatggctcgtatctttaatcccagaactttgggaggctgaggcaggagaatcacttgagcacaggagtttgattgagaccagccaaggaaacataaaaagacctcatctctgctaaaagttaaaaaaaaacttaaccaggcacggtggcacatgcatgtagtcctagctactt

SEQ ID NO: 2223 - DNA, 530 bp, Homo sapiens
cagaaggggattaaccctgcataaaccacgataccttctaaagtttcacactgtctaccactagcagaaagtctgttctctcagcttgttcctactcagcacttcttcagatgttttcccttcttttgcattattcatttcttgaatgataggagtttcgagtataagttgaatatcaggtttctccattttctataaattggataaatttgcacccacttacaggtttggtgatattgggaacttctcatttttgtttctatagttcatgtatagttactatttcaaggtttcaaatctgttttttttttaacttgtatttaagttcaggggtataagtgcaggtttgttacataggtaaacttgtgctgaggggctctgttgtacagattatttcatcacccaaatattaagccttgtacccattagttatttttcctgatcctgtccctactcctaccctccaccctcatgatataatagatttttttcttactttagaagtttttcttgttcattataggaaattt

SEQ ID NO: 2224 - DNA, 473 bp, Homo sapiens
taacaaaattttttttagatacagagacgccttctgttgtccaggctagagtccagtggtgtgttcatggttcactgcagcctcaaattcctgggatcaagtgatccttctgcctcaacctacagagcagctgggatcacaggcgtgtgccactatacccagcttctttaagacacgatcttttaaaatgttccttagttaaggcaatagactcaagtaatgatgcgttacttacatacataagcaacctattaagagtctattagaacatttaatatctcatactatgggataaaggtcccttcctccttttggcttttgcttttcaaaattataatttttagtatcgttcttcctttgcatggctttttccatcaacaccaaacagaaccacagtggaacagagtaacaaagaaaaagcaccaaatcaggcgaggtgcggtggctcacacctgtaatcccagcactctggg

SEQ ID NO: 2225 - DNA, 385 bp, Homo sapiens
ttctttgaatcacttaccacatgggtaagctgccctcagctccctccaagctgtgtctccctcccggcggttcctcttacactccttctccttgtatcccatccctgatcaatattctccagcagttctccactgcctgcacacaggatcaagttcaaactccgagaccttgcattctcagcagctccctaattctgtctctaggtccttcccgtccttgcacacacccaactcataccttactcttgcctgctcccagatatgtgttgtcctcaatggcttccctgcctcttttgtgtgctatttcccttcttagaatgccatcttcacccttagttacagaaacaccccactgaagcccctcatcctccacaaagcctttctg

SEQ ID NO: 2226 - DNA, 410 bp, Homo sapiens
  misc_feature 254: n = A,T,C or G
atcttataactaatcttattctgtgtaactaaacaataggttaggtgtctgtcacagcatttcaactgaaataagactgaacctatcctaaacccctcacttgaaatgcccggtcttctatgtattcaaactctattcaaagtccatttcaagttctatgttttacataacaccatctttgaatttcaagaggatttatacagcatagccctacgtttggtgctatcactacttattttttttgagacagggtnctcagtctgtcacttcaggctggagtgcagtggtgccaccttggctcactacaacctctgcttcccaggttcgagcaattctcccacctcagcctcccaagtagctgggattacaggcatgtgacactacacccagccaacttttatatttttagt

SEQ ID NO: 2227 - DNA, 577 bp, Homo sapiens
tcttctatgctccaataagtacatcctatataacccatcaccactttcttaacactttcctcaatgtactgtaaccatgggtttctttgttcctttttctgctagaattaaaaaattcagaggtcagagattatttatttttgtacattttgactgtcacataaaagctgcccagtaaatatttcttgaatgaaaattgaaagacaaatctaagcatagatacataatagcttgactgggaactggaaatttcagagtgcatttgttttgttcattgaaaaaaagagccatgggcagcaccactttaattaatcagtatagatttattactgtgcatgctctacagagactagcaacaggctaagccccaggtgcagggcaatgagttggctgattttctcctgctccaatgttagcccatcatccttcttatccctaaagggaggctaataaattatgatagtatgacagctacttctgcccactgttaagcatgtcataagttgttacatcatagctatattgaataaaaacctctgtagttttaaaatgttataaaatctgaataaacacacac

SEQ ID NO: 2228 - DNA, 563 bp, Homo sapiens
acttattcatctattcaacattcttcatccattcaacactcataaatatttagtgggcattcacaatattccaagttcaaacttgactttcagtgagttcacagataacggtttccaggtggctaaatttgacacatctgggagtcaggcaacaggaattcaggttaaagaaaacaaagagaaagatcagatacttgggcagatagtgaagccagtgagagaacctgggccctcaggcccctggatccatcctctgcagagaggtgctcaatcctttgcagctttgcagagaggtgctcaatctaaattcaggaaaacaaactctcctatcacagatagggaaattgaggctgatcaaactcttgtacaattttgtttattccatagcccctatgtcaccctatcaccgtattaccacttctatctttgtaagtttctactgaaaccccttatcttagtacaaaaaggcttccaagaatacaaaaattagccaagtgtggtggcaggcgcctgtaatcccagctactcaggaggccgaggaaggagaatcaattgaacctgga

SEQ ID NO: 2229 - DNA, 553 bp, Homo sapiens
cattataagtaaaactataacataacataaatattaaaaagttaacacactgttcatattttggtttattaccctccagtcatttttctatgcatattgtcactagattgaggtaatactatatagagacttttgggtccatgttttgaatatcatattatgagcatttcctctgccattaaaattcttcatggcagacctgatttttaatgctgcataacattccacttttcctatgatccataatcattttcctattgttctgtttttagggtgtttctcatttggttataaataacttaatgaacattctttcatgtgaatgtttttaccatatttcatgttattcttaatataattttttaaaaatagaattactgaattaaagaatataaaaatgtaaggctcttacttttttgtgctgtaaactcaaaatcgaggtaaactatactaatcatgaaagtccatttgctgcacatcaacagtgaatattaccatccaaaaatattaactatcaggcaagatctgttctaaatggatttaaagcataacg

SEQ ID NO: 2230 - DNA, 357 bp, Homo sapiens
ccctgctaatttttggtattttttttagtagagacggggtttcactatgttggccaggctcccaaaatgctgggattacaggggtgagccacccgaccataactgaccatatttttatataaccctaatgttcatctctgcatcgtagaattactggctgtggggaattcatggatttctcacaatccctaatatggctgagtctgtggttccacatttggctgcacactggcattccaggggaccttcagagagtactaatgtggagtcccacctccagagactgtggtttgaatggtctagggttggccaggggcttggaattttcagattttaaggagaactcatgggaaacta

SEQ ID NO: 2231 - DNA, 517 bp, Homo sapiens
aaaagtaatgtcaaaaactgcagttacttttgcaccaacctaatatgatagactaaactataaacatacaaggaagaatgatgtgtaggaagtttaatacataagaattgggatctggctggatgtgttgggtcagggctgagttcagagtgaacagtgatactaaggtttctgcctttatctattcttgagaaaaatggatgatgtttcgggtttttaaaaaagtttcactttagagcagttgagattgagtgtttttagaacatctggctattgagatccagtaagacttgaagaataaaggtttggggtttatgaaagaattctagggccaataatacagatttaggaatcatggtggcattttatggcatgagagttgatgtgatcacaaagggaaactatgggggattaggaaagaaggaaaaggatgaaatcctaagaaactccagcatttagaaagattgtataggtacaaaagccaacaaaggaggatgagatgaaagtaagggaaaac

SEQ ID NO: 2232 - DNA, 493 bp, Homo sapiens
  misc_feature 417: n = A,T,C or G
ccagataaattgcctcttatcccatgcctgaaatgttttgaaacctgatgacagtaaaaaagaattcatttagattcaattgggtattaaatgataaattttctatttgcataagtttggcttctttaactttatacttaacgtgtcagtttttaatgtaattaatccatctgtttgtgcttgtatagtgcttttaaaaagagaacatttcatagtagaatgtacttatctgaattcagaataaaataaagctcacgggaatgagcattttaagcttcacataaggttatatgtggtaatctgtgacttttcagtcatattaaatagaccccggaataatattctcagataaatacagcatttttattaatcagtgtaactgagtgcaaattaaattccattcctccctccttattntataaaaacagaatggtatttgggaaaataaaggatattttaaattgctcaaagagttacatatcttacctgtata

SEQ ID NO: 2233 - DNA, 543 bp, Homo sapiens
ctgcaacctcagcctcccgggttcaagcgattttcctgtctcagcctcctgagtagctgggatcacaggtgcacaccaccacgtccagctaattttgtatttttagtagagatggggtttcaccattttggccaggctggtctcgaactcatgacctcaggtgatccacctgcctcggcctcccaaattgctaggattacaggcctaagccaccgcgcctggcttaattattcacttttaattaagcaagaaaacttattttaattaatgagctcaagcttacagaaagagggtgaagtttttttctacaacttccaatcattcaccagcagattgatatagtctggttttatttctgatctccatggcctagttctacccaagacatacacctgcatctctggaattctaggtctgatttcaggttatttttgtaaatgttgatgaaaatcgaatgtacttgagttgaaaataaaactcatatttttccattcaaaaagtatttattgaactccctactcaatgctatgtactacatgagag

SEQ ID NO: 2234 - DNA, 406 bp, Homo sapiens
tttactggtgctatctgaaatgatactgaaaaatgccgatgccaaaggtcacaatatctaatatgatgagttgttgctaaatttatatgtggtttatatcttttaaccacagtaagcatgttctacttcagagtttatagcttaaatttgtacctaggtaacactgttttatcccttttttttggtttgatttctctctaataattgatcttaaagaatagaataaacagaagagactctggccccaagcagtcaagttataggtggattttattcagtaaaatcaaggcaaaataaagacctattgattcctgggacattttgtcattttatctttcctgagttagacatcctgaccaccctaatagccaaatgaaatggatagcagcagcttgaagtcatttat

SEQ ID NO: 2235 - DNA, 578 bp, Homo sapiens
tagattatttcttcttaattaacagtacaaatagaatatgtcttctgactagagttaataaagacttctgactagagttaataaagacaagatgactcattaaaacaatggtactaaatattaaacacttattttatttctctcaacctccaatcacgagcccccagttaaatgcattaaggaattttatttatttatttatttatttatttatttatttattttgagacggagtctcgctctgtccccaggctggagtgcagtggcgtgatctcggctcatggcaagctccacctcccgggttgatgccattctcctgcctcagtagctgggactacaggcgcctgccaccacgcctggctaattttttgtatttttagtagagacagggtttcaccgtgttagccaggatggtcttgatctcctgacctcatgctccgcctgcctcagcctcccaaagtgctgggattacaggcgtgagcccccgcgcccggcccgttttaaggaattttaagggcatcaaacttatttcaccagggtagataaataagatatatttataatctcaggtatgaaag

SEQ ID NO: 2236 - DNA, 532 bp, Homo sapiens
cttgtgtggtgcactgtgctcctgtctttagggacccgtgaagacaaacttcttccttcatgatagtcatttccatgcgtctgtgtccatactatctctggttaaaacaaatcccaggtacattttaaaacacggatggtggtagatcttgcatggaatggtgatctagtcacatatattttatatactctggaaatgatgcaaaaattggctacaagaaagcttatatctctccttgtaatcttctataacaattttaaactaactttttctacatacagcatgttgtttcctagatgaggcgatgaaattctttatgcagcaagagttttccagtatatttcaaaataccttattgtgaatgtttttgaaatgtgtaattactatctgattaccatatgttaaaaattttaccaaagtaatgtaaaatattggattagatagtaaaatagaataagcactccataagaaatgtttttcctaagaatggaatatgtatgggtttagaagattggatggataggccgggcgc

SEQ ID NO: 2237 - DNA, 515 bp, Homo sapiens
ggccagagtgactgaaagtgcatggctccaggtaggtgacatggtactgtataagttttcttgacccatggttggcttcttgagtcaatggatcagagatagtttcgaggtagacagccacatttctatgccccaagaacactcgagatccctctgcattctctgctgctgtctgatcacgtttttgtttcaagacaagcagctcaaactgtcccacagcttagcaagctatagctcatgggccaaatctcgcctattacttaaaaaaattattatatttttggttttaaatttggggtaaaatgcacataacataaaatttgctatcctaacaatatctaagtggcattaaggacattcacctggttgtgtatccatcactaccatccatctccagaacttttcatcttcccagtctgaagctctgtacccattatgcactagctttcacttccctctgctcccagtccctggcaacctccattctactttctataatttgactccctgggagc

SEQ ID NO: 2238 - DNA, 649 bp, Homo sapiens
aatgtagagaaacttatgattgtcagatttagcaaataaaaatacaaggatgcccagttgaacttgaatttcatacaaactacaagtaatttttaatataagtatgtcccaagtcttaaaagaggactacaaataatttgttagtgtgagtgtgcccgtaagtatttgggacatactcacactaacaaattatttgtcatttatctgagattcaaacttaactgggcattctatacttaacttggcaatttgaggaagggtgaaaaaagagaatacattattacattgcatcatggagatacagaccttaaaaataaaaatgttgtaggctgaggccaagacacagaagcctttgcagcagtgctaattgggcattataagtttatatttattaactcttttcagaaatcataatcttgaaggaaaatatcccaaatcatctcaatacagacaatatccgtacaaggatactacttgacatattcaatcaaaacaatatgaattcttacaaactaagaattggactagaatttagaatgtatgctcattggccttttagctatttatagctggagtcccacagataccaaatgtcatgaatggaaatccacatgcccatcattgacaatctaaacagaacttgtttgat

SEQ ID NO: 2239 - DNA, 605 bp, Homo sapiens
tgtcattacccgagctagggcaaagcaacttcagactttacaaggccatggaggtgaggctaagacagccggtgcctggaatcagtactctctgccacctcatcttctgcaatctaataaacccaatctttctcttttttttgagacagggtctcgctctgtcacccaggctggagtgcagtggcatgatctcagctcagtgaaacatccacctctcgtgctccagcgattctcccacctcagcctcctgagtagctgggaccacaggtgtgtgccaccacacccggaataatttttgttttttttgtagagactggatctcaccatgtcgcccaggctggtctccgactcctgagctcaagtgatcctcctgccatggcctcccaaagtgctgggatcacaggcatgagccaccgtgcctggccaaaacccagcatttctaaggacttcattaacaaagaaataagaacaataccaactctagtaagcgacttctgtatttttatccacaaactaaataatgctaacagtaatttttaaacccatttttttccctgtgaacatacatagcttatgcttttccaataactaacatctctgaaaaa

SEQ ID NO: 2240 - DNA, 280 bp, Homo sapiens
tatgtatacaaaaatatttgagttactctgaatcagctttttgtcttctttttgtgaacagaagttgaacctttggcctcagagcattgctattacatgtaacggccaagagaggactgtacagatgtaccaagggcttagttaatggtcgtggcaaattgtatgatggtttccatgtattagctcccttcctggtaagctggttatacattcccgccagaatgagaagagaaatagaacagagcctccacgggtgatttacgactgctggcatgtaagt

SEQ ID NO: 2241 - DNA, 607 bp, Homo sapiens
agttgcatcacagctagagagcagcacaaagagcagaaagtccagaatttaaaagctaagcttatacttgacaatatttttcatattaatgtaatttcttcctaaatattttaaaatatttcttatgaaacatacttaaggatctctttaactgcccctttgggaagatggggagatggctattgctagctattctgttttgactaccactatttaataaatgaattttaaatgtattatttaattaagaagtattctctgtgcagacccacttactaaaaaataaaagtaataccttttatttttaaaacattattgatatggtttaataagaaagagtttaaaaatagattatacattaaagtatgtctttatattcatttcttctttgcatttttcgaccaattccctataaattacggccacttcatggtaaagaaaccttaattaaaataccaagtgcaaaggaaggacaggatttggatgacatatgtgaatgcaaatgaaaagtactctatagggaaagtgagacttcattgaaggtgacatgcttatggaaaaaaagatgtgctgagcaagcaccttagctgaacaagcaacttggggc

SEQ ID NO: 2242 - DNA, 389 bp, Homo sapiens
gccaggctggtcttgaactcctgacctcgtgatccacccaccctggcctcccaaagtgctgggattacaggtgtgagccaccgcgcctggcctgtaggttctcttttacgaggcaactaattccaataatgagagctccatcctcgtgacctaatcacctcccaaaaagccccaaacccatctcctaatactatcactttgggagttaggatttcaacatatgaattttgggtggacacaaacattcattcaataacagtgactatactatcctatgttaacattctactattttcaaagcttttgttcactttgtatatatgcatttatttatctttgtagcaaatgaaggataaaaatatcttttggagtattatcttgacatactc

SEQ ID NO: 2243 - DNA, 208 bp, Homo sapiens
aaggcttaatcctgacctttcttagatacttgccacacctatttagcattgatgctgttcttattttatggatacaggttagagttcttatcaaaatgatccatactaacgcagagcattttttctgaggcatttataaactaccagagtttactttcaccaatgattacattaacaaatactttccatatgctaaaatagttttgcg

SEQ ID NO: 2244 - DNA, 465 bp, Homo sapiens
accagggaccctctctacaaatgctctaactttcttgccgggaggcatcttccaaccacaggcacgggagggagcccaagtggagcacagccactcgctgagtcgaggagacagagattggagttcagggagtctgaagtgactgaaggctgcagaacagaattccagaggggaaggaaatatgaagaaatacctcagaaggagtgcccaggatcctcatggcgcccccgatgtcctggatgaatactcaggtgtgtgtgagcaggggacattccctgcagctatgtaaagggcgcccgtggtctgtgagctgaagggctcctggacctcacacaggctgagaggagtgcatactccgaccgccagagtggagagtgcccacggatccttcagcacactcagtggagaccccagaggaccacaattgagtgttaagaccaaacctaaacccctcccagtcaaagc

SEQ ID NO: 2245 - DNA, 539 bp, Homo sapiens
agacccagcaaaattgctatatgaataaaatatgtatacaaactaatctttttaaaaaacttttcccaaggctgtatatgaatataaaaacccagatttgaattatacatgcaaactgtaaaagcagagacacatgctccctattaagtctgtgttttaaaatatccagttaccaatcaagaaaccccagtagattccaaagaagcatatgtaagaaaccatgacaaggtaaaagattattatctggcaagtagtgcctagaatcaggtctgagggggccagaagggactatgaatcacaaggtgagaaaagataatttgcagcaaattggtaagatatgtgggaggagctaaagtagttgggtctgccgggtgaggtggctcacacctgtaatcccagcactttgggaggccaaggcaggtgggtcacctgcggtcaggagttctagaccagcctgaccaacatgccaaaaccccgtctctactaaaaatacaaaattagccgggcgtggtggtacatgcctgtaatcccagctactc

SEQ ID NO: 2246 - DNA, 481 bp, Homo sapiens
accctcctttcatcatcctcagcttcagtgaccttcctgaacctctactgggctgctccaacctcaattctgcctctccaaccccttcctctggttgatgtcagttctcagcttggtgtcactgcatcctggaaaaagacagacacaagcccacaaaaagatagatgcacagtgttcatttaaaaagagaatgagttttcccagatctccaggtacttgcagtggtctatgtggccaggcaaatatttatgataatttacacacaaacatatatataggtacacacagacacagacacacacacacacaacacaatatcatttccaggagtgtaaagacatttgatctttagaatgacttaaaacgaaaactagatgagcatatgtgtgaggctgaaagtagttgtgagttgcaggtagatagctgaggttagatcagcagcatatttacatagtttaaaattagtagaggagatactggt

SEQ ID NO: 2247 - DNA, 569 bp, Homo sapiens
cccaggctggagtacagtggcacaatctcaaggtggcgagtccaagcaattctcccacctcaaactctccagtggctgggattacaagtgtgcatcaccacgcctggctagtttttgtatttttagtagaggcagggttttaccatgttggccatgctggtcttgaactcctagcttcaagtgatccacccgcctcggcctccaaagtgctgggattacaggcgtgagccaccgcacccagccgataactacatttcaaattcagttacagtcttgtttaaccccatgataattgtgatctcctttttctctgggcctaattttctatttctagttttctagcctattgtaaagaccctttatgctcttatggacaagagaggagataaaattaacatttggtatgctgattttagaattatttctgcaatttttacaaagataaatgcaaagaatatgtcctatgttatgatatttaaagaatttgtagaggttactccgggcatactgcatgcctatggggtagctctgttccacaaggagcaaaaaaaaaaaaaaaaaaaaaaaaa

SEQ ID NO: 2248 - DNA, 413 bp, Homo sapiens
ctgatgaattgttcccaactaaaaacttgtgattaggttaacttaaaaagtcacaatatggatggtaaattaggaaggtactgtctttattcttagaaaacacagactgaagcatttagggatgaagggtgaggaggtatgatgcttgcaacttatcttctagtggttcataaatgcacctgtgggtgtgaggagcaagtgagaaaaactagtatgtgactcttgtaaaggttatcagatgtgctttatactattcttgcaactttcatcaatttttaaaattatttccaaataaacataaaacgaagagtgaatttattagtctttgttttcccctttccaacacacacacacacacacacacacacacacacacacactatggatttgggtatttttaaatactctatacc

SEQ ID NO: 2249 - DNA, 485 bp, Homo sapiens
ccaagtggaaagagcttggtaacctggcgtttgcccactcattcattcagtaggcttactgagcacatactaagtgccaggtgctgtgctggggattgggtctataaggaaagcagaggggccattctgagagctagccagggtgccgctcaccacgctggggtccaataacctggggctatgttcttcccattgtcctcgctttaccatctgccacactggacctgaagtttccatccttggcccttcaagggctccgtcttcagcaccactcacttgcagtgcctttcccaaaaagggcaaaagccttccttatttggggcacaatgtgggtggagatgtgggccacacccacaggagcttcctggccctggcccctatacttcctcagggatgaaacgggcctttcaacccagtgggcaggtaggggtctcaataatggttctccttttttggcatctggccccataaacatgacagcagac

SEQ ID NO: 2250 - DNA, 328 bp, Homo sapiens
aatgttaataatgtctactacatgctaataatgtctactaaagtacaactgtgaaaaggttgtcaacaaaaattccttatgacccaaggaaaactaaatttgcgtcccaaggctcttaagcaactgtatttaaactctgcacttaaaaattcatattacaaggccgggcacggtggctcacacctttaatcccagcacttgggaggccgaggcaggcgaatcacaaggtcagaagttcaagaccagcctgaccaacatggtgaaaccccatctctaaatacaaaaattagccaggcatggtggcacacacctgtaatcccagctactc

SEQ ID NO: 2251 - DNA, 513 bp, Homo sapiens
  misc_feature 394, 395: n = A,T,C or G
ggaagaccctgcttaccacacagggacaagtgtttaaaagaagtaacagttttaacagaggatgaagggaagtaaagaagggagagtgagagaacatggagctccaaccgcacatgctatttactgaataaatgtgctgttcagggtgattttagtccatcaacaaatattttgtgagccctactataggccaggcaaacagtaatgaaaaagcaggaagcatcctttccctcatggatcttacattctagtagttaaaacagacactgagcacaccattatatgtaattaaataaatcgcaagtggataaatgctgtgaagaatatatacatagaagtgtaggaagataggctgggcgcagtggctcatgcctgtaatcccagcactttgggnngatcacgaggtcaggagatggagaccatcctggctaacacggtgaaaccccatctctactaaaaatacagaaaaattagcttgggcatggtggagggcacctgtagtcccagctactc

SEQ ID NO: 2252 - DNA, 558 bp, Homo sapiens
ggctggagggcaatggcgctatctcagctcactgcaacctccacctcctaggttcaagcgattctcctgtctcagcctcccaagtaggtgggatgacaggcacacgccaccacgctctgctaattttgtgtatttttcattgagatggggtttcactgtgttccccaggctgatctggaactcctgagctcaggtgatgcacccgcctcagcctcaaagtgctaggattacaggtgtgagccatcgcacctggcccacttttcttttacaatatggaattgatgaaatggtttcaggttcaggtacgattatgtgaatacctactgatcatgtaattaactaatactctcactgaaaatttaaattcaactggcaatatactataaagaaattcaggccaggcgcagtggctgacacctataatcccagcactttgggagcccaaggcaggaggatcacttatgccaggaactcaagaccaccctgggcaacatggcgagaccccggtttctacaaaaaaacaaaacaacaacaacaacaaaaacactagctgggcat

SEQ ID NO: 2253 - DNA, 427 bp, Homo sapiens
  misc_feature 260: n = A,T,C or G
gcaaacaaaattaaatagcttattaaaagggttatacaccataagcaattgagatttatttttagcattcaaggatgtttcatcacaagaaaaccaaactatataatacactacattaacagaatgaagggaaagcacacaacgcatgcacacacagacacgtaaatgcacacacacgcaaggccatctcaattatggcagaaaagcatttgataaggtgtagtgctctcttagggggatatggctatgaggaaaagtanggtgagtgtgtacaccattgatgtgttatctagagacacaaatataaacacagtagtaactggaaagaagacagacaacgttggcccagtacatgcaggagatagatgtggtgggagcttatggaagttcccctgtaaggaatagcaagcaattcttcagctgatat

SEQ ID NO: 2254 - DNA, 580 bp, Homo sapiens
cagaagggttattaaaaaaaaagaaaaacagttttgaaaatgataaactaaaggtatagctaacataacttttggagttttcatacacggattaagtatcaacatctcagaagtcaaaaatgacacagtatttaaagtttaaatttggtggatgaataaatgggacaatatttatttataaacactcaaaatttacctagtattaacttcaaaatattaacaggattagaatttttaaaagatgagagccccctagtggaatatagttcttattgcaatatttcaaaatagattaaaaaatgcttaagatctgttcaaaaccaaaaacatccctttagagtaactggactaaaattatgcgacagaaaaaaaaaacattaaactattactttctcagtacttcattttcagatggaactttaagaaaaagaatagtgccaaagggaaaggttagcaatgagcacagggataaaagcaaatgtagcccaaggaagcagtctgctctgccataaatattaaatgttggttttgccatttttttaagctgaatttctgaaagcagaaatagctgaaaagcaac

SEQ ID NO: 2255 - DNA, 561 bp, Homo sapiens
taacctgttacattgcattttgtacttttaaattacacatctgaattgattggttatccttgttaaagtagttccaaaattactgtagtttaaaaactctttaaatattacattgtagttttaatttgtttctgacatcttcaaagtttgaaattttcccttcagcaacaaccatttgttagctacattcacacgaaagcagcttaataaaggacattctacacaaaggtaattataatccattgatgccccttaatgcaagctgctttgtagtcattatctagcagtagatgactaaggaacttgattattcttgtttttcatttttattaaattaagaaggtttttttaaattatgtcattttgcaaatggttcttaggagtaatgcctttcaaggctccataatcactagataattaacctgcaaggattaagtacactcaactttgcctcaggatgcttaactctcaaatacagtcaattatctcatgataataactgctttgtcaagagttaccacttaactccacagtgaaaagtcaaatcacccataccatgca

SEQ ID NO: 2256 - DNA, 514 bp, Homo sapiens
acccctttcctctcccgggacacagctagagtgctgtgagcttgtcggtgtgccgtttagtgtccttctgaggtctcatgtggccttgctctctccccagctacaccgcgagctctttgagagcacggaccaggtctccggtttctctcatacccctaaaggctcggcacagagctctgctctgaagaggggcccagcgagggctgctgtctggccatggcggtcatatttctacctgagtgctggactctggggcccaagaagccccaactcatgttacacaagaagccggttggctataaaatgtggccgggcgcagtggctcacacccgtaatcccagcactttgggaggctgaggcgggtggatcacctgaggtcagcagttcacaaccagcccggccaacatgatgaaaccccgtctctactaaaaatacaaaaaaactagctaggcgtggtggccggcacctgtaatcccagctacttgggaggctgaagcagaagaatcacttgaac

SEQ ID NO: 2257 - DNA, 292 bp, Homo sapiens
ggttaaacactgcagtgctgcattggcaaaacaggtattgcccaaattctggagcccagctccaaccctatgagtttgttgccacttaagacaaatcttctcagatgggaaaagaactttctgtggaggagcgatgccatcacctagggctagaaaaataaacaagaaagagtcagaaaccaagctttgcatactgaagctaaataaatagtaacacctggtcaaacctcaatctttacaagatccgaaatctcatgaccagcctacctgaaatacagggggaagagggaca

SEQ ID NO: 2258 - DNA, 586 bp, Homo sapiens
tgttacttgatactctgccacccccaaacatattttctcttcaaaactgcatgtaaagtcaagggaatcttaaaattttctttcccagataaaatagtcaaagaaatgtcttaccctgttctatgagagttcccatacaaaataaaactaataacatcagagaaatcttgggggtggaatgtattacttggtgctttactcatgtgacttcttaatgctaaagaaatttcttgaatttctgtgtgattgttatcgctgtagacagaaaataaagttgttgttatgcaaaatattttagcttaaaaggttagcacatactgtaagtggattatttacttattaactcactggaggtaaaaatatagtaaaattgagactttcaaatggatacagagatgtgattacaactttagatcctttttttattcacctcagatgggtcatgtgccgacatcataagaggatttgagggaggcatatcaaacatgtgaacataaaaacccaatcattatgcttatctattacaaaaggatcaagtttaggctcttaaaagctcccaaatcaacttgatcaaaaacaataaaag

SEQ ID NO: 2259 - DNA, 256 bp, Homo sapiens
cgtaatttgttcagtttctccccattgtaagatattttgagtgtttccattttttttgttgttgttactgcaattttacattctcacttatgcctatcctctcacatttattcattcatttaataaacactgatttcttgtcatatgccaagcactgtttgagcagtaagaataagactgaaaattcaggtttatcacatcatggaacttatattctagtgagagaagatggatataaaaattgaatatcaattag

SEQ ID NO: 2260 - DNA, 617 bp, Homo sapiens
tagtttgtcattgtgataatagctgaaaacatagcaaatgctaccagagttaagtttatcttccaagatatgagtagattatgaataatattagaaaaagaaaataagcatattttgatagtactaaaacagatttacaaataaaatttactcaaaattcaaaagcgtcattcctacattgtttcattcctccaagggccagtgaaatatgattggcaatgtttttctttgacagactaatattaggatcattaaagataaagaaaaattttaaatgattgtctagtgggtatcaacgaactgattctaaactttatgtagaaatgcaaaagacccagaatagctaacacaatactgaagaacaaagctggaggactgatactacctgactccaaggcttcctataaagccacagtaatcaagacagtgtggtattggctaaagaatagacaaaccaatcaatgcaacagaacagagagcccagaaggagacccacataaatatactcaactcgcttttgacagaagagcaaagggaatacaatggagcaaagagccctttcaaaaatggtgctagacagccacatgcaaaaatgtgaatctagaacagaccttaca

SEQ ID NO: 2261 - DNA, 474 bp, Homo sapiens
taagaaattatataatgggtacaatgtaaactattcaggtagtgattacactaaaagcccagatttcatcactatacaatatactcatgtactcaaactgcacttgtaccccttacatttatacaaataaaaaataaaattttggtacctagaaagatataataaagggatatagtcttttgattaaaaaaaattatctccaccctgatgtggaagcagccatgagaaaagagatttggagaagaccttcttttggatgtcaactacaacaaaattacttattttcacaacatgtaaatatgttcattgcttgatttttttggttgaaaacatagtaagctaaattcataacactggcagtgtttctgtatgtaaacagcttaagactgaaatgactttgcataactaaacacattatataacagctcttcccagttgcctatttgaaagggaaacagccatatgaaccgtttt

SEQ ID NO: 2262 - DNA, 592 bp, Homo sapiens
aagttttattcagacatctgtgttcaggcaataccttagcttaaccagtaaaaactaacattaaaataacattatatatacaaaaaaagaaattccactaagaacatctaatggcataaaataataaatatgtcatagaaagtgaacatatcttcataggccactacatggtaagtaacttgaaaagttaaatagagtatttattttttaacagagttgttgttctaatgttagtaaggaagtgaatggacaaagatataaactcagtatacagaagacatcaaaaatatctggaacagtagtctttggattttaaaacaaattataaagctatagtgatttaaacagtatggaattggcataaagacagacatacagaccaatggaacagaacagaaaccccagaaataaaccctgacatatatggtcaaatgattgacaaggataccaagactacacaatgggaaaaggacagtctcttcaataaatgagctggtgaaactgaatattcacatgcaaaataatgaaattggatccttaccttatagcatatatttaaaaatcaaccccaaatggattaaatacctaaatg

SEQ ID NO: 2263 - DNA, 482 bp, Homo sapiens
cagatttgaggtagactttctgactgatttcttttttagagagcggagcatgcatcttttcaaattcatattattgttgaattaattactaatagaatttatcctcagtgtgtttttccaaacaaatagatcacttgtaattggcattgctttgcaaatccaaaatcagacatccacgttcttaaaagcagtttatcctttttataagattctgtgttttcccctcaagatgactcagattttagattaaatgatagaatgcattctagatacatttctaagtaatcaagcccagacctggaaagtgtttacagggcttgctcttctaaatccttgtgaataatcagagaaactatttgaaaaatggtgttgtgtcagaaacaagttgggatccattcatttctgaaaaatcaaagaatttgcaaaatgagaacactggggccaggcgcggtggctcacgcctgtaatcccagcactttggg

SEQ ID NO: 2264 - DNA, 338 bp, Homo sapiens
ttcctgagctggggtaagagtggaacatgcctcccttctcaggtccagtccaaaaagcatgtggcatatctccctgccacagcttctacccaagaagaccatgtggctcagaaaaactaacaaaagaaatgtgggcacagcaccagctatcagagggagctctctcaagttttacaagcagatctgttgagggaaccgtatcactccatatcactgcagagcatatctgtgaactcaagaagtacaaaaaagccctgtgaccaggtattaacctagctaccagtcattactgttaaacctcattcactggattgccacccaaactacaacacctaaat

SEQ ID NO: 2265 - DNA, 423 bp, Homo sapiens
aatttagtttatctcttttttcatatttgaatcttttctgacgatgaaaatctgaagtcccattattgtctatgtatttacatatttgttcaactactttgcaattaacttttcttccacttgattcccccaggtgctgttggctgggtgggttaccctgtgctagatagaaaccaatcagtcatgctgcctatattacatgagcactagggagaataagaggaagagaggcaatctttctggttcttaatctacaagatagaaataattattgttttaaacagtcacatttgtccacctatttgcccatatatttgttcaaaatttattctggcttttaaaccaaatttctgatgtcatttactttctgtggaaagaatatcctttagattttcatttagtgatggtatgtggtagtaagct

SEQ ID NO: 2266 - DNA, 495 bp, Homo sapiens
attgtcaactgaatttttccaaaagacaaagcttactaacatgcgatggctcttatcactgttgttgccttgaatgcaaagccacagcaggctatgatcttcacaaaggtgcccagccagggaggtgaacggggattgaatcaagtctatgttcaggaaagaagctctgactgcatccaacacaatgaggcctccttttctaaaacctcaaatgcttcatggagggcaaataattttcataattcaatttctctttattatgcataagagttcagaaaagctcaaagaaaaattgatgccccatcgggaggagaagaggagggaagtaagtgtagtaatataaggccaacacaagggattcctgtggtattggaactgttctgtatcttgactgtaggggtcatatacaagtctacacacatgataaaattgcttgaagcttactcaatacacacacatgcacaaatgagtacaaataaaatgagaaatctgagt

SEQ ID NO: 2267 - DNA, 317 bp, Homo sapiens
agccaggatggtcttgatctactgacctcgtgatctgcctgcctcggcctcccaaagtgctgggatcacaggcgtgagccaccctgcctggcctagggttgccatctttaaaaacaatcaacaacttcatttggcctactttaagtcatctttattttattgaactttggagctgaaaaattccttagggctcactgaatccaactctctaattttacaaatgaagacagtgggtcccagagaggcaaagtaatttgctcaaggtcacccatttctttttgtttgccactaacagaacatttcccacttgctgatgc

SEQ ID NO: 2268 - DNA, 340 bp, Homo sapiens
gacagaagggtgtgagctctgggatggtggcttttccttggtctgcatgttcaacattcttccagaagccagagaggtcaggtcttcatagtgactatgtcattcataatgaagtgggtccctaactaataggcaggaacatgccatcatgcctggaatttcctctctgatttctaccagtcagtagccaggctgacaactccagacagaggcaaacatggcggcctcaagtggagaagaaaactctgagcaaagctgtctttgctcccaggcgatgggagatatgggtgaacagcagccgaaactggctggaggcgagaagctttggacttgtttgact

SEQ ID NO: 2269 - DNA, 513 bp, Homo sapiens
gacagaagggatagcattggtgtcatcatttatgcttatatctggcacttgttgctacaaaggtcctttgggatcgcatgctaaatgcaaagatagtaacatggtacataattgctacaattttgtttttagaaaatcatttactgtatttacttaacctaacattttaaataccccaatccagtatcaaaacaagattaaaccagcagttgcatgatttattaagctagtattgcagaagaactctccatgtaatctgaaaaatcaaatgtagtaggaaaaaaaataacttaggcaaacgtaaatgataatgttaaataaaagaatacaaaaaagctctccttccaacctgcacctgcattttaagtggactttagaagactgtggtgtttctgtaactgttaataagcattcataagaccccagaacagagcttcacagccaagcagaaatacataattgctacaattttgtttttagaaaatcatttactgtatttacttaacctaacat

SEQ ID NO: 2270 - DNA, 368 bp, Homo sapiens
gaaggggagccatggaatttttccggtagtccccaactttacccccactgcttctatctttgtggctttgccctcttttatcgcctaataaggctggatagcactttgattcctcaccgtctaacacacggcactttaattttgaggatagagaatggctaacataaagtattcctataatttattaggcttactgtattgtatgctgtggtcacttaaaaagaggactacaatactatatataacacattcagaaatgttgtataaagaccctttttgaattcataaatcttttcttatacagccagattatcataaaatgtatgtgtgggtcgagcgcagtggctcacgcctgtaatcccagcact

SEQ ID NO: 2271 - DNA, 505 bp, Homo sapiens
gacagatgtacatgataatacatatggaggcagttcttatattacaacaataagcaacgcttgctatataaataactgctgctactacatatcgtataactatacaatacccatataacatgcattgcacgatcttccctgaataactcaattatgcacctgctacttactagcggattggaggtataattaaggagacctaagacataatctgtatgttgtaaaatataaacgcataaacagagcagaaaatacgagatcattcatagaaaagtcaatgttttaaatacactcatttaaagaaattattcaaatttgcctttagcttcacagctgtaagtactaaacagacaaatgtgtttcttggagttacaactgtaggagcacagcatcaatctgtgaagctgagagagacaatgagtgaggattcaacaaatacctctagtcttttaacttcttgtgaagcagaatgattgaaaacaactaggctaacttaattctatag

SEQ ID NO: 2272 - DNA, 426 bp, Homo sapiens
ttatacaaatcaataagaaaactgcaaatgagaaaattatatcaagcagcaacgctctaatgaagaaataaaagtagccaacaaaaagttagaaaatggccaggcacggtagctcaagcctgtaatcctagcactatgggaggctgaggcaggaggatctcttgaggtcaggagttcaagaccagcctggccaacgtggtgaaaccccacgaggtgaaaactgtctctacaaaaaaatacaaaaattagtcagacgtggtggcatacgactgtaatcccagctacttgggagtctgaggcaggataatcacttgaaccaaggaggcggaagctgcagcaagccgagatcacgccactgccctccagcctggtgacagagtgagactctgtctgaaagagacagagagagagagagagagaagaaag

SEQ ID NO: 2273 - DNA, 494 bp, Homo sapiens
agaaggggaagttagaaagaatgtggttggttagggcttccaggcttccaaatgcctggaagaaggtgagtttttatatcagctccagcatctgtaggaaagccggagaagaacactagcatccccagcatcccttctgtggagctgaacccctcagcctctccagataggggatccttgttttcatccctggagacccagccctcttgcaaatggctctccatagaggcaatgtctccagagagacttaattggcaatgcttcactgagcacagaaacctgggatatgacagttcctgctctttaaattgtcaaggaaggcaatgtgctctgaactgcagctgctgggagtgcagggggacccatcttagagtctcctccgccttccagcctctgcttctgaatgttctgggaacaagaaacagcaacagagaaatgaacaggtagatggagcacgatgagcaacataagctcaactagcctttttatggtca

SEQ ID NO: 2274 - DNA, 537 bp, Homo sapiens
gacagaagggcttattttgggctggggattactatgatgaagctatatggccctggaaagaaacagataactatttgaaaaacatggtagcattttatcctgtttagcatttttcaaattgtaatatttttatataatattaaaacgtagccttctcaaaagttaatgtaacatactaaaagccattaaaatatcctaatttggcaaaccagactagttttaattacccatacaattctaaggtttatgacctctgaagtaatattccacaactgttttgtaatcaatctgtaattatttttgtgatgtcacagagtagctgatccccctccaaaaaataaacagctttcaaaacatttgttattatttatcattgtctatgcatgtattcattttgtgctgctattatggaatacctgagactatgcaaattataaaccacataaatttatttctcaccattctagagaccaggaagtccaaggtgaaagggctggtaaaactttcaagggccttcttgatacataatgccatggc

SEQ ID NO: 2275 - DNA, 326 bp, Homo sapiens
ccattacccttcatgtgaacttataattgacatttgtctctaaaagcagtcaagcattcatctgtcatttcagttacactaggtaagtatatgtaaataggtgcaaagaaaagtttgatgagtcatatttatagaatatgttctgagcaaatggcagcaactaattacatccaacttatcgttggtgttcaattttgtctttcaacagcaatcaaatctcaaaagtctatatatacaactaagtctgccacaaggctttgccatagctgatacatttatcttttaaaatagtaattgggcctggcacagtggctcacacctgtaat

SEQ ID NO: 2276 - DNA, 120 bp, Homo sapiens
gccattcaggctgcgcaactgttgggaagggcgatcggtgcgggcctcttcgctattacgccagtcgaccgccaattcaatatggcgtatatggactcatgccaattcaatatggtggat

SEQ ID NO: 2277 - DNA, 161 bp, Homo sapiens
aagacaaacaggttattgccaatagaatagtacctataaattacattacatttgctatttcattttcttcttttttaaaatgttgctaaagccttctctattatggagttttgaaagtaaataaactcaataccatcaagctcaacaatgctaaatgtcag

SEQ ID NO: 2278 - DNA, 369 bp, Homo sapiens
gctggagtgcaatggtgcaatctccactcactgcaacctctgccttctgggctctgctccatctcctgcttcagcctcctgagtaactgggactacaggcatgagccaccatgcccggctaattgtttttgtatttttagtagagacggggtttctctatgttggccaggctggtctcaaactcctgcctgaagtggtctgccagccctggcctcccaaagtgctggggttacaggcatgagccaccatgcccagccacattaactttttaaataagacaaatgtgcccataataattacatttattccaaattgtgttagttgtcctagccaatgtaataagaaaggaaaagtaattaggaagcatag

SEQ ID NO: 2279 - DNA, 514 bp, Homo sapiens
gaaagatttactgcttattcatctggaggcaatccttctcttaaaaaaataaacaaagcttgctatataaataactgctacttctacatattgtataagtatacaattcccatataacatgcattcaaagttcttccctcaattcctcaattttgcacctgctacttactagcggtttggaggtataattaaggagacctaagacataatctgtatgttgtaaaatataaacgcataaacagagcagaaaatacgagatcattcatagaaaagtcaatgttttaaatacactcatttaaagaaattattcaaatttgcctttagcttcacagctgtaagtactaaaaagacaaatgtgtttcttggagttacaactgtaggagcacagtatcaatctgtgaagctgagagagacaatgagtgaggattcaacaaatacctctagtcttttaacttcttgtgaagcagaatgattgaaaacaactaggctaacttaattctatagttttaattct

SEQ ID NO: 2280 - DNA, 358 bp, Homo sapiens
aataagtgatcagtttcctttgtaagaacatacaaagtcagtcattcaggaagtttgtgatcttcccctggatgcaagccactggcagtcccaggatcccagtatatccaacacgaaggtcctgtcagagctccagtgttctcccgcacgacctcccacctcctacctcccagtacctcaacaggaaaggacacatctgtgaatcctctggcatgacttcaattccttacagctgtaaaatccactgcatggaaggaaaagaacatttcctagactgggaatccccagacactttcccaaactgaacaagtgaacagggttttcgctctggtgaatgataccccgtcaaggagagtgc

SEQ ID NO: 2281 - DNA, 627 bp, Homo sapiens
tacccaatcagaatgatggcccctgataattttataagaaatagtgtgatgctaagcatgattcctagttaatcattctattcctatgcaacatatcaaaaaagacccttgttgcatgctgaattcttggactaaacgtactttttagttgcacagctgccacaaaccttactattgtatacttgctgattttgtcatttgatttttttttttaatttctaggtttttctaaggatagattcatcatgttatttttcttgtctagagtacagagaaataatattttgattattttagttgtttcaaaattgctctcttttttggaaggagaaacgtaactgccgtgcattttactgtagtcagtagttaaatgtataacatgttagctcaaagattaaaatgtgaatattctagagcacgagtacagagagttgatacaaagggggatgtcagttgctctgaagttaaattccaggattctgtcacatgctgatatagtgccaaagcatatggatctccatatggtgctgcttttggggtttataccacctgtaatctagctgattttcattcacttaaatttgtccaagaggtaagcaaactaaataaggaaatgaaaataatatg

SEQ ID NO: 2282 - DNA, 634 bp, Homo sapiens
acccaatcagaatgatggcccctgataattttataagaaatagtgtgatgctaagcatgattcctagttaatcattctattcctatgcaacatatcaaaaaagacccttgttgcatgctgaattcttggactaaacgtactttttagttgcacagctgccacaaaccttactattgtatacttgctgattttgtcatttgatttttttttttaatttctaggtttttctaaggatagattcatcatgttatttttcttgtctagagtacagagaaataatattttgattattttagttgtttcaaaattgctctcttttttggaaggagaaacgtaactgccgtgcattttactgtagtcagtagttaaatgtataacatgttagctcaaagattaaaatgtgaatattctagagcacgagtacagagagttgatacaaagggggatgtcagttgctctgaagttaaattccaggattctgtcacatgctgatatagtgccaaagcatatggatctccatatggtgctgcttttggggtttataccacctgtaatctagctgattttcattcacttaaatttgtccaagaggtaagcaaactaaataaggaaatgaaaataatatgcctgtgtt

SEQ ID NO: 2283 - DNA, 588 bp, Homo sapiens
acagaagaaacaagaaaccaattttatgtgatttcaaggagtacccctggcctttgactaattagcatggacttgaacccagccctatctctatccaacacatgcaacgcatgctgaccaagcagcaagttaaagggttactgaatttgataaaccaccctctttaatagctgttaccatagtgtttagctgctcgttactgccgcagatgggaattcattgatatgattaaatttgatggtatgataatgtatggtaatcacgattaatcagaaacccactagcaagtggaggatgttgggtattatgtcacgtgcattttaaactgcattctctccttgcaagcctgacaatgtttgacagctggaagggtctcctactatattcgcctgctactacttatagatctgatcagagaaaatgcccatcattccttccatagcttaagtgctggtaattataaggcattgcaagcatgttgtaaaaacagtaggtgttcaaaagcaagacgttctttcctgatgggaataaagtctggattctcatctgcaagggctgtaatagaaagaaatgtgatttgatgcagca

SEQ ID NO: 2284 - DNA, 520 bp, Homo sapiens
ggttgtaagttccctcaaatgctagtcaaagcaaatgcaaattctctccaaattcttaaaaaagaatcttaaacccagactcaaacaattctcccaaataaccttctaaggaaagttgggttatacaaatgtccaagtatacaaggaaacaagatcttatgaatgaaaaccaagaaggcatggcaatatcggacccataaagacatcaagaaaagcaattgtcttaaatcatgaaatagatgctactgacatgtcaaagaaagaagatgggagcctgtaatcccaacactttgggaggctgaggcgggcggatcacaaggtcaggagatcaagaccatcctggctaacatggtgataccccgtctctactaaaaatacaaaaaaagaaaattagcgaggagtggtggcatgcacctgtggtcccagctactcgggaggctgaggcaggagaatcacttgaacgcaggaggcggaggctgcagtgagccgagattgtgccactgcacaccagcctgggtga

SEQ ID NO: 2285 - DNA, 336 bp, Homo sapiens
taaaactctgttttaggataagtcactaatatagagatagctagttcaattgtgtctggcttcctatcacatcactagcacttagtacagaattggggtcctaaaaatatttggcaatgatgacctgtgttgctttcaggaaagtattccaagtgatagggtgcaccataatccatattgctttagctctgttacaagtgacaaaattttctatcaatttccaacttcctagctccaatgtctcaagaatatgccaggcgggtgtaggcacagctccagacagcaaacaactttggggttgtatgcatataactcaggagttaactctattgatct

SEQ ID NO: 2286 - DNA, 599 bp, Homo sapiens
  misc_feature 559: n = A,T,C or G
ttttcaaatgacacctaaggtcttcaatatctaattccctcacaatccaaccagtaacaatagcaccaatgtatttataaaacatgaaagatttggcaacgtttatagatgcttctatattgctgaaatttacgtggatccaactagatgacatcagacaaaggtaacaataattctttaaaaatgtacacagtacatttttaaagcattgggtacagaatgaaattgtaaattttggctaaaactaaagcaaataggtccaaatcacaacacatgtataggagaacctggtgcaccaggataagcacgttcaaaagcctgtaacccttatagaatctgcataggtctgaatactgtctgagaggccaaacctaaatttggagcataaataccaatactttcaaaatataacctaaatgcccttggctccttagaccagctttgaaaacaggtggtaaatctgacaaatggtatagaaagaattctttttgagaaacaccgtatcctaatacctgtatttcatttaagaaactcaaaaaattaattgcttcattagctntcctatatatagagttcatttatacatcagcagcatgcct

SEQ ID NO: 2287 - DNA, 557 bp, Homo sapiens
tactcaaagtgtatatatgttttttttatatgcaagataaactgataatttcaacacaatctgcactactttgaaaaatgtacaccagggcctttcatgacttgtatacagttctggccattctctttatctcaaaccgaagaaagatatgatgcaggcagtagttttttcttagtgcctcatagtatctaatagcagaaagtgagccgcatagcggagcacattagtttttatgtatctacaggacagaagggccacttagctgatggctccaggtttcctttgatataatctaatgttcctatgacctcaaagactgaacacatttccctaagtgctgcacttagcacccaggagcaacttggagtcttcgcagaataaaatccattattttaatgtagattaatacatgggtacttatatctatgcaggtctataatagtttattcctatgtaagctttattaaaagcattggtatgttttacataaaaagttaatgtgaatattagaaaaaaaggacaatattaaagcagtttgtagaatttgttcccccccc

SEQ ID NO: 2288 - DNA, 508 bp, Homo sapiens
taatgccctcattttatgttgtgaattttagaaagaaataacaattaagcatcagtcaattaccttcacttaggagaggagaaagaaagcatagccctcagacagactggggaggcaggagagaattatgcaaaacaggaggtttactaaggtcctatagatacatgcctgggttcttccaaaaataccttcacccaccctcagatattgggcttaggattctaaagtattgagctcagttcttgtggcaacaggacgtaagattctaaacagtcttggtttgaaatggaataagattatgtggaattgctttaacaaggcatgtgaacaagttgttcttcactggcaaccctttccctccacttttgcttcctaagatgtaaagccgtggttggctgaaatgattttttgcataggtgtgcctaaatattgtggaacacaacagcatttgctcgttattaaatgtgtcagattcactatcttctactgtttattttcaatgctacat

SEQ ID NO: 2289 - DNA, 488 bp, Homo sapiens
taatgccctcattttatgtgatgaattttagaaagaaataacaattaagcatcggtcaattaccttcacttaggagaggagaaagaaagcatagccctcagacagactggggaggcaggagagaattatgcaaaacaggaggtttactaaagtcctatagatacatgcctgggttcttccaaaaagaccttcacccaccctcagatattgggcttaggattctaaaggattgagctcagttcttgtggcaacaggacgtaagattctaaacagtcttggtttgaaatggaataagactatgtggaattgctttaacacggcatgtgaacaagttgttcttcactgccaaccctttcggtgcacttttgcttcctaagatgtaaagccgtggctacctgaaatgattgtttgcataggtgcgcctaaatattgaggaacacaacagcatttgctcgttattaaatgtgtcagattcactatcttctact

SEQ ID NO: 2290 - DNA, 535 bp, Homo sapiens
ttggagtcctttgcacattcaactacatagatttctaacttgtggtagattctacctgtggtttctaccgtgtggttctagagagaattatcaacactaggccgggcgcagtggcccatgcctgtaatcccagcactttaggaggccgaggcaggcagatcacgaggacaggagttcgagatcatcatggctaacatggtgaaaccctggctctactaaaaatacacaaaattagccaggtgtgatggtgtaggcctgtaatcccagctgctcaggaggctgaggcaggagaattgcgtgaacccagcagacaaaggttgcagggagccaagatagcaccattgcactccagccctgagcgacagtgtgtgactccatctcaaaaaaacaaaacaaaacaaaaagaaaacaaataaacagtagaaatcatctccataaaaatgattcatttacaaatcttgtgggtggagactcttttcagaataatccttttggggccaggcacagtggctcacacctgtaaacccagcacttt

SEQ ID NO: 2291 - DNA, 639 bp, Homo sapiens
  misc_feature 586: n = A,T,C or G
aagtaattgtagtttttccattacttttatgacaaaaactgtaattacctttgcaccaaactaatatttaaaggacatatggaatggttggtttctaaagatcttagcattgtaaaatatcattaaaaagtcaatattttcttttccttcaagtctctttactcctgccattcctccctgtatttaatatattttcttttagataaaaagagaatgctgatgcacaagcttagagtgtctttcttgatcagttattagggactagaatctgtaatgtttgctggcttttcttttacagaacaattgtaaaacataaatgttgactgatagagttagtataaattatgataggcagacgtcttccctttttggtcctgtcatgacaataagttcatattgtcccactcccaaaacattttcctctatcccctgcctgtctattgcccactatttctttactgcactttacaagaggtgatggctggatgtggtagctcacatctgtaatcccagcactttgggaggccgagtcaggcagatcacttgaggtcaggagttcaatactaacctggccaacatggcgaanaatacaaaaaattatccgggtgtggtagcgggtgcctgtaatcccagctactc

SEQ ID NO: 2292 - DNA, 599 bp, Homo sapiens
cacccttaagtaacaaaatattacaaagcaatcatacaccagatacttcattttaagacagaaatggtgtctgaaaaccagaagaaaaaaatttaccaagttctttcataagcagactattattcttatcctcaaataactaaaaattatctgctaaaaccatcgaagtagtcatttcttgagtatacttctttggagtccaaatatgacaccactaagggaatcctcacaatgggaaacagttgccatgagtgatgagaacaccaagaatgctcagctcagaggcagcattccgtctctgctctgcctaataatagctgctggagctacttccagccacttaggcctctgagtctcagatgcctcatgtataacaccacctactctacagggttgttttgtaaatcagaaatgaaataaaacgatgataaagctttttatcatccgtaaagtaatataactgttgtcaggtgtggtgggtgctggagccatcctcctggtgaaagccagttgataaactttcaagaattttgtgagccacttgttaaaccagaaatagctggaaatcagccacagtgggagatttacactatggaaat

SEQ ID NO: 2293 - DNA, 630 bp, Homo sapiens
aggctggagaatgccaccttctgaaatcaaacctagtaaaagtcaacacattataacaactatggtcataataactacaatttattgatcccttacaatgacaggctctgaagtaagcactttataccctttatcagataatgcttaaaacagctgtgtataatagtcacctatacatctgtatcaaaatatggaagctcctagggttgcaaaggtttcatctggggccaccagcctgtaagtatcataacaaaagttcaaatcaagtttctctactgtctgagctattgtctactaggctacatactaagctttgtctcttttagaggaaaactacagaaaaataaaccatcagataaaatcatttgtaaatatgtcactgatgttgacttgaaaaatatgtacttagaaatctaagagaccagggtataacctcaggtagacatgataggatcacatttgatagatatataacttcatttcaatgccttgggcatgaccaagttgtgcaattagtaaccagcaagaggtggagttgacttgaaagtccttgctggccgggcgcggtggttcacgcctgtaatcccaacactttgggaggctgaggcgggtggatcatgaggtcaggag

SEQ ID NO: 2294 - DNA, 611 bp, Homo sapiens
atatgaggaaactaggcttggaaaaatatagtaatttgcagaaagtcttacaattagttagtgcagctttaattggaaagtttatgcttctttttaccaccatggtatactttccactgtgggcagttgtcttatcagggagggaatgcagttgtttttgctctccttttttaaagcactgaaatgttagaggttactttgataattggattggttagctaattagaatatagagttttttgtttgtttctatttaaagagacagggtctcactttagttgtcccggctgaagtgcattggtgccatcatggctcactgcaccttcagcctcctggcctgaagagctcctcctgcctcagcttcccaaagtgttggcattacaagcatgagccagcgtgcctggcaggaatgtagttctttttttctttttttttcttttttgagatggagttttgctctgtcgcccaggctggagtgcagtggcgtgatctcggctcactgcaaccgctgcctgtagggttcaaataattctactgtctcagcctcccgagtagctggcactgcaggcacccgccaccatgcccggctaatttttgtatttttttttagt

SEQ ID NO: 2295 - DNA, 394 bp, Homo sapiens
ctctcagattaacccagacaaagcaaggcttactgcagtgaatcagacacctcaggcacaggtcagaacacatcacgtggccgggactccctgggactggcaccatcacctgaagtccgccctttagaagaccagcggatgctctgtccatctctcaagagccacatgtctctctcacagggtttccactgctccattctctcatccagctttctcatcttgcatgtgattcagccagctcccagctcagctccacattttaacaaccagcaccggcccggcacggcggcttacacctgtaatcccagcactatgggaggccgaggcaggcagattacttgagcccaggagcttgagaccagcctgggaaacatgatgaaaccccatatgtaca

SEQ ID NO: 2296 - DNA, 590 bp, Homo sapiens
gtatacaaaagtcttttgtgtatttggtttgctaaaatcacctatgctgcatttgatttttgtacttcttacatttcttttaatctagaataatagagtctcattccattgcccaggctggtgtagtggtgcgatcaagcatcatagctcattgtagctttgatctcctggactttagcaatcctcccgcctcagcctcctgagtagctgggactacacacacgagccaccacacccaacctcctcccttttcttcttcatgccattgaggtgttgactaacgtatggtctctattagacaaacttacttatatccactaacttcgaggaatgactaatgggtggggatttcaggacaatcagaagtcagcaagaatgggaagacaaggctgggcatagtggctcatgcctgtaatcccagcactttgggaggctgaggcgggcagatcgcttgacatcaggagtttgagaccagcctggccaacatggtgaaaccccatctctactaaaaatgtaaaaattagctgggcatggtggcgcaggcctatattctcagctacttgggaggctgaggcaagagaattgcttga

SEQ ID NO: 2297 - DNA, 616 bp, Homo sapiens
gcttcatttcatttaaacttccccaaaaccttgtatgagtggagtctggggattcagaagaagacggtggtcatcacagaagttgaaattctctactgtttacttcttcaaaggtcttgttagcggtggccttgaaggtgatgaagaaagacactttcaaggtggacaggtataattattgggtcaccaagaacaaatttgaaaaacaaaatatgccaattgaaattagcatgtagcacctaaatacccagaagcttcttcattgaataatttattcattgaataaattatgtaaactgaattagtaattcctagtgaaatagtggatgaattgagaatagtggtattggtaaaaatggaaaaaaatttttttcttctgagacagaatctcactctgtccctgaggctggagtgcagtggcacgatctgagctcactgcaacctctgcctcccaggttcaagtgagtcttgtgcctcgcttgaggcacaagattagatttagtagagatggggttttgctttgatggccaggctggtctcaaattcctggcctcaagtcatctgcccacctcgacttcccaaagtgctgggattacaggcatgagcgaccgtgcct

SEQ ID NO: 2298 - DNA, 92 bp, Homo sapiens
tttggtttctaggtacaatgtaattttcaatacacttcccagcaagacagctaccaataaattcaagtaattttagtttctgcagcatttct

SEQ ID NO: 2299 - DNA, 608 bp, Homo sapiens
agacaagaaaaatagatgaaagtgcaaaggacatctaggggtgggaaatataaagagagatgatgttagcgccattctcagatatgctctttttcttttccacgacctgttcagaaagacctttacaaccctgaagaagcagaaaataagataaagcgttctgtgagaaaagactctgagaaaaaaagcaagatgctgttcatgtgttccaggaagctatgattcttaactggtgttggtcatgtagccatagtagaagggcacatgtggtggtagcggtggtgtggacaggagtacttaacatttaccaagtgcttgttatcaatcaggtccatgctaagtctgcacagatatgattatctttttttgttgttgtttttagggcaagggttttgctgattgctgggaggagttcaaggtctgaagagtctaactctttcagagacattgagattttaataccacacatctgtcagtgttataaccatgtttttgacttgtgtagtaagtttattggttaaaaacaaggactctttattttttgtggagacggaggtctcacttatattgcccaggctggtcctgaactcacgggctcaaaaaatcct

SEQ ID NO: 2300 - DNA, 584 bp, Homo sapiens
agtataaaaaattcttttattctgaattataaattctgactataaaatacatacgttttgagataaattgtgcatataagcttttagccgaagatgagtgtgttttaaagatgatatgtagctgggtgcagtggttcatgcctataatcccagtgctttgagagtccaaggtgggaggactgcttaaggcccagagttcaacactagtctgggcaacccatctctagtgagacccccatctctactaaaaaataaaaaaatatggtggggcatggtggcatgtacctgtagtcccagctactccagaggctgaggtgggaagatcacttgaactcaagagtttgaggctgcagtgagctatgctcataccactgtactttagcctgggtgacagaacaagactctatctctaaaaaaactcaaaaacatatatatatgcattttatatttacctagttggttgtatgagtctaaaatcttaatcactcaaaaacatattaccgccgggcgtggtggctcacgcctgtaatcccaacactttgggaggccgaggcgggtggatcacttgaggtcaggagtttgag

SEQ ID NO: 2301 - DNA, 575 bp, Homo sapiens
caccatctttgtattttgtgtcatgacttctcaagagaagacagaagagtatccttttgcagatatatttgatgaagatgaaactgaaaggaattttttgttgtccaaacctgtttgctttgttgtatttgggaaaccaggtgttgggaaaacaacattagcccgttacataacacaggcatggaaatgtattcgtgttgaagctttgccaattttagaagaacagattgctgctgaaaccgaatcaggagttatgttgcaatcaatgttgatcagcggtcaaagcattccagatgaacttgtcataaagctaatgttggagaagctcaactccccagaagtctgtcactttggttatattatcactgaaataccatcactttcacaggatgccatgactaccttacagcaaatagaattaattaaaaacttaaacctgaaacctgatgttataatcaatataaagtgtcctgactatgatttgtgccagagaatttctgggcaaagacagcacaataatacgggatacatatacagtagagaccagtgggatcctgaagtcattgagaatcata

SEQ ID NO: 2302 - DNA, 582 bp, Homo sapiens
gatttatcaacttaataaaatatccatagactctgctgtgaaagatgaggatttaactcatttttgttaactttccaatttgattgttgggttattaaaatacacaattaagcagtagaagaagttaaaataatgagagaggaaataaatatattttctccacctaaggatgaggatattagggatatcagtgtccctattcattccactgttctctcctccctgctcctgcttctcacaatcttcttattgtcacaagtttgtcaatatttttactcttaataactaacccttttctgctttatccataggttgattctaaatattcagaaccagtaacaccttttatgtcactttcacagtgtaaatattgttcctagctattcatattctaagattgcatttcttttcatcccgatgagtttcacaagctctggtgcagtcagagaagaatgtttctaagggttgttgggtggataaatgacttaatccatgtaaagggcttagaacaatttctggtagagtaagtcctcaataagcccgtcccagcattattattagtactgtatttcattacatctg

SEQ ID NO: 2303 - DNA, 590 bp, Homo sapiens
agtttttaaaaataattacaacaaaggagagaaatagcgagtgttctctttttttcatttcaaaaaaaattcattacataatatttatagagccctgaaacttgctgaatagaatacatacaattgaaggaactttattttcatctcaccctttccttctcatcttttgtttctctcatctataacctgatgaagtatcattataaaaaataccttactcttttgacttttccattttttttaactttgggatgatggggtgttttgtggtgatggtctaaaaagactgattgctgctattgaataaatgtaaccacacaagtgtttaaaaaagataaggctataggagaataataagaagaatgtagtatggattggcataaaggcctttggatttagcaattgggtttcactgggaaattagtgttttttgttatggtagagaaagttagctgcctgccaaaatcctttctcctcttccaatttcccctgtacttttgcagctatgtgtggccatgcaattcgtccctgtcaatgaaggcttaggaaatgatgtgtgccacttctgggtcaacttctttgctttaaac

SEQ ID NO: 2304 - DNA, 387 bp, Homo sapiens
gctaattagcaatggggatttatggttatttctagcccactccgaacaatgagttatgtaagcaaagcaacatatataaaaatgtaaataggccggtggctcatgcctgtaatctcagaactttgggaggccgaggcaggtggatcacaaggtcaggagttgagaccagcctggccaacatggtgaaaccccatctctactaaaaatacaaaaaattagctgggcttggtggcaggcgcctgtaatcccagctactcaggaggctgaggcaggagaatcacttgtacccaggaggtggaggttgcggtgaactgagattgtgccactcccctccagcctgggcgacagagtgagacttctttccaaaaaaaaaaaaaaaaaaaaaaa

SEQ ID NO: 2305 - DNA, 635 bp, Homo sapiens
tccaagaggtaactaaagtatccaggctgatggaagctccatcatcttgtggctatctcatctagtacccgaggcctttatggatgtcatagcagagtaagagagtgcaggagggttgagcaccagttctctggctcattggtcagagctagtgacatggcctcctcttcctctaagaggattgggaaatccagcaaacagtaattgactctaccacatcttttaagaatagtgttttctgctacatttaaccagagttactgccattgctttcattcaagaactctgactagtaaaggatatgggggtgagaatatttaaagatatatatcttcaatttttttctgcttacaaaagtgatacatacatgttataaaaatttgaacgtgactgggtgcagtggctcatgcctgtaatcccagcactttgggaggccggggcgggtgaaacacgaggtcaggagttcgagaccagcctggcctacatagcaaaaccccgtatctactaaaaatacaaaaattagccagggcgtggtggtgagcacctgtaatgccagctactcgggaggctgaggcaggaaaatcgcttgaacccataaggcaaaatttgcagtgagccaagatcacaccactgca

SEQ ID NO: 2306 - DNA, 119 bp, Homo sapiens
aactgaagttatctctttaagttctcacgttattttgtatattaagattcaaaaccaaaatatcattggtctaaacattgttagaatagaaccagactatgccaatatcactaatatag

SEQ ID NO: 2307 - DNA, 637 bp, Homo sapiens
tacatttattcctttgtaccttctgaggcacaaaatgctcgtaaagattcttctttttgttaacaagagagacacagactatagatggctatggagcagagaagctgggaggaaggccctgtaagccgaatggatgacattagtcctggggggtggacgaaggggtatagacaggaacgagacacttgctcgagacttggctttgcttaccaagaaacagatgcaaatgatcagagacaacggaacagattattctgcaccaatttgaatgaacaagtcatattttcttagttcaggaaacacttttgtcctaacagtaatggtttgatagagaattgaaatggacaattaaaacattggtcatcggctgggtgcggtggctcatgcctataatcctggtactttgggaggccaaagcaggcggatcacctgaggtcgggagttcgagaccagcctgaccaacatggagaaaccccgtctctacgaaaaatacaaaattagggctgggcacggtggctcaagcctgtaatcccagcattttgggaggcagaggcgggaggatcacgaggtcaagagatcgaaaccatcctggctaacacagtgaaaccccgtctctaccaaaaatacaaaaaattag

SEQ ID NO: 2308 - DNA, 560 bp, Homo sapiens
cactatgcctggcctttcaacaatctttttatctattccctctactttgcagatggaaatgaattctatttcctctccctttgtgcttgtatactcttcccctggaagcttgaattcaaacattttgagttaaaaagagtatattaaaaattacctttcctttcaactcttgccaggtcataaacagattgaaaggaagggtttcaaacaggattattcaatgagaatgcgcaagggttaagacattcccaagggactctttactgagtggggcaagggttcagtgtagagggcctcacaaacagaaacgatccattattgacaagggtcactgaatgaacaccagtcactgttctgtcacaatcacaccagcgagcttaagagttaggaaagaatgaggaaagaatgcagcggctcatgcctgtaatcccagcactttgggaggccgaggcgggtggatcacgaggtcaggagttcaagaccagcctggccaacatggtgaaaccctgggaggctgaggcaggagaactgcttgaacccgagaggcagttgcagtgagc

SEQ ID NO: 2309 - DNA, 622 bp, Homo sapiens
aagaaggtgattgtgaagaaaagactggaaagcaaagaggaagtggtttccatacatttacttatttatttctttcaatatacttttgatatactcgttatttttctaactcattaattttctgaaatttagaaggtgaggttagagaggttaagtgactgtttaaagctccatggctgaaaaactgccaaaccatgatggtcttaagtcagaccgtcttcagtatcctggcctcttaccttgttgcttcactacgtgtcaagaagtaggatctattagatgtagtatctcaccataagaaaggtagatacaaagactagaaggaaagaagtaaccttaatctgcacttgcatgtggaaaatgcatatttttaagaggtaagaggtggaaagaaagtagaacaggatttgatggaaaggtaggaggaagtgaaagactggatggagctgagagaagttcacagagatgggacagttaaggagtatgagaaaataatgcatatgttgattgttaaaaactcattactcttcttgaaaagattaccttctaagccaggtggaggaaaaaattagattgaaaagatctgatagacaagactgtaagagataagaaagtacatgcc

SEQ ID NO: 2310 - DNA, 527 bp, Homo sapiens
cagaagggtgaatcagaccttttgctgcatcctcattgtacctgtgtgcacagaccacaactgcaccacctatatactacatacttgaggcatacatttatcatcactcctctgggtttcttccttatgagactgtaataatgtaggggaaaggcagacctggcccctgtctttatacccccagaacctagcacagaggctggtatgagtaaatgataagaaaattatactcaaggacgggtgcggtggctcatgcctataaacctaggactttgggaggccgaggtgggcagatcacctgaggtcgggagttccagaccagactgaccaacatggagaaagcccatctctactaaaaatacaaaattagccaggcatggtggtgcacgcctgtaatcccagctactcgggaggctgaggcaggagaatcgcttgaacctgggaggtggaggttgcggtgagctgagatcatgccatcgcactccagtctgagcaacaagagcgaaattcggtctccaaaaaaaaaa

SEQ ID NO: 2311 - DNA, 616 bp, Homo sapiens
tcaagaacagcctgggcaaaatatcaagaacccatctctaagaaatagtaatatgaaaagcagaatctagatgtgggggcttgtgtttataacttaaatccgctactattataacactccctatccctaattcatataaacaagtacgtaggtattgtagtatgtgaaaatgtcccttaacatttagaatgtatacgataagtctgtaaactattaaatatttgagaagttgaaagagtggttatttatataatcatcttaaaatgtttagagataaatttaaagtgcctaaacagaagaaaataaaacagcttatttagtggatgccaaaatcaaaatataaaataccaaaatgaaaattctcacatttctcattcattaaaaagttttcattgtttgtttattattcaataggagaaagcatttagtgcattttaaagttttattttagttgacaaataataaatatttatatatatgtatggaataggtgttttgatacatgtatacattgtagaatggtcaaacagggtaattagcatatccatcacatcaaatagtttccatttcttttctatgagaacatttaaaattttcctttagctattttgaaata

SEQ ID NO: 2312 - DNA, 549 bp, Homo sapiens
cttggagttcacttcatatcaagtaatagactgtttcattattctttgttatagctttatagtactccatggtggatatatcataggtgagaggcccactccccatgtatggacattaagctttttcaatactttgcaatgatgtacaacgttaaaatgaatagtcttggggtttttttgttttatttatttttttctgagacagagtcttgctctgttgcccagactagagtatgcaacctcagctcactgcaaccttcacctccaggttcaagcaattctcctgcctcagcctcccaaggagctgggattgcaggtacctgccatcatgctcagctaacttttgtatttttagtagagacatggtttcaccatgttgaccaggctggtcttgaactcctgacctcaggtgatccactagccttagcctcacaaagtgctgacattgcaggctgaatatgtatttttatatttttagaagtgtacattcaggacagatactaagaagttatattgcttggtcaaaagctgattttttttttctgatac

SEQ ID NO: 2313 - DNA, 645 bp, Homo sapiens
tatgcaaagtagatttaattgcttgtcactcacactgggaaatgtttcaaacatgggttgttacttaaaacagtttcaagttcatatttttcaaatctccatattcacttcaatataaatgcactgcaaagaataaattcttaaaatcagaaaacatatctagctaagaattaggaaattgaaattctaataagccaagttttctttattttgttttgtttttcataatattttttctctatattggccaaaaatgttcgaagtgactgttgggaaaatatacagcagactaaggacaaattcatataatattatcttaattttggagaattattcagatgcacgtttttcttatagaataacctgtcagacttcagaggaataatctttctaattttgttttcagacatttcctccaaaagattgcagagaaaatcttcccacatatcctggggcatacttcgatgtgccattagagggtagtattgtaactacagagctgttaaccaatattattgatatgcccagaggataccacacccccatcacctataatcatacttcctaggtactttaagcaaatgaacactctaacatacattatagttgattgcatacaactgagtgctgaagacagcactttat

SEQ ID NO: 2314 - DNA, 575 bp, Homo sapiens
aatccagctaatatgtattaaatatgcactatgtgacaggttctgtgagggtgttggggggaagaaagacagggtttctgccgtaacgagccaataatctccttagtaagaaaaaaacttggaatgagaaaccattcattcgtttagccatttactcaactgataatgtatcctgggcctattgtggactgaattgtgtctttccccattccctgcccaaattcatatgttaaagctctaaccccaatgtgactatacttggagatagagccttttgggaggtaattaaggttaaaaaggtcataagagtggggttctttggtaatcccagcactttgggaggccgaggtgggtggatcacgaggtcaggagatcgagaccatcctggctaacacagtgaatccccgtctctactaaaaatacaaaaagttagatgggcgtggtggcgggcacctgtagtcccacctacttgggaggctgaggcaggagaatggtgtgaacctgggagtcggagcttgcagtgagtcgagatcacgccaacgcactccagcctgggcaacagagcgagactccgt

SEQ ID NO: 2315 - DNA, 655 bp, Homo sapiens
agaaacataagtagtttcctctttaagctaaaaatattctgaaaagaaagaaaagttcaaacaagtttgcaaagcaaatggatttgagtggccaatgaaaacatatcaagtcaggctttttagttattggttttgcttgtgagaatgtaacttggaattattaattacaatatcatctattcatttggataaaatgttatctgttgaggaaattataaatgcaacacttatatggcacttatgctattgccacatgtaccatacaccaggcattgttctaagagttttccatatattaattcatttcatcctcacaacattcctccaaaataggtcctttaatactccccgttgtacagatgaagaaactgagtcacagagaagttaaataacctttcaaaggttgcagagctagaatatggaagagccagtgtgcaaacccaggcagcccaaagttcactatatcatgctgtttcttaccatgcaatgaacaactgaatatacaaatacacacacacgcgtacatagacatatctctataaacacacttatatatgcacatacgccttcacatgttacacatccacacacatatacacacaaatgcacacatatacacatacagagagtatatattataaggagcatattttac

SEQ ID NO: 2316 - DNA, 638 bp, Homo sapiens
gacagaagggacctatccaatgctgcagagtgaaccaaaaaaagaactgagaccagaaccaaggtctaaataggctgtgtgctgattagctatgccagaatttgatttctttattttgccactgggaaaacctattaagaggaatgaggcttttattactttacatgtcaaattacgttaggataattcttatattgaaataggatcagaaaattttcattttgtttaaggtatacaaacactggcatttctaaccctgaatcaaatcattccttcaaatcgccacatgtaatttacacaggtgttatatagaaggtaatataaacatagcctctaagcctcagtttcttattctggtaaataagaggacaaataccagcctcacaaaagcgtggatgaaccaaatgtgtatgaagtacccgcactgtgcctggcacattgtaagaagtagtcaataaatggtttcaatgatgtcatgacttgaaaattccatccaggaagggaaggtgatgcttccatgaatatctagactgaggacaagcattgtctagcgatcttccacgacagcaaactatgtggttacttatgatgatggaatcatatcacgtaggtttgctgaatcatgtgttacatataga

SEQ ID NO: 2317 - DNA, 614 bp, Homo sapiens
aatgatatgtaattatatatttcacattaatatattttatgcccatggctatattgatttgggaatatatatggatactaattatgttaggattcatacaattccttgagaggcacaagtgctaaaaattacttgtatgaattatttaatatcattgcaaataagatgttattttaactttttttaagtttctgcaaatatgtttattatgactttttatttttatatgattggaaatacatatactaaaattccgcgttaccagtttcttaaccacagaaacctgaaaaattgccatagttgatttgttacttctaccttggtgcatttacaaaatagtcatatttttattatgaagttaaatattcatttgtttatagctacttcagaaggctcaggttatttttttctttaatagcacagagtcctctcaaggtaagcactgtgcagttagtataaaccattattccccatgtgtacatgattcacagtttgtattgtgttccaagtgaaccatagccctttcagaaatcaagacttatattcattttacttctttgagtactcttgaattttagaaagtccattatgatcctaaggtagcaacaacatag

SEQ ID NO: 2318 - DNA, 610 bp, Homo sapiens
ttattttaagtctcttgattctaaaaatcacttcagagctgtccttagttctccctgcttcccgacttgcttctgcctggcctgggccacagaaacgcggcatggtcagtggggtctttgcccggccctgaagtcctgttagagttctcctggtcccggctctgactctccacagtggcttcttcggcagtttactcactgggcgtttccaatctcgcctgcggcagcattgccctcccctgcagccccctgccttcagcactgtaggaaaacccatcagaagaccaccttgacagtgtggtcagtcaaccaaatgtcttttctccatccttcctctccttctggacataataacatctgttgagtgcattccatttgccagacactgttgcaaatatttgatgcattttatctcatttaatctttgccagaaaccatgaggacaatattatttttatccctaatttttgtggtgaggaaactgaggcacaggaacatgttgattatctttgcctttttgaaactcagcttattttttgctttccataccagttcatttcagtgaacatttatgacctactgtatttccgttataaagatgagcaatgca

SEQ ID NO: 2319 - DNA, 593 bp, Homo sapiens
atgcagccttccttcctgtctttggtgataaaaatatttttttttaagtattataaacactactattgttagcatgttctatactatttgacaaaatgttcttgttttcttcaagtggaggtttttcctagtgagagctatgtttggtcatgttcctctctcaggtgcctcagcaacctgaactcctccttcaagatgcattctatgtggcttggcaaaatagaattagcatagaatttgaaattctcaatttaaatttcacctgtgcaagtttctaactgtgtttaaacatgttatatgcactttgtaaatctgtttcttcatgaataaagtatagataataacaaaaaacaaatctcaagggatagtatctataggatcagatgagataataaattttagaaagtgataagcacggccgggcatggtggctcacgcctgtaatcccagcactttgggaggctgaggcgggcggatcacgaggtcaggagatggagaccatcctggctaacacggtgaaaccctgtctctactaaaaatacaaaaaattagccaggtgcagtggcgggcatctgtagtccctgctactcggg

SEQ ID NO: 2320 - DNA, 643 bp, Homo sapiens
atggctgttcttttctggagggtacaaaagagcttctcacatggcagggaaggctggcgggctggactcagctgggccctcccctctccatataatctcaagacttgtctccgtcatctctgtggcagctatcttacacagtggttgaacatctccagagaccaacaggatttctgccagtcttcttaaaggccagacctgggactgacataacatctcctccagcatactcctttgctcaaagcaatcacaggccagcccaggctcagggaggaggggaagcagaccccacttatcaaagggacaagtagcaaaagtgtgcagctatccttaagccaccatgcctgcaggcccagtggctaagactgagtctatgtcccagaatccccagcaaagctctactgtttactctgactgaactgacttgcagaatgcgtctgcccctgaactaatctctgtgaccaggagcttgggaaatcttgattagagctggaggtggaaacaattttggccaatattatggttaagaaactctgtaggggctgagcgtggtggctcatgcctataatcccagcactttaggaggccgaggcaggcaaatctcttgcgcccaggaattcgagaccagcttgggcaacatggc

SEQ ID NO: 2321 - DNA, 644 bp, Homo sapiens
tgatttgaatataagccagtttttccatgggaaatttatccttagactagtttggggccatagtggggcagcctggtatttcataaatggtcaactgcaatattcagatattggttgtcatccttgtaggcagtggctgtggcaactctgattctacaactttggaagaaaactattaactttgaagttaataatttaattataaactttgaagttttagcatcaacttcaaaggctaggaatggcccccaaaagatcccagtttccttgaataatctttatgtttgggaattatacacttatgctaaatgttccaaatacccctctactcttcaacattgataaactcccttctcaaaaagtggccagctctttcaggtcttctgagtgactttcttaatataaagggcaataacatcgtatcctaaagcttatatgggaggaagctaagtgaatcatggccaatacaagggaagaacgctatcctctgcacataatctcttcagtttatcttttaagacccactttaagttccatcttttccagaaagccttccttaatgacctcaggcataacaacagccaaatagaccatgaaaactcttagaaatggactcagttggccccttattctttactattcta

SEQ ID NO: 2322 - DNA, 653 bp, Homo sapiens
aagttgcctcagaatgagacacactctttgacttcacatgcaacagaaaggcacagttttatttcaaacaaagcagtgttttgctgtaacaccgttaaaaactggaaaggaaaactcaatcaaaccaaaaactagatgcttaggaataaatggtagaattcttacaaaaccaccacgcttcaattcaatctaaatcaattcaacaaatctgtgctgaaagtataacatttagttttcttagacaccaaatgaacaatacaaaatccctcaagggacttagaacattcaagttttctatatctgtggttctaagtctgttaccaacttccaggactctgcttctttccctctgcccattaacaatgcggtgttaaaagtgacttcctaccactatgtttcttacagctgattcaaccactcatctcatagccaggcatgaaagaaaggagcatacccctaaccgagaactattttttagatggtagtcatatatttatttcatatttagtaagtattatttcaggtcttattaattaaaggaaaaaacttctctggctataagatgcaaggatgatatgtgaattcatgaattgttccatgtttttcacccagatacaagaaattcagagaacacttgagagatgctatgcaag

SEQ ID NO: 2323 - DNA, 601 bp, Homo sapiens
tggggcccaggaatctgcattttaaaaacaaatgtcccatggactacacttgatcttagccaaaaggccaagatgtgatcatatgtctcatgtaattctgattttgttgttccttgggtcatactttggcaaacaccaatctgtgggtttttaaagaaaattgtttttttcttacttaagagaactgttaaaagtgtatacggtaaaacaaaagtcagaaagtttaaaagagtagacagtaaaaagcatctctccccatggataaagatgatcatggcagcagttttggtaatagtgaaaaattaaaaacaaaatgtccggccgggcgtggtggctcacacctgtaatcccagcactttgggaggctgaggtgggcggatcatgaggtcaggagattgagaccatcctggctaacatggagaaaccccatctctactaaaaatacaaaaaaattagccgggcgtggtggcaggcacctgtagtcccagctactcaggaggctgaggcaggagaatggcgtgaacccgggaggcagagcttgcagtgagcagagatcgcgccactgcactccagcctgggcgacaaagcgagactccgtctc

SEQ ID NO: 2324 - DNA, 611 bp, Homo sapiens
gcgtgagccaccacacccggcctcagaaactctttttaacaataaaaagttgtttgacggtttggccacatagactatgtaaactttggagaactcatggaagtaagctttattcctgatcttacagacatcttaggggtaggttttggtgtttgaaaggaaaggagaatggcatgagtgctatccataaagtttggattagaagaggccttagagtccaagcctcgtttatgtgagagtcccttccattaccacccccgacagcttctgctttcagcagtggtgagctttataaaattacctgttctggctgggcgcagtggctcacgcctgtaatcccagcactttgggaggctgaggtggtcagatcacttgaggtcaggagttcaagaccagcctagtcaacatggtgaaaccctgtctttattaaaaatacaaaaattagccgggcatgatagtgcatacctgtaatcccagctactagggaggctgaggcacgagaatcgcttgaacccgggggtcgaaggttgcagtaagccgagatcgcaccactgcactctagcccgggtgacagagtaaggctctgtcccaaaaaaaaaaaaaaaaaaaaa

SEQ ID NO: 2325 - DNA, 631 bp, Homo sapiens
accattactgccctaggtcaagcactcatcacctttatctggtgttactaaagtagctttctaaaaacaaagtatggttcctagctggtataagaccctccatagttcttataccataaacttctgcttgaacacttccagagatgaggagcttcctgcctatgatgccatcaatatgattattagacaactcaagtagtttgaaaggtgtcccagtaatttctttctattaggcctagttctacccatcctgtgggcttctccctaccagatcctgaggacctactgctaacttttcaggttccagcctctatttctgtcttccctgtggagttaacttgggtaggttgaactacatttcctggaattgtcttccttgtgtgtttcctcttaatgtgggccacaagagggattcttgtgtgagatttgaaaggcggaagtgaaacaacagccattttgctatccagagtaggtgtttagtaattgacccattatcatggtttctgcactaatcgccattctcatgagtctactggatgtagtcagattagcattgggtacaatagtgaataaagactggtgcagtagagaggcctgatcacttctttggcttggatggtatgcttatctg

SEQ ID NO: 2326 - DNA, 626 bp, Homo sapiens
tacttcttccttctagtctaccctgcacagccctcagagcttgaagaagcactgtgacacctgccgctgtttgcccttaggaaagatgccaagtttagaattggttttcgggtggtttcagcaaaacaatagcccacactgcctcctaagaagaatgactatgccaactacaaagagcactggagaaaaggacaattgttttatgtttccagtattcaaaaacttagcaaatggctgggcatggtggctcacacctgtaatcccagcactttgagaggccaagtaggatggatcacttgatgtcaggagtccgagaccagcctggtcaacatggtgaaaccctgtctctgctaaaaatacaaaaattagccaggcatggtgtaatcccagctactcaggtggccgaggcaggtgaatcgcttgaacctgggagacagagtatgcagtgagccaagatcaagccactgcactccaaatggcagcatagcaggaaggtttagagtatggatcctggggccaggctgctatatttaaatcccagccctggctgggcatggtggcttatgcttgtaatcccagcactttgggaggctgagacggatggatcacaaggtcaagagttcaag

SEQ ID NO: 2327 - DNA, 579 bp, Homo sapiens
tggtggcgcatgcctgtaatcccagctactcaggaggctgagacaggagaatcacttgaacctgggaggcagaggttgcagtgagccgagattgcgccactgcactccagcctgggtgacagagcaaaaactccgcctcaaaacaaaacaaacaatagaaaaaagtaacaaaaccaaactgtggttcccagatcaatgtaattgataaatccctagctagactaacaagagagagagaatacaaattatcagttaataccagcagtgataaagaaaggatatcactagggtgggcatagtggctcacgcctgtaatcccagcactttgggaggccgaggcaggtgaatcacttgagatcaggggttgtagaccagcctggtcaacatggggaaaccccatctctactaaaaatagtaaattagctggacatggtggcgtgtgactataatccctgttacttgggaggctaaggcaggagaatcacttggacctgggagatggaggtggcaataagccaagatcatgccactgcactccagcctggatgacaaagcaagactccattgcaaaaaaaaaaa

SEQ ID NO: 2328 - DNA, 582 bp, Homo sapiens
agattgtgccactgcactccagcctgggtgacagaacgagactccatctcaaaaacaaaacaaaacaaaacaaaaagatgcatttattggccctgtttgcatgttttctggaatccagaacataaacccctaaaaggaccatctccagtcctttgcttcaaagaatcagcaggttagccttgttcatcaaggggcaatcctcctgagttctgtccccaaagagaaaaagcaatgcctaccacatataccttatatttaaccatgagaattgagctggatttctagagaacagcaatggattttgagccaagtgttcactcgagttccagcacagggacacacagtcccgatgggagcatccaaaatggaatctactatgttcaagaatatacactgtctcacacacaaacatcctgcaggatagaccacagggtatgctgtataagctcctcaataaatacagaaatacacaagtatgggtggggcgtggtggctcacaccaataaacccagcacttaaagagggcaaggcaggaggatcacttgagctcaggagttcgagctcaaccagcatgggtaatat

SEQ ID NO: 2329 - DNA, 579 bp, Homo sapiens
atggtaatgctataaaatctctgtttaaaataaagttattaagaaaaatgtgagctgggttaaagaaaagtgttatagtgagacaggttgaagatggttttggccaaagccatgagagtctgggaaactatggcctcaggtctgggaagcattcctctcctgcaagtctcagctttgcccatcaacatgctgggtggccttgggccagggactttccctctctcagtttcatccagtgttaggtgagaggatggaaccagagcagaggtggctgagtccagagagtgcagaggagaggccctgggcaaaggggtgaggaggaaggctctggaaagctggggatggctgggtgcggtggctcacacctgtaaccccagcactttgggaggctgaggtgggtggatcacttgaggtcagaagttcaagaccagcctggccaacatggcaaaaccctatctctactaaaaaaaatacaaaaattagccgagcgtagtggcgtgtgcctgtagtcccagctactcgggaggctgaggcaggagaatcacttgaacctgggaggtggaggttcagtgagttgag

SEQ ID NO: 2330 - DNA, 599 bp, Homo sapiens
ttatggttccagtaggtggtgctataattgctggctttaatgattcattcattcaggaaatcagcaagatgtatccaggtaaataaataagttgcttttcagaaaaagtagctaacaaacaaaaatccatttgtacataggctattgtagtaaatcttaatttccaaagctacccccccaccacagtcttaatgtaacttatccttcttatttcaggaagagcttcagcttcaccttctttagatgtccttattactttattgtcacttggatcaaatggctataagaagctactaaaagaaagaaaggtaagctttccctttaggtgtcgaataacattcttgactagaactgtgctccaaatcattggtgttttctgcctgttggtttcttgcattgggagggagacatctagtatggtccgatagtatttattcagatctggaaccaccataggtggtttcctattactttttgtcagcctgtctatccagatattacgaggaatctgggttaggtgattttgcttttatttatttactttttagaaactcctgcattagggactcttattcaataaaattcaattcatttatcac

SEQ ID NO: 2331 - DNA, 586 bp, Homo sapiens
tggctcaactggagaatcagccatatataaggagtagctgagcaattagagggaactagactaagaagtagattgggatctttgtcctcaactggacaaagattgaaaacagagtccagcccttagataaagtatagatgacagtggaagagaagaatgcgagagggtcagattctaaccaggcaaggaatgtgacttgaatcctcattccacctttggcctgacatttaatcaggtcattcatcggacattcagatccatctcaatgacatcttgttatcacataaggaggccgacaaggagtaggggagtttctcctgatcacctttgtttaatttcagattgaatattttataaacaaactgaaacttatgcctgaagaatgtgtgtgaagcataaaaagataggtttagcagaccaagggcagatatttaacttaagagtaattgatgctttgggctgggcgcggtggctcacgcctgtaatcccagcactttgggaggccgaggcgggtggatcacgaggtcaggagatccagaccatcctggctaacacggtgaaaccccctctctactaaatatacaga

SEQ ID NO: 2332 - DNA, 656 bp, Homo sapiens
tttgagggttagtattatttttaaaaaaagaagaaaaagaaaagggaaaaaattatgaactttttgggacttcatgatcttgcatcagcatgtatttaaaagccattaagcatcttgattagtttggaacatggtataaagactgttacattactggttgctgcagctgaataccggttgcaatatttgtcacagtaaaatgcaccaatcagaaaatgtgggaaaattattatacacttcagtggttgatttggcctaggtattggacataatgagagtcatttaaagaaaagtattcaaagggttagatactatagaagggatagcagttcagctgtggtagacatgaccacaaaataaagtgtggaatttcttaggccacacatagagataattttccttattgaatgatcacactttgcatatgttaatgacttttccttacatctttaggttgagcgatcactcttaatgagttattattattattttttttacaaaaaacgccagccaggcatggtggctcatgcctataatcccagcgctttgggaagctgaggcaggcaaatcaccagagatcgagagttcgagaccagcctcgccaacgtggtgaaaccccatttctactaaaaatacaaaaattaagcaggcatagt

SEQ ID NO: 2333 - DNA, 651 bp, Homo sapiens
ttgccttctagtaaattaagagttcagaaaaattccaattctaaagatgttttgaaataaagattatctttgctcttcagattaaattgcaagtcctgaagattcttttaaccagaaatttaaacatggcttacctatactgagaaagcatattttcctcaaaagaggatatgggagtatatcccctatattgtacataaacctacaaaacatactaatgtggggtgttataaaaattttaataagtaaggctatgtgcagctggaaatccttcgctagcctgaaacatataagcaattcactcaagactcagaagtcttaattttgcaccttttactgagttttcatttttatccacaacagttttattttaaaggaattgctttcctacagtgggttagcactatgatcagaaagaatattttcttttttgcttttttaagcagaattcaaaatctagcagatcaactgaaagacaagaaaaaatgtacaataaccttctcaacatcctccccctccttttctatacagttgcctttacaagaaagtaattaataaacataatcttttgagatcccctaagtcttaaactatgcaaaattctactgacacacaatcttccaatcatcaacagcactgatctttcatgat

SEQ ID NO: 2334 - DNA, 606 bp, Homo sapiens
taccctaaagcacagtttttaatcttgtttgtgtgtgccacaggcccctttgagaatgtgatcattgttattgaccataggcacaaaatacacacaaatacttaacatacacaattttgcataaaatctcagtgagttgactctctaagacatatctagagatctaaggactccagatgaaaagcaactatcctaacataatcccaattatttcaagaaattaaaccaaattctcaaaacaaatttaccttcagtttacttaatttgaaaagtacttgtatgtattacttaaagtcagacagacaacaatattgtgatgcagttataagaaagtggcctgaccttaggtgaaggaactccagaagtaaaaattgatgtctgacaaagatcttcttacgtgtagtaaatgaattctgctctccaaatatgaagtgaaactgcatcaattcaagaaatgcctacaatcccttcagcatggtggttccactgaaaggcccttaagaataacggatattttactcacatgttttgagattagtagaaccgtcgtggctttatgtgtctatttagttactacattcagaaaactgagggtataaaacaaac

SEQ ID NO: 2335 - DNA, 638 bp, Homo sapiens
atagcactaaggcataacctagtacagtttctgctaacagtacttcatagtcaatcagctgtatacaaacaactttgaaaaatagaagagtacattgttttgtgtccctttggaaaaaaaagcttgttaggcagggcaaagaggaaggattttttttttatgtttactgagatgcttcaaattaggtgcttgatatgttcactaaagctcaaaggaataatgtcaagaatagttttagataacataaagataaaaaaaggatagataatatgcctaaaatttatttatgaagcaatgaaaataggaatcaggagacctagtaaatgggaaagctattatcttaggacttttctaaatttaaaattctgtgactctgtgttctctgtgttgtatgaattaccgttagtgtttagaaggaggcaggggtggattgatggaaggatgaataatggatagacagtcttgaaagtaatgactttccagtcacctaaatgacttatggaaaagcagatatttggtttgttttaaataatgttattgttaccatatgtgttagaatcttagaatttcagagctagaagagacattagtaatgaaataatttatgtcccttactttaaacctaaggaaagaagctc

SEQ ID NO: 2336 - DNA, 565 bp, Homo sapiens
tttgattaatacattgactctgggaaatatatcttagagaaggaagggaaaaacagcacagtgctggtgtttaagggctacaggataatgaaaaaagctaatggctctagtttttttgtttggttggttggttagttggtttcagaagctatataatttatttaattaaaaaggatgtggaaacttaaacacaaagtttacacaaataggagaccatgagatggtacccaatgccccacatcctcataaggacaaaacatgctgatgaaaacatctacacagactaaggattctacaagttaaaaaagaagttcatcttttccatatttgtcatggagtttcaatgacttcttgcccagtcctccatctaactgcagctgaccattgggaagactggctaaattcctgcatataccctaggtacagaaaagaaaccccagtacatctctgagttttttggggtttgtttgttttttgttaagttctgggatacatatgcagaatgtgcaggttacataggtatacatgtaccatggtggtttgctgcacctataaacccgtcatc

SEQ ID NO: 2337 - DNA, 614 bp, Homo sapiens
ggactggtacaattgtgcctggactgaaggattattaatattgtgaccagaatgggaaggaattacaaagaatgagaaaacaaaaatacctaccattaaatatcatcaagggctgtaactataatagaaaagagattacaaatctatgcctgatttatacacacactttctttctctctctctctctctgttaataaatttgaaagtctgtatatatttcatgactttctaggctaataaagtgtctcacacttgattcaataattcaaaaaggggtaaaaatatgaatagattaataacctcaaaagtaattgaaagggatttttaaagctcctaaaagagagaacagtcccaacaaatttcatagacaaattcattgtcattaaaggataaatatttaaactgctctaaattagaaatattttagaatgtgctctgtgaaagatgcctaatacatcaggtgaaacctaacaaaaacagcaaaacaaataataatctcacttatgatggtgcagcaaaaaaaatttcttgaagacgtaaattacattcggttatatttttaaagaatacatttgtttaaagaacaatccactacaatgaagcaggtcatattc

SEQ ID NO: 2338 - DNA, 633 bp, Homo sapiens
taaatgggatacacgtcttcttaagtaattcaaagtctagtaggggaagcagaaaggtaacaaacaattaagatacaaaagtaaaacaaaagccctctgtagagtgctccaacatcttttattccttatcatctccccaaattccaatttgctgcccctatatgccctttaaaaaaacccaggccgggcacaacggctcacacctgtaatcccagcactttgggaggctgaggcaggaggatcacttgaggccaagagttggagaccagcctggctaacacggtgaaacttcgtctctactaaaaatacaaaaattagctgggcgtggtggtgcgcgcctgtagtcccagctactcaggaggctgaggcaggagaatcgcttgaacccaagaggcagaggttgcagtgagctgagatagcaccactgcactccagcctgggcaacaaagcaagactccatctcaaaaaaaattccggaactaggcgtggtggctcacacctgtaatcccagagatcacctgaggtgtcaagagctcgagaccagtctgggcaacgcggtgaaaccccatctctactaaaaatacaaaaattagctcggcgtggtggcaagcacctataatcccagctaacttg

SEQ ID NO: 2339 - DNA, 621 bp, Homo sapiens
tggggccaaaatatgtggtggtgttttaattagagattgaattttttagtaggatatttgacttgacattttaaactcagatgtcaagtgaaataaccagttcagttcttccagtagtcgtgtgaaaataatttcttcctcaaattcttccttttggttaggtgcctgtggtgttatgatacataatggttttcgtccatggttcccggttcataactaccattgcccttgttgcagtcttttgttacactgttgggtgtgttaggcctctctggcaggcctctgaccttctcttgcccttcttctactctaatgtttccccgactttctgattaagggtcttaagacccttctctgaaaggctcccaccctatgggcaaaggagtgctgatgtcctgaagcttctctgaaaaaccaagaggacaggattcacagagcttccgaatagcggaatacttggaggttcttggagggtagtgtgcccagggagggcatggaagccctgcatcccttccaccatccctcaccctacacatcttttcatctgtatcctttataataaaccaacaaacatgctacactgagttctgtgagacaatccagtaaagtaatcgaatccta

SEQ ID NO: 2340 - DNA, 537 bp, Homo sapiens
tcggcctcccaaagtactgggattacaggcatgagccaccgctcccggtcagcagtttttattctgttgaccatttcttccttcctgaagctcttctcattaggactatagattaccattcatatattcaacatctgaaataaagatgcttatactaactgagctctgtgtgtgtcagctctgtgacaaattctttacatgtattatttcatcctcccatccatttgatgagataggacaataatcactctaatttaaagaaaccaggcttagtagtttgctgaagatcatgcagtcaaggaaatggtagagaaaggggttcatgtccacatgtgttagttatcaaagcttgtgtccttaaacagtgcatgtaataccacctcctcatgccaggtatcatgttggggcctggaagtaaggaggtgaaaacacctcagatacagaggggaaaacacttagtactcagggaactatgatacagtggaaaaaccaactaagcagatagaatgtgatgatttcaataaagaaggtataatt

SEQ ID NO: 2341 - DNA, 370 bp, Homo sapiens
gacagaaggttggggtttcaccatgtcgggcaggctggtctcgaactcctgacctcaggtgatccgcccgccttggcctcctaaagtgctgagattacaggtgtgagccactgcgcgcccggccgtgggtcaatcattttgagtttgggtcacgtgttcaccactttgcagcccccactggaaccacagtgatgagttttcaggcatcaaccaataggagacaagcatatgtagatcaaaatagtaccattattactggtaaagatgtttgtaaatgtggctttattttctctggtcaaattggctttttaataattcacccttgctgggtgctgtggctcctgcctgtaatcccagcactttgggaggc

SEQ ID NO: 2342 - DNA, 494 bp, Homo sapiens
aacccagcatttgggcatctagaagccttcccaagggctaaggagacacctgaaaaatgagaaagagttacagagccaggcccttaagttggccctgccaaccactctccaaaacccttagatttttgctgcctttgcccttgacactgtcctttccctggagctgaatgtctgggggtagaggaatgactttaaaagtcgaggatcaggcctggcatggtggctcatgcctgtaatcccagcactttgggaggtcaaggcgggtggatcacctgaggtcaggagttcgagaccaggctgaccaacatggtgagaccccgtctctactgaaaatacaaaaattagctgggcgtggtggaagccacctgtaatccaagctactctggaggctgaggcaggagaatcgcttgaacccgggaagcaggggttgtagtgagccaagatcacgccaccacactccagcctgggtgacagggccagactccgagtgttcc

SEQ ID NO: 2343 - DNA, 622 bp, Homo sapiens
ctcccagatctcttggtgtacgtatatttatgatgcttcctcgaagaacttgtaagaagcctgagccacacaaagatgtcccatgtagatcctctggtctaaacccctagctcaactctcatgtgacatccagaattaactgcctaccatcttggatgtctagggcaatcaaacctttggatgacatttgtttgcaatgctgcaagaagccttaagtgaaaactgtccagctgagtcctgtcaattgacagaaatgtaaaagataataaaaagttgtttgccactatgactagggatgatttgttgtatacatagactagtgaaacaacaacaaataatgtattagcataatttaaactttttacatcacagtggtaagacaatattcactgtcaaagtcagctagaacttggataattgagggaggaattatatttgtgtgtatgagatgtcttcattcattcatctatcagtcacttgactaccatgagctggaatttttgttttttaaagacaccgaagactttttataaacaagaggctttaattcctcaatgtatattgatttacaagtatgcattactaccggctgggcatggtggcttatgtctgtaatcccagc

SEQ ID NO: 2344 - DNA, 525 bp, Homo sapiens
tgatactgtagtattacagttaagaggtgatggggtttggatgaagataatgccagtgggaatggagaaacacaaacagaattttatatggactatagatatagaaattaggaaacttaatgtaggggaggacaagaaagaaagggagaaataagaaatggcacacaggtttttaacttgagcaactatatgatttgttttgtaacttagtcaacgagctcaaagtaaaaatggatgaataaataaataaatataattattaatgaaaatgttaataaatttatgaaagtttctctatacctaagaattagggtatatgaataatgccttcacatcacagagccccactcaatattattatttttcttaaattctaccaagatgaaaccttgattctttccagcttctggatgagttacctcaacccccacatccacactaccctctgaagcatacaccaagaggttagcaatatccttgtcctcttccttcattaattaattccgatatcctagcatttattct

SEQ ID NO: 2345 - DNA, 562 bp, Homo sapiens
ttgactcgcttgcttccctagttcttaatcacaggctcaggggactctcagcacctctccttcctccaggtaagtagaagcctgtaccacgtcgtaggtggctccttgggtcgggaagcaggtgctgccagcccgggacgcctcccaggggacattagctaccttgcgggagagcctgcgtgtctggttggtgtgcggagaaacattgtcatctagtggaagaaatagcaacgctctcatctcttttcttagctaatggcgtgtaaccatggattggatgtttacagagccatctcactgttgggctgatcacattgaaactttcctgggaaaagttcttatcatcttcttcctaccttaaattttgtacttcagtaaatttaaagaaatacaatggagattgagaccatcctgcctaacactgtgaaaccccgtctctactaaaaatacaaaaaaattagccgggcgtgctggcgggcgcctgtagtcccagctactgggaaagctgaggcaggagaatggtgtgaacccgggaggcggagcttgcagtgagccgagatcg

SEQ ID NO: 2346 - DNA, 646 bp, Homo sapiens
tgacaactgagctgaaattaattaggaatctatgttgtgtgggtctagtgataataaaagagatcagaaaattcatccaaaggcagcacagacaggcatccaaacagggactgtatctattctcctatcatctacacagaaattgttccataatttactgactgaaaaacaaaaatcattataccaaaagagttggctttttctttaaaacctttgactaaatatttccaaaccagcagaattccaatcaattttgcttttaaatgaaccctgacttactaccccaaatgacttattctaatagttttcaagaaaagtaaaattttcagccaaaaccaaacaaaacaaggggaatgagaggaaagaggttcagactataggatgacccagagacaagaggatgctgtcttttaagacaaaacttttcctccagacactagaaaaacaatgtaacatttccctatttcttgtccagatgcagaacatcatggaagatgtagaatcaaggcacagagctccaagcccaccatctaacacagctaatttcaaaatccccagctcatctttcacctcacccccctcctcctccttggctttaattatgctaatgttggaggagaatgaataaataaagtgaatctttgca

SEQ ID NO: 2347 - DNA, 579 bp, Homo sapiens
cagcctcctgagtagctaggattacaggcacgcaccaccatacccagctaatcgtttgtatttttagtagagacggagtttcaccatgttggccaggctggtctcaaactcctgacctcaggtgatccacccgcctcggcctcccaaagtgctgggattacaggcgtgagccactgcacccagccaatagatgatgaggattctataaatgagtattcatgtaaaatgcctagaataatcttgaacacggtgaagtcattccaaggtgggcggctcggcacgagaatgatgaaagggccgtctgctgggaaagcagggactgttgaatatcagagtgagtttggctggctgagcaggtgcatccttcctggccctggctctaggagctctgccttcccaggtagtacagggttctctagttaggtggtttttgagaagctgcaattctcagctggacaccgtgggcttagagtaggaggtgtaaaaagttaatgcaagctctaggatgtcaagcattgggtgggttgcaggaataatgtgagaggaagctaaaaaaaggtatgtttggggccgggtgtg

SEQ ID NO: 2348 - DNA, 645 bp, Homo sapiens
ggcctaccaggcgaggctagtggaggtgagaagcctcacaatccatgttttttaatgcatccgagttattccaaagcaaagggtatttctttccccttttgctcctctaattgatgcagctgttgcctagcctcatctgcattaagctaaatattatgtttttgtaacgtttttgatctttattaattatagcgcaggaaagctgacaaaagcaacctgtctctttaatataaacaagattaattgcacagttcctgcagaaaatgaactaccagcagtttaacaaaaaatgtttgtctttaagcagccctttggattaaaaaaaaatcaaaactgttacaggaagtgccaaagctgccaaattaccatgcccgtgagcctcaccctcattatcagactaaacgaacgcacaccccctgcactttcatcctcctccaggcccaggagaaagaaaggcgggagagaaaaaaagggcctttatacaaagaagtgtctctgaagtctggaatgcaccctggctgtttgaagacaagatttatacctgacacctttccttaagctcactgttgagactcgcctgttttcaaatcaaccgcagactggctgcttgaggtacttcagctcgtaacgaccacataatctaag

SEQ ID NO: 2349 - DNA, 647 bp, Homo sapiens
ctgggactacaagcacgtgccaccacacccagctaattttgtttgtatttcttgtaaagatggggtttcactgtgtcgcccaggctggtctcaaactcctgagctcaagtgatctgcccacctcgacctcccaaagtgctgggattacaggcatgagccaccaagcctggcctgctataaataatttaattttcattttaaattaataatttgaataacttaattctaaattaaacttgtccaaaactgactctttctgccaaaaacctgcactctattttgattccctgtccctctgactgaccaccttgtcatggttcaggcctgaaatatgcaaatcagactctattctccttttctgttatcaagaaggagtcattccaagagggagtgacatacattataatagacacattatatttctttaaatttttatggattcaaataaatataaacacttttttcacatggaatgtatccctttttgcctataaacatggtggaggtggcagaagccatgggagtgctaaggggaagcctggtgcatcacctgccactgtcattgccatggattgccctccatttaccaataaagtcctgttgggcctgtgttttacgcaagctggtctctgtcacagagtatggct

SEQ ID NO: 2350 - DNA, 613 bp, Homo sapiens
  misc_feature 543: n = A,T,C or G
tgtatttttagtagagatggggtttcaccatgttggccaggctggtctcgatctcttgaccttgtgatccacccgcctcagccccccaaagtgctgggattacaggcatgagccacctcgcccgtcctgacagagcttttaaggatgcatggagttctggggagttgagtctgttttcttgtctcatcagaaacacatcagaaaacacctttgaagtttaaggtgccagcaggtgtccctaagcattctaagtctacacgctgtgccccgtgcaatatcacttaagttaaactaataccttttctgctggtcttcacacagctactaatatgttctgatatataacatttctctgagaggggaatcaagaatgcaattttggctgggtgcagtggcttacaactgtaagcccagcactttgggaggctgaggcgggcagatcacctgaggtcaggagttcaagacatgcatggccaacatggcaaaaccctgtcttctactaaaaagacaaaaattggtcaggcacggtggcaggcgcctganatcccagctacttgggaggctgaggcaggggaatcgcttgaacctgggggcggatgttgcagtgagctga

SEQ ID NO: 2351 - DNA, 644 bp, Homo sapiens
gacaactgagctgaaattaattaggaatctatgttgtgtgggtctagtgataataaaagagatcagaaaattcatccaaaggcagcacagacaggcatccaaacagggactgtatctattctcctatcatctacacagaaattgttccataatttactgactgaaaaacaaaaatcattataccaaaagagttggctttttctttaaaacctttgactaaatatttccaaaccagcagaattccaatcaattttgcttttaaatgaaccctgacttactaccccaaatgacttattctaatagttttcaagaaaagtaaaattttcagccaaaaccaaacaaaacaaggggaatgagaggaaagaggttcagactataggatgacccagagacaagaggatgctgtcttttaagacaaaacttttcctccagacactagaaaaacaatgtaacatttccctatttcttgtccagatgcagaacatcatggaagatgtagaatcaaggcacagagctccaagcccaccatctaacacagctaatttcaaaatccccagctcatctttcacctcacccccctcctcctccttggctttaattatgctaatgttggaggagaatgaataaataaagtgaatctttgc

SEQ ID NO: 2352 - DNA, 634 bp, Homo sapiens
tgacaactgagcttaaactaattaggaatctatgttgtgtgggtctagtgataataaaagagatcagaaaattcatccaaaggcagcacagacaggcatccaaacagggactgtatctattctcctatcatctacacagaaattgttccataatttactgactgaaaaacaaaaatcattataccaaaagagttggctttttctttaaaacctttgactaaatatttccaaaccagcagaattccaatcaattttgcttttaaatgaaccctgacttactaccccaaatgacttattctaatagttttcaagaaaagtaaaattttcagccaaaaccaaacaaaacaaggggaatgagaggaaagaggttcagactataggatgacccagagacaagaggatgctgtcttttaagacaaaacttttcctccagacactagaaaaacaatgtaacatttccctatttcttgtccagatgcagaacatcatggaagatgtagaatcaaggcacagagctccaagcccaccatctaacacagctaatttcaaaatccccagctcatctttcacctcacccccctcctcctccttggctttaattatgctaatgttggaggagaatgaataaataaag

SEQ ID NO: 2353 - DNA, 654 bp, Homo sapiens
tgacaactgagctgaagcgaaggaggaatctatgttgtgtgggtctagtgataataaaagagatcagaaaattcatccaaaggcagcacagacaggcatccaaacagggactgtatctattctcctatcatctacacagaaattgttccataatttactgactgaaaaacaaaaatcattataccaaaagagttggctttttctttaaaacctttgactaaatatttccaaaccagcagaattccaatcaattttgcttttaaatgaaccctgacttactaccccaaatgacttattctaatagttttcaagaaaagtaaaattttcagccaaaaccaaacaaaacaaggggaatgagaggaaagaggttcagactataggatgacccacagacaagaggatgctgtcttttaagacaaaacttttcctccagacactagaaaaacaatgtaacatttccctatttcttgtccagatgcagaacatcatggaagatgtagaatcaaggcacagagctccaagcccaccatctaacacagctaatttcaaaatccccagctcatctttcacctcacccccctcctcctccttggctttaattatgctaatgttggaggagaatgaataaataaagtgaatctttgcaaaaaaaaa

SEQ ID NO: 2354 - DNA, 585 bp, Homo sapiens
ttcatgagatatcttgaggaaggtgctggacttcccacagtatgtggcatggagactggacgtgttttatatagttatccaaaaggttatgccagaaactgggagaagggaagacacctatgtcctccagataatttcaaaatggtttcaagaacactgatagagggaaacagtggggctgtggtacctgcgattagggatttgccatggaaaacagattccatattggagattttctcccaacattttattatgaaaatacatttacagaagagttgaaaaacctgtacagtgaaggctgggtgcattggcttacacctgtaatcccagtactttgggaggccaagggaagaggattgcttgaggccaggagttcaagaccaacctgggcaacatagtgagacaccaactgtacacaaaatttaaagaaaaaattaaccacgcctggtggtgtacgcctgtagtctcagctactctggaagctgagatgggaggctcccttgagcccagaagttcaaggttacagtgaactatgatcatgccactgcactcttgcctggaccacagagcacgaccgtgtgtctc

SEQ ID NO: 2355 - DNA, 603 bp, Homo sapiens
tggctattattcttttaaaagggaatacaaaagttgagatccacctgtaaacttctatgttcaggcaaaggacacaaaaactgaagataaaaagcgtggttggtttaagtgggaaaaatcatcatttttaattgaagaaaataaaatatttaaagtaaatataccaagcaagaattatagaattaatgttatcaaaatgacatgaatggtctcatatactaggcaatacctgtatattaaaaatataaattatataaatatatatgtcaaccaacaaattatgtttttaaatatataaaatatatttaagttatcctaaacaaataacaataatgtttattttaataattgatagcaataaaatatccaagcctttctttctggtgtttgagttttaaaaattaatgataattacaatatttagaaatagtatgagtaaaatgtgttgtgtactaagccaaatatatacaaatttttatgtgaaaaagtgaagacataaaaagtttaaaactatccccactttgcttatatattttcttcttcatatggtgtaatctcaataccttaacctttccattacttttcccagaattcctatttctt

SEQ ID NO: 2356 - DNA, 606 bp, Homo sapiens
gacaactgagctgaagtgaaggaggaatctatgttgtgtgggtctagtgataataaaagagatcagaaaattcatccaaaggcagcacagacaggcatccaaacagggactgtatctattctcctatcatctacacagaaattgttccataatttactgactgaaaaacaaaaatcattataccaaaagagttggctttttctttaaaacctttgactaaatatttccaaaccagcagaattccaatcaattttgcttttaaatgaaccctgacttactaccccaaatgacttattctaatagttttcaagaaaagtaaaattttcagccaaaaccaaacaaaacaaggggaatgagaggaaagaggttcagactataggatgacccacagacaagaggatgctgtcttttaagacaaaacttttcctccagacactagaaaaacaatgtaacatttccctatttcttgtccagatgcagaacatcatggaagatgtagaatcaaggcacagagctccaagcccaccatctaacacagctaatttcaaaatccccagctcatctttcacctcacccccctcctcctgcttggctttaattatgcta

SEQ ID NO: 2357 - DNA, 620 bp, Homo sapiens
tttcctcaaaatctgagccccagccctgcagggcctctcctccatcatctgctgggtagtatgccttccttacagttggagtcccatttctaccagggtttgtctctcctgcttcttggttctgataccctaacctctctttgttctcctagacccagtgggtacaagctgcttcctacagttatcacattacctcaggttcctgtgtgctgtcagccctgtgtgtagcacccacactccttctgatcccttcagcatcttgtgcacacaggcttaccgcgtgctttcacagccagcatctgtgctccctcgtatgtgcccagagagtgagaagtgcctgacaattcttgtccgcccgaggcagccatgaataaatgaccatggaagctttaacaatgtagctcccttgcctctgatcaggatgactctgagagatgtgacctacactgtctccagagctcccctgtggggctgtgccagagtcaccgtccatggattcgcttttctgatcctacaacttcactcccctcccagttttccctggagtgtcttcctaataaactactttcacatggattctcctcttaggctccacctctagagaacccacataagatact

SEQ ID NO: 2358 - DNA, 439 bp, Homo sapiens
  misc_feature 358: n = A,T,C or G
cagtcaagatcacagtctaggtctaggtcaaaatctagatcaaggtcttggactagtcctaagtccagtggccactgatagtataaaccatggtcatttttaggcatgtatcattcatttactcatagtttggtttacttaaattatcaggaatacaatgttgcaatgatgcttaaaaaacacttgttagttttccctgtaccaggcaatggttataattaaaatgatatgctgttgagaagccactcttaagagtccagtttgtttaatgttatgggcagctaccaatttgtggtgtctctgtatatttttgtaaagattctcattttttatgcttgaagtatttggtgaaaagatngttggttgaccataatttgcaacattgtctcattaaaaataaactttcatattcatatttggtagaactgttaatctagaa

SEQ ID NO: 2359 - DNA, 361 bp, Homo sapiens
tggggagagaaaatcgctatctcccatacctgatctggggaaactcactgaggtgacatttaaaaagatgagggagtaggccgggcgcagtggctcatgcctgtaatcccatcactttgggaggccaaggtgggtggatcacctgaggtcagaagttcgagaccaccctgaccaatatggtgaaaccgtacctctactaaaaatacaaaaattagccgggtgcggtggcgtgtgcctgtagtcccagttactagggaggctgagacaggtgaattgcttggaaccaggtggcagaggttgcagtgagctgagattgtgccactgcactccagcctggatgacagagcaagactctgtctca

SEQ ID NO: 2360 - DNA, 475 bp, Homo sapiens
aggatgtgtggcatctcacagaggaaaaatgttttccatgctatacactcataggtcacagacagcagctttgtacagaggccataaatattctgttaccacccagatggccctgactaattaattctttctttcattcgtttatgtttatgatgaactcatagatatttctttgacatcaggcatgatttgcttttttaagacgtttaatgatcatggctaatctaagcaaaatacatagcatatacagtgactgacttctcaaaatctttaatcacaaaacacttccactaccattttccttcaggcaaaaaaatatagcaaatgactgtgaagcaaagaaagcagcaggcctttatcattttgattctaccttaccacttgaaatgtttctcttctggcaaaatgcattattttattccactatttctgacaatgacaaaaaagaaaaacatactccacaggaagtatttgc

SEQ ID NO: 2361 - DNA, 422 bp, Homo sapiens
atagcactaaggcataacctagtacagtttctgctaacagtacttcatagtcaatcagctgtatacaaacaactttgaaaaatagaagagtacattgttttgtgtccctttggaaaaaaaagcttgttaggcagggcaaagaggaaggattttttttttatgtttactgagatgcttcaaattaggtgcttgatatgttcactaaagctcaaaggaataatgtcaagaatagttttagataacataaagataaaaaaaggatagataatatgcctaaaatttatttatgaagcaatgaaaataggaatcaggagacctagtaaatgggaaagctattatcttaggacttttctaaatttaaaattctgtgactctgtgttctctgtgttgtatgaattaccgttagtgtttagaaggaggca

SEQ ID NO: 2362 - DNA, 599 bp, Homo sapiens
gcataataaccaagaaagaaaccaaaaatgttaaaaaatcatgaggaaaagaaaagaaagacaatagaccctcatggtttaggagcaatgtctctctattcatcaaaggtttaattaaagcctatgttatctgtgcaattatagaagacggaaaaattggaatgttctccagttaattttatgaggttaccactaccttaaagttaaaaattaacaagaacataatagatgtgaacaaataaagacaaatattgtttataaatatagttgtaaaaatcctactaaaacattatcacattaaacccaatgctatgtaaaccccaaagatgaatgatttccaagaattcatgaatgagtcaactttaagaaatctatgtatttaattaatcaaccgggttaagtaagaaaagtcatataaatgtcttgataattgccacaatgatatttgatcaaattcaatatccaattcatagggaaaaaaattattagcaagctaaggaataaaaggatacttttgtactctgataaaggttatctattaaaaataaatagtaaatatcagagctaacaggaaaccatgactggcattcctactggag

SEQ ID NO: 2363 - DNA, 94 bp, Homo sapiens
tatttttggcagcagacttaaccatctaatcatgttttgctctagcgaattttaaaattagtttgcatttcctaagcacacatcagctgggtga

SEQ ID NO: 2364 - DNA, 455 bp, Homo sapiens
catgtgctgccacaggaagtgcaaactagaatgaagtctccgaagagaagtttgtcagttcatttccagagccttgaagacattcatattttctgacttaacaactccatttgtaaaaatttctcatgagaacacatcagataggcactcgagattattcactgctgtgctatttaaaaaagaattttaaaactgtcatgcaaataaatgcccaatgatagggggatgactaaataaaattaagaatatgcataaaagacaaattgttgactggggatcacaaggtcaggagatcgagaccatcctggctaacacagtgaaaccccgtctctactaaaaatacaaaaaattagccgggcgaggtggctggagcctgtagtcccagctactcgggaggctgaggcaggagaatggcatgaacccgggaggcggagcttgcagtgagccgagatagt

SEQ ID NO: 2365 - DNA, 617 bp, Homo sapiens
tgatttgaatataagccagtttttccatgggaaatttatccttagactagtttggggccatagtggggcagcctggtatttcataaatggtcaactgcaatattcagatattggttgtcatccttgtaggcagtggctgtggcaactctgattctacaactttggaagaaaactattaactttgaagttaataatttaattataaactttgaagttttagcatcaacttcaaaggctaggaatggcccccaaaagatcccagtttccttgaataatctttatgtttgggaattatacacttatgctaaatgttccaaatacccctctactcttcaacattgataaactcccttctcaaaaagtggccagctctttcaggtcttctgagtgactttcttaatataaagggcaataacatcgtatcctaaagcttatatgggaggaagctaagtgaatcatggccaatacaagggaagaacgctatcctctgcacataatctcttcagtttatcttttaagacccactttaagttccatcttttccagaaagccttccttaatgacctcaggcataacaacagccaaatagaccatgaaaactcttagaaatggactca

SEQ ID NO: 2366 - DNA, 140 bp, Homo sapiens
accagcctgattttctgagacagctggggaactaggagatacaggaatctttcttatttctgaaatactgatctggggcataaaaatatgtgctaaagtaaactgaacccttggatccctgtttcattcagctggcgaac

SEQ ID NO: 2367 - DNA, 510 bp, Homo sapiens
tgaggggacacccacaaacggagtgaccaccagccccacacctcctctccccggggcctggaatctcccaccttgatcctctggggttctaattctggctcaggggcagcggaaagattcctctgcttttcctcctttttaccatctacttatgtctgaatcttacctctgatctttccattgcctctgtgggaaaatggtagaataattcttacatgccaggctcatgtccagtcaggccaatatggacaatgtttagtgtgagtgtgcatgcgcgtatgcagttaagagcaagtgccttggccgggcacagtggctcatgcccgtaatttctgcactttgggagactgaggtgggtggatcacttgacgtcaggagttcgagaccagcctggccaacatggtgaaaccccatctctactaaaaatacaaaaaattagccgggcgtggtggcaggtgcctgtaatcccagctactcaggaggctgaggcaggagaattgcttgaaccca

SEQ ID NO: 2368 - DNA, 370 bp, Homo sapiens
gatgagattatgaaagtggaaccctcgtaaatgggattagtgcccttctgaaagtgacggaagagagctcgccagcaccttccatgtggggagacagggaggatatgacagtctccaacctggaagagggtcctcaccaggccccgatcatgctggcactctcatcgtggacttccggcctccagaactctgatcaacaaatgtgtgttcttaaagaaaaaaaaagtgtggaaagcaatgttaatgttcccaatcactttgagtacattctttccttaactatgtcttaatgcatagttgtgttggatggcctagtttgtaatgttagaatatgcatgttagtgaattaataaatacagcagtaaagaat

SEQ ID NO: 2369 - DNA, 441 bp, Homo sapiens
tagtcccacttgtccccgcagctaagcacccccattggatggatctgttggcagtccttcccaagggattgtgcctttgtgaatttgtgccttgggtaagactgaaggaccaagggtgatgtgcctggagggcagacacaaggggaagaagtgggtgaggtgagctgggctaccaagctgggcccagtcaggaatgcctaagctgcacagagggctttggtcttcattctaagaccaatgtgaaggctttgaagcaggaaaataacccaatcaaacttcaagaatggaggcagggtgatcaggagtgaggcttcctcagtgacctggaggagagatcatggtggcctggactaggatgggtgccaaaaagatggaaggaaatgaacagactggggaaatatttaggaggatcaattaataagacttagtgattgactggct

SEQ ID NO: 2370 - DNA, 437 bp, Homo sapiens
atctcggctcaccgcaatctccacctcccgggttcaagcaattctcctgtcccagcctcctgagtagctgggattacaggcatgcgccaccatgcccagctaattttgtatttttagtagagatggggtttctacatgttggccaggctggtctcgaactcctgaccccaggtgatccgcctggctcggcctcccaaagtgctgggattacaggtgtgagctactgcacccggtctataataacatttttaaaatttataaattattgaaatgttttatatcaatttaaaacattattattcacagtttaccacttcatagtgctgtgttaaagaccatactaccattattttcaaagaataagatctcacatccccaggagtacctgaggagtgctgagacagcatgaaataaacatgggatatttctaaattgct

SEQ ID NO: 2371 - DNA, 367 bp, Homo sapiens
cagagggatctagaatatctgccaaccacgttaccagcttccctcatgaattcaaacatcatctcccgcttctatgccttggtttcagcagaagcagcgctagtgctaactcttataggagagaatcccattccctggcctatagaagtcctttccctcaaagcccagtcaaccaccctcctcatttaaggattctagttttttcaagcattatagtctccagtcacctacataatatccctctgattggatggatctctgaggctgagaccactatattttccacaccatttttgagccccacccacctacctagcaagcaggtgttctagctgagccggagtaggaaaggcatggaagggagaag

SEQ ID NO: 2372 - DNA, 474 bp, Homo sapiens
ttcctaagagaaatagaaaaaaattgaatatgggcaggcaacattattttactatacaaaataaactggtttgaaacaagtattttgatgagaggttttgtggagcaagcaacattatttgctttaaaaaatgcctattcatggtttcatctacttactgcttttagaattgttaatttggcattgtgataagacaagctgtgagattcaccacatttaatattaaatgccaaaaagaaaaagaatgattgtgcggtggatttgaaactgaggaacatgagcattaattacaaaatgttgaaaatatttcattgcacatttcattggctacattgtgcttcttagctgtagaagccataaaaacttacttatgctcttatttctaaaagaattgtaaatataatcatatttaaaaaatttaaacagaattgtgtagtcattattatgtagttttaaagtacatatgattattaa

SEQ ID NO: 2373 - DNA, 201 bp, Homo sapiens
ttctatttctagaatgacatgctttgacatttcattaagaatttttagatgtttcaaatggaacagactacatatttcagatcaattgaccttgaggatacaattcagaaacaagttttactcaacagtttccatgaggagatgtgactgccagattggattaaaggccaaggttttgttgggatgtgtgtgtgtgtgtgt

SEQ ID NO: 2374 - DNA, 294 bp, Homo sapiens
agagcccatgctatggctatttgactttgcagtaggaagctcttgttaaaacaggtgcgcctgaggaactgcgtttatgcgtgaagaacactctccatttgcccctgacgtctgcctcactcttcccagattgaacctttattatcccatgctgggctgggacctcattatggaaggcctcgaaagccagcctgcggaggttgaacaagggagtaggatgatgagagttctgctgtaagagattaacccagcatcagtgtaagagacttgagagggaggaatgggtagagaaag

SEQ ID NO: 2375 - DNA, 276 bp, Homo sapiens
gagcaaatagccctgcgaagacttgcctctgcaaagttccattggcatgaacccccttggctggcatcccttcccaacgtcagagccctgccctggccctggctcccaagctcagaacacctgccttgtccctgcccccacaggggggcagtggttcctgctgattagccagggctgagctatggattagaataggggaaaaaaaaaaaaaaaaaaaaaaaaaagggggggcccttttttccggaaaccccaacctgaaaaaaacccttggggggt

SEQ ID NO: 2376 - DNA, 515 bp, Homo sapiens
gagaaacctgcgagaagagagcatagactcttggtcagaagcccctgcttcctacagaatctctgctaatacccttgataattctattggcccaagatgcaaaaaagcccagaactactgcttaaactttcccaccaaagtacttgcgcctggctgggaagattgtgtcagccccactggaggtctggaaaagaggcccagattcaccaacctcaagcataaaatttctctgaagtctggccgggcggggtggctcatgcctgtaatcccagcactttgggaggctgaggcaagcagatcactttagtccaggagttcaagaccagacctggccaacatagcgaaacaccatctctactaaaaatacaaaaattagctgggcatggtggcgggcacctgtaatcccagctacgtgggaggctgaagcagggagaattgtttgaacccgggaggcagaggttgcagtgagccaagcttgcgccactgcactccagcctggttgacaaagcgagtct

SEQ ID NO: 2377 - DNA, 442 bp, Homo sapiens
atttgatccctactgactgccctgtgccaggcactgtggtaggccgcgggaatacagcagacaaaaacccctgccatgccaaagagggagccagaaaaacccacagtgagtaagtgaatcgatacgtaacacgttccatgcaaaatacactaggagaaaagtagagcagggaggggatgtctttggggggtgcagtttttaacagacgaggtgacactgaaaaaggcctaaaggtcccggcgcagtggctcacgcttgtaatcccagcactttgggaggccgaggtgggcggatcacctgaggtcaggagttcgagactaacctggccaacatggtgaaaccttgtctctactaaaaatacaaaaaattagccgcgcatgtggtggcgggcgcctgtaatcccagctactcgggaggctgaggcaggagaatcgcttgaacc

SEQ ID NO: 2378 - DNA, 416 bp, Homo sapiens
gtatccaagtagagagaagtagaacggagcctctggcatgtggtttgacttattttaaatcacaaaataatacataatcttgctgaaattgatctgaaatatttcattcattacttaccacactatattcatatggtcgggcgtggtggctctcgcctgtaatcccagcactttgggaggctaagacgagcagatcatgaggtcaagagatcgagaccatcctggccaacatgatgaaaccccatctctactaaaaaatacaaaaattagctgggcgtggtggtacatgcctgtagtcccggctactcaggaggctgaggcaggcgaattgcttgaagccaggaggcgaaggttgcggtgagccaagattgtgccactgcgccttagcctggcaatagagtgagactccaaaaaaa

SEQ ID NO: 2379 - DNA, 87 bp, Homo sapiens
agagaaaatctaaagggtaattaaaaatacgccaaaagcagacaaatgaaaatggaaacacaggataccaaaacgtataggatacac

SEQ ID NO: 2380 - DNA, 409 bp, Homo sapiens
gtctctattagcttaacaaattacacacacgcacacacacgcacatgcactcatgcacacacacacacacatgcactcatgcacacacacacacacacacacacacactgctgtataagcaagttcactatgaacccatcagctgggacccaccatttgattctcctgacaacagctgcaaagaagagcaagatatatgaggaacaggacagggcaaaaaacaacatacatcagaaacatactgccatggagcaaatgaaaattgtgaccaaatatttgaccacaacctaagaaattaatgaaataatcacctctttaaaacaagagcacaaagccaaataaaatattcaaggaagacacaacactagaagatgtttcaacataatatgaaaaaacatcaaaacttagg

SEQ ID NO: 2381 - DNA, 509 bp, Homo sapiens
atagtgttaaagtctgtatactcttctcatacacatagattcatgtttatattgatgaaaaagtatttctaataaaacttagcatttttgtgtttgaaaaatatgacttttaatgatagttagtgatttatcagtaatacaaatatccttctctcgtgtaattagtggagacaagtctcaagctgagaattgttaagtgtcagtgcttgcttaattggggcaattttcacttatttgaaaaatacatactaataccatttgttaaatgatcagaacttgctctcattgaaaaagaaaggtagaggccgggcgtggtggctcatgcctgtaatcccagcactttgggaggctgaggcgggtggatcacaaggtcaggagatcgagaccattctggctaacacggtgaaaccccgtctctactaaaaatacaaaaattagctaggcttggtggcaggcgcctgtagtcccagctgctggggaggctgaggcaggagaatggcatgaacccg

SEQ ID NO: 2382 - DNA, 452 bp, Homo sapiens
gagaaatgtcaccagcagaattgacttttcatgatgtccttccaagagtcttatgttctcagaccacaggaaattcatatctgcagatctaacagtaacatgaaagagaagaacaacagcctcactcactctctcctgcaaaagtgcaaagatttctgtttgacacataataaacagtaaatcccaaatgttgaggttgagggtgtcactgggggaaaactactgctctaaaaattaataataataataatagtaatattggccattttttcattaaccatggcctgagtctcagccttaagtattcagaaactcatttattcattcattcattcaacatgtattgagagctgactgtgtaccagacactgtctgaggtgctaaggaaataaaaataggcaggtgagttaacaatctctgctaccatggagtttatattctagtgggataga

SEQ ID NO: 2383 - DNA, 423 bp, Homo sapiens
cacttgaggcgagggttccagaacagccaggccaacatggtgaaaccccatctctactaaaaatacaaaagttagccagacgtggtggtgcaagtgcctggtgcaagtgcctataatcccagctactcgggaggctgaggcacgagaatcacttgaacctgggaggcagaggttgcagtgagccaagatcgtgctactgcactccagcctgggtgacagagcaagactacgtctcaaaaaaaagattttttaatgtatctatgaccctttatagaagacatagtctttcatcattatcatcatacttatgtactgatatatactacataggtttttttagtgtttatggcagtaaaagcaatttgttacctttctatacaagttttcaaaggatttcaagatgctcatatttattatattctt

SEQ ID NO: 2384 - DNA, 527 bp, Homo sapiens
gggtgcctttgacaaatcattaagaatgagttctacattaaaaaggggaagagagggtgatagctgaggaggcagcataggcaagaacatccagcatgaaagaacagtgaaggacatcaggaacatctttcaggaacatcaggtaaaacagacttagggcccaagtcaaaggagctaaaataatacaccctggaaagtggtatgatcatttctgcatctgctccagagaaacctgccaaaatatgattagcataatacccaagagaacatcacattccccatgtgtgaaaatgcaagagggagttatttctaatagttcataagctcagcaacaacagagtagacacaaaagccatagaatgtgcttaggctttactttaatgatatagggatatcacatatcatcagcctgtggagtacagaggtagtttacaaaggataaaccttcattgtttggaaaggaaagatcagagagctctttatgaagtttaaacaaaatcagagaaataaagagatgtgggaaaaaa

SEQ ID NO: 2385 - DNA, 387 bp, Homo sapiens
gtatcctctctttttcatctccaccaacctctgtttactcctcttctctactacgtctaccagatatattaagttaataaaggcattcatatacttcagcaatgtttttggagtgggatgtgtgtgtgtgtgtgtgtgagagagagagagagagagagagaataagaacatgcatgctgaagtgctgaagcacctgcatcaacattactatcactacagtcatagtccaggaaagatgtctctgctctcaagcaagaaacaagaactaccatgatggtttgggaatgaggaaaaataagagggtgaaataagagagtgtatttgacattaagttgggaaattgcagaggaagcaacctaacattaggtgttaaaagacctggattct

SEQ ID NO: 2386 - DNA, 538 bp, Homo sapiens
aggtgcctgtagtcccagctactcaggaggctgaggcaggagaatcgcttgaacccgggaggcagaggttgaagtgagccaagattgcgccactgcactccagcctgggcgacagagtgagactccgtctcaaaaataaaataaaataaagagggggtaaaaaaccataattgtctaagaattgctctgaggattacatcagtgtaaggtaatgaactttactgaaatgtatgcaaaaaatatcactttcattatcattatcatcatcatcatcatcttcacctgatactttaaaaacttcaaatgaaagagggtaagaaagaacccactggatcccctactctgtacctggcattgtgctacaggttgtgcatatgtcacttttaggttacaacaacagcccaactgtctacacataaatttatatctgctgtataggaataaactatatttctaattctggaaaatgaggtgcagagaggattaagtaacatgcttgaattcaagtatgtttcaataattaaatcgaagctgggcg

SEQ ID NO: 2387 - DNA, 502 bp, Homo sapiens
gcatccagcccaaggctacttcttcttagatgacgcacttcactctcccaaaatgattactatttctttggattatactttgagaatactttgagaaatgctgaactcttgaaatgagcattggtctgagagtcaggagacttggccctagtcctggttgtatacaagtaatgttacctctctagacctcagtgtctcttccaaaatgggagggttaggccagagtctctcctccaacatctttttggatctaactatctacaattctatggcttctgcaaagtatactggaatcagtgtgctgctttgggagagaggtgggccagaggacctccaaatttctaaataattcttcagaatatccatcttttaagctacagatcttaaaacagaaaaaaaaagaaatttctccataaaataaaaatttcaaaaatatcacatcttaattcttggcatatgaatatatcattttccaccacctctaaacaccactggctcatct

SEQ ID NO: 2388 - DNA, 439 bp, Homo sapiens
tagcaggaggtagaagaaaaagttattgaagctgaaatagtgatccttagccttagggacagtgtgtgtcagaggttagagcatccagcatggctggtggccagagctttgcatcagtctgagatgtatgtgatgtatctttagctcagggaagagagaggacttgatttttgaggaaggcttgggaaggagggatagaagagctggatagttttgctgctccccagccagaaatttatagtttgatttcattattgccttgaaatattgggatgtcccagaacacacagccattcatatttaaaagtaagcatggcaacctcacgtctgattcggatataaagggctgatttggcttatttatatgatttcaattcacaggcagccataatcaagtgcttactaggcttgtaagagcagccagaggtcagaccattta

SEQ ID NO: 2389 - DNA, 432 bp, Homo sapiens
cctatagtcattttctatgttgctctaaaattattctaaactcctctaataaaaacttacaaagaaaccagacaaatgtgcatatggatatgactatgaactaggaaacatccagatgccttggaaaaccctaagagaagaaggaataactcacgatatgtgaaatgcaagtgagataggtgagcttggaaaatatatcatcagtataagccttagatttattttgcataattgaataaaattctttaaaaataaaaaggtgagtgttttaattaaacttgacaagtgacaattaagttaaacataatcttttgtttacaatcactttgattggagacagaaggaaattagaaattaaagtttgttggctgagcacggtggctcacgtctgtaatcccagcactttgggaggccaaggtgggcggatcatga

SEQ ID NO: 2390 - DNA, 259 bp, Homo sapiens
agtaatagtgattattattatttaaagatgcaactacttctgcaccaatctaatagattacatttaaaatggaagcctttctttgaccttttggtctggactatggctgtacagtgtagcaaagcaaaaggaacatggcggggcaactttctaggcaaacacagcaggagcactacacttactttaagggccctggaaagaggactccaaatcagcatttctactcacattgaaatccaggtctatgtaagtattcttt

SEQ ID NO: 2391 - DNA, 280 bp, Homo sapiens
tgtcccagtttttcctggactgaggggtttccttggacacaggactttcagtactaaaatgtaaaaatcccagacaaactgggacaagctggtcaaacctagttgagtttgaatttgatatttaacactttcaacatcttaatgacatttaagatgtgaaaatagaatgtatttttcatactcctcgtcactgggacactatatttcttcactgacaacttttaatggccaaggatcttatcactaatgaaaaagggaacaggctgggcgaggtagctca

SEQ ID NO: 2392 - DNA, 277 bp, Homo sapiens
cagaagggtaacttaagccttagatatgaggtaaaataactaccctttttaaagcaattaatatatacaaggcaatgttatgtgaattccattcattgtgttcatttaaccctcataataacactatgatttaagacagtatcattttaaaagcataaaaagtaacttctgccatgacacacaattaggataggaagaaatatttataaaagatgttaaaaaggtgacaaaacatcctatctgcaatattctttaaattatatccttggaacttaat

SEQ ID NO: 2393 - DNA, 479 bp, Homo sapiens
attctttatgtttccagcttatctatttcccagagaccaggtcatatctgattaccttacagtctatgaatatatttttgtgtgtgggaagagtgggtctacagtatgaataaagtttgcctatagtcattttctatgttgctctaaaattattctaaactcctctaataaaaacttacaaagaaaccagacaaatgtgcatatggatatgactatgaactaggaaacatccagatgccttggaaaaccctaagagaagaaggaataactcacgatatgtggaaatgcaagtgagataggtgagctggagaatatatcatcagtataagccttagatttattttgcataattgaataaaattctttacaaataaaaaggtgagtgttttaattaaacttgacaagtgacaattaagttaaacataatcttttgtttacaatcactttgattggagacagaaggaaattagaaattaaag

SEQ ID NO: 2394 - DNA, 378 bp, Homo sapiens
tcccataatatgtataattataacatgtcaattttaaaaaaagcaaatgagtaaattttaatacagtcaatgtaggttacaaaactatttaattcatcttcaggtctacacccaggacattctggcacaataatttctatttatgcccaagaggcactaaagatcccttgattccatttatctattcaaattttcaacaaatatttattgagagttcagtatctgtgcaatattttcttaagtgctggaatacgatgggagtaagccaagaatttgccctaaggaagcttatattttagggagaaaatgacgaggaaagaatctctctatagcaaaaaagcagccagccagggaaggaatactacaccacatcagctt

SEQ ID NO: 2395 - DNA, 272 bp, Homo sapiens
cttttaccatatttttctatactcagtacatattacctgtgcaaatttttttaatgattggcaatttcacattacttatcaataatttaggtatgtctatattttattccagcagtttgaatatcaaaaatgtattctgaggtaaaaatcatagctgtacacaataatttagcttcaaagacatgccttgaagtattgattatattattgaagaattagaaatgatttaaatgtctaaccacaggaggctctgtaaatgaattttgattcat

SEQ ID NO: 2396 - DNA, 523 bp, Homo sapiens
cactctttctcaatattagctaataaatatgtatttttaataagctgattaaggctttgttagtttctcaatgataacatcgggcccatggttctcaatcagggtatgattttgcccctcagaggacattttgcaatatctggaggcattttcagttattataagtggggctgggtggatgctgctggcatctcatggagagagaccagagatgctgttaaacatcctataatgcacaggacaggcccccacaacacagaattatccagcctaaaatgtcactagtgctgagggtgagaaactctgacacatcgattcagtgatgttctggcaacagccaataaagtcagcaattaaaaatttgtattgtagggccaggcgcggtggctcacgcctctaatcccagcactttgagaggccaaggtgggcagatcacgaggtcaagagatggagaccatcctggccaacatggtgaaacctgtctctactaaaaatacaaaaattaactgggcatggtggcatg

SEQ ID NO: 2397 - DNA, 370 bp, Homo sapiens
ctcccaagtagctgggattacaggcacctgccaccatgcctgcctaattttttttgtatttttagtagagacagggtttcaccatgttggtcaggctggtctcgaactcctgacctcaagtgatctgcccacctcggcctcccaaagtgctgggattaaatgtgtgagccaccatgcctgttctcagtagattcttatattgtcttttcttctttaacctcttagaaagccaaaaggtaaaatttcagggtttagagagggtatggaaagtctagcttctcatgcccatctggatagagccagctgtttgtcctcattcaagaagatacttgccgggcacggtggctcacgcctgtaatcccagcacttt

SEQ ID NO: 2398 - DNA, 492 bp, Homo sapiens
ggactagctgggactacaggcatgcgccaccatgcctggctaatttttgtatttttagtaaagacggggttccaccatgttggccaggctggtctcaaactcctgacctcaagtgatcctcccgccttggcctcccaaagtgctgggattacaggcatgaggcaccatgcccagccctgttattggatttttctgtccaaattttgaatctagacactgacacagggagtaggccttccagtttctagttggtacaaagaagagttgagaaatttgagagaggcaataatttcagccccattcttaacacagttggcttagttggtaactgttgaagattattcacctactttttcctcaattcttgctttagaagagccatcaaggaacagctattaccagcagaactgctggaaggaatccagtagatctggccccttgggagagtgggggaagagcaagagtagcctcagggaaaggggtcagggagag

SEQ ID NO: 2399 - DNA, 473 bp, Homo sapiens
acagattaccctcggcactttcagaaaacaacacagtgaccagtatattctgtctttttgatacagccagaagcaccctgaaagctgagacctaactgtgcttttggaaaataagcttttaggagttgaatgaccttgtctacttcttttagtcagaataatgttggcatgtctattttaggttaaaaaaaaatacaaattctaaaaagggacttttaagggccccttttgaaagccttagcatttaaactaacattagatttaaaagaagggcttttctcccccattataggaagctgtgtaaaatcatgtgtgaggttgtgagggtcaaatggaagtctaagataaagttctgccaattactggtgtctttaagcttccaccagcagccaagcacagtgcagatcatgagtccttcaaaatacggggtggttttaatgctctaagttggtatgattactttttctaaagag

SEQ ID NO: 2400 - DNA, 547 bp, Homo sapiens
ggtgagagatagagtaaaccttaatttggatttcagagtagagagtctatcttcttggctatatccacctgatataaaatttctgtcaagatgagcccaggataggtgaaggagaaggtctcagataccatggggtctctgtgctcttattaagttttagtagatttttaaaataacttagttttgttaattaggacgatttctagggacattaagtggttgtgattttaaatgtttttatgctagttaggcatttttcacaagggagtgtctctgtgaaacactacatgtcatcattcttaaagaaaagcactctagtttggtttgtaaaaatgagcatgtatgcaaggaaaaaaaaattatcagacattaaacattatacatagttttaattgcattgatgggagtgggagttttgcattttcacatcttacataatggatgaacagagaactttagttcttagtaagaaaacaaaaacattgaaccatggatagaacagtggggagctctcttttgaacaacttgtaggttgatgagtaaatca

SEQ ID NO: 2401 - DNA, 511 bp, Homo sapiens
atttgcaaattttggggctgcatgtgaggctgggaaggttgacccagagcttctaaagtacaaaatgaaatctctcagaacctgatggtatttggatagcatatacccaccagaggaacaggcttttatctagcataccacaggtctcccctttagcacatctgtgctcattttgaaactgtatagggaaggacattaggtggctgggagaactctgaaggacagacctggatctcctgccaccttccaaaggtgaaacaacaaaaatccgccaggctttcaatcaaaagccccggaagggccacttcccaaggaacagaggcaagagcagaagtagatggagtcttactgaaactgaaacccagctcaattcctaataggttgaagatatgattacctcaatgcagtctgcttatcagaaaggcatatcatatcatccggatgttttatatacaatgtttggcatacaacaaaagactgttagatatggaaggaagcaagaaaatgtgac

SEQ ID NO: 2402 - DNA, 473 bp, Homo sapiens
gctttgcgctgggctgagcccagagccgagagcaggagtcggctctgagttccctgcttggtttttgggtggcagcagccagaggaggaatatggcgctcttaggcagccgagcggagctggaagcggacgaggacgttttcgaagatgccttggaaaccatctcaatatcttctcactcagatatggcaacaagcagccttcactttgcatcatgtgatacacaacaggcgcccagacagcgcggagcgtctactgtcagcagttcatcatcaaccaaggtggatctcaagagtgggcctcgaagaatgtgctgtggcattgaacttatttctaagcaacaaatttacagacgccttagaattgcttcgcccctgggctaaggagagtatgtaccatgccttgggctacagtaccattgtggtgttgcaggctgtcctgaccttcgagcaacaggacatccagaacggcatt

SEQ ID NO: 2403 - DNA, 530 bp, Homo sapiens
gatggaaggatgggtgaatgaatgagggaagtcaagcgatccccaagcgacttaggaatgtagttgctcccctgagaaaccaggcagctgccattctccgaagtgccccggcttgccaggcacagaaggtctcatggcacctcagagactggccctgcaagggacatggctgatggccaaatacagtcaccacctcgggctgcccaagctctgtcgagctggaatatggcagggctaacattacagaaaacaagttgacggcgtcagaaatgggagtttcatcaccctcagacgtgtttagccccaactgtgtgtcagtctctgctggactccagagcataaaggaagcaatcattgtccaaggaacagagtccctaaaggaggtagtggggtcaggggaaaaggaaggaaggaaagggacatttattaagaaatttattgtatgctgcagtttactctattatctcatttaatcttctgaacaatcctacaagactgaaggtgtaagagccatttctccacctggcagg

SEQ ID NO: 2404 - DNA, 318 bp, Homo sapiens
tctcctgcctcagcctaccgagtagctgggactacaggcacccaccaccctgcccagctaatttttgtatttttagtagagacaggatttcaccatgttggccaggctggtctcgagctcctgacctcaagtgatccgcctgccttggcctcccagagttctgggattacaggcatgagccatcacacccggcctgggactcttcttgcagtgagccagggccatgggacccttcaaaagttgctccaccctaatccccaaaatatctttttctcccgcctgtcccaagtacctggcatcatactatatgggtcaact

SEQ ID NO: 2405 - DNA, 521 bp, Homo sapiens
ccaccatgactggcaaattttcgtattataagtagagatagggtttctccatgttggtcagactggtcttgaactcccgccctcaggtgatctgcccgcctctgcctcccaaaatgctgagattacagatgtgagccactgtgcccggctgcctgagacattttgggcaacagccgtgacagaagaaacgtgcatcccttctgtgcaggggatttaagaagtggctcatggctgattatgttttctttgctccgtttctggaactgtgggagcatcttctgggataagggtctatctgtttgagtctctgaatgactacgaccaccagagcccccttgttggcccgtgatggatgcgaaatcaattcagaagtaaaggccgggtgcggtggctcacgcctgtaatcccagcactttgggaggctgagacgggcagatcatgagttcaggtaatcgagaccatcctgactaaaacggtgaaaccccatctctactaaaaatataaaaaattagccaggcatt

SEQ ID NO: 2406 - DNA, 283 bp, Homo sapiens
taactatcaatgactttgaggtgataatgagcagcgaagacatttcaagatacccacaaacaccataatgtgatatgaaactatctatgatttccatgggtgacaagtcacaggcattactaataccactgtggcttgttgcctattatcataactgctaatatttcaattagagattagagaagataaagggcttctgttttttgttgctgttgtttatcatcaagttaaaaggcatcctgaaacactttctggcttaaggcttcagtaagaatggagtaga

SEQ ID NO: 2407 - DNA, 558 bp, Homo sapiens
accctattctaagctgtggattcgggatagaaagaaagggggagggcaccacatatagtgtaagttgatttttttctgggttaaaaataagcaggcaaacacacacgtacacagacatgcacacacacacacacacaacatatgaataaatgttcagctggggaaataagccaattttcagttataggcatgaaagtcaaataggaaaaattttagtagtgcaaatgaatacatccctgaaaattcagtgactgtttcctaccacaaaaacttcctctgtcatatggattcaaaatcaatattgagcagagccagatatattcccagaagactatgggattcaatcaggatagagtccaattaagtgcatgcccttcagggcttttagcaggtttctgagaaagaggggttgatttgagacaaatgatgatgcaagattttaagtagtgtaagactaaacttaagatcagttggcactgataaagacacaaagggtaaatgttttcaataccaaatgaaaattatggtagcaatttgaatggttgtatttaatcattt

SEQ ID NO: 2408 - DNA, 578 bp, Homo sapiens
tatcagtgacctaacaataactctataataatagcttacagtctacaaaacatacacacacaagaagtagtgcaacacagagggtaagagtggagctttgaggtcagctgggttggctgcggactgtggccccaccactgtctagttgtttggctttgggcaagctagctaacttctctccacattagtttctatccagccttataaggttgttatgaatattaagtgagatgatataaacaaagagctcagcacagtgcctgggatatagtagatgtgcaacaaatgtcagctattggtatttttgaaatcatctactcatagcaatctagtatctagctgcaagactgtgcagacactgcacagggacagagtagcagcagacaattgaaagttgactgtgaggccgggcacagtggctcaagccggtaatcccagcactttgggagcctgaggctgacggatcacctgaggtcgggagtttgatactagcctgaccaacatggagaaaccccatctctactaaaaatacacaattagccaggcatggtggtgcatgcctgtaatcccagctactc

SEQ ID NO: 2409 - DNA, 351 bp, Homo sapiens
aagataattgtcttcaagatgagatagaagatgggaatgtgaatcaagtagtattaaaagcactatttcctcacataccttacattcatagatgaccacttcatatagttctaatcaatggtggaaaacttctaaaagaaaacacagtaaagtatgacacgctttctgcagtttggcactctctttctcactgattggaatacagatgaaatgcctaggatcttagcagttattgttttttctcagtaaagacaacagcagcgacatctgatatctttgtgcaattgaactaaaccagaaatcttgttccttgctaattgtagcaaacacagtcttttctgaagaaacatc

SEQ ID NO: 2410 - DNA, 477 bp, Homo sapiens
ttaggaccaacagaatacaaagattcattcagaatacatgtaatgaagtggaacacaaggtaaagttttgcagacaattccatgaaaaaacatcagcgcttcaggaggaggctgacagtatacagcgcaatgaactattacttaatcaagaagtaaataaaggtgttaaagaggagatctataatcttaaagacagactcaccgctattaagtgttgcatcttacaggtattgaaacttaaaaaagtgtttgactatattggactaaactgggatttttcacaacttgaccaattacaaacccaagtatttgaaaaagaaaaggaacttgaagaaaaaattaagcagttggacacatttgaggaagaacatggcaaatatcaggcattattaagtaaaatgagagctattgatttgcaaattaagaaaatgactgaagtagtactaaaagctcctgatagctctccggaaagcagac

SEQ ID NO: 2411 - DNA, 423 bp, Homo sapiens
tctctctccctctctcttagaacaagaattcaaggggagcgccacgaagagagatttcacagagaaagtgaatttagtattaaacaggttataattaagctaagaggctacaattaggactcttagtaatgagggggaatccatatgcttgttatgtcaaaaatggtagttagccattacatattctagtacaataaatctgtgctagaaagtcagaccaaacatgagaccaattaagatgaagcatgactttaaacatataatggatgataaatctaaaaacccattttcacaggaaacagtttgatgcagggctggaatggagtcattgtgtccagttttatgtcttggatccatagggggaaagttacgtaatcatattaacctaaatgctagttatttattttacttttcctatttatt

SEQ ID NO: 2412 - DNA, 523 bp, Homo sapiens
ggactgaggggagagaggggaaagaaggagactgggcagaggaagaaattgagatatgatgcagactaaataaagcttcagttgaccctttggccatttctgaaaatggaatgacccttcagagatattcctaattggggtgagaaggctgagcctttatactcccatgttaaacagtcattggatgtggacgaccttgagaagggtggctgtcttcacctggaggcactcccagtagctggggcaatagcttcttcattctggggagagtttgaacacattacagctatcggacaagaacccattccacctctttcttccattcaaggactaaatatgccgtgtgtgtgtgtgtgtgtgtgattgaaagtaaagtaaaacctgacactctggccaggcgcagtggctcacacctgtaatcccagtattttgggaggccgaggcaggcagatcacgaggtcaggagatcgagaccaccctggctaacattgtgaaaccccgtctctactaaaaatacaaaaaa

SEQ ID NO: 2413 - DNA, 486 bp, Homo sapiens
cctcccaaaatgttgtgattacaaatgtttgcgccaccatgcccggccattgtagtcatttatcctggtggattaaaactgaaccagggaggtaccagtcagtggcttcgttatcatcaaattgatgactaaggtcaaccttttagaatcttctagaataaatatgtcttacacctctaaccaaatacacaggtttttaaaaaaaacaaatctataacataggccgggcacagtggctcatgcctgtaatcccagcacttttggaaggtgaggcggccgcgtcacctgagagcagaagtttgaggccagcctgaccaacatggagaaaccctatctcaaaaatacaaaaattaggccaggggcggtggctcacacctgtaatcccagcactttgggaggccgaggtgggaggatcacgaggtcaggagatcgagaccatcctgggtaacacagtgaaactccgtctctactaaacatataaaacat

SEQ ID NO: 2414 - DNA, 486 bp, Homo sapiens
cagagaagtggaaattacttcagattgtcatgaaaaagacaaatggagaaggtgggatgcatgaaaaatagacttttaaaattcctaaatcaatgccctcaagtcatctaaaatgattagaaacagtctatagttgtcttttatgaggagacaagaattatatgtgttccttgttttttttctccttctgcttgctgaagagttctggtttcacttgtcttgtccttttccttccctttgtcctgccttgagagactggttatattaagcttttgtgaggaatttcaggtgagagggaatggaggaagaaaaaagagacttagggacacatattcatacccatgtgtgtatgtgtatttatgtgatatatgtataattttatatatgtgataaatacatacacattacaaatgcaattatactatacttaatctttcatatgttttaaatccttcaagtttattatgaacatctccccatgtcaac

SEQ ID NO: 2415 - DNA, 559 bp, Homo sapiens
agctccccaagataagaacttggctgccagagggcattaagaactaagggcactaacatatgggctatacggaagtgagaagcgccaggaaaaataaccttgtacatctttccgtgctgggaccttgtactaaactgagaaagtattttcagctgagttacttggtgaggtttacaccctacccacctagaatccttgctgctcccagatattccctctctttaaaccaaatctctggttttttaaacccatttctacttaagcattcaactaatgaaatggtaaggactgtaagaggacttgagcaaactcactgaatggctgacacagaagtcttagaaggaggaccgggcgcggtggctcacgcctgtaatcccagcactttgggaggccgaggcgggtggatcatgaggtcaggagatcgagaccatcctggctaacaaggtgaaaccctgtctctactaaaaatacaaaaaattagccgggcgcagtggcgggagcctgtagtcccagctactcgggaggctgaggcaggagaatggcgtgaacccgggaagcg

SEQ ID NO: 2416 - DNA, 558 bp, Homo sapiens
tttctgaagtgtagatgttagaataaggcttttctgaagtttatgaaattttctataaacagattgacctgtgtcttttagtaaggacttattgtataatagtcaactgctattaatttagaaaaattatttgtttattactgttactatccaaatagttttaatgaattaacgtttgagagaagacaaatatccttatgtgcaatacaaaattatttgagattctctttgtatggattaagctgatgattccctgtgctttgccagtctttcagggctttctatagtctgatttatgggctaaataagcattttccacttacttctgcatagttaagctcttaccttccttttaagcattcagcattaacgttcaatatgtaccagaaatttctgctgagtccagggagtctagtctactaggagagtgagtattaggactgatggagttctaagtggaagttgttttctagggtctatctgaagcctgggttaatactagtcctaaaagtcctcagcttctgatggcatcatgcaacctgacttcaaactacacta

SEQ ID NO: 2417 - DNA, 288 bp, Homo sapiens
gaattcagaacgtcgagatggggcccaactcactccagtgggtcggctcaccgtgtggcttgcacggaccttacattttctacaaggcttttcaattccaccttgaaggcaaaccaagaattttgtcccttggcgactttttctttgtaagatgtacgccaaaggatccgatttgcatagcggagctccagctgttgtgggaagagaggaccagccggcaacttttatccagctctaaactttatttcctcccagaagacactccccagggcagaaatagcgaccatg

SEQ ID NO: 2418 - DNA, 438 bp, Homo sapiens
gatttaattgttggatgtatttcttaatgggataattatttaaaaacattcccagttactttaaaagcgtatgtgaatattacccatcagttttgtcttgaccttgcctttggctccttgagtgtctctgttcatgtgacagctttccagctcatccttaatgtcatactcgagctgtttatcttagtgaggtagtgtgggcctaaaatgaaataatatatatcaaaagcacctgtgggggaaagcacatctgaatgccaagcagtacttagttactgcaagtgctacttctaccaatattttttctttctttctgcccctttaaagagaggttgtccctttttaatagatatatgacagctctgcttcctttcttaagtctaagatcaaagaaatgttgtaataaaggggagtcactccctcccattccttctctct

SEQ ID NO: 2419 - DNA, 531 bp, Homo sapiens
ggtgctgcatactatcctggaatcctgcagtataggactaaggatagaaggccctagaatagtgctacccaaagaagtttctgcagcaatggaaatgttctatatctgcactctccaaaagggtagatagacactggcaacatgaggacattgatttgttgacatatgactagtttaattaagcaatagaatttattttatttcagttcatttaaattagaactaaaccatgactaatgactactatattggatagcacagttttaggtcacattgctgatgtttagggatgtgtttggtgccaaagaacaatctgtaatcatccaaaccaaatactttgaagtaggactaaggtaaaaatgatgctaactaacattttgacaaaattatttttattcccctttaactggaggatagcatactatcttctgaaaaataattcttattgacttgaagtctttaacgaagataaacaataacctccaaactaaataatttaaacatctttaaaattttttaaaggtcagcgca

SEQ ID NO: 2420 - DNA, 77 bp, Homo sapiens
tacttaaagggcctttgagtgagagttgggcattcattctgaactaaccactaatatcattaagaattagtgctgag

SEQ ID NO: 2421 - DNA, 405 bp, Homo sapiens
atcttagtaactagtattattgataactactgaacatgtgtcgaatgggaagaggagatcatcaccacatattctttaaatgtcagctgctttcataaaagaaagggttgatgttgttttctgtcaacagaatcaaatgaatcaattctggaaagtcttcctttcctctttggaatttatcttcattcatagaaactgtattcataggtcttaaattctttcttcttagactatagtactattacttggaatgattgagccactagactaaacacctgatactggtgcttatacacgtaaaagataggaacaaggtaagataattagacatttttccattgtcccccatattgcagggacaataaacttcttataggaagcataactaacactcagaaagtatgc

SEQ ID NO: 2422 - DNA, 560 bp, Homo sapiens
gtcgtatgtgaatctgtgaatccttataagaaatgtttattgttcaagaaagaagcctcctctggtggttgataagcaattctccacggcagagaaatgctaatgttttgttcttatgtcttgattgatgctttcactacttattcttcaggctataagacagaaggaaacacagtgttaccttctttcataattacaaattccaacacctctttctcccccccaccccctgtctcccttctacttctcatattaccttaaccatcaaattcaaatgcatctgaatttgtaaagttaatctttcaggttctaaaataaacctgtatatataatatctccattactaatgccatctccacatacgtacaagaaaatgtatagctctacattgtcaatccagacactaaattcattccaaatgtttttaaataaaaataatgaattgatttttatttatggcatgctgcatacacccatctttaagtttcaggtataactacatgcagaaccctcttgttgaaagtgcagagcaacattacagtggctaaatttcaaattaa

SEQ ID NO: 2423 - DNA, 531 bp, Homo sapiens
tgggtggaaaacaggttaaacctgggagaaagagtcctcttttagggataaaaattgggattgttcagctggtgtggtgtgtttgcatggggtagcacaaagcccccgtgaacatgacttttaccactaactatctgtgtgaatttggcaagcgtctcgaacatcctggggctgtttactcatctgcaaaatggacacaaaaacacctgctctgcgatcttcacgggtggtggtcagagtcatgtgaaaagatgcaggcagtagagcgctgtgaaactctaaagtgctcagcaaatgtaaggtaggctgggtgccctggttcacacctttaatcccagcactttgggaagccgaggcgggcgaatcacttgaggtcaggagttccagatcagccaggccaacatggtaaaacccaatttccactaaaaatacaaaaattagccgggcgtgggggtgcgtgcctgtaatccctactcgggaggctgagtcaggagaattgcttgaacccgggaggcggaggttgcagtgagc

SEQ ID NO: 2424 - DNA, 498 bp, Homo sapiens
gcagactcctgggttcaaatgatcctccagccttggcctcccaaagtgctgggattacatgcatgagctaccacacctggtccattattatgaatttaaactgcaggctgatgattccagggtcccaaattcactgacagcaggcacgctggtcttgcacaattccccagagcagatggcccttcctacccatagaagcccatgctcttagctctcctacaaacctatccttagaaatacgaagtgctggccgggcgcggtggctcacgcctgtagtggatcacgagggcaggagatcgagaccatcctggctaacaaggtgaaaccccgtctctactaaaaatacaaaaaattagccgggcgcagtggcgggcgcctgtagtcccagctactcgggaggctgaggcaggagaatggcgtgaacccgggaggcggagcttgcagtgagccgagatcgcgccactgcactccagcctgggcgacagagcgagactccgt

SEQ ID NO: 2425 - DNA, 499 bp, Homo sapiens
  misc_feature 318: n = A,T,C or G
ctaagccaggagaattgcttgaacctgggggttggaagttgcagtgagccatgatcatgccactgcactccagcctgggtgacagagcaagactctgtctcaaaaactaaaactaaaaataaaataaaataacgaagagtataagtggattgtttgtgacacaaaaaataaatgcatgaggggatgaataccccattcaccttgatgtgataattatgcattgcatgcctgtaccaaaacatctcatgtaacccagaaatatatacacctactaggttcacccacaaagctttaaaaatatacatataaagaaagaanaaccccagcccagatagttctaggtgtgggaacctccatgaacctctctgtgttcaggtgaggtgaaagtgactatcccataggttgtcatcaggagtgaatgagaaaatgcaaatggagcccacacctcgaatataattaatgtacaaaaagcattaactaatctagctggtccagatga

SEQ ID NO: 2426 - DNA, 464 bp, Homo sapiens
ttgtacatttttgaggttctatagaaatatataatctcattaattcttatgttctcatgtttcaacaggtactgttattctcattttataaataaactcagaagctcagtcacgtggcctccatctcgtctcacactttttccacctattcctttctccctgtcctagaaaatggcaagaacttcacacttgaacattttaaatgtagtctagcctcagtttctaaatttcatatattcagctggtatgttacagaaactaatagtgagaaattgtcatctgaattaactgctaggcagcaggacctatataactggcttggttttatatattaagtcatatctggatcagctccttatactgctctgctggtttagggcaccttaaaagccctacattggccgggcgcagtggctcacgcctgtagtcccagcactttgggaggccgaggcgagcagatcacg

SEQ ID NO: 2427 - DNA, 497 bp, Homo sapiens
cgaaaatgaatgttaaatatgcaaattttaaaaacttctacccgtgggatggggtagttgagaagtgggtataatgaaaactcagacaaaacagaaaacaagaagagtcttttttaatcaaataaaaaaaataaacatgaaaattagaaagtacaatgttagacagtatctatagtcacaatgatagcaaacaaagtttccactacaaaacacagaatcacagaggagacacagacaagacaaattaatctatataatactgaaagaaacacacccaaagccgaagtatctagaaacactgaaactgaaagaaagcagggcgtagggggagaaataggtttacctagttctattttaccagaagaatatgaaccaaaaaagaaagcttgtatagttattttattctcagaaaaaaatggaaagacagaaagtattatcagaaataagaggctataataaaaggaacatttccccacaaaagtataaaaattctgaac

SEQ ID NO: 2428 - DNA, 558 bp, Homo sapiens
ccagctttttgcttggagatatttctgatctgtgacacagggaaggggaaccatagcagggtcttattatgtgtacggcacagataccagagttctaggaggcagaggtacttggaaatttggaatgcgcggtaaccaagacaagggaaccacacagaaaaagaggtccagaaatcttcaagtcaattcaaagaatgacaaagaaagtgtaggctgcatattctacggagctcacaaagaaatggatatgtgtatttcaattagccagaataaagaatctgtgcagaacacctgcagccttcagaaggggcccctgaagggtcatgcatttgtagagagctaaagtagctccaaaggaaaatctactataagtgtaccataaagtcaaatacaaactttaaataacaaaatagaaaatctgaatagccccatatctcctctaaatattgaatttacaagacaccagaagactacatccagatgaatccaatggtaaattatattcaacatttcttaagaaaaaataatattcttatacaaaatgtttcaaaaaacaga

SEQ ID NO: 2429 - DNA, 465 bp, Homo sapiens
gtgggtctgagtgtggccatataacggcactctggctaatgagacatgagaggaagtctgtggggtgtgcagggagggtgacagtggggactcatcctcatcagaagacagagacttccagggagactgccctttccttgtttcccttcttcctgccttgaatgcagatgtgacagttggcgggtcagcagccattctgtagtaatgagatgataaggatgacaaagagattgcaggaaatccacccctgccatcatcaaggcaagcgttactgcctcctgatttcttgttatggaagaaagataacgcctatttttcttccctaaaccactataaattggatttttctttgacctgacaccaaacacattcctatagaattcactgccacacagccgagtaaatgtttgcttttacctggcttttacaactctctgagcttcccaccatctagaagatgaaagt

SEQ ID NO: 2430 - DNA, 559 bp, Homo sapiens
atatattttatgcttgcaaaaattataaagtttttctggtgggattattaatatatgaaaacaactataatataaaggcagaagttatagtctttattgttgtaaggcaaaatattgattctaaatagacagtgaaaaattcagtacatatattgcagtccccagagaaaccctaaaaaattacacacacacacacacacatacatacacacacacatatgtgtatgtatatatgtatatattcatatatatgtgtacatgtatttacagagagaaaaaaaaaaaattgcaatagatgaactaaaattgaatatttaaaataatgcagataccccaataaaagcaaaaaggcaaaagcagacgggacaaagaagaaacaaataataaaatgatagacctaaatccaaatgtattaataattaccataaatatgaaatgatcctaatataacaataaaaatacaaagtttattgcaactgatataaaaataatttatatgctatccatacaaactcacttcaaaaatgataatataggcagattaatggaaaagaatgga

SEQ ID NO: 2431 - DNA, 155 bp, Homo sapiens
atgagagcccacaggaatccaagttttgagtgaggaaaactgctttttgcagtccatggagccccaatcccaagaaggtgggtcaatcctctattaattttatttctccttgtgtcttcttgctgtttctctctagatgcagaagcatatatgga

SEQ ID NO: 2432 - DNA, 366 bp, Homo sapiens
  misc_feature 106: n = A,T,C or G
aaatgtgagtgcctaccacgtgccaggcactgttgactgttgagagacatcagtgaataaggcgtccaaggccatccggagcttaccagtaattcaggagggctgnggaagaagaattcagagcagtttaggacctggtaaagtttgtgaaggctgtgtgctattcaagtggaaacgcaaacagacagttggcagtatgactcctcaaaggaggtgtctgggctacaggtaacatttaggagttgtcagtatataggaatgctaaatgttaatagacacatggatttcattatactgtttcgtatttgatttacgtttttcataataaagcctggacgcagtgactcacacttgtaatccctgcac

SEQ ID NO: 2433 - DNA, 351 bp, Homo sapiens
tagttaaaatggtaatgggaagaccatataaacaacagaaaattaaaagttcttaaacacatgaaaaggtgctgaacttcacaataagataaaaatgtacaaatatgagataatcatttttaactattcaattgacaaagattcaaaggtttgataaattattggctattttgcaggaaacaaactctccatgttggtataaatatagattaatataacctctactgaaaacaatttagcaaacttttgtttaaaatttaaatgtaggtcgggcacggtggctcatgcctgtaatcccagcactttgggaggccaaggcgagcagatcacaaggtcaggagttcaagatca

SEQ ID NO: 2434 - DNA, 341 bp, Homo sapiens
catccggtattttcacccaaagtctggcagaaattaagtgcaaagattaaaactacattcctttcaaatccaagttcaagagtggcttagacagacaacgtcaagagcagcagtgggcagaatggaggcttctggagcaggcatgtagacacccctaaatgcttaggatgagtaaaccagaactccttactgaccagactgtgtagctccagccttttaccattcccaagatgaggacggtccaggacagctttacagagataacaaagaagtaggattggcaacccaacaagtcaaagtagccgtaaccgtagccactcccatgaccaagcagaagcagc

SEQ ID NO: 2435 - DNA, 549 bp, Homo sapiens
gttttgataataataccctacctagcttctgaacagtttaataatagatttaatccgtgagaggaaataccctcgaaagttactatagaaataacacctcactatctggtggcatttacttagttcttagaactgactaattagtttatcggttaaagtaatttgctattatattgtaaaattacatttgaggctcacttataaaaattggaaaacatcgaaatataagaggtccaagagggtgtttgaaacacattttgctaagttgacaggaaattaatagactttttatgggcccattacttattaatacactcaaaaaaaaggtacagttaaataaaggttttaaatagtctataccgtatactaaaactaaattaatatttaggactgaaataacatattgattaagtaccagctatgtacccaaaaaatgctgggcacagaagttagagtaagatgttttacttaaagggcctttgagtgagagttggcaattcattctgaactaaccactaatatcattaagaattagtgctgagttggtag

SEQ ID NO: 2436 - DNA, 529 bp, Homo sapiens
gtaggtgtgagattttgctttgacaacttactcatagcagttgggcaagtcacaaccccttgtagttgcagcttgctgatgagcaaaaatggaaataatacttgtgtcatttatttggtattactgttgctcatttattcatttacttctttaacaataattgaatgctgaccatatcccaaatactgtgctaaacacagtggcagatgcagaggaataatacaagccctggactttttttccttatgcagtttttgaaacatacgaataaacagaaatactatgatgatgggggaccagttgatctttctcgataaaatataccctatttattgagcactatgttataccagggactatgctcttcataaattacaacattctttaggaattggcattatcatattcattttacttatgcgataactacttgtcatagatcacacagcttgtaaatggcagaactggaatgatttcaacccaggactatccaaactctaaacctgtactctttccaccttatcatact

SEQ ID NO: 2437 - DNA, 559 bp, Homo sapiens
tggatgtagaagggtataaaataaaagttgaggaactaaagttttcatcaaaacctgtggtgttagggtgtaggtttttattttattattttattttcctgaaaagagttaaaggaaatagtttttttctgggaagggtgaagtttctgtgagtgttttgtgggtttagagattggataaatcaggaagacaacagatgtttggtgtgattagcaggtctgattgaatggaaccagctttgaagtctaattgaagacatttgacattaaaacgccaagattatttaggtgcttcacaaaataaaattaaaaatgagacccagtaaaggaaaaatacataatatgaaacatttgttggccaggtgagagactatgctgatgaaattattattggcatccgaagactccactttgattgaaatttatttaaattttccattctactcagtggtgttctgctgaaaacagtaaaaatttgtggaatatgaaaaataagcttaagtacctttttcaaaatcagtagatgtgactagaagaatttaaaacaagatacacaatta

SEQ ID NO: 2438 - DNA, 558 bp, Homo sapiens
ggttacccttagggcaataatagggtaatgattccagatatggaagttgtagacattaaatatctgtgagaaatatttgtgaaagtatattatggaaaaaatggaatatgcatgtaaacttaggctatgttgagtaaaataaaactaatgttttaaatatgaagaaatgaacagttgctcaatgcttgtttctctacacatgtgcaggaagtatataattcagtgctgtacacatatcacattggagcattaatcacagctgtgtcccactttacccaaacatggccacatagtctcttaatcaagcatttgggaaactactagcaatcatttagagtggaaacataatttgacaccggtttagcattccatttgtttgctacatccctctttatgacaagaaagggaaaaatcatgtaatactataatttgaggaaatgtaataatgcattcagggagacagaagcaggaaaattttgcctgtgtagaatattgtcacacatacatgtatgtgtatgtgtatgtatatatcagaaaacatatttcaaaaataaaaaa

SEQ ID NO: 2439 - DNA, 240 bp, Homo sapiens
tcaattgctttatgtagttaatggagtccaaaatgcattgtaatgtaatttattttgcagaaatatcacaaaatagttcacaggtaattatgtttgatgtggaaaaacacaaactctgaatgtgaaaatgtgttctgtaggttgcatttagaaaagtggtgggcagggctcagatggtttgtaaagactagggaaatcaaaattttataaatagggatctattgttttattaaatgagcc

SEQ ID NO: 2440 - DNA, 422 bp, Homo sapiens
atgcccttacacattccacatgcatcacagcacataaccctgacaataaactacaaggtaagcaactaattattccctttttaatattttttaaaacctaggaaggtaacttaatctctttgacttccaggtctcatgaactagaacattagagaatcaagatttgaacgagaggtgatggtttttaaaatatttctgctagatatcaaaatgaatgcatgggatttgatatatctacataagtaggcatagaaatagagatgctcactgatatgtgtatatgcacatatgaatatgtgtgcatgtatatacatgtatccatttcccagctcttcttttaagaggatatagaaacaatgtcaccccagcaacaataaacaccctagtgcccacatcttgatttctctgtaccattttctact

SEQ ID NO: 2441 - DNA, 253 bp, Homo sapiens
catcaacaaacatttttcttcctcatactttttctccccacctcccaaaataaagctcttacctaacctaatacaaccatccttatctaatctaaaagcattccttgccgggtggcgtggtggctcactcctgtaatcccagcactttggaatatcgaggcaggcggaacacctgaggtcaggagtttgaaatcagcctggccaacatggcaaaaccacatctctactaaaaatacaaaaattagcagggcat

SEQ ID NO: 2442 - DNA, 523 bp, Homo sapiens
aacaaaaagtgggccccagtagatggtggcttcttgaggggggaaggtaggagggtgagagtgagatgccgtggaacagcaaggacaatggccttgagaacagggttacattatgactttcagggacccttcctctataacaaccagacatattaaaaagcatattttatgactatactggtataaagacaaatacaatccatgctagattcattattacatacccattattatgatattcatttttcccttctgattttaaaagaaattcataacatttatctgagttccttccagtttcatggggcctaggcattgttcctcctgggtgtaagggttaagtcagccctgcttgaaagaaatacatcaaaatgtgtattctttaggagtgccattctatttgactgaggattttttaaaatgttcttggttgatgatacttcctcggttttctgcaacaagcccggataaaaaggaataataaggccggtgtggtggctcacgcctgacgtcaggagtttga

SEQ ID NO: 2443 - DNA, 526 bp, Homo sapiens
tccaatgagatagatactttctcacccctagtcaggaagctagggattatagatattagggaggcaaatttttcactttgagacactacaacattggtggtggcttatgtgacttcagttagaagctcctgattgggatgttgtcaggagcacgcacaaggctgttggggttggaagagtagattcctggaatgaaatttcctagtaatttcctttctttatttagtcaacaccaaggagtagtctgcttctcccctttctgttgctaccacttctctctaatcaaactgtttcttttctggacttattgcaaaaaagaacattgtctttccttcagcctttttcttactctcctcatttctaaaggaaatgcctgctcagcccatctttctgttttgaaggtttttatagaagattaaaatttcccccactctgttctttgtagtgaaaagagcaacttctgagattttatttttctccttctccttcccagtgttgctgctactcttaatatgtaggtcatatt

SEQ ID NO: 2444 - DNA, 559 bp, Homo sapiens
acaactactgtattatttcataaatatatttggttcatggttgtttatatattcaaaacaattatttgactgtggtacttgcaaattcatagaactcttttgcacctatctacattaataccagatactaaaagttaacttaagaaaataaagaatcctaatcaacatttatctattattaaatttggatttgaagaacttgcgcagtctgtcttctaagtccaattgtaaactccctaaccaaagctttactgttgttacaagacaactggagttagtcatttgtcttccctggtagcattttgaacaataaattgaaaagcctgaaaccaagatacatcaggtatctgaacaaagaagcaagattgatacttttctttccatgctgttgcaaaaacctcactatctaaactcttgactgtctattccacagaccatctcacttctttatcagttccaataaaatatgcattcataaacgctgccctatagcttggtcatatcattatccataaaagttcacccactgaaaatacccctagccttctatactcagtgc

SEQ ID NO: 2445 - DNA, 523 bp, Homo sapiens
accctactacttgagaaattagctgctcaatattgacatggacactgagaagaaaaatacattttggcataaaattaggaagaataaaattttattaaaatataccatttacaataacaaaaagagagttaactgctcggatcccattgaagttcatgaagttgatatactgtagcaatcaaaattctcaagattaatatttcatgacagaatacctggatttagggccaggcgaggtggctcacgcctgtaatcccagcactttgggaagccaaggccggccaatcacctaaggttaggagtttgagaccagcctggccaacatatagtagtaaaaccctgtctctactgaaaaatgcaaatattagctgggtgtggtagcgcacgcctgtagtcccagctacttgggaagctgaggcaggagaatcactcgaacccaggaggtggaggttgcagtgagccgagatcatgccactgcatccagcctgggcaacacggcaagactccatctctcaaaaaaaaa

SEQ ID NO: 2446 - DNA, 492 bp, Homo sapiens
agaagcatccatttaaacaattataaatttatgaaaattaaaaagcagagtaagaacaggtagatataaaaaacaattaagaatcttagaaaataaaagtacagtcaactgaactagaaaaactcaatggatgagttcaaatctatacgtgacatattaaaaatgaacagtaaatttgaagataatggcaaggagctgttatcttactttacctaagaggaagcatgggagagaagagtctgttctctaaaattaaggttcggttgaaaggcctgtaagatagattggccagctccaatatatatctaatatcaatttctgaaaagaatggaaaaaaaattatgaagatacaatatttggagagatcttccagaattagagaaaaagtccttagatagaaagcatgagcaggagaaagataaatccacatctagatacattatgatggaacagaaaaacatcagaataaagcaaaactcttaaaggaacaac

SEQ ID NO: 2447 - DNA, 516 bp, Homo sapiens
gagagccgaggaaaactgagcgtgggcctcagaaagaagttaaggcacccgcgagccgggcaactgccctccttccgcgccggcggagcgattaaagtgaagaaacaatggccagcaatcacaaatcttcagcagctcgccctgtttcaagaggtggagttgggttaacaggaaggcctccttctgggatacgacccctatcaggaaatattcgagtggcaactgcaatgccacctgggacagcaagaccaggttctcgtggttgtcccatagggactggtggagttctgtcttctcaaatcaaagttgcccatcgccctgtaacacaacaaggtttgactggaatgaaaactgggacgaaaggtccccagaggcaaattttagacaaatcttactatcttgggcttcttagaagtaaaataagtgaacttacaactgaagttaataaacttcagaagggaatagaaatgtacaatcaagagaattcagtatatttgtcatatgaaaagagggctg

SEQ ID NO: 2448 - DNA, 284 bp, Homo sapiens
aaaaagcagtcaggtgcaggtttcctatttccttaataagaaagtaagcaattctcttgcaggaggtacagctgggcactggaatgcctggtctcatgatagcattggtttggtcagaacccagtgcaataagcttgtcaagccatgggaatcagtgagaattctaagccccaaacagaaacaaatgaactgggtttttacaggcagtgccttcatctataactgcactcagagttctttggactcatatttttaagtcaaagagaatgcatgcttggagcacg

SEQ ID NO: 2449 - DNA, 501 bp, Homo sapiens
agccgggtgtggcagcgtgcacctatagtcccagctacttgggaggctgaggcaggagaatcacttgaacctgggaggcagaggctgcagtgagccaagatcacactactgcactccagcctgggcaacatagcgagactctgtctcaaaaaaataaagtgccagtgaagaacaaagggccaaggaaccaaaggggagcaggtaccctgggcagacaagttggctggtgagaaggtcagtaaggctacagcactatgggaggtagtaccaggactttcttgcatggcaaaaggggtctctcagaagcctggtgccaatgtaacgaaagcctgggggagccagggagacaaaagtggaggctgggacaggcatggtggctcacacctgtaatcccagcactttgggaggcagaggtgggcagatcacttgaggccaggagttcaagaccggcctggccaacatggtgaagccctgtctctagcaaaaacacaaaaattagct

SEQ ID NO: 2450 - DNA, 554 bp, Homo sapiens
taatttaaaaagttttctataattataggctacatgctttcttaggtgaattctatcaaacatttaagaaagtacagagaatcctcaacttacagtggtttgacttgtgctcttctgacttgataatggtgctttcatctgtgtacattaatgatgagcatcaatatgaccagtttttcactatcagtatagttttcaataaatttcatgagatactgaatattttaaaatgggccttgtggtagatgattttgcccaattgtaggataacgtaagtgttctgagcaagtttaaggtaggtgaggctaagtcatgatattcagtaggttaaatatattaaatgcgttttagacttacaatattttcaatttaggatgagttcattaagacataagacaattgtaagttgaggagtatctataatatcaatcttgaacggactctttttaagaaatagaatttaagggccgggcacagtggctcacacatgtaatcccagcactttgggaggccaagatgggcagatcacctggggtcaggagtttgggaccaac

SEQ ID NO: 2451 - DNA, 405 bp, Homo sapiens
ctatccacattttacagaatggatgtcatttctgagtaaaaacttaagtctttaaattatttagaaacatttttatctacatacatatacacaagttataagttccaaatctaccaaataaccaagaaaatatcctggagtttatcagttgtaaatgataaactctcaagagttgaaatgccagctatcctatagatgagtaagtagagacataaatcaaaacctgaatttcagctttttgggaaagaagtactttttgggaaagagggacccagaccaagcgtagcaacttggagttggagaggagtaggcatggaaatcaatatttatttaattcctactatgttccaggtagtgtgctaagacctttgtctctgttatctcatttgattctcataaccactt

SEQ ID NO: 2452 - DNA, 531 bp, Homo sapiens
ctccaggaaactctgaacggccttgacacaggtaggagtcatttgatgacagccacttttcacccccacaaaagaccactttgcctgagagttcagaactaggaaggagtctcaagcctgtgaggtgagatggatgctaaaatcttctccctagaagatgcctcagaatttttgtttctttttattggttctatacttttcatttcacctggagctgtgccctcctggagcatctcaacagttacataagccactccacttgatctctgctggacaattacttttaaaatctcacatgtaaatagggcttgcagtattttatgtagaatataaataataaatatttctgtggcttctgtggaagctaaaaatcatgatgtagtgtttgaatatgacttttctttgtattcatcccaagggccgaattctttttattgttatcagtatttacatcttaagctggcctctttctcagcaaggcttacatttatttaggctgcatctattttcccttatgctgtcatttcccaa

SEQ ID NO: 2453 - DNA, 528 bp, Homo sapiens
aaggccggcgccaggtgaggctaattctagggccagtggtgctcacacgggcctgggtttaacctggtgaatccccacacctataaacacctgaatccattcctggtgggcttggacacagcacggacttgcgacctccccaagctgacataaatgcacttctcctggactgcccgggccccaaatctgacctagccttgggggtgccaaccaggactcctggaccaccatctactccatgacttgaccagagcccccgtcggtttatacccatgcaatgtacagaatttttggcttggatcgtgcccaagcaacagaaagctgcagggggctttcaggaagggagttgggtaaagaatcaagcacttgctggcataaacggacagagtccttgctctggagaatgaggcatcagaacatctcacagaggcctaagaacagcattccgactcattccttccccgtgagaagaactaagttatgcaaatcaatgcacccatcaatcgagcatctcaagatctcaataaa

SEQ ID NO: 2454 - DNA, 479 bp, Homo sapiens
ttcttcctgtcttacaatgcatttgaaataaagtgatgtcagattgagagtaaaggcccgaaataagaaaaagtaataggcacaattagcttgctttacctttattgataactaagatttagaactgctttgctgtatactcactgctggctacatgtctgtcactttaatttgcactggactacaaaaacatccacaaatatataatatatacctacaaattatatggtatctatatcacatgtatgacccatgaaagacagatgcatattctatgagagactaaatcattcttcataattggtagcttggcattcatttcttgagaatatcagagctgcttaaacatgaatcacatgtgacatcatgcgcacctctcacctcaccttctagataccacacaccgcccattttcctctaggctttattatagactacctgcaaccagaaaagagctttatagagcatctcatcttact

SEQ ID NO: 2455 - DNA, 498 bp, Homo sapiens
caagacactcactccagcatcctttgataaataaattatccattgttccctacaataattatcacagagctcatagtgcacaataccatgtgcagaaggatacttcgttaagtgttactgactgctgcttagttttgagtgcttcaaagtgaacatgataataaacaaaccttgaagtgattatttaaaaatcttcttagtcggatgttagaagttaagtttcttgggatggatctagataactgaattaaactgaatatgcagtgctactatggtgcctactacatagtaattacctagcaaatgttttttgggtgaatatcacatagaagctcctatccttgcagctggtaaagggttgttaaggtgactgaaagatctcaacaaaagaaagaggctaaatgatcaacaaatatttattgtatattcactatttaaaaggcattgtgctggatttctgcttccagccatgatggcataacaaggactgattttaat

SEQ ID NO: 2456 - DNA, 555 bp, Homo sapiens
gaccatgagttcaagtccagcctgggcatcatattgatgtctcttctaaaagcactactaatgcaataaaatgtattctcattgaaaattacatctgcagacaataaaacaggaaaaaactgctgtcttttcacactcaattgtttatcttctgatctgattcatcttgccattgtgtgttgcataaaagttgtaataaactaaaatttaacatattgtggtacaaacacaccgtggaatagtggaatactatgcaaccataaaaaagaatgagatcatgtccttctcaagaacatgatgaagctgaggccattatccttagcaaactaacacaggaactgaaaacaaaataccgcatcttctcacctacaagtgggagttaaacgatgagaacgcatggatacatagagggcaacgacacacactggggcctacctgagagtggagggtgggaggagggaaaggggtacaaaaaataactattggttactaggcttaatacctgagagatgacataatctgtacaacaaacccctatgacacgcgtttacctat

SEQ ID NO: 2457 - DNA, 524 bp, Homo sapiens
ctactttaataaacaaagaattaaactgtttaggccttaaaagagagagatcaatttataattatgggatgagtaagttctttctaaaatataacatgaaattcagaaaataaaaataaattgataaaattgaccacattactcttgtatggcaaaaatactgtaaaatagtcaaaatataacagatactttctttagtatgtaaagggattaaacaaggtaataagaaaaaatgaaaattacaaatagcaggcagctcaagaagaaaaggtagggctgagcacagtggctcatgcctgtaatcccagcactttgggaggctgaggtgggtggatcacctgaggtcaggagttcaagaccagcctggccaacatggtgaaaccccgtctctactaaaaatacaaaaaattagctggatgtggtggcagacgcctgtaatcccagctacttgggaggctgaggcaggagaatcgcctgaacccgggaggcagaggttacagtgagccgaggttgagccactgcac

SEQ ID NO: 2458 - DNA, 555 bp, Homo sapiens
tagtttgtcattgtgataatagctgaaaacatagcaaatgctaccagagttaagtttatcttccaagatatgagtagattatgaataatattagaaaaagaaaataagcatattttgatagtactaaaacagatttacaaataaaatttactcaaaattcaaaagcgtcattcctacattgtttcattcctccaagggccagtgaaatatgattggcaatgtttttctttgacagactaatattaggatcattaaagataaagaaaaattttaaatgattgtctagtggttatcaacgaactgattctaaactttatgtagaaatgcaaaagacccagaatagctaacacaatactgaagaacaaagctggaggactgatactacctgactccaaggcttcctataaagccacagtaatcaagacagtgtggtattggctaaagaatagacaaaccaatcaatgcaacagaacagagagcccagaaggagacccacataaatatactcaactcgcttttgacagaagagcaaagggaatacaatggagcaaagag

SEQ ID NO: 2459 - DNA, 515 bp, Homo sapiens
cagaagggtgaatcagaccttttgctgcatcctcattgtacctgtgtgcacagaccacaactgcaccacctatatactacatacttgaggcatacatttatcatcactcctctgggtttcttccttatgagactgtaataatgtaggggaaaggcagacctggcccctgtctttatacccccagaacctagcacagaggctggtatgagtaaatgataagaaaattatactcaaggacgggtgcggtggctcatgcctataaacctaggactttgggaggccgaggtgggcagatcacctgaggtcgggagttccagaccagactgaccaacatggagaaagcccatctctactaaaaatacaaaattagccaggcatggtggtgcacgcctgtaatcccagctactcgggaggctgaggcaggagaatcgcttgaacctgggaggtggaggttgcggtgagctgagatcatgccatcgcactccagtctgagcaacaagagcgaaattcggtct

SEQ ID NO: 2460 - DNA, 519 bp, Homo sapiens
tagttaagagtttatgtgccatggtaatggcagagaaagctgaaaaaacagaagactggccataaatgaatacccaaaagatcccagaattgaagccttcatctccattaggaatagagctttttaataagaggactgtaagtttaagaaatgtgaaggactaccttccctttactgtggtatttttatagtacattatccagctcttggttcactctacaagtgaaagagaaatcagatgataattacaaagaattaggattatgcgtccagagttctaaacacaagggtgaattgaatggtgtatataaaaaatgtttttattaatatggtgaatgaggccaaatgcggtggctcacatctgtaatctcagcactttgggaggccgaggcaggtggatcacctgaggtcgggagtacgagaccagcctgaccaacatggagaaaccctgactctactaaaaatacaaaattagctgggcatggtggcgcatgcctgtagtcccagctccagctactc

SEQ ID NO: 2461 - DNA, 492 bp, Homo sapiens
attttcctggattctcagcaatgttagaacacatggagacatcaggaagctcagagtgttaggaaaccaagaaaattaagaactttaaagtactgcaagttgaagtacaaggggtcagagtatggaagaagtattcagatccacatcaaggcaaaaatgaaaatttctgtgatattttccacccaagtgaaaagaaactgctggagtatagataacatgtatttttttatttgttctgttgttcttcaattgactgtaggaattaagagttctgccttttagaataccctgggcatctctttaaaaactggacactaaagggcgagacttttttaaaaaaatgcgtctagttgtcccatggccctgcagttcccatgaaaatgccttttttagctgagctggtggaaacctttcattccctgtggtctgtctctgaacggaagagggaaactgatgcattaaaccatgggttgatgacacatggatttgact

SEQ ID NO: 2462 - DNA, 156 bp, Homo sapiens
aaccttctatccctcatgttagacacaaggaaaccagggccaaggaagacatagttatcactcagctccttatgacttctgacttgatgccctctgtagaatatttcaccctgctatagagacttttcttaaaaaaaaaaaaaaaaaaaaaaaaaa

SEQ ID NO: 2463 - DNA, 265 bp, Homo sapiens
ctttgtcaacagggagctcaggagtattaattataggaaaccgtatgacataaactgcagggcagtaaggttctattcaatcagaagtcaaatcattctctatgtataaatacacaaagaatcctgcccttgatgtgggaagtggcaaagcccttttacctatattaccaccataactgagtctgatcctattcctaaacatatacacatatcacatgtatctacatttcatccaaacaagattcaagacttaccttcttctgac

SEQ ID NO: 2464 - DNA, 321 bp, Homo sapiens
gtgtaactctctagatgggactgggttcataagacttcagttccattggtgatgtacaggctgcaaagcacagcacagcgtaggaagggcactacatccatcggatggccattcagctcttcttcccctgctcttccagctcagcccacttgcacctattgatacattttatctattgtcttttaaaaagtgtattgaggtaaaattgttgtacaataaactgcatccatttagagtacacagtttaatgatgcatttcctgacaaatatatatatccatgaaaccaccaagataatcaatatatagaacatttacatcat

SEQ ID NO: 2465 - DNA, 385 bp, Homo sapiens
  misc_feature 252: n = A,T,C or G
agatggggtttcgccatatcacccaggctggtctcaaactcctgagctcaagttacccacccacctctgcctcccaaagtgctgggattacaggtgttagccaccatacctgtcctacttctaactgatatacatgcatctggggacctctgagaaactctgaacagcaaacaattgaaaaaagaaatttctaaaaaagaataatttttcagcacctaaacttctgtatgtgaaactataacaacaacctanaatgcttctaatacggtaatggccctatttctctgcaaataaggattgctcatgattcttacactgcctttcaattaggattatacagctccattcctcattcaagcttccaatacgtgcacctaagtatcat

SEQ ID NO: 2466 - DNA, 495 bp, Homo sapiens
tatgtatttcccacaacacctggacctcagagccgttgaatatgtatttgttatatttacttgaaaagtccaaaaacaatttgctcattaaatttgtagaagacttggaggggctaggaggagtggtccctaattattagttgtagtagctagtaagttgaatgtcatagtcagaattataaaagttgtcaaaagatgaaaaccttataaaaatcaaaaataccaacacctgaattcaaaaatacagaaatcaaaattaaggagagaatagatgtgtttaatagcatattacacatagctgaagagagagctagtgaattggaagagagctcaaaagaaagcatcaaaaatgaagcacagaaaacaacaaacagaaaatgcagatgaggctcagaaacagagacaggttgagaaatacaaatattactgtgttatagttgcctacagtattcagtacagaaacatgctgcacgggttttcagcctaggagcaaca

SEQ ID NO: 2467 - DNA, 389 bp, Homo sapiens
ctctcagattaacccagacaaagcaaggcttactgcagtgaatcagacacctcaggcacaggtcagaacacatcacgtggccgggactccctgggactggcaccatcacctgaagtccgccctttagaagaccagcggatgctctgtccatctctcaagagccacatgtctctctcacagggtttccactgctccattctctcatccagctttctcatcttgcatgtgattcagccagctcccagctcagctccacattttaacaaccagcaccggcccggcacggcggcttacacctgtaatcccagcactatgggaggccgaggcaggcagattacttgagcccaggagcttgagaccagcctgggaaacatgatgaaaccccatat

SEQ ID NO: 2468 - DNA, 435 bp, Homo sapiens
gtgggagactttcttgtggatcggggtgacctttacattcattagatgccagtaaccacccctcctgccacacctccagttatgacaacccgaaatgtctccagaatgactccaagggacaaaaatcacagccccttgagaacccctgttctagacagatattggcccacccacctatggcacgctgcagctgtgaggcagatccagcaccgttgggcaggtctccactggctctgcagactcttgagtgtttcacctgaaaaaaacaaactggataggtcacgggtggatcgcctgagtccaggagttcaagatcagcctggggaacatggtggaacccctctctaccaaaaatacattacctaactggacatggtagcacttgcctgtagtcccacctacttgggaggctgagttgggaggatggcttgagcc

SEQ ID NO: 2469 - DNA, 473 bp, Homo sapiens
  misc_feature 234: n = A,T,C or G
gcctcccgagtagctgggattacaggtacctgccaccacactcggttaattttttgtatttttagtagagatggggtttcatacattggccaggcttggtcttgaactcctgacctcatgtgatctgcctgtctcagcctcccaaagtgctgggattacaggcgtgagccactgcgcctggcccaattcataacatttaggtatgggatggagtgtgatatgggtgtaatgtangcatgggggatggggagggaatgagaataacattaagagttttccatatttataacagatcctaaaaattaaaatgcaaagcaatttagaatacattgataagtaaaaagaagaaaataaaattacctaataatgactgagaacaattttatgtctaaccgacaaattcatttccacacacatatatatacatttagattattttatacacacacacacacgcacacacacaaaaaata

SEQ ID NO: 2470 - DNA, 458 bp, Homo sapiens
gatatgttcctaaacttttgaggcgacatcaaaaagcttagttgcaatttgttgcttaattgcaattttgtttcttgttcctgttgtcaagaatagaatgttggtctgaagacatcaaggagggactggactactcaagacagttgtgggatgtataaatatatcaccatgtgtcataggaacttaactaatttactttttctttttttttttccccttgcaaaatggccaaagttttctggtcttggatgagcaacgatttgcaaaagaaattcttcccaaatatttcaagcacaataatatggcaagctttgtgaggcaactgaatatgtgtgagtatggacagcagtttattggagtaccattatcagctactgatgaagccattttttttcccattagggtggtaaaggaaaattattccatacaagcaccaccaaattttgacttgtttattt

SEQ ID NO: 2471 - DNA, 509 bp, Homo sapiens
gtaattgaaacatacggtacctattaggacctatctgcacatatgtaactgctcatttcatctgtacaaatgactgcttacttaagcaaatggcaggtctgagtgctcatgttgggaaattttgctaggaagtcatttccttaggaaaggctatattcacatcctcaaagtgctgaaaagtctaggaaacacgatgccatggatgcataaaaagagggctggccaggatcggtagctcacacctgtaatcctagcactttgggaggccaaggcaggtggataacttgaggccaggagttcgagactagcctggccaacatggtgaaaccctatctctactaaaaatacaaaaattagctgggcatggtggtgcccacctataatcccagctacttgggaagttgaggcacgagaattgtttgaacctgggaggcgggaggcagaggttgcagtgagctgagattgcaccactgcactccagcctgggtgatagaggaagactctgtccc

SEQ ID NO: 2472 - DNA, 520 bp, Homo sapiens
agcccctttctagagggagctgatttcagtggtgggagattatttgatgtctcttcttgtttggtctctagtgattccattgaacctgcatctgagactgtgggtcttgaaataaaaatcctgtttatggagaaatgttcaagatggttatttcatcacctataaactattaggagtttatgagaacctacatttagcacaacctaaaactgaagttatctctttaagtttctcacgttattttgtatattaagattcaaaaccaaaatatcattggtctaaacattgttagaatagaaccagactatgccaatatcactaatatagaaccatttaaaagaagccaggcgtggtggtccatgcctgtaatcccagcactttgggaggctgaggcaggtggatcacctgatgtcaggagttggtgatcagcctggccgacatggcaaaacccccatctctactaaaaatacaaaaattagccaggcgtagtggcaggtgcctgtaatcccagctacttggg

SEQ ID NO: 2473 - DNA, 484 bp, Homo sapiens
ggcccaccaggcagcgctggaagggactttccaccacaaaccgttcccacccccaggggtgccagcaaggatgaatagggcccatcaacaccaggtgacctggataaatgttctccccctcacaagcccagggtctccctcctccccctacacacaccgtgaggcctggggaagcactgtccaccctgcaactcagggttgctcacccacctcccaaaaactaagaagcaccaggagacttgaggaaatgcactccacccttctgagtggcactagcaaacagtgagcattctgccaacaccaagtggcctgagaggtgccctcctgcaggaccagaatcaccccccactcaaagacaataacaattacaaatactcttgaacaaagtgaaaaaggagaaagacttagcaaataaatagaagatacaaaaagaatcaaacagaaattgtggaaccccaaaaaaaaaaaaaaaaaaaaaaaaggg

SEQ ID NO: 2474 - DNA, 643 bp, Homo sapiens
aacagctttccctaaatttcttcaccagttcgcacaattgcataaggagtaatctccacaataaatctcttatttcatattgatgataatagttctgattatttgaatgaatcctaaccattacatcccacatcagaccttatgtaggtcttacatatgaccttggcagcacgggtagattaccactgctgtgatgtgattacactgattcaaagatgctataatattttatattctgtagtgctgaaattgagaattaccaaatctagcatgagcagtgaaattagaggcattttattactgcaatatttatttatagctacctatttatatggtagctaaaagaactcctagaaaaaaatagactctacaattatttctgagaattttaatacttattaattggtagaacaaatagaaaatcagtaaagttatagaaaacgtgagtaacaatattaaccaaattattttaccaacctaaaagacaattatggaacagtccatccaacagtaaaatacacattctttttaaggccacacaaaacattcacaaagatagactggatttgaagctataaaacgagtctcaaacatttataaatagttgtaataattgtagcagtggtggatttacacaagtaat

SEQ ID NO: 2475 - DNA, 555 bp, Homo sapiens
caccacgcttcctgtacagtctatggaactgtgaacaaattcaatctcttttctttataaattacccagcctcaggcatttctttatagcaatgtgagaatgaaccaatacagataccagcaccaaagtgcctaccgtgaactttttcctacccaggaaaaaggaattctttattatcatcagcctctaaaacagggctttctgttacttgcctctgtatgaactccaaactgacacgctatctaatttatgctgagagcacagctagggaacatgcccaggcatgcggcttttacctactgagctggacaagattgtggaagtgaaagtaaaatttgaagattggatgaaagatgttaaaatcatgggaaggctgactaatttgagaatactcagacatctcataggtgaggaaaatgacagtattaacattaatacaaagaaggtgatcagtcaaaacattcctcacgagaaaaggtcctttggcaaatactttcctttaaagtaaatgaatataacaggccaggcacagggctcacgcctgtaatcccagca

SEQ ID NO: 2476 - DNA, 614 bp, Homo sapiens
gtaagaacaggtaggatgattccactttgaggaaaggtactttgttactaacgttggtaagacagcttctgctataaatgctcttcacaatccacatgtagagaattctggacaacagtatcagtccagatgccagaaaatgcacagtgagcatgacatgctcatcggctgaggtattctgacttcagctaaggacgcaatgatattttacttgagattcaggaatgcagaggatagattctgtgggagaaagaaaagctttgtttaagtaactgatctaaagacattacaatgttagctgctttcactccttcaaatcccaaatattgcctaatatttgatttgctttgcattgagaatttggaagtaaataagatatagtctctggcatccagagggtcacagtcaaataggaaaggtatggatggatattacccaaaaatatgagagattctttaagtttggaaaacttaaaggaaaaggcagattgattctctagtgctggctgcaatgggcgattcctcagagaaggcaggagaatgattgtcacctgagctaatccttgaacacatagaaattctctggacaagatgcaaaagtattagaaacagaga

SEQ ID NO: 2477 - DNA, 434 bp, Homo sapiens
tttcactaccaaaatatatgaaagaactctaattaatcggctttaagaaaaagtgcttgaatcaagtattttatcagaaaaataggaactgattcaaatgtcttttagttcacatgactggtaagtatttggtaaataaaactagtttgttggtttaaggaaagcagccatctcttctaccagcaaaaatacccatgtattttaacttgagggttttacaggctgtagaaacgatgaacaaataaataacttgagttgatagctagctttttaaaataagctactcaagcataattattaagaatgaataaattggctaggcatggtagctcatgcctgtaatcccagcactttgggaggctgaggtgggcagatcacctgaggtcaggagttcgagaccagcctggccaacatggcaaaaccccgtctctact

SEQ ID NO: 2478 - DNA, 627 bp, Homo sapiens
tgcgcctgtagtcccagctacttgggagactgaggtgggaggatcccatgaactcaggaggtcaaagctgcagtgagctatgattaaaacctgagctccagtctgggtgacagagcgagacctgtctggaaaaaaacaaaacaaaacagaaaagaaagtgttgagtgaaaacgtcttcaggtgcctttcaccttgagagagggcacgaggctgagggcgccttcccgtcctccgaagcctccatccctcccctggcattttgcctttcacactgtaatttctttcttgagaatcagccgaccgaaattaagtctcccaaattcctgagtaagccgaaaagctatttttcttgcaaatcttagatgaacataatttaatataaggcataaactaatgcaataaagaccatatattacagcagtggcacaattaaaaagcaaaagccgacggaagagactgacagacagcgtgttaaccacagggaaaataaaatagaaataagaggtaggttatattctgtgcataaataactttaaagaggaacaataaatgacttctataacttttaatatatgtgttggagattatttaattgcagtgaagtaagaagtgataaattgagctgaa

SEQ ID NO: 2479 - DNA, 455 bp, Homo sapiens
tttctctcctccaatccgttctatacactgtttctagttaaaatccatacaaccccccgcccccacccaaagaaattcccagcttgacatttgtgataatttcacatatattttaaaatttagacttgtcttaccctgagggtgtttggttctcacaatccaaatccattttccaaaaacatttattacatttttatccctgctctagcaaattaccatggatttagtaacttaaaactatacaaattgtgggctggacgcagtggctcaggcctgtaatcccagctctttgggaggctgaggcgggtggatcacctgaggtcagaagttcaagaccagcctggccaacatggtgaaaccccatctctactaaaaatacaaaaaattaaccaggcgtggtggcacatgcttatagtcccagctactcgggaggctgaggcatgagaatcgcttga

SEQ ID NO: 2480 - DNA, 655 bp, Homo sapiens
gagctcccatagcaatgtcatacagtcacagtgatttgagtaaggtgactttgcttatgggaaataaactgtattttatcaggcttatttgaatgacattttgataacctctgtgttatgatactagaatcattaagacaatacaataacctacaaatatctcatctgtatgagcttgctcaatgggttttgactgagtactttcactgagactgttcactgaatcagtgttattcttgaaaggacatagatctattatcatatcttgtaaaaggttcttttttccctctttctcagcctgctaaagaggttaggatttagtttcaggacagatggggcatatgatactaggggtaggtagaagtactcagtctgacaagattaaaggctattgaacttagtttctctcttcttcctcttctaaattttgaattgctttatcctttacttttccatttgaaactcattgtgggtagtgcagtaaaagcagtggccctggtgctcacacatgtaatcccagcactttgggaggctgaggcaggaggattgcttgaatccatgagtttgagaccagcctggacaacatagtgagacctcatctcctaaaaatgtattagctggacatggtggcatgcacctgtagtctcagctactt

SEQ ID NO: 2481 - DNA, 631 bp, Homo sapiens
  misc_feature 504: n = A,T,C or G
gacagaaggggtcacaaggtcttctcacccttgccaattatagaaagccattaatttgaaacccattaaaagccaccttatgatcaagaaaggatcaagctgaattaaattttccagcccaggaatattgatataactgaaacacaagatggaaaatctggacttgaagatcccaactagcctgcgtgttctcaaagccatgtgctgagaaaagaccccaccctgttcattttaagccttgtacttgtactttcctttgaaaacattgaactttagatttatttgactgaaaaacagatcttaaattttcccctcaaagatttttaattaggatatttccaactaattccttttattttaggaatggaagtaaaagcaaatgtatactaattctgtcattgcttgtttagaagagaatgagtagatgcttatctacatcaatagaaaattaagtaacgatataaaattataaacacagctactagaaaaacacaaacgtcccanataatcagaaagaaacacacatacgacaaagaagaccacttattgaaagataaaacaatgaaatacatactaaaagcaaaaaaaaatgaaataaggcatgtgtgaaaataagactgaatcacacagc

SEQ ID NO: 2482 - DNA, 478 bp, Homo sapiens
tatttttcagatatggaaatagtaattaaaatctctaattgtcctaaatttacataattatggattaatgcactcaaaatttgaaatcaagtcttcaatactatttatctttctttccaattagtaagtgaaggacttatataaaataagttgatgtttaaaaaatttaaatttggaataaagagaatgtaaatttgggataaagagaagataggaggatgtaactacatgggaaagcaaaggtgatatgaaagagaagataatggcacagaatggaaagtaatggcaagaaaagtgaaattctgacggacagaacttttaacttttctacacttttgcctaaggaaaatattaaatggagttgccttccatttgcccaggcccctttatatagcactcatattgagattgaaattagaaatatagaagtaaattacaaggaaataacttctcagcattgactaaaagagactcaact

SEQ ID NO: 2483 - DNA, 447 bp, Homo sapiens
tacaaaaaaaaaggaaatggaaatattaaaaaccaaaccaagacttcaatgtgaagtcttcagttactcaccaattgctaatgcaattgtgtctagttttgagattagggatcagactgtgcctgtgtccatcctacagaaaaatcatctatttttttccacactgaaatttaagagaacttactgaagttaacatattccattctgggaagtgaattataatgtgtaattattacaattaccacaactggaatgtaacagggttatttttcagagaacagaatttgtcagaaggagaaggaagaaaaagagattatgaatgattaaataaatttctattggatatacaaaaagtcaaaacttttcaatacatacagcttagcttctagaataactatttactgttgagactctctttccaaagttatttgtgctactccttcttct

SEQ ID NO: 2484 - DNA, 480 bp, Homo sapiens
actgcttgagcccaggaggtcaaggctgcagtaagccttattcaagccactgcactccagcctgagtgacagagtgagaccctgtctcaagtaataataataatttatcctcaaagaccctacagtctagcaagggagagaagactattcacaaatattccttttgcaagtttaaaagtgctcaaaatcacaaggaagacataactaaaatgctatgatggctcaggaaaggaagaacttgcctctataagaatatgtaatcatactaattatgttttcataaatttagtgaggcatcatagcatagttataagaaggttaggcatggtggctcgtgcctgtaatcccagcactttgggaggctgagatgggaggatcacttgagcccaggagttggagacaagctggggcaacatagtgagattcccatctctacaaaaaacaaacaaaaaaagtagctaggtgtggtggcatgcacct

SEQ ID NO: 2485 - DNA, 574 bp, Homo sapiens
ggacgccgaggtgggttccgggagacccgcgggtctggctgcgagagattgggtaactcaaggcgtccctggagtacactgaggataagtgtttgagaaatgctgtctgaaggaatgaagtcagtctatgacaacgtctctctgccgtgaatcattcctgcagatgaaaaagtgtgacttggcagctgatggagtctcgctctgtcacccaggctggagtgcagtggcgcaatctcggctcactgcaagctccgcctcccaggttcatgctattctcctgcctcagcctcctgagtagctgggactacaggcgcccgccaccacacccggctaatttttgtatttttagtagagatggggtttcaccatgttagccaggatggtcttgatctcctgaccttatgatccgccctccttggcctcccaaagtgttgggattgcaaggcgtgagccactgcgcccagcctccaggcctcagttttcttatgtgtaaatggggatgataaaacccggacctgcctatgaacggttcagttggatcaaagtagaatgagtgcagaagaagaagcatgat

SEQ ID NO: 2486 - DNA, 571 bp, Homo sapiens
gcgtgcctgtaatcccagctactcaggaggctgagacaggagaatcacttgaacccgggagggggaggttgcagcgagccgagattgtgccactgcactccagcctgggtgacacagtgagactccctccgggcatctgctggtttgaagaataatttatgggctgggtgcaatggctcacacctgtaatcttgacaccttgggaagccaaggcagacagatcacttgaagtcaggagtttgagatcagcctggccaacatggcaaaaccctgactctcctaaaaatataaacattagccaggtgtggttgtgcatgcctgtaatcccagctactcgggagactgaggcatgagaatcacttgaacctgggatgtggaagttgcagtgagccgagttcacgccattgcactccagcctgggtaacagagtgagaccctgactcaataaataaatacataaataaatagaataatttgtggtcctggtagccaggatagctgagcactgcctctggccctctaagaatgattttttatactttactgtctgggtcagagtcagcttggactc

SEQ ID NO: 2487 - DNA, 594 bp, Homo sapiens
tttatactgcccattgtgatagataggtctctttaccactagatggcctgatcatctcaaaaaatgaaggaaagcaattggtgactctggcattaattgccctagaagtgaagagaactatttcaagtaagcgtatggaactgaaatattttaatcataacaaataagctttaattggctttccctgatttctttagaaaggattattctcacttctgctaatgtatcttagttaatatctctccattttatgtttttcccacatggtatatgctatttattactattgccttttaaatttttcagactatcttgctatggtagtgattaggaataagctgtctaattcccattaccacacatctttttaaaccgtatacttgtagcttcatcattagaaagacattcattgtctttcaaaagtttcattatggctgggtgtggtggcttacgcctgtagtcccagcactttgggaggccaaagcaggtggatcacctgaggtcaggagttcaagaccagcctggccaacatggtgaaacccagtctctactaaaaatacaaaaagtagctgggggtgggggcatgcgcctgta

SEQ ID NO: 2488 - DNA, 541 bp, Homo sapiens
gcacctgtaatcctagctactcaggaggttggggcaggagaactgcttgaacccaggaggcagaggctgcggtgagcagagatcgtgccactgcactctagcctgggcgacagagcaagactccacctcaaaaatatatatgtaataataacaataaattaaataaataaattccaattcttggccaggcacagtgactcacacttgtaatcccagcactttgggaggctgaggcgggaggatcgcttgagcccaggagttcgaggctgtggtgagctatgatttcgccactgtactccaggctgggtgacagagccagactctgcctctacaacaaacaaacaaacaaaaatttgattcctgtatatggcactttctatgtagctgtgtagctggtggaggagaattcctggaattcctaataactccactgaagatggtctggagtcttccctcagagctcagcgcagagaaggtttgctcagcagagcaggtatgcaaggcagaaggcctggctttgcaggccgaccaattcgcttct

SEQ ID NO: 2489 - DNA, 532 bp, Homo sapiens
ctctaggtcaagatttatcttctctaaggtaaaactcacaagggactgtcacattgttgggtgtgtataaatgaattttaaaaatcgtaataggccaggagatggcaccttttcctttaacataagctaaaaggatattttgtgagaactggaaattaaattagggccagccatggtaatgagctgtcaataagccagtcaactataacagagttaaataatatagtatttaagaactggagctggagtcttcattttctctatctttgcacctttacctaaacaaatacatacaccagtaatcttaataatcactttcagggaactgatgatttaaagttattgaatcaaggccaggcgcggtggctcacgcctgtaatcccagcactttgggaggtcgaggcaggtggatcggatcacctgaggtcaggagtttgagaccagccaggccaatgtgatgaaaccttgtctctactaaaaatacaaaaattagccaggcattggtggtgcacacctgaagtcccagctactc

SEQ ID NO: 2490 - DNA, 89 bp, Homo sapiens
ggctgagaaagaggaccgtctgtaagctttcagaagaagaaggatcaacagttggaacgacttcagacttcttgggagcaacgctggga

SEQ ID NO: 2491 - DNA, 608 bp, Homo sapiens
ctgggtgcagtggcaggcgcctgtagttccagctactccggaggctgaggcaggagaatgatgtgaacccggagggcagagcttgcagtgagccgagatcatgccactgcactccagcctgggcgacagagcaagactccatctcaaaacaaaaaacaaaacaaaacaaaaaacaaaaacaaacaaacaaaaaacaacaaacaaaaaacccttctatacatgccattatttacattggtgcatactttttcccaaaaacaaaatccttacagtagaattttgggtcaaatatgtgaaagtaatttagagctttgctatacctttcaaactgaactgacttatactcctacttgtgcactaatgcttttgtaacactatgcttttataaaaagtaataggagggccaggcatggtggctcacacctgtaatcccagcactttgggaggccaaggtgggcagatcatttgaggccaggagttcaaaactaacctagtcaacatgatgataccccgtctctacaaaaatacaaaaatcagccaggcatgggtggtgcacacctgtaatcccagtcactagggaggctgaggtgggagaatctcttgaaccc

SEQ ID NO: 2492 - DNA, 516 bp, Homo sapiens
aacccagcatttgggcatctagaagccttcccaagggctaaggagacacctgaaaaatgagaaagagttacagagccaggcccttaagttggccctgccaaccactctccaaaacccttagatttttgctgcctttgcccttgacactgtcctttccctggagctgaatgtctgggggtagaggaatgactttaaaagtcgaggatcaggcctggcatggtggctcatgcctgtaatcccagcactttgggaggtcaaggcgggtggatcacctgaggtcaggagttcgagaccaggctgaccaacatggtgagaccccgtctctactgaaaatacaaaaattagctgggcgtggtggaagccacctgtaatccaagctactctggaggctgaggcaggagaatcgcttgaacccgggaagcaggggttgtagtgagccaagatcacgccaccacactccagcctgggtgacagggccagactccgagtgttccaaaaaaaaaaaaaaaaaaaaaa

SEQ ID NO: 2493 - DNA, 315 bp, Homo sapiens
aactaggtcaaaacttcccttaacttaaaggtggataaacaattctatttcacataaaataccatgaaattgaaaagatgaccaaactcacaatttcccattagaaaatacctcagttcattcaacaataaatatgaatgaacatttacgaagtgtcaggtgctccactaggagctgtgaacacaggacagaataaaacagacaaaagtacctgtcctcgtagcttttcttaaggctttctggaatgaactaaaacattaatgaattgttaatatgaaaaacaaactagttttcttcattaaatgggtgtagttg

SEQ ID NO: 2494 - DNA, 408 bp, Homo sapiens
tttcctggaaaatataaggtcattagaaaaatttaattccatttaatttcctccaaactttcatgttgattgttaagtattttaactctatataatttttaatcatcataagatttcattatcatggccaggcacagttgcacacatcctataatcccagcactttgggaggccgaggtgggtggatcacctgaggtcaggagtttgagaccagcctggccaacatggtgaaactccatctctacaaaaaatacaaaaattagccaggcatggtggcacttgcctgtaatcccagctacttgggaggctgaggcaggacaatcacttgaactcaggaggcagaggttgcagtgagccgagatcatgccaccacactccagcctgggagacagagtgagacttagtctc

SEQ ID NO: 2495 - DNA, 197 bp, Homo sapiens
atgttggaaagtatatcgtgaatggtgatatttgggagcctccatttccaacttgattcccagaatactggtagcaaagattttaactctcaggcaggggactgaacgaatattgctctgggaaaattaaaccactgaagattgtgtgtgtgtgtgtgtgtgtgtgtgtgtgtgtgtgtgtgtgtgtgtatttcttt

SEQ ID NO: 2496 - DNA, 355 bp, Homo sapiens
ttttcactatgttggccaggctgatcttgaactcctgaccttcaaagtgctgggattacaggcatgagccactgcacccagccggacttatgttttttactgatcagaccagacagtgctcagagtaaagacaccaggaatctcttggtgtcatctgcagaggcagaactggggtgcagcgttttaggctcgctgagactcccaggggccttctttcttcacaccattctaaatgccagatataggcacatggaagtcactatggaaaggaagacaaataaaacaaagtagtctatgactttcattatttggttgtgaaaaataacaataatagattttattttatcttgaagga

SEQ ID NO: 2497 - DNA, 443 bp, Homo sapiens
atatttttttagagaaggtaagctcagaggaacttttaatataccaatcgatgttaataaaacacaagtcaaagacaagtgtcaacatgctttcaaccaacattaatgaggaaacaagacacaaattctttttctttttttattttattttattttatttttgagatggaatctcgccctgtcgcccaagcttgagtgcagtggcgtgatctccactcaccacaagctcctcctcctgggttcacgccattctcctgtctcagactcctgagtagcggggactacaggcgcctgcaacaacgcctggctaattttttgtattatagtagagatggggtttcaccgtgttagccaggatggtctcgatctcctgaactcgtgatatgcccgcctcagcctcctaaagtgctgggattacaggttgagccactgagcctggccct

SEQ ID NO: 2498 - DNA, 413 bp, Homo sapiens
acctgagtctgcaggttgagtgagaagagagttgttgacagctgagtaggctaagagtgtggctacagtcccaggcatctcagctgcaggtatagggagtatagaagtgacactgggagaccaggtggcctggatctgactggaggaggtgctgaatgccaagctaaagagcctgagtgttattctacaggcaatgacagcccaagaaacaggatatcacaaaggttaagaacaaggattctgggtttgaatcttggctccatctcttaagagctgtgtggcctttggcaaggtacccaagctctctatgcttatattttctcacctgtaaaatcagttgtagtgagaattacatgagtgttgatatgcaaagtgcttagaacagtgcctggcacatagtgacatacataagt

SEQ ID NO: 2499 - DNA, 438 bp, Homo sapiens
ttcatcaatattccattgaacacaattttatgtagggtgtgttttcatctcctgtaaaggaccctaacattccatagaatattatattatagtaggcacatttggcaatgatgacagtgtactgtatttttcttgtaactacatctccgatgaagtcactgcagtcatgacaaactccagtcccactggaatgaggttcagagaacggactaagaggtaggacatggtctaagggaaagggttctattatctgtcaaaaccaggtaaaaagggaaggtttctagttctttgaaggctaaacgattaggttctgatggcttttaaatgttgatcatttattattaatatgaaagatcattttaaaatgtattatcttcttgtcttctcacttttgtgaacacaattgtacatgctagaatttagcagattcaggacact

SEQ ID NO: 2500 - DNA, 393 bp, Homo sapiens
ttctccatgttggtcaggttggtctcgaactcccgacctcaggtgatccatctgcctcagcctcccaaagtgctgggattacaggtgtgagccaccgcgcctggcctgattcttttgcttttcatgatatatcctgtgtaccttgagttttttaccaatgaacatgtattatttgcagagtaattttctaagccatatgaaaatgcatacagaaaaaaaattacactgccagattaatagtaggcctcaaaactatagaaataatttaaggagaaggagtaagaaatgtcatctgagattgtctttcaagataaaagacaaacataacagataaaaaataaatatatgtgtgtgcacgtaactattaaaacattataacaccccgggctcagt

SEQ ID NO: 2501 - DNA, 610 bp, Homo sapiens
tgggaccctgacatgtccatggagaggagctgggtgagggagactgactgtgagcaacccagaggagaaaggagttgggggactgtcatggcccatgccacaattgctgtacctcctacctgttctgacattgcatttggcaaaagaggggttggattctggggtgtgagaaagaaaaaaaatgtctctgggcattgagcaacctctctcagcaacagcactcctcagaaagggtaataatgtaaacattcacccattagaggaaaaaacttagcctttatgccaccctctccaccattaacaacattggcagccctattaaagtacaagtcagatttgtgtttaatgatcttgaaagtaaagtaattgcttgagtgttaccattcaaatgttcttagaagtgcagataatatttacaattggattgtcctttcggaaggggtaggcaggcagccttcctccgctatttgaagctgaggctggggagaagtgacttcagcaattggcttatgggtctaaaagctcagcgtttattttcgtttcttcttttcaatatcaagagactccagagcattagccatacctcattccttcaaggaaggagatgctg

SEQ ID NO: 2502 - DNA, 343 bp, Homo sapiens
aaggtgaccaactttgctataaaggtgttggaagtaggaagcattccaacttcctactgaggaaggttataaaatctgtaatgctagagatcttttcaggagccaccaaattgacaactatatatttgtgaatagtttaaaggtacagttttgcttacaataaggcaacaggactagttaatttatagttgtgacttgtgtgggtttttaatgatttttatgtttttaatgtgattttaatgtgattaataatatcttggctaaaatggatacagtgacaaatagtatataaaaatttgcagccgggcgcagtggcttatgtccgtaatcccagccctttggg

SEQ ID NO: 2503 - DNA, 263 bp, Homo sapiens
ccatgtttcgcccaggtttgtctcgaactcctgagctcaagtgatctgcccaccttggcctcccaaagtgctaggattacaggcatgagccaccgcgcccaaccaagagcagagtttagatgtggtacccatggagacgcagactaacaataggtgagtggatacagttgtgactcagtatataaaatcttttctttggaaggctattgatgacacctcagatgccatgctgagagcatggcaaaacaatgaatgtggccggg

SEQ ID NO: 2504 - DNA, 571 bp, Homo sapiens
ttatcaaacgtatacttaattctttgaatgtgttagtatgtgttcaaagtacaccttaattttatatatacatatatttaaattacataaaataaataagccactaaaaatttttaaagattttcttatatttcctttcagtatttttatgtgcatgcatctgtacttggtaatattgttgaattcatgtttgcattgacaaagcctctccccttgcccaaactctagtcaggatcctctaagcctcctctcagccccagccttcagtgttcatcctagtctggcccacatctctcaggtttagtaagaaacttgcaaagaatcccctactctcagtactgatcacctttgatatctgatcaaatttgttatctcccaccaccctccagatgatttctgatcagtctggcctgccttcagtaagaatcctgttcgatctgtttaacccaaatcccctttgcccctgatgtttcctcttagtatccccagttgagccaattttcaaccattaaaaaaatcttggacaaaattaagttcagataggttccagagtgcttatgttcagttcttg

SEQ ID NO: 2505 - DNA, 555 bp, Homo sapiens
atttttgtttttatttttgtagagacagtgtcttgttgtgttgcccaggctggtctcaaaactactggcctcaagtgatcctttgtccttgactgtccaaaagtctgggattacagatgtgagccaccatgcccagccaataagtatattccttcgtttatattaagcgttacatttagagaaattacctagttccctaattcctattttctgctcctccagctgagttacctcggagaggcaacttaacctagatttgctcactcataaaatggtaatactgcggtggctcacacctgtaatctcaacactttgggaggctgaggtgggtggatcacctgaggtcaggagttcaagaccagcctgaccaacatggagaaacctcgtctctaccaaaaatacaaaattacccgggtgtggtggtgcatgcctgtaatcccagctactcgagaggctgaggcaggacaatcgcttgaacctgggcagtgcaggttgcggtgagccgggattgcgccattgcattccatcctgtgcaacaagagtgaaactctgtct

SEQ ID NO: 2506 - DNA, 346 bp, Homo sapiens
gtgatatgccagatgttacaacaccaaatgggttgccattcaattctggatttaagctaaatgaactggttgactaactggattgatttgtcattagacttacatgtttctaacttcttaaaagcatactttaattttcatctcccttatatgccattgtgtgaatactgggtaactctctacattgtaagcagattttaagaaatctgcatttaagagatttttgttcaaaagtagatttaattcacaaaagcctatatagtttgtcgttattgctatatgatttttccaggcagacctgtgtaaaaataatttcaggcagtgggaagagcatgtgcaaaatcag

SEQ ID NO: 2507 - DNA, 496 bp, Homo sapiens
aacaaagtggatgatggttgggcaatctttctccatatcaggattcttgggtttaaagacatagcactccttcagcccttcccgatcaaacacataaggatcaatctttggaaaggggagcttgttcattttagcccacttttctgcaagtagaagttcctatgggaaagatggaaagatgaatttggaaattttcagttttcattgattcagttggtctgaccataattcagtgttcactaggtgtctactgtgtgccagcaatgtactccttgctaggatgaatcacgaccctgttctcaggaagttcattaatttcaaagaaattgaaaacaaactcactattgttatgttaattcttggcacaaggctagctccacagcaggcatttgaaaaattattgataaactgaactgagcaaaattatgttgaagaagctgctagagaaaaaaaattatgggttcagagaatttataaccatgtgaaagttttttta

SEQ ID NO: 2508 - DNA, 463 bp, Homo sapiens
cattttctaaggcccatgcccattttataattttgttttgttttcacatcggtcttcaccaaaatgcatacttcaagaccacagcttattcatttttataaccatattaccaaatactgcagctgtcacacaatggatactcataaaatattggagaataaatattcagggaataagttcttgtgtagaatgttgatagttctctgctctatattcccagccctcgaaggagcctgccaggatgaattcttccagcttcattcttcatatgccttctctgcctcaagaaccagtgtcctgctggtcccagtccatccctgctgtcatcccaactcttccattaattggcagaggcagaatggggccctgaggtggtttaaataaaccatttgttcatttatcagatatttattccagtatttgtctcaatatttatttcatgtctaccctgtgccaggtgcag

SEQ ID NO: 2509 - DNA, 496 bp, Homo sapiens
acctaatggctaccagcattttgttctcctgagtgaggttgaagtagagaggatggggttcgggagttggtggaagagtcttggactagatacctcgaatgctaggagaacctgtgtgcatatgcacgtgtgcatgtgtgttgtgtgctgcgtgtgtggcatgtgtgtggtgtgtgtatgttatgtgtggtatgtgtagtctgtgtgttgtgtgtctggcatgtgtgtaatgtgtaacggtatgtgtgatgtgtgtgtgatgtgtgtgtcatacatttggcatgtgtgtaaggtatgggtggtgtgtgtgatgtgtgtgtaatatatatgtggcatgtgtgtaaggtatgtgtggggtgtgtgtaacatatgtggcatgtaaggtatgtgtctcgtgtgtgtctgtgtgcatgtgtgaaaaaaaaaaaaaaaaaaaaaaaaaaaaagggggcgtttttttcggaaaccccaaccttaaaaaaacccttggggggtt

SEQ ID NO: 2510 - DNA, 619 bp, Homo sapiens
tcatgagattgctgttgtataaatgtagggaaaagcaaataatcaggagccaaaattgtctcttatcagggaaagttcataattagtttgcattctcacagaattctaaatagtactgattaattaagccaatatgtattccaagcagcaacagctaccaatagtcagcctgtgtggggagaagcataaatccaatgaactcaaatttaatacccctaattgtaccaatgtaagtaacagtcaatgactgagcatgcagccttttccctagacaatctctaaaatagtttttaactgaattttgtgaacagtatgtagagaaaatctaaggaaaaaatacagtgaaggcaagaattcccaaaatgcaaatcagaaaacattaaaataatattatgaaagtttggttttcacaattagggtattcttcaagttcaatacactttctcattgttgtatttttcttttaatttttcaatttctagacatatttatgcaattatttgtaaatctctctaaattctagaaaaaatttttcccatttgaatgtcatagaaacagaaatataaaaacaattttaagatataaatattcttgaggatttataaccaaatatttttat

SEQ ID NO: 2511 - DNA, 658 bp, Homo sapiens
atctggacttttcagctcaatatacatgataaataggcaggctttaggcctggctatccatttttggccactttatcactggctaccagcatgtgaacaagtcttgcaggaatagcataagattatggcacacattgattttcagcttttgactgtgttttcaataatcagatataggtgaaactgtttaagtacaagatagaggcccaatttgacagactttgaaccccaaggtcattttaagagtcagggacggaatggtcatttgatagatgggataaatatatcctgggggataaaacaaagctgtctttgatcctcctctttttagtttgttcctgatactttacatggccatcttttcatatacccattgtttacagaatcagaagggtaagatgctattctgtgcagagaatgataagaactagtacctaataactgctagaaagaagggggccgggcgcagtggttcacgcctgtaatcccagcactttgggaggctgaggcaggcagctcacctgagggtgagagttcgagaccagcctgaccaacatggagaagccccgtctctactaaaaatacaaaattagccaggtgtggtggcgcatgcctgtaatcccagctactcaggaagctgaggcaggagaatcacttg

SEQ ID NO: 2512 - DNA, 639 bp, Homo sapiens
acacacattgaattcgccaatcccctgttcctcccaacaagctctgtcctgaacttctgtcctgactggtccagaaaccagctatcctggtgcttcgcagacctctgtaactgagatggaaagggagagaagccggtgggagtggaagaagtcaagcctgtgcacatgccctctttcctggaaagcttctgtttccctctagggtctcggtctagcagatcatatagggccctgtggtaattttaatcagttaggtcttttctcataatgagatgggagccaccagaggggtctgaggtgagaagtgatatgatccaacttatgttctagcctcagattggagaagtagtatggaaggagcctgctgagtgaggagaaacctctcccatgaggattctgccctggtctctcatctgggcttaagcccactgcccgtcttctctctgctggaccattgcaacgactaagtccaggccacaagtttcttcccactcaggtgagtttcttccaaagacggtgagccactgtctttgtcttgcacacagaccgaactctattctgccccactgtcatgctaacaaactcttattagctccatgtttcctacatcatcaaatcctgaccctcttctttgtcata

SEQ ID NO: 2513 - DNA, 618 bp, Homo sapiens
ggaagccgtctgatgacaggatgagcctaaggtggggaggggaggatgcggtgagccacaggttctcaatgttcagagagccagtgtccttaaatagcgaggtgaagagctcaattaggaaccaaagccaaaaatgagctgaggcaagatggtagaacccaggcctggatctgagcagttgtcaaaagtctggttacaacatttgagagtgtggtgttcagctacctttttggattcagttgtagttttttatttgcatattctttttctttttgataaagctctatgaggactatgttttcaactccctagatgcatatagtcctgtactcagatataatgtatctaatctcttcccagatttataattgcaaaccataagccactttgagttgtgttccagcacctgccgaaggagacgactaaatgatatgaaccccattttcctcctaagagggcattcaaattctcttcctcttggattttatgaaatcagatttcagttggaagattctgtcacttggcctcttattgtcaaacacaggtaccttttaacgcagacttctactgagaaataattagagacagggtctcatggtcaggcgcggtggctcatgc

SEQ ID NO: 2514 - DNA, 494 bp, Homo sapiens
ttgcaaaaaaacaacagaagggtacggttgcaaaaaaacaacaaaagggtacggttgcaaagaaacaacagaagggtacggttgcaaaaaaacaacaaaagggtacggttgcaaaaaaacaacaaaagggtacggttgcgaaaaaacaacaaaagggtacggttgcaaaaaaacaacagaagggaaaagctatctatgacgaacccacagccattatcatactgaatgggcaaaaactggaagcattccctttgaaaacgggcacaaaacagggatgccttttttaaccattcctattaaacatagtgttggaagttctggccaggccatttaggcaggagaaggaaataaagggtattcaattaggaaaagaggaagtcaaattgtccttgtttgcaaatgacatgattgtatatctagaaaaccccattgtctcagcccaaaatctccttaagctgataaacaacttcagcaaagtctcaggatacaaaatc

SEQ ID NO: 2515 - DNA, 426 bp, Homo sapiens
atagcaattcttaaaacaaaattcgaggaagaagatgccacagaattctgtggtatgttgcttaacaacaattatatcaggaaactcttactcatacctaaacacaagcccagtattctatattttaaatgtgtttttctccaataaatggtcaaaaaatcatgtttatgtataatgtaattaaatataacatacagttgtgtatgttgccacacacataggcttgattgtattaaaatgcaacattagaagaatagcattctttatagtcgcatatttttgcttgactggtcacatttgatgaataaagggtatttcaatcttcgaaataagtttatgttcttatgctgttggctgtcttattaaatgtccatgaaaggcaagcttaaggatatgtaaatctagctttgaatatatatgtagcat

SEQ ID NO: 2516 - DNA, 253 bp, Homo sapiens
atgcactggaaaaatgttttggcaactgttttcatttaccctatgctctttgactttttggttgttacagataaaaagagattactctgctgagagtactaattttacttaaaggtccttttggtttgcatattaaatatgtcattcagtctctcccgagttaaatagagtgtgccctcctgttactttgaagttaaatgaagttattttctgttttggtgcataagtaaatataatcataacttactttctt

SEQ ID NO: 2517 - DNA, 477 bp, Homo sapiens
gctagagaaaagaggatgttagtaagtttatcataaagaagacaatacaaatttactgttcattaagtggaaatggatcataaaggtttcattctcaagttcatgtcgaataggaggaggagaagaactgcttgatcttgctatctcagggatagcagaggcagaagaacatctgcaaataagtagaccaaacatttcaaatctgtgttgttcaaggatccactgtacagtaatgctaagaaaggcagtggacataatttttaaaaagaactcagatccttaatttatccccaaattcaataatataacaatttttaaaatagaatttgtatgtttgattgtcagagatagatgaaataaaacaaaccattagaaataaaaaattgtttaaaaaatgcatcagtatttagatttgaaaaaatcataattaaaatattttcatcactgaatttaaaaaaatctataaatggatctaac

SEQ ID NO: 2518 - DNA, 569 bp, Homo sapiens
accacaacacatttagttgctcgactcatatgaagaagaggtgccctggttgggaaaagtgaaaattccgaataatggaaacgaatagcccttagtgagaataaatattctggttcatacataagcctcagagtttagtgagtcagtcccttgaatttgatctcttctaggtgctctgacaaggcctgaagtccagaagttaaaaagctaagaacccagagactagattgagattacttgagtcaagtcatgttgcttatggaagacctgcctaagtgaattctctggataacatgacatatctatctcatttcctaacaatggcaggaactcatatttactttatgactcctctgtgttaagtactatgctggtcactttaaatattatcttattttgtcttaacaactcaagaaggtactatttagccccgtttacaaatgaaataaaaacacacaaaactgaggttcaaagaggctaagtaatctgcctaagactaaacagctaatatttaatttaacagatctagccagggctgtcagacttcaaaaatatggctttttcagctg

SEQ ID NO: 2519 - DNA, 177 bp, Homo sapiens
attgtcaaagactgaactaggaaagaaagctgggcagtctgcagcaaaacgacaaggaaaatttaaaaaggatgtaatccctgttcattactacttaatacctccaccaacaaagactaagaatggcagcaaagataaggaaaaagattcgaaaaaaaaaaaaaaaaaaaaaaaaaa

SEQ ID NO: 2520 - DNA, 463 bp, Homo sapiens
aagatggcatggacctgtttttctttcccttttctgctaagcacatctatgaaccctgaaaatggctcaagagacaaccaaaggagaactaaaagaagaaaagtgtgatattgtttggaaccccaggaccaacagaacagtacagtggaggccctctctcctcttgcctggcctgagagtccccttttactaagagatactggagtgaaaagggctccagtcaatagaaaagaatcagagaagcgggtggcctggattggaaagccactctgtcccaatgagttagggactctcttccacttcccagagacaccagaatagtaggagataagtgaaaaagtaggagtatcctgccatgcctgtcctgttccttcatggagagacatcctgctacctggtctggggaaattctgatcattcaggcagtgccaagagggactgctaggacccctagtggcaccag

SEQ ID NO: 2521 - DNA, 605 bp, Homo sapiens
gaaacttacttcaacactgtaaaggctgtatatgaaaaacctatatctaatattataatcaatggggaaaaactgaaagctttttcttaatatctggaacaagacaaggatgtctactctcatcactcctattcaacatagtactggaaatcctagccagagcaatcaggcaagagaaataaaaggcatcaaaattgaaaggaaagatgtagttatatagtcagtctttcatatctgctggggatttgtttcaggaccccctcagataaaaaaatttgtgatgatcaactccctcacataaaatcatgtacagttggccctatgtatccatgggtacacatctgtggattcaaaccaccacagatggaaaatgtgtacaaattttgttcatagttgattgagttcatggttgcagaacacatggatatgaaggactgactatataataaatttactaaagttgtaggatacacaatcgacatacaaaaatcattgctatttctaaacactaacaatgaattgtctgaaagggaaatttaaaaaacagtatcaaataaactactttggaactaactaaccaaacaagtgaaagacttaaacactac

SEQ ID NO: 2522 - DNA, 646 bp, Homo sapiens
taatgctctgtttgctgcattatacaaagggatgttggtcataatgaaaaatgaaatcagagccaaaccctagtgagtgtgagaaattggtgccaggataattgcacagtaaccaatgtaaaactaaatacattatggaggctaaataccaaaaccacaattgttttacttttcctcgtatcttgacattttaaaggcacgatatattatttttcagccaatcaagggccatttactgaacaccaactctaagtatcttccaaaactaggcactagaggaacattatgttagttggtcagtgtcacatagcagaaagagaaagcatcaacataatttactgaaatatatactgcctgctgaaatcacaaaaatatgaaatatttgaaatctttagtgcttacactgaatttaatatgccggcatgttgaaattatctctttaatttaaattaaggtgaattttcctgttcttctaataattttatatagttttaatgctcatggttccaaataaatgtgcattaagtagcacactttagttaagcatttcaatatgcattcataaaagcatgtgtttgaaaatgccgacacatatgaaagctcattcagtagaaactaatgctgtccagcagagaataaagtaact

SEQ ID NO: 2523 - DNA, 568 bp, Homo sapiens
aaacatgtatgcccacttggtgttcatattataatcaatgactgcctttattatttatagtgaaattcctattttctgataaacatagactgattttgttttccatcagcccagttgagcattattttatcattttatgtgatttaaagtgaacttacttaaatatgactgtgatccacagttccactagagtgtactataaagatctggttgaagcggccagccttaatagatacatcttggcagagaagattcttagagaagaatggattttccatctttctcaactaatcagtcccttgccaaaagcagatcttacttttattatctaatggtaaactggaaactgctagcctaatatatatcacccaatttttaaatttctcctgcatgcatttaccttaaaggagcatataaacttagacttttaaaattaatcctgctttcttctaatttgttcactctttttctttgttccaaaggtattataacacaattaatgtaaaaaatacatcattaacatttatccaataaggttaggtactttctaatgaaattctccacttag

SEQ ID NO: 2524 - DNA, 669 bp, Homo sapiens
ttggcccggcctgtggtgggcactcactaagtgtctctggtaccggggccagtgatgggcactcagttagcgtctctggcctgagtgttgcttggctgctttcctggtttgacactgcactttagactattgcagctaaaattaacacacatcatctgttgatgtgatgcttgcctccttttaagcttttctcaagctttcaaaatttcttcctgaagtttttccttcacagatgaaattgctcctgaattagaggtgatttactccaggcttccttgtgcttaaatgtggcaactttcaaggctgccttcatttttgcctcagagtttataaagcagcttagtgtgaatagatgctgtagggccgggcacagtggcccatgcctgtaatcccagcactttgggaggctgaggcaggttgatcacctgaggtcaggaggtcaagaccagcctggccaacatggtgaaaccctgtctctattaaaaatacaaaaattacccaggcatggtggcaggtgcctataatcccagatacatgggaggctgaggcaggagaatggcttgaacccaggaggtggaggttgcagttagccgagatcgcgccactgtactccagcctgggtgacaaagtgagactctgtcccaaaaaaaaaaaaaaaaaaaaaaaaaa

SEQ ID NO: 2525 - DNA, 618 bp, Homo sapiens
gttgcaaggtggcctctgaatgccacactgtgtggccactcccttggacagtggctaggccacagggtcgcctcccctggccccagtctgtgggttgaatatgctaaccgagccttcccaggagcctcctctgcccccagcccccaggtctgtacagatggtagttggtactttcagcccgccttgagaactcagtattcttcctgttagctttccttcaaagtaaaatcggtagaacctattttgagtgtagaaaatttgaagtcgtggacagcagattacaaaaaattgcccaccaccatgcctggctcatttttgtatttctagtagagatgggctttcaccatgttggccaggctggtctcgaactgctgacctcaggtgatctgcccacctcggcctccctaaatgctgggattataggtgcgaaccactgtgcctggctcctttttgtatttttcggagaagcacaaggacttgttgtttaattaagcaagactatactctcccagagcatgcagttattattgagtaaaacacagttaatgagatttaatcacgttccctatcactgttgtgcagcatgataagtaggtgcaaatggcaagaagcacgctg

SEQ ID NO: 2526 - DNA, 357 bp, Homo sapiens
ctcattcaccacatttcaaccatgcttgccttttctctgttctctgactgtgctgtagggctcatgcccatgctgttccctgtacccccaaatcactgtaatgctgtctctttcttgttgctcatatcctagttcaaacctcctcactggccttccctcaacaacccaatttatttttttattttttgtttttttgagactgggtctcattctgttgcccagaccagagtgcccaatcatagctcactgcagccttgacctcctaggctcaagccatcctcccactatagcctcccaagcagataagactctaggcacacatcagtccattattttttgtaaagatggtgtcttact

SEQ ID NO: 2527 - DNA, 563 bp, Homo sapiens
agattgctactggagttgagggtcttatgtagaaaacatgcttgtatttttggaagcctgcatatcttctcagagcaagagaacatgaaatggtagtatcagtagaaccacaggaaaaggacaaaaggaaagtgctcaactctttccacaatccaagtttattttctgtgagagagatgggatggggagatcatctgctgacctgggatgggctctctctttggaagccaggctctgtgctctagggaccccatgaattcctcaggaagtttccttgtggttgacatgctggaaaacaggccctgagagtttaggatgagccttcctagatgctgttttaggaggatcctataggaggctgggctctgagtatgttgagagactgaacatatgtggcacggattcacaggtctctagggagctaaagcaccctcccctacacaactcagcctgctgacccagctcacacagtttatttatagaactcactggcatgtatccagggcatgcttaaagtgtaaagtcctggccgggcgtgatggctcatgcctgtaatcccagca

SEQ ID NO: 2528 - DNA, 83 bp, Homo sapiens
agtctagggggtcactgtcattcccctttccttgatatcatggtctggaggcagtgtgatctgtcagactcaggactagctgg

SEQ ID NO: 2529 - DNA, 630 bp, Homo sapiens
ttgatctcaatcagagtagttgaattattttcttgtgaaaatgtactatccttgtttttgtttctgtatgttttctctatgtaaatcctagcttttcaaataaccattcaaattcttatgctttgtattttattttcctgaacataccagctaatgtaaaataatctttctttccaattcttgaaaccaaatgtaagctccttaagggaagaatctataacaatttgtacttcccacagcaactatattagcagagaaaaatgatttggtaaataaatacctgtgagattaaaaagaaaatcttaaggatgtaatgagatttgcatacacacagacacactctcacactttctttaagaggaggctcttcagtcctatttatttcacccaactctcatcaagttgcagactctgaaccaaaaggaatcttaggaaccctccatactgtgctgatttctcctccgtaatagtctctttgcatccagctgggcttgaatatcttcagccacagaaaaatcacttaacatatggagctcattctattgctacatatgtcctaaatactaaaacattattttaatgcttagccacaacacacacatgccaaaaaaaaaaaaaaaaaaaaaaaaa

SEQ ID NO: 2530 - DNA, 534 bp, Homo sapiens
accggatttcttggttttctgtgcactgagccctgtgctttcaggaggcctccacgttgccacgcataatctaaagtatgtccaaggtgctatgcacagagaatccatggtgtgcattcctgacattttacctatctgctcgcccagagatttaccctttctcctaaggggctagaaaatcagaagaaaaccataagaaacatttagatgtccaaagagaagaatgacagcacatttctcattagcaatatgcaagtcagaagtcatgtggcacaccatctttaaaatcgtgaaataaaaataaatgtcaactcttaagtctatactcaatgaatatcttttcaaatgaagttaaaatagtaggtgtttagacatacagaagttgaaagaattgatcatcaatagacttgcactgtaatattttttaaaacttttatgtttgggggtacatgtgaaggtttgttacatagataaacacgtgtcacgggggttcgttgcacacatgactacatcacccaggtattgaactcacta

SEQ ID NO: 2531 - DNA, 486 bp, Homo sapiens
tgatggttgttggtttagtcacataacaagcgttcttttcgtaagtaacgcccctgtgtgagttcttaaacgcttgcaaagcaggtgggtggtgaataacctccctaaagggtgtgtgtccatatcgttcgctcttataaacaggaacgttaacagatggtgtaggatgcttcggagacctcttcactatttggggtggggcatgtttgtctcatctctctgagccctacttcccctttgggaagaaagttgagggagcaatgtgagagaagtgtattcaatattccccaccttgagaggactattttcttgttttttttttctagggcttttactaagtccctaccaaacaacatgctaattgtaacctgtgtaggttaagaaacaaaataggcctgattttgctggactaaaagttgcttaaatctagtcagtagtacattgtgatgttgtttctagcaaatatttcttggaacactttctgcc

SEQ ID NO: 2532 - DNA, 507 bp, Homo sapiens
caactcaaatgaataggctattgagcatccatgtggaggccttataagaagtcgtgatgcattaaaattgttttcagattataactagtggcaatttggaaagtggataggaactaggaggagttgatggaggaaaaaccagacaaaaggccgtttcactagtcccactagacatttggaaggcttgaaatgaagtagtgacaataaggatagagagagggactagatatgcaaattagtcttataaaaattgacttgatttggtgctttgtgagatgtaaatattgaggctgacctaaaagttgaagaaaatattgacatgtctagtatgagtgactaggtgaatggtgatgtcttttaccaaaagaaaaatttctagggtgggataggtgggttcatgagcaggatgataaattcagtgtaaaaaaatacttatttttaacaaataagccataattctggtacaaaattttaaaagtatagaagaatatatggtgaaaagtaagt

SEQ ID NO: 2533 - DNA, 606 bp, Homo sapiens
cagaataaacggctaatgtgtgaggggcttaatacctaggtgataagttgataggtgcagcaaaccaccatggcacacgtttacctatgcaacaaacctgcacatcctggacatgtatcctggaacttaaaattaaattaaattaaattaaaaaataaatctcagtggcctaattcaataaatgtttatgtgttgctcatccaaattacagtagatttgtggtcagggttggagagctttcctctacagtcactcagggactcagactgcaccatcgggaatacaggatatcaaaggtcacatgaacaagaaatagaaaacataaagtacgcatatctgctcttctatgcattgtactataagtgacacatgtaattttgcttaaagcccctgccagaactagtcacatgggcctacctaatacagataattagtcattcagtaagcagtagaactcttcaccacagatgtaagtcagttttgacaagagtattggggaaaaggtgtagaacattatcatttgtgaaatgtctccacaggagagcagaacgttgatgtgagatacagtacccaaagacaacatcaaactaaactaccaataggtag

SEQ ID NO: 2534 - DNA, 256 bp, Homo sapiens
ctttcttcagatgtctctgcggcagttctgcccttgcccggcccaaggcagctgcagcatctagcttgtggcccttttccatctcttctgggagctgcctttattctgagccagctctacacttaaaggggcgtttgttctattttatcccgaattcctaaatgttttgtggagacggaaggctttttaagatatctagtctaccatatctccaggaataaaaatgatttctataaatttttaaaacctatgtaaa

SEQ ID NO: 2535 - DNA, 362 bp, Homo sapiens
  misc_feature 273: n = A,T,C or G
gtcattcaagtaatttgggtactggaagaatcgggttaattgattacaaatatactgcagtgcaagaaatagggtttaataaattcaatgtctcatttgttcaaataggatttaatgttcactgccagtcacacattggctgaaataatatttcccagaaataacaaagggtcacaacacaagtcagaatcgtcatcctgggagaaatcatagagattaaggtcgccaaggaaacttttttgttatataattacttttatttatgtgaaacanaaccttgccttatctagatagcatatgacttagtaatagaaattcctatacaaattataatgtgtgtagcaatttatatcactgaagca

SEQ ID NO: 2536 - DNA, 246 bp, Homo sapiens
gaggaaatcatccataactgcatattattttgatttagaaaaatcaatagtgtgaactctttatttttctccacaatccttcgtttcttgcattccttattttagaatatgacatcacttgtctaaaattcatgaataggaacttcacaaagaattatgacaataaacatataaaaatgttcatctttactagttttgaaaaaagtagaacaaaataaccaaagtgacttttgtacttttctattg

SEQ ID NO: 2537 - DNA, 287 bp, Homo sapiens
ctctctgcttccccttgctcgctcggctatagcccatgggcttctggctgctccttccaccctcagggcacatgcctgccctgcccctgtggctgggcctctctcccaggcatcagcagggctccctcgctccctgtccctacgttgagaaagagaaaagcaggccctgacctcctggagcccgcctggagcccagcggggcttcggtattctccagctgaacctaaatgacttcacaggacatcagcaacagacaaaccacctgggaccacgatggatcacgacac

SEQ ID NO: 2538 - DNA, 95 bp, Homo sapiens
aaccagaatacaacctgcagtgaagtgtcattgcatgatttcagaattacttataagtctcattagaggcatccctattgctatataaatataat

SEQ ID NO: 2539 - DNA, 561 bp, Homo sapiens
atcagccccagggcgctgtgccagaaaaaggactgcacagcaatgacagctcattcttctaccacggtctagcatgcgtgctgtgtgtgtggtgggtgttatttaggggaggaggaggtaacagtgagacacgtgttttgtgtgttaaggggacagagacactaagcttgacccactatgatgtctgagtcagtctggtgaaccaatcatgaaatgctcaaaagagagttgcacagttacaaagcctttgccattgaatggtggagactgtggcatcagtcccccaccctatcttctgtagaaaacagaatgagagtgcagttgcacagaggtggctccactgtagctcctcatgttatgcatggcagacattgctaatattcattccagttcccggtcaggcatggtggctcacacctgtattcccagcactttggggggccgaggcatgtggatcacctgaggtcaggagttcgagaccagcctggccaacatgatgaaacctcgtctatactaaaaacacaaaaaattagtcaggcgtggtggcagaagcctgtaatc

SEQ ID NO: 2540 - DNA, 374 bp, Homo sapiens
gtgactattgaaatgagatgataacttcccagaaactgcgtagaaataatcatcactttattaccctttgaaaagaagattgatagaaaagtcattcgaaagatggttcattaccatgccctagtacgatttctttactcacatctctctaaagcatgagaaagggaggattattctctaaggtcggaatttgaaggctgtttgcctctttgaagtctcggtatttaattttctgtagtcatttcttgggcaattttctaagaaactagttgaagctaatttatcataagttaaagtcaaatgacagaaaagatttttcccccttaacagcattttattccacagaggttagcttctgaaggaaaatgagactt

SEQ ID NO: 2541 - DNA, 466 bp, Homo sapiens
aaggatttcactatgactttatctcccaggatatttaaggtttggtctcattctctaaatgtacttaaaacaagaccgttggacttacattttgttaacataacaaaaatgtatttatcatttcagagatttccgcatattttgcaactggctcctcaatgacataccattttcaagaacattacactttaagtgaaaactccagctctctcgtttcttcattatacagagatgtaacattgaccagagaaatgatcacactgagcttccgaaccacacgatctccgagcttattgctgtatgtgagctctttctatgaggaatacctttcagttatcctcgccaacaatggtgaatatcttttgtgtaaagaaaaagagaaccctgagttagaaaaataggactgtaatgacatgggtcttttcagcagtcaaactacaaacgatgagagaaaactgtatgccct

SEQ ID NO: 2542 - DNA, 441 bp, Homo sapiens
gtagcaagaatgaggtctgggggcatctttgtgtacatctgtagtgctgtgtgctccagataatcagcttataattacagattatataatacagattttcagattataatcacagattattcatgccagcaaaccacgacctcagattggccatctcttcatgccctgaggcttggagcatgagagagtccgccttggccgtcgtcatgaagctgacagcctttgtttgctgcagagtcacgggaaactacatgctgcactccatctttcttgcaactccgccagatagctgattgcagacccaacagtaatgtcatggggacacccatcagggaatgcattagcaagtgaacaaacggggacaaatacaaaccatatttaagtttctgttatctttaattactgaggacacactgaattattttctataacttgctggat

SEQ ID NO: 2543 - DNA, 460 bp, Homo sapiens
gtaaaatatgtacgtgtttagggactaaaatatcaagaaagaggccacatgttggttcatgcctgtaatctcagcactttgggaagccaaggtgggcagatcacctgaggtcaggagtccaagaccagcctggccaacatggtgaaaccccatttctactaaaaatacaagggttagccaggcgtggtggtgtgcacctgtagtcccagctacttgggaggctaaggcacaagaatcacttgaacccgggaggagaagattgcagtgagccgagatgtcgccattgcactccaacctgggcaacagagtgagactctgtctaaaaaaaattaaaataaaatatcaagaatatccactcctacctgttaataatgcttacctctagagaatgtgatagagctggagaaaaagagagtggaattttatttttttacattaatacaattctatattgcttaac

SEQ ID NO: 2544 - DNA, 466 bp, Homo sapiens
gaggtcgaggctgtagtaagccatgattgcaccactgcacaccagcctgggtctcagaacaaaaaaaaagagagaaaatgcaattatcgtccccagataagaaggattacctttgtcacaactgcgaagtaattgctttggtacggaaacagcacacagagccataaagcaggttaaaaaacacttctgtgacttcctaaatcctctcttgaatacatctctgagttctggcctagggacagcagtttcatttctggctctaaaatttaggtatataacaaaacacaccagcacagaaaaacttcaagaatactatgaatgagtgccataaattcagaacaaacaaaataacttgcactctaaaaagtcttacaaggccaagtgcggtggctcacgcctgtaatcccagcactttgggaggtcaaggagggtggatcacctgaggtcaggagtttgagaccagcct

SEQ ID NO: 2545 - DNA, 208 bp, Homo sapiens
ataaatttgttttctcaaatatttgctatgagaggtggatggattaattaaataagtcaattcctggaatttgaaagagcaaataaagacctgagaaccttccagaaaaaaaaaaaaaaaaaaaaaaaaaaaaaaaaaaaaaaaaaaaaaaaaaaaaaaaaaaaaaaaaaaaaaaaaaaaaaaaaaagaaaaaaaaaaaaaaaaaaaa

SEQ ID NO: 2546 - DNA, 646 bp, Homo sapiens
cataccaaagtcagtgtcagacagataacttcgaactattataactcattctttgagttcttagatagaattaaatgtcatttctaaaaggtctgttttgttctttctcaaactcaccttttcaaaaatcatatgatattaactcattttgggcattatccttgcatttatcatctttgtgtctcagactcttgataatggcctacccaaactaggcatgacaataaatgttggttgaaatgaagaatatcatgaagacactatgttcgattcactatattatatgctatgacaataatcacataatgtagaagacagattatctgtccttaaggtcattttgttttaaataacaaactggggatcatgaattcagaagcatatgaaagcagatatttacaccaaaacaagtatagtgcttcacatctggagccctatccattaaaggattgaaaactatacctgagagatgcattgaaaagcaatcaaaattaaatatagcatggccgggcgcggtggctcatacctataatcccagcactttgggaggctgaggtaggcagatcacgagatcaggagatcaagagcatcctggctaacatggtgaaacccagtctctattaaaaatataaaaaattagctggat

SEQ ID NO: 2547 - DNA, 585 bp, Homo sapiens
ctgtttgcagatggattggggggagcatctgcagaaaggcaaaaaaggccaaatactcttatcagttgcagatggctctgttgctgatgacagcctgtgtcctgggttctgatgccccctagagacagccgtgaagaggcaattttctcctcgaaggaaggaactggaatgattggttgtataattgcagaattgttttcagtatgtcagcaagcactgaaaatggggaaactgtcccttcctacctctgtaggctggagacctcgggttcagctccatttatcagggcacaggaccttcctgttctgagactttgttccaggggactttcacacttcagagaatagcacatgtcatcctgcacttttgtggggtgattaaaagctcacggtatccttttatgtttagcccatccaattcttccaactggcctcagccagaaaagcagggaaggcacccccagtttgcagctgagagactccagcctgggagagctgaataaatcttttgcccagaggggttcctcagtaaatgctggagatgaggctcagacctgacctttggattcccagatggagtgctctg

SEQ ID NO: 2548 - DNA, 427 bp, Homo sapiens
gtttgaatattcagtgcactgactcttacattcagagaaatcttatctgtagtaagcagacctaggatgcagcttgtttgcctttcactctgtagcttcagcaacagcaaacatcattttgccaattttgttcctttcttttgactgcaatcatcttctttctttgtcctagaccattagttttgcggtactcatgagcctctctcaactcccttgagagtgtcatggcatcctctaaaggtaacttgtgggacatgcaaatctctctgccttgacatctttcactcctacaggtagggtttgatgctttacctttccactatcttgtggcgtatctctttcctcaacaccaccaccccccaacccccatagataagtgtataatgtgtacaactaatgcccacatttcatcactaacataaaaatg

SEQ ID NO: 2549 - DNA, 289 bp, Homo sapiens
ttcttatttgtactccagtttatgaatgaattatctattccactgttttaatctgttattaatcctatcccatgaattttttaactggggtaatggaatttttttattttatttttattttttatttttttattttattttttttgggacagagtctcgctctgttgcccaggctggagggcagtggcagtctcggctcactgcaagctccgcctcccaggttcttgccattctccagcctcagcctcccaagtacctgggactataggtgcccaccacaatacccagc

SEQ ID NO: 2550 - DNA, 287 bp, Homo sapiens
  misc_feature 96: n = A,T,C or G
acgctttgaaaagagccattcactgattttagtgaaatgaattgttattttgaaaacagttagtgctctggctaatttctcttgttatggcaatcnttggctctttctcatgtctgtattttcatattgaaaacagatttgagaacataatagcctgagatgttgatgcacagatataggtggaaatagagagatgacctagagaagcatatttaagctaggctgcagtgatctagagaaaatgtatgtcggctgggctcagtggctcatgcctgtaatcccagcat

SEQ ID NO: 2551 - DNA, 285 bp, Homo sapiens
tgtttttgatttcatgcctagatcttttggttttaattcacataaaatagatgacacatgttttctgtgttcactggaattttttaaatcaacaggataatatatattctgtgaaaataaaataaaagcaatgacaatgataatatctcatgtgttttagagttcttcaagggttttcacatgaattacattatcatgattgattttcatttaaaacatgaaaacaaaaacctgtgaggtaggcagggttaaggaaaaaatttaaaaagctccattgtgtataat

SEQ ID NO: 2552 - DNA, 314 bp, Homo sapiens
tcttaccaaatgcagatttgtttgagcattcttttggtagtcatccctccaaatgtgtgcacatgttttccccctgcacctagaatgctctttctccttgaagttcatgctgaactctcatctctccttcaggctcaccctaggtcttggcatatcaggaagtcttcagtggcatccctggaggcagcaggatgaaatgtacaaagcctggacctcagactttggtgttcatcctgtttctgataattacttatgacagccagggcacagcaattcatatttcctagcctaagtttctgcataagcacatacct

SEQ ID NO: 2553 - DNA, 175 bp, Homo sapiens
acagaagggttcataagaatgcatggttcttaaggtataaacataggatactcagttttgctttgactgtttttatttttctgtggtagggataaattgcaaattgttttggacactatctcttaacccattcccgtgagcaaagcacatttttctgtaagatgactaagctaat

SEQ ID NO: 2554 - DNA, 598 bp, Homo sapiens
taacactgatttctagtacaaatcaatagacaacacttgcaaaatggattttgtaatcatatttagagcttgttacaatgactaatggtttgcaatattttctgaattttaatatcctctagacaaaaagaagtttttaataagttaccaagttattcatcatagtaatgaatgtgttatatttgtacatgaaccaagacaatcaagacaatccagtgaacaaactgcagaaaatatattaatcagtaattagggtttagaaaaagtcaagacaagttctgtaataaatggtgttcatcacttgcacgtattcagtacatgtgcacagtcttccaagtaaagataaaagtatatttgccattgtataaagcattgtataaataagcatatttatctataccacacccatttaggaggaaaatattgataggaagacagtcatacaaaataacaacagaatttacttttagagacttccaaggatgctaagggagagtgtgtttactcagtgctactgagcacacacaagaaaacaaagaaacaaacattatgtttggagcgtcattgtttgtcaccaaacaaaatattatgcattcac

SEQ ID NO: 2555 - DNA, 398 bp, Homo sapiens
cttcttcttttgacctgtcacatgatcagggtggaggaagaattaactgacctgacctaggaggattttctattcatttaaattcatagagttcgtgtcctttgccaaacaaatgtgcataacaagtaaagtatagaatgggtcagagaagccataaatagtcagaatcaaaaatgaaatctaatgattcccagatggttgtttcttccactataacatcatattattctcctgcattatcatttaactttctgtttacctgtctcatcttgccaactagattgtctttagtttcattccaaaactatctaaacggcatcctccatttccaggtggcagtaaaagattaaaaagtacctcctggccaggcacagtggctcacgcctgtaatcccaaca

SEQ ID NO: 2556 - DNA, 205 bp, Homo sapiens
cagaccttctgccaccttccattccctggattaaagttcctcttttgtaaatactcaagtgtttcctggttagacactgacccatacacttccctaccaggccacaagcttcctgttgggaagggccctgccttgtatccccagggcttggatactctcatttagcaaaagagaagaggcataagggaatgaattgctccctggg

SEQ ID NO: 2557 - DNA, 553 bp, Homo sapiens
tagaatatggttggttataaggggagaagaaaggtttctagtttggttgactatacagatagaaaaaccactgataaacaggaaaataaaaatgagaaagaaacaaatttatcaaaaagcaaatgagtttggcctcaaagatattgaatatattgttgcagtggaatatcaaaaatgacagtgcacaattatccagaacttatagatgtgacagtagaatttaaggagataatgaatgaaataaaaatcatacatgagagtcttttacataggatgagaatgtataacacagttaagaactcatggagtagagatttagagcaagaaggcagaaatcattggagcaaatgaaggagaagcaatcagaaacagaagaaatgtggccaagatggcattgagacagtgcagagttcactcagctaggtacagagtaagaggccatcaaacatgtggatgatggtggaggttctcagctgagtctgaggcatggttgttacagaacacaacacattcctctctggagtcaaaaacattaatagaggtgacccctcag

SEQ ID NO: 2558 - DNA, 159 bp, Homo sapiens
tagagactattgcatgacttaccacactgataagaaatatcattaggaagtgatataatatgctcttaagagtccacttgtgaaagttccatagatagaaaatcatatctcatgcttagccaacattacatcatgctgtattccaataggcattatgga

SEQ ID NO: 2559 - DNA, 517 bp, Homo sapiens
ttattgaatagcacacatacatgcccacagtagacatcagacaagtaggatttaatttccttttacttccaaaattttatgtgagtacttgtcattagcaacatttaacctgaagcttgattttcaaagaatctaagaaattaaggttccggtattttagcctttgcagtacttgagaaagcacaggaagatgaaagaatattttctggcacagaaagacattaattgctttgagctgatatgttgtaagctctaagtaatccaaattctaaaattatcaatctccttgctatgctgaaagtagaacacagtgaagagcatatgtaaaaaatcagaaaagtcaattaggaatttattccattagttaagaaaagaggtatcaggttgatatcaggatggcagtggtagagttggtaaaatgtagtcagattctggaaatattttgaagttgaaatgaacaatgcttcctgccagattgaatatggagtgtgggggaaaaggtggagtcaaagaacat

SEQ ID NO: 2560 - DNA, 526 bp, Homo sapiens
gagacggggttttgccatgttgcccaagctggtcttgaactgctgagctccagcaattcactcacctcagcctaccaaagagttggtattacaggcgtgagccactatgcctggccatatttttttcccttaatttatatactatagaaatgttggaaatgtcctaaaaaatatgtactcatagttgaggtcaataaacatgtaaagggtagaatcaatctggggaataagttctgatttgctatatgtgaatttaattaaatataagggagttaaaatccaaactagtttacctttgctattttctgagattaaaaaactcatttgtattcacttgagtaatactttaacactgtatatatatatacaaaatgttttttgttgagacagggcctcactgtgttgcccaggccagagtgcaatgatgcaatcatggctcattgcagcttcaacctccctggctcaagcgattctcccgcctcagcctcccagctgggactacaagagtgcatcaccattcctggct

SEQ ID NO: 2561 - DNA, 195 bp, Homo sapiens
aaaagtccagcactaaatcttctagtcacttaatccccagctcttctatgtttggagataatttcctttatgaaaagaaactctaacctggccagatacccttctcagacttgctaatggaacaaagaagcctctcattagactcatccctgtggctgcagaaataagtgtctcggaaagcacagcttttgcttt

SEQ ID NO: 2562 - DNA, 115 bp, Homo sapiens
catcggcattggcgtttttccagagcttcccatgtgcttcagcttcccaaatggtatctgctgtcctaaagaactatgatctcttctctgttccctcataaaccatacactacat

SEQ ID NO: 2563 - DNA, 218 bp, Homo sapiens
agtatgaattccttaaaaaaaaaaattcattcctcctttctgcgtcataaaataagtaacttttttcccattaaaatcttctgtaatgcttctgaaaaaagcacgcagtttgaaaaacagcaatagtaaatgtgggtctctgatatattttcaaatgctttaaaaaattattaatttattcatcacatgtttatgaattacctacaataacaggcact

SEQ ID NO: 2564 - DNA, 479 bp, Homo sapiens
taattgactttatagcagtagaaataatgaaagatacatttgctttcccataaaaatgtgattttagtggagaataacgttcctgaagggatgagttcccaaatgttattaatcaatatattatagcaatgagcataattaacaaaacaaattatattcctcagtattgttcatcacaaacctatctaaattatatatcaaataatcagcaagttaatacagaaatgaatagcatatataacatttatttacttttacttagactccagggagagggaatgtgctcagttgggaaagggttgaaggagggacatgagaagaaatgagttggacataagaaatttagaggccgggcgcagtggctcatgcctgtaatcccagcactttgggaggctgaggcgggtggatcacctgaggtcaggagtttgagaccagcctgaccaacatggagaaaccctgtctctactaaaaatacaaaa

SEQ ID NO: 2565 - DNA, 602 bp, Homo sapiens
cttggcttgtagatgactgtcttttccctttgtctttacatggtcttgtctgactttgtttaaggacaccatttacagggactggataaggtcccaccctaatgatctcatttaacattaattacccctttaaagatcttatctccaaatacacttacattctgagacattggtggggggtggctagggccttagcatatgaatttaggggagaaactattcagcaaacaacactgtataataatgtttcccaaattatagtctgctgagcacttgtatccagatgtactttagtaacagattatactggtgaaacacattgggagaatgctaagtgatataccaaaaagtttgtgtttggttgagattgtggatctttttacaagctaagaatggtaatttccaggagagtgttataggcgttaggctttcctatatttatctgaccaaggaatctgaatttgtggtttagaaaaggctgttgcatatgcatagtaactcttttctttacttaaaagacaataatacaaatctgacaaacttgaaacatatatcttagggtgggcccaattatagatgggataagtaaccatctcaccata

SEQ ID NO: 2566 - DNA, 623 bp, Homo sapiens
ggggggtcaacagtctttatccttttatctcaccaggttctgctgtccaacatgcccatgacctagagctggagttcttaagtgcttttatcacttttcttaggacatcttgggctggctataaaaggaagaggttgagaagggaaagttagaaaagtgcaggaaagaggagctcataaaagtagtgtttcatgctggaagagaacgtataatacatcagtggttatgcaatggaggtccatctggacaggagctggggagactggggaaggggaggtgcctgggaagaggctggtgaccccgaccccagcacctgagctggagagcagcaaagagcaggaagcagagacccaagagggccacaagagaggctggagacgaactcctttgtgaggtctaagggcctcataaagactgctggagactgaatttgtcgacatggagtggtcctggattatgacctgctcaaacttatggttctgagatggcagaagtcaaatcagtgtgaaaattattttatttaaataagcaaggtatgtgagtcttgaatgttggatagaaaattcccctagaacttggccgggcgtggtagctcaggtctgtaatcccagtactttgggagt

SEQ ID NO: 2567 - DNA, 507 bp, Homo sapiens
gcacctgtaatcctagctactcaggaggttggggcaggagaactgcttgaacccaggaggcagaggctgcggtgagcagagatcgtgccactgcactctagcctgggcgacagagcaagactccacctcaaaaatatatatgtaataataacaataaattaaataaataaattgcaattcttggccaggcacagtgactcacacttgtaatcccagcactttgggaggctgaggcgggaggatcgcttgagcccaggagttcgaggctgtggtgagctatgatttcgccactgtactccaggctgggtgacagagccagactctgcctctacaacaaacaaacaaacaaaaatttgattcctgtatatggcactttctatgtagctgtgtagctggtggaggagaattcctggaattcctaataactccactgaagatggtctggagtcttccctcagagctcagcgcagagaaggtttgctcagcagagcaggtatgcaaggcaga

SEQ ID NO: 2568 - DNA, 550 bp, Homo sapiens
  misc_feature 510, 511: n = A,T,C or G
gtgtattttcattttcggatctggaatcagccattcctgcaggcagccccgttctttttggtaggaaatggtatttagagaccacagtgcagcatgacagtgctcagtgctgctgggttgatgatcatttctaggccttttcaggggacagtatcttcttaaagatagtttatatttcctttgagatcaaatgcatcatgaactcatactgacagatgattttgtgagccaggcaattgagcagggactggcggggtgattcttctgtttcaggcgtcctgaacagaagtcacttaattatattcagctgtgaatgggttggtttagagtatttgagtggctgttgacttccatgtctggtgacttgaagtggatgccagagggtgaggcttagctgaggcttaggccgagcacctgcagagtgcttggactcctcacctggcctcagggctcctagagagcatgttcagcagggccaggcagaaactgcaagagttctaatggcctaanngagacagggtcaggctgaagtgcagtggcatagctcact

SEQ ID NO: 2569 - DNA, 586 bp, Homo sapiens
gaacaaagagttgactacacaaagcagacagattccacccatgaccattagaacaaactttttctatgtcacactctcctttccattcctgtctttacggattatctctcttgtacaattcctggctctttcttcctatgtaggaattagtttctttaatgccaatccaggaaaagattaattgttctgcagagttattaagccaattcaaggatatgactccccagtacccttggatggattatgtctcattagagtcctttctgggaaaacaataactagtggaacaaatgcctaaaaatatcaaccccatcgacaggacagtcaattggacaatttgaactgacaattcaaaattgtccatgaagatttacctctcactttggctgatacagtaaataacacagtccaagccctgggggaacaatttaatttccttaactcaaatagttatagttaactgttatagctatagataatacaatggtgttgtattttctcttggccaacctaaaccattgctaacacttcacgctatacctgaactaacattacagatgaaatgaagcaacttatatctaagcta

SEQ ID NO: 2570 - DNA, 559 bp, Homo sapiens
ttactcaaaattctcctggcaccagttacttaactggtattaattacaattaatattttggcatacttcatttttattgcttatataataactagagttaccatagttaactaacatataatggctaataatgtcagttattattagcacgcaccaggcacactaataatagctaacattcttgtgctcttatgtgctaggcactgtgctttcatatgctttatctgacttaacacatgtaagttgcctaaggtgttacaagcggcaaagccaagaaataaacctgagactccagagcttgtaatattaacttctatattatgtctagtcttgccataagtatcttcagagaacagcttcaaaaatgttaaacctggctgggcgcggtggctcacgcctgtaatcccagcactttgggaggccaaggcggacaggccacgaggtcaggagttcgagaacagcctgaccagcatggtgaaaccttgtctctactaaaaatacaaaaattagcgtgtgcttgtaatcccagctactcaggaggctgaggcaggagaatcgc

SEQ ID NO: 2571 - DNA, 171 bp, Homo sapiens
caaaccataggactgtataaaacaaagaaataaattgtgctatatttaaattttttttaaatcaaccaagatgtggaggaaaagatgaaaaggagattatgacaaatgactaactttattacaaattaattataataaccacactggggtggatggggaaggagttgacct

SEQ ID NO: 2572 - DNA, 141 bp, Homo sapiens
ttctccctagctatgttatctgcaatacctagcacattgtatagcctcaactatatactccaaaaatatttactgaataagtgtaccattttctactccactacttatgatttcaacaaagtgccctggagatttctgatt

SEQ ID NO: 2573 - DNA, 401 bp, Homo sapiens
aagtagcaatgagtgtgagatgagccctagtgaaccaagtccaggagattattaaaatgacttttacttgccttccaaaaacataaacaagtacactcaaaatcttgccaaagaatcagacaggagcccaattaccatgcttccatccagaagagcattaaaccatacttcactgggttttaaatatagaaaagtagactgaatattccaaaccaacaaaaattcgcatcgctggaccacctgaaactcttcagtcacttcatttcattctgaagagtatcaccaatgtctatttatctcctatagtcaaatcataaaaccaaatgtttctccaaaaaataatgaagcccagcattgacaacctaagtgtaggtgcacagccagcatgaactataaggaac

SEQ ID NO: 2574 - DNA, 278 bp, Homo sapiens
acaaaggaagaggaagcagaggcaagaattaaatgtgatctggattggcttaaagcagcaatagaatgatggcctagaaataaacacaggctgaccggaaagctgcctccacaaacaattgcccaacagtcaactaaaggacgtgttgttttattaaggcaatttattattctttgtctgatagtggccaattcaactgggtgctacccaggctaccaaagtcattctgcagccactagagatctgcacactactggagatttctaggacaaagcact

SEQ ID NO: 2575 - DNA, 609 bp, Homo sapiens
ccagggggttccacatgggctgaacattctctgattaactctcccctcatatcaacaacttcctcctatcaagcttgacatcttgtgctatttcttcctattctaggtgtaggcaagtctagtttgctcttcagctactctatccctctcctgcatattgactcttgaattcttgatccctagtagcttctcacactgtctgtaaaatggagcatggaaccactacatagaaacaggaaggttctgccctgtactctcagctcttaagggcacagtcacaagaagaccatttttaaattctcattgtgtaacacccttacacattccacatgcatcatagcacataactctgacaataaactacaaggtaagcaactaattattccctttttaatattttttaaacctaggaaggtaacttaatctctttgacttccagttctcatgaactagaacattagagaatcgagatttgaaccagaggtgatggtttttaaaatatgtctgctagatatcaaaatgagtgcatgggatttgatatatgtacataggtaggcatagaaatagatagagatgctcaaggatatgtgtatatgcacatatgaatat

SEQ ID NO: 2576 - DNA, 500 bp, Homo sapiens
  misc_feature 423: n = A,T,C or G
atcagccactgtgcgtggcctggcttcagtcgtaattgcattttgaaaactgggcctgcagctctgtggataccacacatgttctatttgagcctatatttctctgctggccgaatttcttaggaacctgtgccaattgtttttcatctttgatcatcagcccgaaccatgctgtgtccacctgaggggacagtccagcatctctgtgccatggcagatggactgccggggctccacctggttttggaacctgcagtttgcaccatggctctcctgactgcagagccaccggcagctgctgtgtttcctcatttcctctaaccccagtctgtggggccttccccttcagcctgctgcagaacccatccctctggtcagttgaaaaatgtgggtaactgagttggaggtggcatgaggggactntctggaaaaggtctaaaagtctgtctagaggagcgtatacatgtgtgtaggtaagaatggcatcaagttgcacactg

SEQ ID NO: 2577 - DNA, 548 bp, Homo sapiens
  misc_feature 416: n = A,T,C or G
gaataaacagggcatgatgatgagtatcgccaccaagatcgctatgcagatgacttgcaagctcggaggcgagctgtgggctgtggaaatacctttaaagtccctgatggtggtcggtattgatgtctgtaaagatgcactcagcaaggacgcgatggttgttggatgcgtggccagtgttaaccccagaatcaccaggtggttttcccgctgtatccttcagagaacaatgactgatgttgcagattgcttgaaagttttcatgactggagcactcaacaaatggtacaagtacaatcatgatttgccagcacggataattgtgtaccgtgctggtgtaggggatggtcagctgaaaacacttattgaatatgaagtcccacagctgctgagcagtgtggcagaatccagctcanataccagctcaagactgtcggtgattgtggtcaggaagaagtgcatgccacgattctttaccgaaatgaaccgcactgtacagaaccccccacttggcactgttgtggattcagaagcaacacgtaacgaat

SEQ ID NO: 2578 - DNA, 431 bp, Homo sapiens
ttagtatttatataataactagagttaccatagttaactaacatataatagctaataatgtcagttattattagcacgcaccaggcacactaataatagctaacattcttgtgctcttatgtgctaggcactgtgctttcatatgctttatctgacttaacacatgtaagttgcctaaggtgttacaagcggcaaagccaagaaataaacctgagactccagagcttgtaatattaacttctatattatgtctagtcttgccataagtatcttcagagaacagcttcaaaatgttaaacctggctgggcgcggtggctcacgcctgtaatcccagcactttgggaggccaaggcggacaggccacgaggtcaggagttcgagaacagcctgatcagcatggtgaaaccttgtctctactaaaaatacaaaa

SEQ ID NO: 2579 - DNA, 591 bp, Homo sapiens
atcattcttatttttgtttttaatttttagagacaacgtattgctattcaagcctctctgttgcccaggccggacttgaactcctaggcttgagcaatcgtcttacccattgtcccttgtgacagtgactttaagtgattcaaaaggcctttatagaaatgtcttttcttataaaacaagcatactaactagaaggggaaaagaatatttaaatattgacagtcattaacaggatcactcaaacactttgctctatgatgtttgactcttcttagaggagtgcagcggggtatcacacagcttctgctcaggtacaatcatgttttcaaaagaaaagggctgggcgtggtggctcatgcctgtaatcccagcactttgggaggccaaggcaggtggatcacgaggtcaggaattcaagaccagcctggccaacatggagaaacctcatctttactaaaaatacaaaaattagcagggcataccagctactcgggaggctgacgcaggagaattgcttgaacccgggaggcagacgttgcagtgagtcgagatcgcaccactgcactcactcttgggcgacagagtgagact

SEQ ID NO: 2580 - DNA, 558 bp, Homo sapiens
tcctaatcatgctagtcacagtgtggaatgagataaaaaagaacttatactatggaaaattattttaatggatcattttcctgtagtaggcgtgtgctgagggagaaccatgtctgtgctccatgcatatcctctccacatgctttgaggtggagagatcaatcctttaaccagcccaggtggtcatggaagcattcctggaggacgtgaggccgtgtgagtgagcattccaggagagggtctagtgtgaacaaagacccagttacattggtaacattgtgaccaattgggtttggatgaagtaaaaaatgaaaggcatggagtagagctggagaaattttgcagggccaggttaaaaagtgacatttatgtccatctgaggagtttagactttattccatgggcatggaaactactgaaggatttcacaagggaagtggcatagccgtactttacctatagatcgtttactcttagtcatgtggaattaaaatttaagaggacactagaagggagaagacactgtggggtgttttgtgatatttcagaagagaaatg

SEQ ID NO: 2581 - DNA, 621 bp, Homo sapiens
attacacagtttgtagtattttgttataggagcacaaatggactaagacaatcctcataataaccgtctgtagcaagtttcattgttgtccgcgtttgaaatgtaagacagctgaggagcggggaagttatttatccagttgcaaagacactctgctgtagaggcgggaatcgatgccaggcttcttaatgctggacagttgtgtcttaaatagacacaacaatatcagatcaagaaaaaatgaaatgaaacacaaaatcagtaacccacatagaactaaaatcatcaagattttacgccttttttttctcttgcgtttccgcttgtcttgcaaatgtattacgtatttttgacaaattgtcaacaacaatgccactggtttgaattgcctttatttaaagtagcgatgtcacactttcttttatgtcaactgcacagtatttctcctttttatctgatctatagaccacttaggctactataagatcccatgattaccatctctacccttttccaattttgatgaaggagggaaaaataaaaaaacagtaactcaggctgggcgtggtggctcatgcctgtaatcctagcactttgggaggccaaagcaggtgaatcaca

SEQ ID NO: 2582 - DNA, 397 bp, Homo sapiens
aaacaaacctgttttccttatttcctaaacaaaattccaaaaaaaacttttttgaagcaaagatcatatgtgttttcaagtatcaagagatctgaagctttttgccaacataaagctaattaaacttcaagctccagtactgggggacacaattatccttactttgccatgtaaatagttaataggatttatttttgtgcttaaagaatatgtattgttgtatgtacttatatttgtccgtgtcagtcttgacccttagaattttgggcacagatggtgtatatctgacttataaccacagaaacaccaaacacaggagctaagaatattactaggggccagctagctccatgtcatcccaacatggcatggctcccactgtgggtaagagagatga

SEQ ID NO: 2583 - DNA, 305 bp, Homo sapiens
gaccttgccaaatgaccaaatgggacaactctaggaatgagccttcttagcgctgtgggacctgctgctgttagttggcctgcatatgcattctgaggaatgctttttggccaagaggggagaccgaggacaaagctctcatttttttatcttgcccatattcctttcaaaggagtcttgggagtcacgccctacaaaccatgaattctcatcagatgggttttatttaaccctatatattgtgacttaaattccaatctgactctggcataacattatgagacaaaggaaaacctaaaaatatt

SEQ ID NO: 2584 - DNA, 233 bp, Homo sapiens
actacctaattagttaggcagtaaacgtgtcattggccccagacagctgctattaagctattatcattggcatataggcataaattatatacttgaactgcatggatacagttcattaattgatgttttgagccatgataaatcagagagagagagactaggatagcaggggtaaattctgagttttaaaggaaaaagaagacagtggcaaaccagagaggacaggtctgaat

SEQ ID NO: 2585 - DNA, 520 bp, Homo sapiens
gaagttagaaagaatgtggttggttagggcttccaggcttccaaatgcctggaagaaggtgagtttttatatcagctccagcatctgtaggaaagccggagaagaacactagcatccccagcatcccttctgtggagctgaacccctcagcctctccagataggggatccttgttttcatccctggagacccagccctcttgcaaatggctctccatagaggcaatgtctccagagagacttaattggcaatgcttcactgagcacagaaacctgggatatgacagttcctgctctttaaattgtcaaggaaggcaatgtgctctgaactgcagctgctgggagtgcagggggacccatcttagagtctcctccgccttccagcctctgcttctgaatgttctgggaacaagaaacagcaacagagaaatgaacaggtagatggagcacgatgagcaacataagctcaactagcctttttatggtcaggccatgaggatcctggggaaggcaaacctggc

SEQ ID NO: 2586 - DNA, 222 bp, Homo sapiens
tctaagcagatgaggatgggaatgaggagacgttagacccactagttctttggttctgagattggttcttcttgcctgccttacaactcctgctgcttggaatcgttcatacgaaaatagatacacccagaacaaattatcttaaccagattctaaagcagaagcgcttagccaactcatagaattatttaattatttaatattggcactgcaaggagctta

SEQ ID NO: 2587 - DNA, 538 bp, Homo sapiens
ggccagagaacaatgcgaccaggtaagctaccagctggagtaaaagagatggcaaagctaaaaggcatatctcattctggggaaaattaacctcccaattttgcccagtaattgattccatctgactgaggcgtttcagcctccactgtgactgtcatttgggtagctgggaagcgaaagcctgtaattacagtcatgcaaccctgttatcagagcctggggagggctttcctctcttcctaccctgggtgatcacaggtgaggctgaccagagagggaggaaggagagaggggcaagcaggctggtggttctttctccatgggagagagacccctaaggcaaccccaaccatggagaaaaggtcagaggtcgcagggagtcctcttgagttttcatgatatgaacatgaagaggccagagcttcctgcttgctgcaaattcttctctccagggagatgctttgcctagatagagctaataaagagcagggagtgtgattaacagagaattagaagaattcttctaataccatctata

SEQ ID NO: 2588 - DNA, 94 bp, Homo sapiens
taagaacatgcaacatgataaagtgaaaattagtcatacatagattaaaatatttatggcaatgtgctcactcaacccattcctgcttttttct

SEQ ID NO: 2589 - DNA, 586 bp, Homo sapiens
catcctctgtttaaaggaaagtggagcttacatcacagagcacagattcataggtggaaaatgcctgcatccagcacacagggtccctccctgcctgtaaatgatggggtgcagttaatcccatttgacaaatgaggcagcatgcaacaaaagtaattttaattaattaagggattcagagagatgaaagagtggtccttcgttgtcatcttttcccatatagtttataagagcatgacaacatcttaccaacaaagattttgctgtgaggctgggaaaaacgcccagtgtgtcatggttaagagtaagggctgctaagatgggttgccttggcctacgctgcagggtggctgggatctcgtcaccgacaggccactgctactcccacatcccttaccgtgtcccattttacatttcaccctctcccctctgacacatccattttgggtaacccttctacaatcaactggtaccatgttcagtaaatacaaacttaaatctgtgaaacctgggtccacacttgaaaaagctttcttaagcagtcttcttaccaaatgcagatttgtttgagcattcttttggtagt

SEQ ID NO: 2590 - DNA, 574 bp, Homo sapiens
tgcctagaatgctccccaaccactgtctagcctctgcatcgcacctttcaactgtcactttcctacatagccttatctgaccctccagccaacatgtggttttttggaaacatgttaaagaatcaatttcttttcctgcataagttatttagcctatattatatccttgcctctatgattgataaaggcttatcgccttcactatatcaccagatcagtgagaacaagtacctcctacactcataacagtgactgacacatagaaagcattccataaaagattttgttaagttgatgagcaaatggatttttaaaagtagttaaagttttgatgaagatgtccataattgaacaatcaacattctgagcacgtttatgaaaagggaggcaaaataccttcattccagaatgttggaggaagaaaaggtttatctgggattacttaagtagccatcagtgaactctgagggaagattctgggattaagaggaaagagtaggaccataaaaagggtatgtgcacaggagagtcagaagaaatgaggaggagctgagggaaggacagactgatttgg

SEQ ID NO: 2591 - DNA, 446 bp, Homo sapiens
actaggcttactgtaagagctccaaaaatattttctgacatatgttctacttatatgtcattatgtaaaaataaaacaaaattatactcatgcatgataacatctgtattttccaactgcgaagtttgtgtaagtgatctcttgtaagatggaggtctgaaacataaacagtttatcacttgttgctggagtaacaattggcagagattgccctaaactctaatgacattttactctccccaaatcagatcgataggtttttgaagtgcactcatgttgaattagaacaataataaacagtttttaaagaaatgcatgaaaaatacaaagaaataacaaaaaataccttttaaaatacacatcttttcacctttttgaagcatttttacaaagttaaggggtgtgtgtctgtgtgtgtgtgtgtgtgtgtgtgtgtgtgtgtgggt

SEQ ID NO: 2592 - DNA, 596 bp, Homo sapiens
  misc_feature 455: n = A,T,C or G
ttatgtgtttcaactttatgcctgacttataataatagttacaaatactacattgctagtaacaccaatatctaataccatttcctctttcctaatttcttgcagttgaagaaatggagatgagtatgtctatatgcttcactctttcctcagcaagatttatttagcatatgttttgttccaggcaccggctaagtgctaggggtacaaaagttgttttgtctcccttccttccagatgtgtccatgtgtccaggctaacagagtgagtagtcacacaggcaaatcattctcctacagttgtcaggctgaaggctgacttggtgtcataaataaaaaggcagaagatatttgtattcattgtcttggatgatattttcaacttgagtaggcagattgaaaagaaaaatgcggccgggtgcagtggctcacacctgtaatcccagcactttgggntcctgaggtcaagagtttgagaccagcctggccaacatgatgaaactccgtctctactaaaaatacaaaaaattagctgggtgtggtggcaggtgcctgtaatcccagctacttgggaggctgaggcagaagaatcacttg

SEQ ID NO: 2593 - DNA, 450 bp, Homo sapiens
gagtgcagtggcgccatcttggctcactgcaagctccgcctcccgggttcacgccattctcctgcctcagcctcctgagtagctgggactacaggcgcccgccaccacgctcggtcttgtgcctttcttaaaggagaaaccccgtgtatccaaagactgaagaaaccagtttctctaccctctgaattggccctctaggctttctaagatatgttactagctactcacctacataccaaattctggtaggagaaatagaaatggatgctaccaccgacttaaaagagagcaggctactcagttattagtgtggtcctattagtcttttcttcacagaaagatctgtctgtatgctgggtaacaagtgtttttggagacttagggaagggtctggactttgccattttctgcataaggtagagaaagtgcttttggggaacagcatttctc

SEQ ID NO: 2594 - DNA, 549 bp, Homo sapiens
  misc_feature 165: n = A,T,C or G
cagaagggcggcttttcatcaggaaggaagcagaagggataaggatttggcatgcttcaaattgagaggaaaaattaccactgttgtgatagatggtttgaaaaacccatcaagtgggtaactagatcttatagccagactgcagccatcaggaattctaactcntcatttgtattgcagaggaattacttccaatgttcttccagtcctggcccctagtataaactgctgttgataggagatgcagtgagttgtctcccagaaacttgaaagtgagggaaataagatcaccttcaaagatgtatgctgtgaaatcatcatataaatgatccaagcagaaatggctacagtcatcttatagcagtagcagagcttggggcctgagtgtgtgtggcagactcaacagaggtgacattaacctgacttaccatgttagcatatctgaagagtggaagaactagctaatcagaaggtggaagcctcacaaaaggagcatcctgacacatatggtgacagtaccgtcctagcatggtctcaagagcgggagtg

SEQ ID NO: 2595 - DNA, 551 bp, Homo sapiens
tcaggaacgagggacaaagatcaaatattagaaaaaaaaagacattcctatcacccctaacataagggtcttaggagatctatgttacgaactggaaacaaggaccaaatacatatttcttattatgccagatttatgaaagccatggggagggatctggaggaagttccccaggattttctgaaaacattgtaaactttatttatgaaggaaaggaagaaaataatatgcttcagttgggatataagtgtttatcacctgcgaatacatgtggtagaggaaaatgtctaactctctttcttgggggtcacaaatatgattaaatttactatcaccttataaagccaaaagacaagtacgttagtgaaatgatggcaggtataccctgcactgggatttatgttctatgatacaatcttcacatgaaaaacatactgaaaagcaatagataaaacaaaacagcagccttagaggagtgggttttgtttcagcctccatgggcatcccatgccatcgtgtccagctgaaagcctttcacatgatccaccctg

SEQ ID NO: 2596 - DNA, 486 bp, Homo sapiens
tatcagtcattacccttgctcaagcccagactgggtcatctggccacagcaggagatgcagcgggcaacagcagcaggagatgcagcggggaacagcagcaggcatggagctgagacaagatttcactgtgaagacagtttccggggagaggctgggtccgaagctgcatctccatgtccggccgggcctggtggctcatgcctgtaatccctgcactttgggaggctgaggcggacagatcgcttgaggtcaggagtttgagaccagcctagccaatatggcgaaaccctatctctgctaaaaatacaaaaattagctgggtggtggtgggtcagcacctgtaatcccagctacttgggaggctgaggcaggagaatcacttgagcctgggaggcagaggttgcagtgagctgagatcacgccactggactccagcgtgggtgacagagtgatacgctgtctcaaaaaaaaaaaaaaaaaaaaaa

SEQ ID NO: 2597 - DNA, 567 bp, Homo sapiens
gggaattagaaaatttactggcagctttattagttaattttactggacaatagtgaatttggccgtgtcaccacattaaaatgccatcataatattcccattatgtagaatcgcatttatattttccatctgcttctcaggagatctttaagagccaagatattggcttttttttttcctttttatgcatttaagactgctaatgaacccatcagccaaagagcaaatatttattgaacacctacaatgtgcaagggaccggaggaaacacaagaggttgaagactttgtgtccaagaagttgtagtctgatcagagagaaccagactttgcacattaaaactcataagttattaaaagtgggtggctgggggcagtgactcacacctgtaatcccagtactttgggaggctgaggcaggaggattgcttgagcccaggagttcgaaaccagcctgggcaacataatgggacctggcatccacaaaattttaaaaaattaggcgggtgtggtagtgtgcacctgtagtctcagctactcaggaaactgaggcagaaggatcgcctga

SEQ ID NO: 2598 - DNA, 530 bp, Homo sapiens
agtgctgtagggcctcttctccaaaagtctagattctgataactccattctcttccctttgttcccataaccccagggagagtagctgtttcctaaagtcagtgtcccatctttgctttgtcaattctctaatatttatcaatttccttgtattagatcctctcttttaaaataccaagtgtgaggaggctgggtgcagtggttcatgtctataatcccagtatttgggaggctaaggcgggaggattacttgagcctaggaattcaagaccagtctgggcaacatagtgagatctcgtgtctaaaaagctctacagttaaaaataaatggacaaaggccgggcacggtggctcccagaactttgggaggccgaggcaggcagatcatgagatcaggagatcgagaccatcctggtcaacatggtgaaatcccgtctctactaaaaatataaaaattagccgggcgcattggtgcactcctgtaatcccagctactcggtaggctaaggcaggagtactgctcgaacctg

SEQ ID NO: 2599 - DNA, 588 bp, Homo sapiens
ttcatttagagatgatttacatttatttaatgatagaatgggaatacaatgggagggaagcaatgactgagacaagccacaaaaacacgtctagccttgagagttgcaacgaatattcccagccaaatgagtctgtttaatgtgttttcatgcatgcaagtttatctgcttagctcaaactgtttgaacttacagtcccatcatggttatttccaatatttttgaaaacaaacatatacttacacatattttaaaaaatcaccactctgcaatatttctgttgaatcagaccttacgttatgttgtttaataaagtatggtaagttttggcatgtatgatttttatcatataagaagcataatttcttagccaaaaatttagcctttgactctttagtagaaagttgagttctgtacattgtgttctaaagatagacaaaaatctagagattttcttctttcaaagtaaaagcagatgaggcctttttccaccctctgaggcattaaattgctttgctcaagttagacttttaatatatctaatttgataaatgtatctgttaatttatgtaattcagcaatatggaa

SEQ ID NO: 2600 - DNA, 544 bp, Homo sapiens
accgtatgaaaagaagttgtcaatacaattaacttaataacatctacctccaatatgtgaagtatcaacatgatacaatgaatgtgaatcacctcatgcagagtcactgcagcagagatattacaaacaaatattgttacttataatggaaggaaaacatgggttattgtttaggtgtaacatgctgtttgtttgtatctcttcctaaattctgtttagtgggaatttatttgtgcaaatggaataaactgagaatgcacattgcattatgtgatgtcagggtccatgcgagttggcatagcattatgttgaggtctttgtaataaacgcgatgactaagcctgtgggaggtataatggcatctatgggaagagtcaggcatcgtcaattccacagtgtaattgatcccaattaaattttcggcactatttccatttcaactagggaggcgtatacttcttaatctcaattatagtaatcttacttatttcattttccttgaaaaatcttaaaacgtgtaaaaatacttgacattatctatccc

SEQ ID NO: 2601 - DNA, 145 bp, Homo sapiens
aagcgtacaaaactcctttgtttttagctggtgaggaaattcttctctgagccctcagaaatttcatcattaaattgtgttactgctgaaatacaatgctcataaagtcatataatctccaagctggacagtctgagtgtgaaca

SEQ ID NO: 2602 - DNA, 318 bp, Homo sapiens
tgactctaaaaagtgagtcagattgtctctgggagcaaagaaatttaccttaaaaaagtatggaagattgctcatcttggaaaaagccaaaatgtttttggctagattataggcttagaaacaactagaatacccaactcttcacagaaggctgagtaatgatttctgcctttccaaatctctgtggaagcctcttgggctagtataaagggtaaataaatgagtgttcctagaaacagcagtaaaggaacaagaaatagttaaatcttctacatggtaattcagtgcttttaatatacttacacccaatattctcat

SEQ ID NO: 2603 - DNA, 92 bp, Homo sapiens
aaattgcaaaggttgtcataggactatggaggccattaggctaattaaaatttataatattgcccatatatttgtactaagtctcattcctg

SEQ ID NO: 2604 - DNA, 398 bp, Homo sapiens
agggcccaactcctatgccattccagctcttaactgaagcatatatgaaccattaaggtgttatctggagataagtcagctcttgtcttttccccagggacgtttgtattataagagggaacttatagggactttctagacagggatatatgttgggaagaagaaggggaggttagaaaggaataagttggatttgaaatgattgtcagtttccctaaactttttatcggaaattccaagaagctcagaagcttttaggtaaactgaaattaaaataccaaactaaactacagcacctattatacactcacatccttatctcatttgaacctcacaacaaccctgtgaggtagtctgggtcattggccctaatggatagatcaggagagtcactatta

SEQ ID NO: 2605 - DNA, 591 bp, Homo sapiens
gtagagacagggtttcaccatcttgtccaggccggtcttgaactcctgacctcatgatctgcccacattgacctctcaaagtgctgggattacaggcgtgagccactggctgcaagctggtttttctgtgtacttcacttatgcgtgtctattgaacacctactatagctccatgcaaggcattggaaacacgtatagaacagacgtacttcatgtccttgacatgaagaattgaaaaggttagagaaaagtgtattaataggagaaaagagtttctgaagtggacagtaccatctaagaagaaaaattggaagtaaaaggctgggaagaggcaaagaaaattcaagaccagagtcaagaaaagagtataagccgggcgcactggctcatgcctgtaatctcaacactttgagaggcagagacgggtggatcacctgaggtcaggcgttcaagaaccagcctggccaacatggtgaaactccatctctacaaaaacacaaaaattagccacgcatgatggtgggtgcctgtaatcccagatactcaggagactgaggcaagagaatcacttgaacccgggaggcggagctt

SEQ ID NO: 2606 - DNA, 517 bp, Homo sapiens
ctttatactctaaacttttttccttctcttccgtagacttttctcaggaccaagcacctaactaatgattgatcacctttctaactttggatgattggtaaaactgacattgtcctacttatatacacaaaaaatatattccatttcaatactttaatgtgtattctacctcagtgctattagaaccacaaaatgtttaaaagtggaacatccttagttatttttgttacctaggttgcaaagttcagtcaacatcaacaaatatgtattgacatataaatgcaatgaaggattttccatggttaaactaattttttgccatttttaaagcacttttatatctattatgtcatttagtccacacaacaacctgcaagttggaaagggcaagtataattttatcactggaaaaagacagaggttaaatgtcttgctaaaggttgcacaagtaattactagcagaaccagatcttcaacacgagccttctggcttctaatgcagggtcctcccactcca

SEQ ID NO: 2607 - DNA, 615 bp, Homo sapiens
tcctctgaacttaaatcatagttaatcccttacctttttctatgcctcagcagcagtactcactcatccatttattcatgctttcagagaataattggttgggcacatagtatgtattaaggtcatagtaagacttgagagttaggggcatgaaaaacctagcctttactctcttggaacttgcagtctagttcatggtttctacatttaaacccaactagattatatcacaatatatgttccagaagtgtcccagatttggaagagtggaggaaagaggatccatgcgtctgtgtagaaagaaagacagctttaggaccgagtcagattttaaagtattaaggataaggaagctattcctagcagacctaatagcacatgaaaagtcatgacgaaaatgtctgatggggtatctgtagcaggatgggctagaaagttggctaaataaaagggactgagatgaataatatgacatgagtttgtagacatagtcaaaccagattatgggggcttgaaatcctagcataagtacatgagttctatatcatgtagtgtggatgtgctcacatggataagagtgtgtgtgtgtgtgtgtttctgtgcgtgttggaggga

SEQ ID NO: 2608 - DNA, 546 bp, Homo sapiens
ggaagctagagaactaggaccggaagaagaactgagtgttcggagatggagaaatctctcatcatccttgcagaagacaaatttgatatcctctgtccttgtatgctgttttcttaccatagtctgctgaaaggtcaagcagaaggaggaatgaaaagaggacattggatttagtgtattaaataattcaggcaacactagcaggagcaatttcagtggagtggtggatgtgaaagagccaaagttggactgggttaaaaagagtttagggaggctgggcacggtggctcacgcctgtaatcccagcactttgggaggccaaggtgggcagatcacgaggtcaggagttagagagcagcctggccaatatggtgaaaccctatctctactgaaaacacaaaaaattagctgggtgtggtggcacatgcctgtagtcacaactactcgggaggctgaggtaggagaattgcttgaacccagaaggcagagattgcagtgagccaaaactgtgtcactgtacttcagcctggtgacagagcaagactc

SEQ ID NO: 2609 - DNA, 626 bp, Homo sapiens
ccttttctggcatagtagttttaaagcagaaaatacacctagttagtgttgcctataatatacatacttccttgccttgttaaggtcattttaaaagttactgcacaagccatattgtgattaaaaaaaaatcggcctggtctcaatcatccattaagaaaaatctactattaaatattccaatacagaaatttcttttaaagagcgtaatttttagttttctggtctctttctacaatgtacttgcctccctagtacctgcctcaatttccgacatggtttttagaagaaaaccacttctaatctcctcttagctgagaagccaaataatcttattaagaaatatatgttggccgggcacggtggctcacacctgtaatcccagcactttgggaggccgaggcaggcggatcacgaggtcaggagatcgagaccatcctagctaacatggtgaaaccccgtctctactaaaaatacaaaaaattagccgggcatggtggcgggcgcctgtagtcccagctactcgggaggctgaggcaggagaatgtcgtgaacccgggaggcggagcttgcagtgagcggagatcacgccactgacttccagcctggacaagcgacagagcaag

SEQ ID NO: 2610 - DNA, 517 bp, Homo sapiens
taattctgtttatgagaggaatcatgtttatttatttgcatatattgaaccattcctgtatccctggagtaaaacccactttattgttgttatattatctttttaaggtactgttggattcagtttgctaggattttgttaaggatttttgcatccatgttcatcagggatatcagtctatagttttcctttttattgtatccctctcatctttggtatcggggtgatactgacttcatagaatgagttaggaaggcttcccttctcccaccagcaacacatttgtgcagcccattgtcccaccaccaccaacgtaggcacacacacatagacactaccaggtagaccttgtcaatgcatgagcaccctgccatgccctgctgtcaccctgccccagtcagtgattcacctccattgacatgtgtggaccctaatgctcctgctggcacatgctcctttgcacaaatcttgctgccactgccctgatgaaccactggccagcacacccaattggaat

SEQ ID NO: 2611 - DNA, 306 bp, Homo sapiens
agggcctcaaaactagctataaatttcaccattttcacatgtaccaccacccctattatactgacccactaagacaggtaacaatgttatttatatatctacagtgctttccattaagtgagcaaaaactttacatttaaggataaccttgccacatccctaaggaattgtgagaattgtgcaactcaggtttagcaagtgagccattaaacttaattctcattcaaacttagtttgaatgacctttgtttctatgcggtaccacaagaaacataaaatctaacttatctagtgtcttacaacttt

SEQ ID NO: 2612 - DNA, 426 bp, Homo sapiens
cttggcttgtagatgactgtcttttccctttgtctttacatggtcttgtctgactttgtttaaggacaccatttacagggactggataaggtcccaccctaatgatctcatttaacattaattacccctttaaagatcttatctccaaatacacttacattctgagacattggtggggggtggctagggccttagcatatgaatttaggggagaaactattcagcaaacaacactgtataataatgtttcccaaattatagtctgctgagcacttgtatccagatgtactttagtaacagattatactggtgaaacacattgggagaatgctaagtgatataccaaaaagtttgtgtttggttgagattgtggatctttttacaagctaagaatggtaatttccaggagagtgttataggcgttag

SEQ ID NO: 2613 - DNA, 390 bp, Homo sapiens
ctggtgtgctgtatgtactccggaaggtcaagaaatacatacgggctacaaggaaaaatatatgaaatataaagtatgtttccgtctaaggtttcttggaaactctagttgaggcttttacaaatgtgctttttagcatcattcttccaaaagtaccttttaaaatgattctcaaggcttcacaatatatatatttttacaaatacttatttcccaacatctgtaaaagtgtaaatcttagagtattttatgctgaacttacaaatttggtactgaagacaagtatttcttgcagtctgccaaatttctgccacactggaaaatacacagatgattgtttaacattctgtgccatcagacaggaattatatttcacatcttttttttttt

SEQ ID NO: 2614 - DNA, 494 bp, Homo sapiens
tcacaggggaatgttgggtgttattttatttcaggattctgatacctactctaccacttgctggctatgccatcttcacctacttgcacctgttttctcttctgtggataggtgatcatacatcccagtttgcctgggaacacctagacctaatcaaccgcaggagccacttgcactctcaaaggtggcctggtttgtattaaaaacactggggggcctggcgcagtggctcacgcctgttatcccggcactttgggaggttgaggcgggtggatcatgaggtcaggagttcgagaccagcctggccaacatagtgaaaccccgtctctactaaaaatacaaaaattagccgggcatggtggcaggcacctgtagtcccagctactcgggaggctgaggcaggagaattgcttgaaaccggaaggcagaggttgcagtgagctgagatcgcgccactgcactccagcctgggcgaaagagcgaaactccatctt

SEQ ID NO: 2615 - DNA, 343 bp, Homo sapiens
atccatttatccatccacctcccattcatccgtccaccctttcctccatccatctacccaccattcatctgtccacctattcatccacctatcattcatccatccacccatcattccatccatcccccattcatccatccagccacctaccaaccctgcatctacctacccattcatccattcatctgtctatccacccaccatgtatccatctaatcttattcaaggagctacagcatgcgggaccatgctcagcaatgtaaagacaacgattaacagttcaatcatagttcctgtcccaaatggactcccatctactgcagtttgtacccagggatgtgga

SEQ ID NO: 2616 - DNA, 471 bp, Homo sapiens
aaatgactcttttgcagaaaggagtctggaatgatatatccaaatgcatgagtgatgaactctaaagagtcagattattcacaatatggtctttcttcttttttattatctacatcatctaaagtttctacagtaaatatctatgaagtttgtaatgaaaaacctttttgttgaacgtatcaaaatcagattaaattatgaaactataggaatacaaagggtttaagactcagtggctaaaactaaaaaataatttaataaaagttgcagataaaaatttttctgagctagaggttttatgctctattccaatttttcaaaagaagaaatttttcttgtaagccggagatgtataaacaagggtctaaaaccaattttcatcaatcactgaaagaaaaggtaaaacataaatattccatgtcttcaaatgtaatcggattcacattcttcagatacacaaattaaactaac

SEQ ID NO: 2617 - DNA, 488 bp, Homo sapiens
aatgcagctaacagattatctgagagactggccttgtggtaaatcatactgagagcctgctaggagatataggaagaattggaaatgggtacacacaaaactaagcaaattaacaatcagggcaattattaacttcaggagaaataaaaaaaaagtatactacaatgttcagttattgatatttgcataacaatgtaaatactgaatattggtatattgtaaatggtaatatagctatattggggcttataactaatttatctatctataataaagagaagtcaatggatatcttgaaattatgaatcaaaaggatcaatatttatttagaaaaatatgctgggcacagtggctcaagcctgtaatcccagcactttgggaggctgagacgggtgaatcacaaggtcaggagttcgagatcagcctggccaacatagtgaaaccccgtctctactaaaatataaaaattagtcgggtgtggtggcatg

SEQ ID NO: 2618 - DNA, 572 bp, Homo sapiens
ttattgaatagcacacatacatgcccacagtagacatcagacaagtaggatttaatttccttttacttccaaaattttatgtgagtacttgtcattagcaacatttaacctgaagcttgattttcaaagaatctaagaaattaaggttccggtattttagcctttgcagtacttgagaaagcacaggaagatgaaagaatattttctggcacagaaagacattaattgctttgagctgatatgttgtaagctctaagtaatccaaattctaaaattatcaatctccttgctatgctgaaagtagaacacagtgaagagcatatgtaaaaaatcagaaaagtcaattaggaatttattccattagttaagaaaagaggtatcaggttgatatcaggatggcagtggtagagttggtaaaatgtagtcagattctggaaatattttgaagttgaaatgaacaatgcttcctgccagattgaatatggagtgtgggggaaaaggtggagtcaaagaacattggttttcttgagcaacaaaggattgagttgccatttatgcagatgtgaaaaact

SEQ ID NO: 2619 - DNA, 500 bp, Homo sapiens
caaatacattacatgaaagaggtggggctatgaaaaattatctattattagctagacgtgaatttgtttctaaaatgagacccatggactctggagctgggagaaagaaccagacaactggtaagcatgggtcctgccaggtggggcagacttgtggaagtccctgttcattgggaggaagcattaggagagctctgagagatgaagagggagtgacaaaaggaaggagagcaaaaaaagagaggcagaagaaacaccaaaaccaaatgtttcctctttaaaaatgtttgcttcggtcaggcactgtgacttatgcctgtaatccccgcactttggaaggctgaggagagaggatcacttgaggccaggagtttgagaccagcccgggcaacatagcgagacccctgtctataaaaaaacttagaaaaattatccaggccgggtgcggtggctcacacctgtaatcccagcactttgggaggccgagactggcagatcac

SEQ ID NO: 2620 - DNA, 574 bp, Homo sapiens
ggctcaagcaatcctcccacctcagcctcccaagtagctgggactataggcgtgtgccaccatgccgtctaatttaattattattatttttgtagacacgaggtcctgacatattgtccaggctgacctccaactcctgaccccaagtgatcctcctgcttcagtttctgaaagtgctgggattacccggacacagattcatcttctactcttctgctttgctctgtgccctgggtggtagactcctttggactggatcccttgtcaaataggttctgggtgcttccagccaatgggaggtactgtgaagtgagtgtagggagggaggagaaagaggttgtggtatttctctgccccatcattgcttccgttcatctcgagcagtagctgcattcctccacaattcctgccaggtattctgttcatctggggttgcagctctaacttggctcgaataaaagcaattcttcctttaattccttccaccctggaggtgtaatggcttcctgctgctcctaatctctaagcactgcatcctctctagatttatacttgtaaccctatctacatatca

SEQ ID NO: 2621 - DNA, 434 bp, Homo sapiens
tacagtggcagtgaggagagcgagcactggcctgaacacggtcgtcatggggaccctgccctacacaccctgaggccagtaaccgctaaggagagtgggcacagggcacgtgttcaggaggcccggggaacctaacagccatggcctgtcctgaggccatctttgccttcatgtgcctggggtggccctcaggtttccctgaggagctggaaacggtcttcaggctgacctgcaccacccctgtcccagcctcctcctctgagcgtcagtgtcctccctgggagcacgaggacaacgtcagccctgaaaggccacagtacacagtaagacgtgaatgatgtttccctggcctggccagtgcctggctcagccgcgtagccactggtgtctggtattcctgaagaagtggaaggaaatccttggcagattaaaaa

SEQ ID NO: 2622 - DNA, 453 bp, Homo sapiens
gtttctttgttctaggaccccagattagcctctgttaactttgtatgcgtgtgttggtgtgtaggggggttagtaagcaaactatatttgaagaataatgagaagaataaaagctgctaacctgtttctctttctccaaaaacaacgccataacatctggtgtgtgtagaaaaaagatggcgggccgggcgcagtggctcacacctgtaatcccagcactttgggaggccgaggtgggcggatcacctgaggtcaggagttcaagaccagcctggccaacatgatgaaaccctgtctctactaaaaatacaaaaaattagccgggtgtggtggcatgtgcctgtagtcccagctactcgggaggctgaggcaaaagaatcgcttgaaatcgggaggcggaggttgcagtgagccagcactgtgccactgcactctagtctcagcaacaagagc

SEQ ID NO: 2623 - DNA, 359 bp, Homo sapiens
aggatagaggagcatatggaaatgccatctctgaaaaataccattacagaataggcaacaaccttgagttagttggatacaaggaactgggccaaatagcctcttgaaactactttctgctcctcccttcttaccgtcctttcttcctttcatgcatttactgcaggtaacgcatgatacaagtttttttaggagaaagaaatgtggagcccaaaacattgctaatatagaaggaatcaggcttaatttagcatgtttcaaagagccgtgtccaagtcatccaaataaagaccttatttggcaaggtcagctgccctttaaatcaaccctcacaagttaaggtattgtatatggtactc

SEQ ID NO: 2624 - DNA, 437 bp, Homo sapiens
ctcttggagtgcctcaaatctcactgtgcaggtcctcactgctctgcctgtacttatatctcggtctgttggttgctttcattaattcaagctgatttactaacaccaagagtttctcagacaaaatctgctgtgtcagtcctatgagcaggcagaaagataggacaatatgaggtgacatccaaattacaacacaggtggactagccaaggaaaacatttcgctttcaggaagcagtgtgctgtttgttactctagggtgataatgttatgaagaacataaagacaagttatttttgaatgtgtttggggttttctgtaataatttttaccttttttctggtatctttaattcttatttattctaattccagaattgaaaacaagaaagcaaagctcccattatttctacatacatgatatgttatatagaaaatc

SEQ ID NO: 2625 - DNA, 588 bp, Homo sapiens
tgagaacttagcataccaacagcaggaatctgtgttttaggtgtttgtttggctgaatgcatccatactggggcccttcattgtagattgtccccgtgggatcaaagaaaggcacataaccatccttgcccgtacaaagatagactttctccagctggagtttgtaagcagaattaagattttgttctggattccaaagtactcggccataaaggatttgacctgaaaagattgaaaggtattaattaggtcagactttaagatgaaagaaaaacaaatgtcaagggttgaaaggggttaaacatgctcccttaagagtgaaaagcacttttctatgaagagctccatgattccatgtgcccctaaaatactcattcatttattgcttcgtttttattcttattttctttttttctctgagttttcttgctagggaacatttatgccttcttttttttcaataagcattaattaagcatttaagggaagcaaagtattctgttatgcacaggggataccaaggtgtgtgagatgcagttgagaggatggaaacaaactcacagtgattgactaaaataggctcatatt

SEQ ID NO: 2626 - DNA, 457 bp, Homo sapiens
attatccctaagaatatgtaaacgaggtcaaaccccgatcctatttgcattcccctccccacgggtaactatcttgaatcagagccaatactacactattgcattagggtataatttaatcattaggggatagttttcatgcagaaactagaaagcactgatgagattctactcatgttcctttaccagctttagttataaaggggaagcgggaaaatggaagcacgtagaggataaggtgataacctccaccttaccatcttccttcttcccccttaaaaaagaaatggaatgttgagtctatctggaatgttgacaggttaaaaaggagctgttgaagcctgtcgttcacagtagcatcgaaaggtgaaaatttgtctccacttgagtaccttgaaatggcaggtgtgttattggaatattgggctattgttggtcagtactgctgagtatagac

SEQ ID NO: 2627 - DNA, 438 bp, Homo sapiens
gtttcaacatgtgaatgtgggggaggacacaattcagtccacagcgggtactgtaagactctgggaattaccctgaactagtttattccaagcaggtggccctgagctgtgcttcctttaaaatctatttgtagccttaccagactatattatataaactcctctccacatggccacctctaaaacttcctcagcattttcagaacttaattttgtccaaatgcttcaagtttcttccagatgtctgccatctcccagatacagctacttagcaaaatcagagacattccctgtcatggagacacggcccagttcccatgtggttccagggaagatttggtcaaaacattgcccatttctacacagtgtctaaatggaactagcacccaatggttaaagaatattctcagccagggaccgtggctcacctctgtaatc

SEQ ID NO: 2628 - DNA, 559 bp, Homo sapiens
cacacagattgttagtggcagatgtagtgttcaaaaccaggtagcccagctccagagcctactctctaaactgtctttgataagaaatgaattttaaccaaagaaaactatgctttgctttattatgactttggctgaattgctggggtcagcaaactttttgccagggaaagctgttctgcagatgtcaagaggaaaatgaggttatagatctcttcctgtctgggatatatatttattgtacagtagaatgtaatctaaattattcacagtttatattttatggaaattttagcttctgtaaatctgagttagatttcaggactagagttatgtgtaataaaattcttataaaatccatttaaaagattaatgatagatgtagaaaattaaatctgggtattttattttctccagtttcctggatcttccaatttcatttgcagagattgtctttgtgacaaaaatcttctctttagatttcctggggaaaggtaagagcaaagtggctttctttgctggtcctgtggatacagaacatgctcttgaaaagaaaaga

SEQ ID NO: 2629 - DNA, 494 bp, Homo sapiens
atagaaattacagactacactagagatatttcataccttcaggttatttgtaaagaaatggcaaatattacctttatcatttttgacatttatgttaaatgagataataatcactgctatttgaaacctgtcatataggatttgagtctgtctgctggtcaggaatatttgcctcaccccaggatttaaagtacttctagaaagaagccaaaggccgggcgtggtggcttactccttgtaatcccagcactttgggaggccgaggtgggtgaatcacctgaggtcaggagttcgagaccaatctgatcaacatggagaaaccccatctctactaaaaatacaaaattaaccgggtgtggtggcgcatgcctgtaatcccagctacttaggaggctgaggcaggagaaccacttgaacccgggaggcgtaggttatgatgagctgagatcgcgccattgcactccagcctgggcaacaagagtaaaactccgtct

SEQ ID NO: 2630 - DNA, 581 bp, Homo sapiens
catcttacagtacagaggatgtgggatattaggacccatcacccctccctctactgtctcccactgtcccccaaaggccctccagtaaagaaaccatactttgatacacaaagaaaagaggatgctcttgagcttggaattttggaagctacctacaaactgtcagtcatgttcatagaaattctgagatgcaaccaatcttcatctataccaagctactatagaaaaaaatcagaatatgagaatagaaagaaggcatttgatgaacattccctccaatacagaatgaacaagccgaagaatatgctagcaaaacacttcaaaaaaaatctgcaaacaagcatgttaaggtattaaaaaatgtactttgaagtagtaatctaattactaagaatagaaatggtcaaaaaaataggacagcatgaaggaaaattaactgaattcaggacaaataaaatagaagaaaaatacatcatatcaggaatgaacataaaaagcacccaacgaagaattgattcatatgaagcttaataaggagtatagaagaaaaacagattaccaaagagaatgaagatgagacg

SEQ ID NO: 2631 - DNA, 509 bp, Homo sapiens
aatgcagctaacagattatctgagagactggccttgtggtaaatcatactgagagcctgctaggagatataggaagaattggaaatgggtacacacaaaactaagcaaattaacaatcagggcaattattaacttcaggagaaataaaaaaaaagtatactacaatgttcagttattaatatttgcataacaatgtaaatactgaatattggtatattgtaaatggtaatatagctatattggggcttataactaatttatctatctataataaagagaagtcaatggatatcttgaaattatgaatcaaaaggatcaatatttatttagaaaaatatgctgggcacagtggctcaagcctgtaatcccagcactttgggaggctgagacgggtgaatcacaaggtcaggagttcgagatcagcctggccaacatagtgaaaccccgtctctactaaaatataaaaattagtcgggtgtggtggcatgcgcgtgtagtcccagctactc

SEQ ID NO: 2632 - DNA, 539 bp, Homo sapiens
ggtagccacgtccaagagtatttgttttttagtctgggaaatatctcctgcttgaaactatattctgtcttctgctctcaacttttatccctttcctatgtttcctgacgtctgtctgtagacccctgttggtaatgggtatgtgtgggaagataattatgggtcagagaggccttctattgccaaggggagacatggtacttcatctctcatcctcttcctccacctaaacaccattttaacttttgctgccttgttaggaatgtattagaggattccatgttttataaagggataaaccagaggagagggccaagatcctgagattctgtaaatatccaatggaccactcttgccatccccattgtaattgaggcaatggaaaaaggtagcctacatctatgatatagaattaatctttgttaattattattccatctacattgtgtgccatacatgtgtgaagatgtaaaatgaataaagcacagaccttactgttaaggagctcagagtctagtagaaagagagatgcataaatc

SEQ ID NO: 2633 - DNA, 553 bp, Homo sapiens
cctcagtaattttatttgtgtgggggcctaaatgtttccctactagtcttttcggaaaacatgtttgttttaatttcatcttccctcactttatttaggtagaatttttcccccttcatttctgaaattttttgctcaccgccatgtttaaatggggttgaatcatagcgagccatgggctcttgccaaagtgagatagatgtactgaggagataattgaaaagtcagactctgtactgtggggctttaatcggagcactgctggaaatgattgcagagaatgtagtgcttcatatatccatgaccaagattgacatgttgctcacaacatgtcacaatttagtgaggagctacatgtatttccaagaattccagcatagattataatttaaataatcgaatttggtatttaggtacattgtttatatagccaagtgtatatgctttactacctaacaattattctagcctaggtgaatccctaattgaaacacctggctaacactttagacacataaattaagtgggatacagttttctcatttgtattatc

SEQ ID NO: 2634 - DNA, 627 bp, Homo sapiens
ccattagaggaaaaaacttagcctttatgccaccctctccaccattaacaacattggcagccctattaaagtacaagtcagatttgtgtttaatgatcttgaaagtaaagtaattgcttgagtgttaccattcaaatgttcttagaagtgcagataatatttacaattggattgtccttcggaaggggtaggcaggcagccttcctccgctatttgaagctgaggctggggagaagtgacttcagcaattggcttatgggtctaaaagctcagcgtttattttcgtttcttcttttcaatatcaagagactccagagcattagccatacctcattccttcaaggaaggagatgctgagaggaacaatttgtggtgcaagttaaagcacaaccaaatagctccttgggaaaacagcagaaggcatttgtgttgagtcagtatttcaggaatttgggaagccagattgtatctttcctgagagaacagtaaaaccaaatcaaaacgcaagggccagacacgatggcttatatctgtaatcctagcactttggtgggccaaggcaggaggattgcttgagcccaggaatttgagaccagccagggcaacatagtgagacccagctctaca

SEQ ID NO: 2635 - DNA, 636 bp, Homo sapiens
ttaagatctgattataagccattttattaaagttttccagtatgtaacagtttaaaaaattataaagtcattcattcctatatttcaaaagtataactgcaatgcaaaacctttcatgagttaattgggccacatgtcagaaagagagttgaatttcacagtatgtgatcctctgtttcatttcaactcattttagattttcagagtcaataaatgaaaggaattgaaatataaatattcaacttcacctacgttgttatatgtgtgctttaagtattagaataaattgaatctatgtgagctattcatgtgctcaatttaaaatatgtaaacaagttttcaaaactgatacacatagtatttccttatacaagggagattatgcatagaaattaaagtattgggtagaggatgaaaaatatttgattagttggtgaaaaaaataacttaaagtgtattataggtaataaaattctgtaaataccatttttaataatcactgcaaaatgaagtaaagtttatttagcataaaagcagtaggaaataaatgttatgtttaaggaatgagaagaccctcaaagtaggtagccttttgaatgaaaatgattgaataaactaattccttaataagggaaa

SEQ ID NO: 2636 - DNA, 459 bp, Homo sapiens
gacagaagggatcctactcaggtgaaaaataagaattccagatacctcaagcatctggattgtgatagaatacctagacaaagcatcccttcttaggccgacctcatcctcgcttctcctcaacccctgaaaataaaaaacacatctgatagaaaaataatttccttgattatgaacatggataaagaaaaacttaaaactaaaaggatttgataaaaataattataaaagttcaacagaataagaatatttcaaacacaggcatgcatgccttacacacacgtatttctaaaaattatagggttttaggctgggcatggtggctcatgcctgtaatcccagcactttggaaggccgaggtgggtggatcacttgaggccagagaccagcctggccaacatgacgcctgtaatcccagctacttgggaggctgaggcgtgagaatcacttgaacctgtg

SEQ ID NO: 2637 - DNA, 607 bp, Homo sapiens
aaggagtgtggcttgaagtcttttgattctctttccaatgagatgtatataattatggaactgaaaactcacaactaaatggaagtcagaagtgatcatagagtgacagagtttgccaggggtgtttagagtcagtcctaggaggcaacctttaaacatctgtgagagtgcctagaaaacagggctcaattaaaggagactcaacaaagaaataaattacataatgaaatcccagttatttgcataaatttctatactaaatgatatacagaggtcccttacttaacctgtgatttaatgacctgaagtgtacctctctaacaaattaatctcgcataaggactgtttattattgtttgctacaaaataacttctaggcctgtaattccaggatcacctgaggtcgggagtccaagaccagcctgaccaacatggagaaaccccatctctactaaaaaacaaaattagccgggcgtggtggtgcatgcctgtaatcccagctgctagagaggctgaggcaggagaattgcttgaacccaggaggtggaggttgtggtgagccgagatggcgccattgcactacagcctgggcaacaagagcaaaatt

SEQ ID NO: 2638 - DNA, 512 bp, Homo sapiens
aatcccagcactttgggaggctgaggcgggtggatcacctgaggtcaggagtttaagaccagcctggccaacatggcgaaaccccgtctctactaaaaatacaaaaattagctgggcctggtggtgcatgcctgtagtcccagctacttgggaggctgaggcaggagaattgcttgaacccaggaggcagaggttacagtgagctgagatcacgccactgcactccagcctggccgacaagtggaaactccatctcaaaaaaaatagaatacaggtgggtttacaaaataattttatgaggaaaaagaccactaagaccataaaggaaaatactgccaagtttgacaacataaaggattttctaaggcttaaaaaaaattaataatattgaaaggcaaacaaatgggaaaaacatatgcaacaactgacaaagcattagcagtagttctatatataggaagtatatgaataggagtaaaatgaccaataaacatatgaagagatttcaatca

SEQ ID NO: 2639 - DNA, 566 bp, Homo sapiens
actgagtaatgtagtatattattttttcttcacagtgttgcattattttatatgttaacaagtagtagcttaagtaaccgtatgttttgtagctgaggaaatacctgcataatgatccagagtgttttaggagcagtatatttcaattatttttcaaatgtgatttttcaaaaaaagtctgtgtgaaataattgcaaaggatgattgtgaaacagaagaattttaaaataggaataagaataaatctgagttgagtagtttttactgtgttttgatgtatatttgtatttgtgtttctcttcttgaccatctattatttaaaatcatttctcacataaattaagaaagacgtactgagttcttaaatggttttgatagtagacatttcctttggagtacatttgtcatttcttgtactgcagtaaatgtgttttgagtcatgatgtctttaatagtaccaatttaggccgggcgcggtggctcacgccgatcacgaggtcaggagatcgagaccatcctggctaacacggtgaaaccccgtctctactaaaaatacaaaaaaatta

SEQ ID NO: 2640 - DNA, 632 bp, Homo sapiens
tatggttaagtcacttcaattagttaaaatagttggatgagaacacaatagaatatttcaagcaacagctgagtagaagattttaatctcattacaactgatgtcagcattctacctgaggcaaaactaattgcagcagcttcctcccacagccccacctcaccacatactcatcccagataaccatgcaaaagaaaatgtactaataaaggaagagttttcatttgcgcctttacagtcatgtataagctagagcacaacgtcccccatgtacctaacagaaagtgtccatgccctttcccacgcctctccttagtgccaatatctgggatggaatgctggctggatgtgctattttatgagaacaaaaggaatataggtgtcttcaaggaggatgaacctaatttagagtctcaggtcaaccttgagtaagctactcaacatctcagaacctcagtttccttgtctataacatatgggctccgtttgcttttaattctcttgaagaattaaatgaaagtatgtacctctcagagccagtacctggctcagaaaatgctaaataagtacatatttgactccctgagttggcaatgacaaaacagtggaacttggaggagctcacataactc

SEQ ID NO: 2641 - DNA, 669 bp, Homo sapiens
tgatctcagctcactgcagcctctgccttttgggtttaagcaattctcctgcctcagcctcctgagtagctgggactacaggcgtgggccaccatgcccagctaatttttgtatttatagtagagagggggtttcaccatattggtcaggctggtcttgaactcctgacctgaggtgatccacccacctcagcctcctaaagtgcttggattacagacgtgagccaccatgcccaacctaatactatgaactttctaagaaataataccaattatccccaatctattctaaaaacttgaagaggaaggaattctccctaattcattgtacactgatagtggggtaatgctggcattaccctggtatcaaaacagacaaggattattctgcattatcctgctatcaaaacagataaggatgccacatcaaaaagacaactataggccaatatctctgatgaacatagatgtataaatcttcaacaaaatattatcaaacagaatccaacagcacatcaaaaacaaaacaaaaacaacaacaaaaaaacccacaacatgttcaagtgggatttatcccaggaatgtaacaacggtttaacatctgtaagtcaataaacgtgatccatcacattaacagaatgaaggaccaaaactatatgatcatctccat

SEQ ID NO: 2642 - DNA, 567 bp, Homo sapiens
agccaaaatctatatggtttcttatgatttttttccctaatggattttgaatccctggaggtcaggggttcatactctccacagcaactggaagtagaagcccttacaagtaatatctggaatctttttaagtttgaaaatctaatggctatttgtatcagatttatatgtcctggctcttaataacctcctagcctacctgataaacctgtgaaattgcactttcttccagtagataactatgctgttctcaggtgaaatacttcgcttatcccttgccagtccagcctggggaaggcagctggacctgagctgggaattttatttgagggagtggaaataggaggggttggccaaggctgagttagaggggacagctctttagtggcctgagctggctctttggtgcagccgaagattgttagaattttagaggtggagagactttagagatacatcccagtcctctattttacagatgaatgaaagtgagtctcaatgatgttaagtgactttttaaaggctacagaaggctgggtgtggtggctcacgcctgtaatcccagca

SEQ ID NO: 2643 - DNA, 637 bp, Homo sapiens
actatctggtggcatttacttagttcttagaactgactaattagtttatcggttaaagtaatttgctattatattgtaaaatagtacatttgaggctcacttataaaaattggaaaacatcgaaatataagaggtccaagagggtgtttgaaacacattttgctaagttgacaggaaattaatagactttttatgggccattaactaataatacactcaaaaaaaaggtacagttaaataaaggttttaaatagtctataccgtatactaaaactaaattaatatttaggactgaaataacatattgattaagtaccagctatgtacccaaaaaatgctgggcacagaagttagagtaagatgttttacttaaagggcctttgagtgagagttggcaattcattctgaactaaccactaatatcattaagaattagtgctgagttggtagcaggaaataggtaattctgtctaaaggaatcatgaaatggaaaataaataagcttttaataaggagaaggaagagctgaagaaatggcacagtgttcttagaatgacagatagtcctatggggactgcagcataaaagtgaaaaatgtataagataaacctttagatggtaagcaaggcaagattct

SEQ ID NO: 2644 - DNA, 646 bp, Homo sapiens
atattatgtgatttggcagatgtcattctttttctttattacaaaattttaaatcactaccatccctctggtaaatttaaaaagtaaggcctattgctcatcctaaaaggtagagcttgcccaccaatgatagactggataaagaaaatgtggcacatatacaccatggaatactatgcagccataaaaaaggatgagttcatgtcctttgcagggacatggatgaagctggaagccatcatcctcagcaaactaacacaggtacagaaaaccaaacaccacatgttcccactcataattgggagttgaacaatgagaacacatggacacagggagtggaacatcacacactggagtctgtctgggggtggggggctaggggagaaatagcactaggagaaatacctaatgtagatgacgggttgatgggtgcagcaaaccaccatggcacgtgtatacctatgtaacaaacctgcacgttctgcatatgtatcccagaacttaaagtataacttttttaaaaaggtagctctttcccaattagctgttttatctctatcttatttcctattatctttttctgtaaattatcaaactttaaggaccatcgaagtctcctgatagatgcctttatgaagttaaaaac

SEQ ID NO: 2645 - DNA, 623 bp, Homo sapiens
gcatttgatgtttgaagtaaaatacagcaaccttacatagagctttataataagcttcatgtgttcaaatataattggtacttttataaccgatgctgtttgtgttatactcagaaagttatttcttatcgtaagattaccaatatagtcaccaaaattttttttatagtttgaattaattttctacatttaaataaaacaagcgctgctgctgttgttactattcccttttaacatctccccaaattagtgttttattctgtacactttatgagatgccagcttaacaatacccttaatatggcccaaggattttacaaaaggaaatgctggtgtgtttgtcaaaagtgttttctggctgggcatggtggctgaagcctgtaatcccagcactttgggaggctgaggcaggtggaccacgaggtcaggagttcaagaccagcctagccaatatggtaaaaccctgtctctactaaaaatacaaaaattagctgggcatggtggtgcatgcctgtagtcccagctactcgggaggctgaggcagaaggatcacttgaatccaggaggcagaggttgcagtgagctgagacagcgccactgcactgcagcctggacaacagagc

SEQ ID NO: 2646 - DNA, 591 bp, Homo sapiens
ttccctcgcttcattacactctcccttcccttataagcaccagtccaaaggctagaccactgaaaattctgtagctcccctgggtctggccacccctgtgcaactgtggcaatccgtgtgggcccgggggaatgtctgtggaagagggtggttcctgtaatgtggacagacagaggctgaggttccctgggcagaaaatgctcccctgaggcctgctcctgtagtatggcacccgcagccacagttctggtcctggggagggagagcaatggggagtgagttggtagtgtggtataaagacctcaaaaaatccccaaatcaccaccaacattagtgtttgggtccatgtgggcagagaaactctcttacagtttggataccagtggtctgccacagagccaagaggactcagatcattccaacctgccactttgatgaaatgtcaagtcgcgatcacgaggtcaggagatcgagaccatcctggctaacacggtgaaaccccgtctctactaaaaatacaaaaaattagccgggcgaggtggcgggcgcctgtagtcccagctactcgggaggctgagtcaggagaatggc

SEQ ID NO: 2647 - DNA, 602 bp, Homo sapiens
  misc_feature 156: n = A,T,C or G
ggaatgctgtcgggactgagcaggcaatggcctaaaaacaataaaaagccctactaaaagctggttttctttttattattatcctgtactgacaattcttagtaatatcagtgatgaaataaatcactggggaagacctctcccacaccagccccncggagtcttgctctgtcacccaggctggagtgaagtggcgcaacctcggctcactgcaagctccgcctcccgggttcaggccattctcctgcctcagcctcccaagtagctgggactacaggcacccgccaccacacccgactaattttttgtagttttagtagagatggagtttcactgtgttagccaggatggtctccatctcctgacctcgtgatccgcccgtcttgtcctctcaaagtgctgggattataggcgtgagccactgcacccggcttccgatatctttcttaggaaggatacatcatcatttaaataatgaaagcaatatatattcactgtagaacatccagaaaaatttgaaaaaatatttttaggagagaatcaaaattcacattaactccaccacttattgataatcatagatctttatgtcattattactt

SEQ ID NO: 2648 - DNA, 635 bp, Homo sapiens
accactgatccaagcaactggttctcccttctccactgggctacagctctgagcttctgcacaaagagtggagtctccatctttaaatattctgcttatttttcaatttgtcattatactaagaggtcatgtgtgtggattacttactttgtgctgggcagtatgctaaattctttatacatggtaactctttatgcttgtaacttcgtgaggtatcacagtcctcatttttacagatgaaacttcagcccagaaaggtaatttgcccgaacagcaaattctgaaactggaattggtggctctggtgcccaagcttgcatatttagaccaggcatcagtaatagcctcagttttgtttattgctttgttaagccttagttttgaagcacttgttaagtgcgaggctccatgtagagtgtataaacactcaatctctgtgtgacgacagctccaaggagcagtccagcaagttctgtctggccaaatctagacctggttttgattaactttgttcatgatctctagatcactctgctctatgcttgaacctgtatgcttgagtcaagcttacctctctgatgggtgaagaaaatgatatttcactgttatattaattttatttttcttaccacaaa

SEQ ID NO: 2649 - DNA, 622 bp, Homo sapiens
gtgacccacttaagattccaaccatctctattttactccaaatcctaaattcttagccattatgcatcactgccttgacagctgttttgtacctgcttccttctccctgcagagtgcctgctgcactgtaggtatttaatatatgtgcttagaacgtgaactaagctgaaaagcacaccaaccaacaagtttttttgatgtcattctttctatttaaaaactgttgtgactaatgagctattttaggtctggattactgtggctgaagtaacagatatgtgatcaggtcctcctcatccccatgacacatagagtgtatgcttcccaatactgagagtcaccatttccttcctgtatattcctggtctttaatataacctcaaaccaaattccattatattgtgtacttgatgctaccattactcagcatgttaaacgaatgccataggccaggtgtggtggctagcacctgtaatcccagcactttgggaggccaaggtgggcagatcacttgaggtcgggagttcgtgaccagcctggccaacatggtgaaacccatctctactaaaaatacaaaaattagccaggcatggtggcgcactcctgtaatcccaggaactcg

SEQ ID NO: 2650 - DNA, 588 bp, Homo sapiens
atttacccttgtatttcccacagtacttcccatagtgagttacccttagtaaatactcagtaagtttaattgaatttaaattacctgtaagtcttaaaatgtgggattaaattaagaatatattgtcctggaaatacccaaatgtctattgatggatgaatggataaacaaaatgtggtatacacataatggaatattattcagccttaaaaaggaatgaaattctgacatgtgctacaatatgatgaacctggaagacattatatgtgaaataagccagacagaaaaggacaaatactatatgattccacttatatgaagtacctagagtagtgtaattcatagaaacagaaagtacaggttgacatccaaaatctgaaatgagaaatgctccaaaaactgaaactttttcaatgccgacacgatgctcaaagaaaatgctaattggagcatttcagattttggatttttggatttgggatgctcaactggcataatgtgaatattccaaactctgaaaaaatctgaagtctaaaacatttctggtctcaaggattttggataaaggatactcaatgtgcaacatgt

SEQ ID NO: 2651 - DNA, 660 bp, Homo sapiens
taccctcctcctcttcagttccatcaaagtgaaaccagatcaaatggattgacttagtagagccagaagcctgtgtgtggggtgctgttggggtgaagaagggttaaattcaagaaaaattgtcagagacatatcaaaaggaggcatttcctgatgcccaccagaggtaggcttgcgaatcaggtcagccagccacagatgtgcaggttgtggcctgcacaaccctaggaagcaccaccagcttgaaaacacaccactgttttgtagatttattacacttttctgggagacactttcttgttctaacaaaatctctacataatgacaatttttccaacagatgacagtaaagcgtcttgagaaagtgtaccttttaaaaaattcacatggaggtcccttatgggctagccctggccctgagtaagttgaatccatggaaaatctaaagaatcccttttcaggccgggcatggtggctcacgcctgtaatcctagaactttgggaggcctaggcgggcggattgcttgagctcaggagtttgaaaccagcctgggcaacttggtgaaaccccatcgatacaaaaaattagccaggcgtgctggcacacgcctgtgatcccaggtactcagaaggctgaggtcggagaatcgcttgagtctg

SEQ ID NO: 2652 - DNA, 637 bp, Homo sapiens
tttcccaaacgcaggttaccttggcatcaaatttctcaagtgtctggctccgaggtggatctggaattttcagcctctttgtgatgttagcagggctttttatttccatgaaatcttgaggtaacagagggtagggaggagagagcaaacactgacatcccagactgggaaaggggagagatggtggaaactgagaccaaaacactaaaaactgctgggtccatttttcttcccactgggaattcaggcaacagcatcaagggctggtacaaggcatagcctcggagacagacctgcctgtggcctggcaggatctcctgcttaagggccttattgccctgcttcattaacaaccacggcttagcaacaatctgccagcaggggtcagtctcggtcgccacacagaagccaggaggctctctccagctacaaagccacgctctggaatgttccagaagttgttcggtgccactgcacaacactcagcttctcttcctatcttgtcacctcggcacctgtttcctagtttttcaagattgcatttcatacttagagaaattaattaccttatattcctgtggcagaatttcatactgagctaaataattataccaagttccccatatcatgtataaaa

SEQ ID NO: 2653 - DNA, 592 bp, Homo sapiens
gtgtattttcattttcggatctggaatcagccattcctgcaggcagccccgttctttttggtaggaaatggtatttagagaccacagtgcagcatgacagtgctcagtgctgctgggttgatgatcatttctaggccttttcaggggacagtatcttcttaaagatagtttatatttcctttgagatcaaatgcatcatgaactcatactgacagatgattttgtgagccaggcaattgagcagggactggcggggtgattcttctgtttcaggcgtcctgaacagaagtcacttaattatattcagctgtgaatgggttggtttagagtatttgagtggctgttgacttccatgtctggtgacttgaagtggatgccagagggtgaggcttagctgaggcttaggccgagcacctgcagagtgcttggactcctcacctggcctcagggctcctagagagcatgttcagcagggccaggcagaaactgcaagagttctaatggcctaacctcacgagacagggtcaggctgaagtgcagtggcatagctcactgcctggaactccttggctcaaacaattgtcacacctca

SEQ ID NO: 2654 - DNA, 668 bp, Homo sapiens
gggtctggatgatgaaccacagtgtctagtacaataatttctcttatgtgagcttcaagagtgatattgagttaatgtttctatatcctacttttttgttttgttgttttgttatgactttgttctcttaacaattaattttccaccttagtgtttcttatactgaggaattgtagctacttatactacagaggaatgctgaggaattgtagctacacatgacgattgcaatttcaaggaaagggaatttatgctgaaatatttgaataacttcccctcttagtttttactatgtcaaaaaaattcatataaatgtatccctttacacaattggtctactgaaatttttggtgaaactaaaacacagtattgccttttttactgtaaaagagaaaaaattaaatagatttatgtacagagacacctattacaaaaaatatttttaaatgaccctacactgtatttgcataaaagacttaatttgtcatttccttagaaatgagaggttaggggccaggctcggtggctcatgcctgtaatcccagcactttgggaggctgaggcgggcggagttcgagactagcctgaccaacatggagaaaccccgtctctactaaaaataccaaaattagctggaccgtggtggcacattacccgtaatcccagct

SEQ ID NO: 2655 - DNA, 549 bp, Homo sapiens
tgatagcaaatataaatgtttatgagtaggggcatgggtggtgtagggttgattgatacacaaaggcctttgtgaggactcgtcttcatggaagtttaattattgcaagtacttttttaagaaagcatgacaggaacaataaaccttaaactcaacaatgattgctacctagaaaaatatgcttgaaatattgtctttttactatattagaaaagttgattcaatacaaaataagctcctaatgtagaagtgatcattaaaaaggtaaaaaagtggatcacgaggtcaggagatcgagaccatcctggctaacacggtgaaacccagtctctattaaacacacacacacacacacacacacacacacacacacacacaaagttagccgcgcgtggtggcgcgcgcctgtagtcccatctactcgggaggctgacgcaagagaatggcgtgaacccaggaggtggagcttgcagtgagctgagatcatgcccctgcaatacagcctgggcgacgagccagactccgtcccaaaaaaaaaaaaaaaaaaaa

SEQ ID NO: 2656 - DNA, 588 bp, Homo sapiens
tctgccaagtaaagaaaaatccatcttaaaatattttgctatactatggattttagtatatatgtttttcttctagtttctataaccaattatggtcctatatgaataataatggttttcatatttataacaaaatctaaaattagttatatttatcctactggcggtgcactgagaaaattctactacatttgagcttaaaaaataaataagccttaatgcctcaaatgtatataaactgactcataatttgatattcagcctttgaaagtggttttgggggtacacatttaaagatgtatgtaggccgggtatggtggctcacacctgtaatcccagcactttgggaggccgaggcgggtggatcacaaggtcaggagattgagaccatcctggctaacacagtgaaaccccatctctactaaaaatacaaaaaattagccaggcgtggtggcgggcgcctgtagtcccagctacttgggaggctgaggcaggaggatggcatgaacccgggaggtggagcttgaagtgagccaagattgcgccactgcactccagcctgggctacagatcgagactctgtcgcaa

SEQ ID NO: 2657 - DNA, 655 bp, Homo sapiens
tgcccatggctatattgatttgggaatatatatggatactaattatgttaggattcatacaattccttgagaggcacaagtgctaaaaattacttgtatgaattatttaatatcattgcaaataagatgttattttaactttttttaagtttctgcaaatatgtttattatgactttttatttttatatgattggaaatacatatactaaaattccacgttaccagtttcttaaccacagaaacctgaaaaattgccatagttgatttgttacttctaccttggtgcatttacaaaatagtcatatttttattatgaagttaaatattcatttgtttatagctacttcagaaggctcaggttatttttttctttaatagcacagagtcctctcaaggtaagcactgtgcagttagtataaaccattattccccatgtgtacatgattcacagtttgtattgtgttccaagtgaaccatagccctttcagaaatcaagacttatattcattttacttctttgagtactcttgaattttagaaagtccattatgatcctaaggtagcaacaacatagcctattaccgtctatgatggtttacagatctattattccacgttagttcatcactatcaactaccatgatagagttaagc

SEQ ID NO: 2658 - DNA, 635 bp, Homo sapiens
atgcatatttattaaaagtctctgaactccaaacctcttgccaatgtttcttaagcctgatgattcctactattgctccacaacgtgtatatgggagttcccatgtaggaagaaaaatagcatccttgtataactaattaagaaagattaaaggaaagcaaagaatttaactatctttacacagaaaaggtggccggtgttttagtgagtattttctcaaaatctatacccatgcctggcacatattaagcactaaataaatctgttagataaatgttcaaataattagcctaagcttatagacaagagtctaaaacattgatggcaaaattcccaaaatgcaaaataactcaagcaataggcattcaaaagtattgatttatattacagagtcaaaacaaggtggagagtatggattctagactccaggcttggattttggctctacttctttgacatcttgttataaccccctgagccaaagtcttctcacccgtacattaagaaaaataatattggccaggtgcagtggctcacgcctgcaatcccagcactttgagaggccgaggtgtgcggatcacgaggtcaggagatcgagaccatcctggctaacacagcgaaaccccatctctacg

SEQ ID NO: 2659 - DNA, 616 bp, Homo sapiens
tacaagctatgaagccaaattagacgaggaagcaagttacagtcttgatgtgtgacagggtagaaatcagccttaaaaacaatgcatgagaaagtgacttgataatgctagaagctgcaattcccaatgtagacatgacaggagtatctatgcaccacataaaacagcagtcttcaaaaaacggaaactgcaggataggtaggaataaaaaaacacattcataaaggttaacattgccactctgaatccaagacaggttaagaggccaaaatgaaattatctagaagccttcagtttctcatggatatgataccaagcattgcgcttcaataacagagaaaacacctttccaacctcccttgaaacgtttatggaaacttgccacatattaagacacaaaggaaacttcagtaattccacaaagcagagacaatctaaacatattctctaaccacagtacagtaaaactagaaattaaagactcaaaaattccctactggaaatgttactaagaatttgttcaaaatggtaacaccttgtatcagaatccatgatgcaattaaagcaatgaggcaaagaaaattacatccaaaatgaaaaagaaacatcaaatgca

SEQ ID NO: 2660 - DNA, 637 bp, Homo sapiens
ctagagtgttacgatttcatgggcaaaatacaaagttgaagtgtccctgataacacatagcaagcagcacatttcccaggaaaggccagcactgcttattctcacagaagtcacccctgcaagggttctttagatcagtggttctcaaattgagcattcaagagcatcccatggaaggcttattaaaatgcaggttgctggcctcagagctcagattcagtagaagtcagttagagtctgggaatctgcatttctatgcatccttgctctctctccctcccttcctgctgctactgctggttcagggaccacactttgagaatcactgctttggatattagaatgatgattctctcaagtcttgaaaaaaaattgcgaagttccctctaatttagcagagttaagacaaatgtttcatttaatttgcatctatacatagctctgatggactaatcctttataattcaaagggaagaatttaaaaatcataatgatgaggctgggcacagtggctcacgcctgtcatcccagcactttgggaggctgaggcgggaggatcacctgaggtcaggagtttgacaccagcctggccaacatggtgaaactccatctctactgaaagaaaatacaaaaatta

SEQ ID NO: 2661 - DNA, 630 bp, Homo sapiens
cttatcactaagaatgctttatctgttacagtctgttttgtatagtattaatatagtaatatgcagctttaaaaaattatttgttcaatatttacttttctatttattttcaatcttttatgctcttatattttaggtgagtctataactgaatgattataaagatacttgttgaattcaacaaaagccatgctttgtgaaaaatttttagcctcaaatgaacataaaataagagaagaagggctaaaagtctatgacctaagtatataacttaggaagttagtaaaataacaagtaaacccaaagattccttgaaaaccctccagattccttgaaaagactaacaaaatggacaaacttctggcaaggcatataaattggggaggggggcaaagaagaaacaaacaaataatggtaggaatcaaaaaggccacaagagtgtctatgagtgagtctcagccaggctcttccagaggataattgacaatgtctgaagacatttttgaccatcattatttagggagtgttactggcatctagtgggtagaagccagagatgctgctaaacatcctacaatgcacaggacagcccccacaccaaagaattatgcagcccaaaatgtcagtagt

SEQ ID NO: 2662 - DNA, 654 bp, Homo sapiens
agggcaggatggagggacgtacagcctgaaaggacactgccatggtccaggcaaagggtcaaagcaggaacagatgaagatgtatctcctttaaaaacaaacaaacaaaaaaagacagtttccctctgtcacccaagctggagtgcaatggtacaatcttggctcactgcaacctccacctcccaagttcaagcgattctcctgcctcaacctcctgaatagctaggattacaggcgtgcccagctaatttttctatttttagtagagacgaggtttcgccatattggccagactggtctcaaactcctgacctcaggtgaaccgcccacctcggcctcccaaagtgctgggattacaggcttgagctaccgtgcccggccaaagacgtatctctaatagtttttgtttttgcttttttgagacaaggtctcactctgtcgcacgggctggagtgcaatggcacaatctcagctcactacaacctccacctcctgggtttcaagcgatcctcccaccttagcctcccgagtagctgggactacaggcacatgtgtctacacctagctaatttttgtatttttagcagagacagggtctcgccatgttgcccaggctggtcttgaactcctaagctctagtgatccacccacctt

SEQ ID NO: 2663 - DNA, 648 bp, Homo sapiens
aacactaacccacagggaggatgagagaggaaagtgcctcctctggctgaaactgccaggatgccctctacttctaaaaacatttggtattttccatagcgcgtttctataacaaaaaatatgtgctagttcccgttagctggaactgacatgtggaaggggccaggtcttgtggggcctggccaagactgcccccctgtgtacagcaagggaggacctgcggttccaccagagccagagcagggccagaggccgcaggggcacctctgagctccaacaaagccagcaacaccccataccgccgaacagacagaaaggcgggccaggggccctccatgtcctgaaagacccagcacagcactgtccatttcacaccaggattcttccaacatgagaaagcaataacctttaatattcacgtgctcattcaacttaactgggggcgggctcagtggctcatgacagtaatctcggcattttgggaggccgatgtgggtgggtcacttgaggtcagaagttcaagaccagcctggccaacagggcgaaaccccgtctctactaaaacatacaaaaaaaaattagccaggcattggtggtgtgctcctgtagtcccagctactcgggaggctgaggcaggagaactgcttg

SEQ ID NO: 2664 - DNA, 657 bp, Homo sapiens
atgtcagcaagcactgaaaatggggaaactgtcccttcctacctctgtaggctggagacctcgggttcagctccatttatcagggcacaggaccttcctgttctgagactttgttccaggggactttcacacttcagagaatagcacatgtcatcctgcacttttgtggggtgattaaaagctcacggtatccttttatgtttagcccatccaattcttccaactggcctcagccagaaaagcagggaaggcacccccagtttgcagctgagagactccagcctgggagagctgaataaatcttttgcccagaggggttcctcagtaaatgctggagatgaggctcagacctgacctttggattcccagatggagtgctctgaaccgtgtacctggggctgtcttcaccactcaaatatcgatagagataacatagagatgtcctcaggaagataaccaactgttcccatcctgtgtggtctacagattgggagatagggcctacccaagtgtagaaataaacattttttacaacatagagaaggctgagaaccaggataccaatatcaataaaatctggatatcatagagcacatggaagctaaagaaaaataagtaactggtcaggtgtggtggctcacacctgtaatcccagca

SEQ ID NO: 2665 - DNA, 253 bp, Homo sapiens
gttggctgccttcatttcagctgcataagattggttggatccagagagattgtcctcactgatgctctgagccagccttgaggaaccaccacatctgacctcattctgtttgctgtgacaagagagggcagagttttgtgatattgcttttgaagacaatgtcatcaagatacaaaagccatgggaatagtgtgtatggtgtgtgtatacaagggaaatggggaaatggtgtgggatgtgaacacaagtgtgt

SEQ ID NO: 2666 - DNA, 662 bp, Homo sapiens
gagccaactcttagggcacattaatcttgaacttctggcctccaggattattaagaaaaattttctgttgtttaagccactcaggctgtggcattctgttctggaagcctgagctgactaaagcagaatcatgcactcactaaagaaacttctgaaaaatgcacataaggaagaagaactgaaatcaggaataaaatgatgagtaaagttacagtgatgcatatcagggaagatcaaaataagtaatgactgcacaaaacaatattaaatataaggattggattgagagaatatatgcaactgtaatagaattattgagcaacaataatatgcacatttgaaaacggtgataaagaatacaaaagatctattatttggaaagaagtagagatatgactcttttgtctttaacttaagaaagcacataaggccccgcgtggtggctaacgcctgtaatcccagcactttgggaggccgaggcgggtggatcatgaggtcaggagatagagaccatcctggctaacacggtgaaaccccatctctactaaaaaaataaaaaaaaaattagccgggcatggtggcgggcgcctgtagtcccacctactcgggaggctgaggctgaggcaggagaatgacatgaacccgggaggctgagcttgcag

SEQ ID NO: 2667 - DNA, 667 bp, Homo sapiens
gctgggattatgggcgtgtgccggcacacccggcttatttttgtatttttagtggagacggggtttcaccatgttggccaggctgggtcttgagctcctgatctcaggcaatctgcctgccacggtctcccaaagtgttgggattacaggcatgagccaccatgctcagccttgtgtccctttttgaatgatctgactcaatcttccagaatacttcatcttgcttctgtccaactgcctttgagatttcggactttttgagtctgtatgctatgctcactggaaatgttatctcaagccttcatagccatgtgctatttgccatctccacaaagctgacttcttgtattgcttttaaaagggatcttcatggggctatgtaaggaaatattcatgcattttagaggtgcatactaaagtaggaaggagtgaaatggcatgaggcctgcgatgctctttaaaagatttcagcaaagagaaaaaaagtagaacacaataaatgaagcaaacatcaaaaaatcgagtaattgttaatcgagtgacagttatatggagagtcactgtgctatatgctccttttgtcataataaaattttaaaatataaaataaacattgtcataataaaagtttaaaatgggctgggcctcgtggctcacgcctgtaatc

SEQ ID NO: 2668 - DNA, 351 bp, Homo sapiens
ggctggggaaggcgattggcatcgatctctccatcccttccgaggcccgacttcggaattgtcttagaagaaagaaggcaagccaccattttacccacgtaaatatatgaatatatttctgacattgaggtgttccagaagatgataaagaaatgatagcagctccagaaataccaactgattttaatctactacaggagtcagaaacacatttttcttctgacacagattttgaagatatcgaaggaaaaaaccaaaagcaaggcaaaggcaaaacttgtaaaaaaaaaaaaaaaaaaaaaaaaaaagggggggcctttttttcggaaaacccaaccttaaaaaaaccct

SEQ ID NO: 2669 - DNA, 611 bp, Homo sapiens
acagtcagaggtaaagaggtcactgatgatcttggtcagaggagtttcaggagcctgacagggacggaagccggcaagccccgaatcagggaaggagtgggaggtgagaacagatgatcaagggcagatgactcttgcaaggcgtggctgagaagcagagagacacagtgaggctcttgggggacaactggaaggcatggggcactttgattttaactcagggaaccctgagcttacctaagtgcagatggccagtcacagctgcaacccatagactaagaagccatgggccaggtgcagtggctcacacctgtaatcccagcactctgggaggctgaggcgggcggatcacttgaggttgggaatttgaaaccagcctgaccatcacttgaggtcgggagttcgagaccagcctgaccaacatggtgaaacccccgtctctactaaaaatacaaaattagccaggcatggtggtgcatacctgtaatcccagcgacttgggaggctgaggcagaagaatcactgaacccaggaggcggaggttgcagtgagccaagatcatacaattgcactccagcctgggcaacaagagcaaaactccgtctcaaaaa

SEQ ID NO: 2670 - DNA, 652 bp, Homo sapiens
ccttgattttgatcaaataaattacaggcaccagctggccaagagttttaatcaggctttgagatagtgggtcattacatggcaagagcgcccaggacaagagacacgggtgccctgcagtgtgggaacatcatccagggcagggaatatcatccagagagaatgattttgtcttgaattttgcaaatgttgaacagatataaaaataacttcataaatgattaggagaattttttccatctttaatttcataagaaaattattgaataataattgcttaataataattgcttaaagcaagaaatagggagaagcttaaaatgcttatttaaaataaggtggcaaaataaattttaaatgcttataaatttatacatgtacatatgttgttcacagaattaagtgtataagacagtgataggccgggcgaagtggctcacgcctataatcctggcactttgggaggccgaggtgggtggataacttgagatcatgagttcaagaccagagtggccaacatggtgaaaccccgtctctactaaaaatacaaaaattagccaggcatgatggtgggcacctgtaatcccagctactccggaggctgaagcaggagaattgcttgaacctgggaagtggaggttgcagtgagctg

SEQ ID NO: 2671 - DNA, 657 bp, Homo sapiens
ctctagtcctcattctactcatgcttcagtacatcagcgtcacagaccactctgccaggcaatattaggttcacgatgaaaagggagaagaagaaatgttggcagattcccgcgatactcagaaaacagtataaaaaggaccaagtggtttgaaacaggatttaagatgcaagagattacaaagaagccttccttgtagattgaatgttagcgtcaattactgatataaacatctttggggagacctcgtttgagcaaagttaatgacttctgttctggatgtgtacaatttaaagggcctataatatgttttacccatgcatcctcaacaaggatgatattgccaccaaagggggtaaaaattggttgctggggagtaaaaaaaatcttactttttatgcacaaagtatagaaaggcatatagtacataaacatttatgctactgcatatttatcaaaatttcatggagggcaattaggaaaatattgtctataacacttatgggaagcacagataatgtgaagaagtatgaagttattcaagaagtatggaatttatgtgagaatatgtgtgggagatcatatgtgtgtatgtatgcacatacacatatacatctaaaggaagtcagtgtacacacaggaattgaagccccatgc

SEQ ID NO: 2672 - DNA, 579 bp, Homo sapiens
aactagatattcgaatgaatatatagggccattcaacatagtcaccattgagctatctttagagcacagggcatttaataatgggcatctccctgtggagagatctggagctcaggagcattcaggatttccatgccccttctctctgcatcctcctgcctctaatctagctatagcaaggacactacagcagttcactctttaagagtatttctggttacccagtgaagggtgggatcaactctcccacccaaaactgggttgggtgtcaagactgattcaccacatctcaggagggtgtggaaagatgtattgctcacatgaggctttctggggagagcagggcagccatccaaacgggtctagtttttattttggttggagagtgggctggggtgaggctacttatgaatgggcagaggtttgatcttcctgctggcacagggaagaagtgcccccactttcttattggcttacacagatgtggggcaaaaggggagtgatggggctcaaaagccttcaatggtcaaataccaaaaatagggccaggtatggtggcgcatgcctgtaatcccagca

SEQ ID NO: 2673 - DNA, 687 bp, Homo sapiens
tagatgcacgatattacttctgaacaagagaaagaaactggtaggaaaatttattttaaaagtgttgaagggaaagaatcaagaccacagatccagatccggagattattttgctaaagaatagcaattgtgaggcatgaagtgggaggggggaagaagctatgaacttaattttgaggtttctgagaaggaagcttgagtgaattcacttcagatgcatttggaatgtttgcactccagaagatgagattgtgtgtgctctggagagtattggaagaaggaggtattactagatttggcgactcccacagtgactcattactcttctctgttactttcaggattcatagagatatgttttgttgatattatttatttaagtgagataaatttgaatatgaatccattggcttttttttgtaaaatttctgctttataaaatctgttagaaggctgggcccggtggctcatgcctgtaatcccagcactttgggaggccaaggcgggcagatcacttggggtcagcagttcgagaccagcctggccaacatggtgaaacccagtctctactaaaaatacaaaaattaattagctgggcttggtagcacatgcctgtaaacccagctactcaggaggctgaggcaggagaattgcttgaacccagggggcagagactgcagtgagctg

SEQ ID NO: 2674 - DNA, 661 bp, Homo sapiens
taaactctttagtgagaattttttaaataaccagttgaccctggattttctcgtgtactctctaacttgaaccacacattctactatcaagacaaatccaagttggtagccaacacatcttcctgagaatttgagctagttaagttaagaacaaatgaatgttttcttgattcttggtattagtaagaatggaaacctgaagttgataaagtttttgattgagaaaagtagtgtaatgaggttttgcttttaccctatttctcctaagtgaagaacgacaaggcattgacagtgaaattagtctcttcatttattgatttggctcttaaaaagaaagagattttagagatgtcaaatagtaaaatcaaaaagggatgtgtaaagaagtttttagagaagcagaatggatgcagatattcaatgactgcttgagacctaacgagaaatattggctggttgtggtgccatatgctcatcatctcagccctttgagagactgagctgggagaattgcttgaggccaggagttcaatcccagcaatatagcaagacttgatggtacatacctgtagttccagctgcttggctggatgaggtggaaggatcatttgagcacaggaggtctatgctgcagtgagctctgatgatgccattgcactcg

SEQ ID NO: 2675 - DNA, 665 bp, Homo sapiens
tgagaacttagcataccaacagcaggaatctgtgttttaggtgtttgtttggctgaatgcatccatactggggcccttcattgtagattgtccccgtgggatcaaagaaaggcacataaccatccttgcccgtacaaagatagactttctccagctggagtttgtaagcagaattaagattttgttctggattccaaagtactcggccataaaggatttgacctgaaaagattgaaaggtattaattaggtcagactttaagatgaaagaaaaacaaatgtcaagggttgaaaggggttaaacatgctcccttaagagtgaaaagcacttttctatgaagagctccatgattccatgtgcccctaaaatactcattcatttattgcttcgtttttattcttattttctttttttctctgagttttcttgctagggaacatttatgccttcttttttttcaataagcattaattaagcatttaagggaagcaaagtattctgttatgcacaggggataccaaggtgtgtgagatgcagttgagaggatggaaacaaactcacagtgattgactaaaataggctcatatttatcaaactcatactattttccaggtactgtaccaagtcctctcatgtaataactcatggagtgctcacaattttgc

SEQ ID NO: 2676 - DNA, 644 bp, Homo sapiens
gttcgttactggtgaatttcaatgtagtgacatcatgttaaatgaatacacagagaatgcatataaaagtacaatccttacttgggccctggagttcgggaccagcctgggtaacatagcaagacctggtctctcaaaaaaaaacacaaaaaaacaaaaaaacactgaaatcacatgtttaaaatatgcaaaccaacttctaccaagttctaaatatacctttgccttctgaaggcttttttaaatactgcacacattttcaacaagcattcctttagtatttccattgtttagggtaatatttagttttctcccatgggacgagcccagatcaagccctcaacttgtcatgacaatgtttattcaggtaaaacaaacaaattgccctctaaaaagtattttctacagctcgaattacccacttacacaagttataacaactattaacaattttatcatttatatttgaagtcacttgctttgggggttttcactgagtgggagtagataactgagatatcctcaaagtcagagaaattctgtgattcaactgctagaggtcatttgatattaataatagttgaagttagtgaagcatgataatctccacattccatttatttacatcatgctcctgaatatat

SEQ ID NO: 2677 - DNA, 603 bp, Homo sapiens
tagcagtgaaatttattatcatttgtattaagaagagatgactattagatgccatgccataaccaactcttctccattagattaggaggaccaggcctgatactgaatattggaactgttggcaagaaaatgaaagttcgtgactgcttgagttatttttaaaactctagttgcatggctgttatgtctcaaatactatataattatccctagttactggtatctttagcatatttgaaaccatccatatgtgacctaaagccacacagctatattaagacatttttgaacaatcaaagcaaatgacactttaaattaaaacaaaactaatatgaagcaactactttaaaaaaaaaaattgggaccaggcacggtggctcatgcctggggggccgaggcaggaggatcacttgagcgcaggagttcgagaccagcctgagcaatataacaagacctcgcctctacagataattaaaaaaaaaaattacctgggcatagtggcacacgcctgtggtctcagttgctcaggagaccgaggtgggaggatcgcttaagtgtggacagtcgaggcttcagtgagccatgatcgtgccactgcactcc

SEQ ID NO: 2678 - DNA, 597 bp, Homo sapiens
ccacatctgtaatcactgcactttggcaggccgaggtgggaggatcacttcaggtgaggagttccagaccaacctggccaacagggcaaaaccctgtctctacaaataatacaaaatttgctgggtgtggtggcacacgcccgtaacctcagctacttggaaggcagaagcaggagaatcgcttgaacctgggaggtagagtttgcagtgagctgagatcgtgccactgcactccagcctgggcgacagcaagactctgtctcaaagaaaaaaaaaagtagaaagaataaaaccatagtcttgtttataaaaggtgaaacatattgggataaaaagcactgaaaacagttttcttccaaagatacacttaactgctagaaacatctagaagtcgttggcatagttctaagacattttagagcccgctgaagggatgcttgcctcttaagtcatcttgtctccttttcttgacattcccaatagttttaagctcaaatctgagttctctgataacatcataatttttgtttcaaaaaaatactcctatgtatttcttattaaagaatacacactgaggtttaaaattgatcgtatatg

SEQ ID NO: 2679 - DNA, 656 bp, Homo sapiens
gcctgggtgacagagcaagactcccatctcaatctcaaaaaaaaatagtcatgaattatgcaattattctaattgtatctgcacttacgaagtcagaggtctcctttttcagtccctctgatagtaccacctaagtgctgtcctgctcctgtgaacactttcctgtgcaaccaaacaggaggtgccaggttcccagaactctctaacattacagatctctgtccatctttactaaaaaaaggaaatgtgagggaaagaaggggaagaactctagcataaataatgtattaatataaatatctatattgattttcaccccccattcccctttgctaatagaaaagagtctagctatgatgtgtcccaaatttaagagtgtgatgtgaaggactgaatttttgtttgttcgtttggtgagcttttcactcgtaggtgacatcttttgtatatgctgtaaagtctcagttaatggaatcctacagtgcatttctggctagctcggttggtagagcgtgagtctcttaatggaatccttaattagctagaattttcctgcaaatggctttggatgagggaaattctataaaatgacaatttggatatactttttgttaaatgagagcaattttctctgtatgctttgtctatgcatggct

SEQ ID NO: 2680 - DNA, 684 bp, Homo sapiens
ttttaacttcaaacaagagatgacaaaagactcttcaaggaaaggacaatgaacaaaccagtactacctaagaatcgctgcttcagagcatacatcagaatataaaaacgggcatgcaagcttcattatggcaatccagggatagcatggttaggaagaagaaaaaaaaatcagagatcagttaatagccttctcacttacaggagaaatggaggtatgaaccaaggaggaagatgttacagatgactccaatatcataagcctggtaaacaagtgtccagagttgtcaatgataataataggctagttggggaaaatgcaggtttggagaaaaacaactgacttcagtttgggaacataaatattaggttgtatcatatacaattgccatttaaccattaaattaataatttcatatgacacaacctaaggttttgggtggagaggcttctgataagtggtatgtcagacatgtgtctgctgcactaagaggtgtatatgtggatttaagagtcatctagacagggctgataacatggaaccatgtcagaggttacatttccaagggtagcaaagaggaggactgtcagggatactcactgctagaaaacagaaagaagccagggacatgaggataaagaagaagctctgccatcactgacactgaggccataaatgactaat

SEQ ID NO: 2681 - DNA, 648 bp, Homo sapiens
actttctgctttgccccctccctacctctatgctgatgaagagccagccatgcctccagcccttcctgaggccaccacatgatcttgcttattttcccattccaggaggtcacctgcagggctcctcccacctagccacaatggctagtcccgctgcctccacagtggccctgcagccccatcccagacccactgcacggggtcacaagcttgtgcagggtggacagagcagtagctcatggcagacattccttctgttcatctgttgcagggaaaatggggtgaggcatgggaggggttcccagaatcccagaaaggcagaaggagttgagatctgagacagagtaggctttggagactccctccacagaccactctcccaggggctaggttaatgggcctgctttgggaagctggggcaggtgaatcacctgaggtcaggagttcgagaccagcctggccaacatggtgaaacctcatctctactaaaatacaaaaattagccaggtgtggctgcacatgcctgtagtcccagccactcgggaggctgaggcacaagaatcacttgaacccaggaggtggaagttgcagtgagccaagatcacgtcactacactccagcctgggtgacagagtgagactctgtctc

SEQ ID NO: 2682 - DNA, 612 bp, Homo sapiens
tcaccttctgtctctccagtttgggggcagctgtttgacctgtgacttaacttctcttacagatctaagaaaagttgttgatttttcagtttgtttagctttttacttgctcttaagattgagtgacagatttttttttgcatttttttattgtgataaaatgtattaatacaaaacatttatcatttaagtgtacagttctgtggcattagatacattcacactgtgcaattaggactcttaaaaggaaaaagtcacatactgttagaagggtcatacaaggctttatagaaaggatttttaagatgagcttctatatatcaattaaaagaacatttcagtagaaacatgggcgtatggtatgataattaccagaagacaaatgcaaataagtgctgaacacaggaaaaaaataatcaacctctccaataatcagaaaaattgaagttaatcatcattaactgttgggggagtagctaccaaatttgataaaaactcaaaaattcgtaataattcagaaattgagaatagcggccgggcgtggtggctcacacctgtaattctagcactttgggaggctgaggcgggcagatcacgtgagctcagaagttc

SEQ ID NO: 2683 - DNA, 624 bp, Homo sapiens
caatttatagagacaaatttccaggggacctaagaatactgttggtccatatggatataaagtgaaaaatgaaagaactcatgcaaaaatctatgctatctttattcttcctaggttaattaaatctctatttaatgcaaattttataagtgtattctgctgttattggagaaaatgaatgttttcaaagaattcctatgctccaacttatgaaaccatactctgtctagacaagggcataggagatatttctaaatactaataataaactcagatttaaacaaagaagtgaaagatctgtacacagaaaactacaaaacattgataacaatggaagaaacataaataaatggaaagatattccatgttcatggattggaagaattaatgttgttaaaatgttcatatttacccaaaatgatatgtagatataatgcaattcctatcaaaatccaatgacagttttcatagaaatagaaaaaaaaattctaaaattcatatggaaccacaaaagagggaggcattatattacctgctctcaatattgactacaaagctatggtaattaaaaccagtatggtagtggcataaaaacagacacacagaccaatggagaatagagag

SEQ ID NO: 2684 - DNA, 554 bp, Homo sapiens
ctcacacctgtaatcctagcactttgggaggcccaggtgggaggatcacttgagctcacagaccagtctgggcaacacagtgagaccttgtctctctatattttttttaaagtagaagaaaaaaaaaagaagtaaactaagcttctagggtctttttgtttgttttgtttttttatcactgtactcttcttccagaagacaaagactactaatacacacacggcaatcttaatactaagtaatctgacaaaaaaaaattacagcagctagaattttatctaaaatttatataagtttaaatgtttaaaaaaaaaaattttatgaggctgaatgtgggggctcatgcctataatcccagcacttttggaggtcaaggcaggtggatcacttgaggtcaggagttcaagaccagcctggccaacatggtgaaaccctatctctactaaaaatacaaaaaaaacatttagccaggcatggtggcacacgcctgcaataccggctacttgaaaatgtgaggcaggataatcgcttgaacccggaaggcaaaggttgca

SEQ ID NO: 2685 - DNA, 504 bp, Homo sapiens
tttggagttttaatttctcaaatgatcccttctttttagatttcaaattataacctatttcctgcaccattgctgacgcctggtgatccatgtcagaagtacttccaggtcagatacattttctcatatttcaatgcagagaagcagttgaatattaaaacttaaaaaaagataatgtttaatgttaaacttatgatttactaaaataacatgttttttaatttcattgttcttcactaatgtaatagaaaaatgaatcttggccgggcgcggtggctcacgcctgtaatcccagcactttgggaggccgagaccggcggatcacgaggtcaggagatcgagaccatcctggctaacacggtgaaaccccgtctctactaaaaatacaaaaattagccgggcatggtggcgcgcgcctgtagtcccagctacacgggaggctgaggcaggagaatggcgtgaacccgggaggcggagcttgcagtgagtcgagatcgcgccact

SEQ ID NO: 2686 - DNA, 484 bp, Homo sapiens
tgagcccagaggtaacttcagaatcctccctaacacaaaactccagcggtcactactgatgcaatacatgttgactatcacaaattcaagcccacctaaaagagagaagaacaaaagcagtgcaactggatagagagctatggctgaggccaactatgatcaaatttattgtctacgaaaacaagtaaccctggtgactgagagatttattaaataatcctttgggctttacatagatactgggtataataatcaaatagcataaaataccaaaatataattgtcaagatatactagggagtggtaaagatacggaaacatgttaaatattatctgtcatgtatattaaaagagatataggggtggaaaaccagtgctatgaaaaataagtgctaaaaacatggcaaagttcaggaaatggagggtccattgtggtaatctagagagctttcatatggatatactaaaacttaagacagacctt

SEQ ID NO: 2687 - DNA, 624 bp, Homo sapiens
ttttagtgtagtagtcaaagcattaatttctcacattgcaatttccttcaaagacataaatacaacctttctaatgactccttgttcatcaagatacctcttcaaattattctatttgtttcattcagtatattatctgtgtataccgatattacactcttttctttttttgagatggaatctcattctgttactgatgctggagtgaggtggcatgacctcggttcactgcaacctccacctcccaggttcaagcgattctcctgtctcagccccccaagtagctaggactacaggtgcacaccaccatgcctggctaatttttgtatttttagtacagtcagagtttcaccctgttgtccaggccggactcgaactcctgacctcaggtgatccacccaccatggcctcccaaagtgctgggattacaggcataagccaccgcacccagcctgatattgcactcttggattttgaacactgaatatctttttgaaagattacacctctttacctcttcgtgcttcagaaattattttccttcaagtgttctaagaggctaatgaagaatgaagtcatgttttatcacttttgtccttaaagatttcagacatgctgaaactg

SEQ ID NO: 2688 - DNA, 531 bp, Homo sapiens
tgcagtggtgcgatcttggctcactgcatcctctgcctcccaggtttaagcaattctctgcctcagcctcctgagtagctgggactacaggcgcccaccaccacacccagctcatttttttttgtatttttagtagagatggggtttcaccatcttggccaggctgatcttgaactcctgacctcatgatccacctgcctcagcctcccaaagtgctgggattacaggcatgagccaccccgcccagcccggccgtctctttttctacagtagaatttcttttctaattttttgatctcacaagaggatgtcctggaattcagtagaatttctaacattgtcactggttttcctgaaagtgagatttatctcattagacatgtttggtataaatacctcctctgtttgctctactcccaaccaggagggatggttgcttttatacagaccgcattctggaaccttctttacagatacccagcccttcacgggcatcccatcagtaggcgattgctatagtttgaacttgca

SEQ ID NO: 2689 - DNA, 535 bp, Homo sapiens
tctccatgagaaggtaagctccaggagtgcagggatttgatctttttgttcagttttgtcttaccagcacataaaacagtgcctggcctcatgatggtgacctccttatcttcagtcatctccttgatctcagcttagtccctcacaaactcccatgattttttttaaaggacatggatcttttactttttaaccttaaaaaaaatttactgccaatatctgtctagaccccttcctagtcttaaggaatctgctatctgagtgagctttggggtgacacaaaccctttctgctacaacggaagccaaattgagggatatccttactttctttgcccttaggtaaaatgagcaaggaaaggcacatgacctgggctcagacaataggtttcacctgcttgggcatatgactcttacagggggcaactaaaagacaaaggatgagattcatggttgtgttctaggccctagcagtatacagtggcagtgtcagcatcctgactgcgttgtttctgctactcagccttttctgcttt

SEQ ID NO: 2690 - DNA, 585 bp, Homo sapiens
  misc_feature 577, 578: n = A,T,C or G
aatacttaatgagaaatatgttcttggaaaaatagaatatatacaagcaggataatcaagcaggacattctttttattatattatctttattattttggctctgccatgttagcaataataagtaaattctgatcaactaaaatgaaaaatgcataagatggatttaacagtagatttcaataggcaaaagaaagaattcatgaacttacagatagatttatttagactaaacaatttgaattaaaaaatgtgaaaaataaacagagccttagaaaactggaggacctcattaagggcactaatacatgatgatgggagtaaccgaagaagagaagagaaaaaggaacagaaaaaatattcaaaaaataatggttaaagttttcctagtttgatgaaaaatactaatctacacattcaagctcagtgaactccaagtcggataaactcaaagacgacacagacgtatcacagtaaaaatgctgaaaaacaaagacaaaaaatctttaaagcagcaacagaaaaatgactcatcatgtctagtaacattaatggctaaatttcattagaaaaaatganngatcatg

SEQ ID NO: 2691 - DNA, 569 bp, Homo sapiens
agatggatgaagtacaatgatattgctgtgacaaaatcatcatgggaagagctagtgagggactcttttggtggttatagaaatgccagtgcatactgtttaatgtacataaatgataaggcacagttcctaatacaaggtaagaatatatagggtggtgtgtatttttaaatagtcataaatgtggctctggtatgtggtgtgattagttaagtgtaattcactcagacgatgaaggatgtggttaggaaatgctactgggttttgacaagactgaattgaaaagtaatgtcgtcagggctaagaattcgtatatattttgtattccaagtcaagactgttccacagattgactcacatttaatatttaattccttagcctaacatatatggcctctgttcttggcctctgattatctccccaccttcattgatcaccagtgttccttttgaatttatatccttactgaacttcttgctgtatctgctcatatcaaaccatttcacacatttatgtttgcatgttcgtatatgttttattttttgctagtaattcttttgcctaattc

SEQ ID NO: 2692 - DNA, 646 bp, Homo sapiens
ctttgtgggtggccagcacacggatgtctatgaaccacatttgaaaaccaccactgaagctcataagatgtgcgagttggaccatctaaccatgaaaaccccctgatggtggtggcagcaattatctgattgtagaacaacaggatccatgtcctgaatggatcccaaccaagaattgaatccctatctccaagagtcatattaccctctaagaatgctggtcaccacagagaatacagatagaggcttagaatgtgtgtgcctgtgactgtgtgtgtgtgtgtgtgtgcgcgcacgcgtgtgtgatggaggcatttggagaggaagagagagactgtatttcagcctctatcactactgcgactgttaccttggaggcactgtgtttgaatctgcttagttttctaagcagatgaggatgggaatgaggagacgttagacccactagttctttggttctgtgattggttcttcttgcctgccttacaactcctgctgcttggaatcgttcatacgaaaatagatacacccagaacaaattatcttaaccagattctaaagcagaagcgcttagccaactcatagaattatttaattatttaatattggcactgcaaggagcttagagattgtcatttgacaaata

SEQ ID NO: 2693 - DNA, 678 bp, Homo sapiens
ggtgctagtgaaaagttaaacagtatggtatttagatggctcaactgacttacctatggtaaatgggccgtttttagtcttgagggcagtccatcactgggaggtatccacaaggtaggaagagacccctacacaattagatgccccttgaacaaagatcagcaaacttttcctgaaaagaaacagattataaatattttaggctttgtgagccatgtaatctctgttgcaactacccaaatctgttattttaggccaaagcagccatagacaatatgtaaatgaatgagtgtgtctgtattcctataaacctctttacaagaacaaatggtattctagatttggcccatggtctctgctagaataaaagtcccacatttggtttttatcctactagtattcctggttattttaggcattgtcctttctagaattcactatgggtatctgccactgcttgagaaagctgctgagaatcaacactgcaatatattgtggaaatatgctttgggggcaccaagtatatgatgaatgatgaatgaaaccgagttctgtggttagatcatttccagtcagaatagagactgaggcaggattggaagatgtgcagataacattcttagaaatacttctgtagagggaaaatgtcattatgagtttaaaataaattactatatg

SEQ ID NO: 2694 - DNA, 566 bp, Homo sapiens
ttatgtcacactatatataaactagtaagaataatgactaccatctattgaatcctaaccatgtgtgaagcactgggctagtatattacatggactgtctaatttaattgtctcacaaatgctatgcatgcataggctttatttacatctccatttcatgggagtgaaaagtggtgctcaaaggctaaataacttaacagttggtaagtgttcgaactaactgggatttgaaccaatgtttgtttgtccagtatgccaatcagccaatgctaaatgtttaggtgcagtttgcattataatctttaaccacattggctgattaaataatagttcttttgttattttctataatgaatatcttattgaatcctctaaataaatttcacgtatgtataatacaaaaaatcccaagagatattgaataataaaaatattggccgggcgcggtggctcacgcctgtaatcccagcactttgggaggccgagacaggtggatcacgaggccaggagatagagaccttcctggctaacatggtgaaacctgtctttactaaaaatacaaaata

SEQ ID NO: 2695 - DNA, 586 bp, Homo sapiens
taattttcttagtttatttcttcttttctctgtaaaataagattagtagtcataacaggcaactctggcttacatctgggttctgctattgcatttcattttcatctcatggaaaaggttttataaagcgtaatgcattgctcttctcagcctagaggtgcaagaacattatctagctgagaaaaagtagttttgagtattaattaatggttgttaagatgtcaaagaaactctatttttgctttcctctactgtagcttcattcatgaatatgttttggttgtaattgatctgcatgccttatccattacactgctcaggctgataatattcaatatagttaaaaaaagaagtacgtattaaggctaggcacagtggctcgcacctgtaatcccaaaactttgagaggctgaggcaggtggatcacttgaggccaggagttcaagaccagcctggccaacatggtgaagctccatccctactaaaaacaaaaaattagcagggtggtggtggtgggcgcctgtgatcccagctactcgggaggaaggagaatcacttgagcctgggaggtgtaggttgcagtgag

SEQ ID NO: 2696 - DNA, 630 bp, Homo sapiens
cgccccagctctcagaggcctgccatcactgtgcacccacacaccaccagctgtagcccaggcacaggacctcaaggtgggccagctcagctgccaacaggagcgagtggtgctgaggtatccagcagggcagcacatggtcctcccaggagccgtggcccagcacctcctggccggaacagccatcctattcaaataaacgagtaacaaaaatgggcacactctccacttccaaaagcaatgctggccaggcgcagtggctcacacctgaaatcccaatgccagaggcgttggaaccagagcaactccatcttgaacaggagctgggtaaaatgaggctgagacctgccgggctgcattcccaggagtttaggcattctaagtcacaggatgagataggaggtcggcacaagatataggtcatgaagaccttgctgataaagcaggttgtagtaaagaagccggccaaagcccaccaaaaccaaggcggccatgagagtgacctctgattgtcctcacggctcattatatgccaattagaatgcatttgctgctaaaagacacccccaccagcaccatgacagtttacagatgccatggcaatgtctggaggttaccttataaggtctc

SEQ ID NO: 2697 - DNA, 614 bp, Homo sapiens
aagaaggggaaatgttgaattgtgttttccatcccaactggtatagagatttttttttcttttagttaaaagcaagtgattataggagaaataagcatgtagctcctatgactacgctgttttagagttagctggggaggaaaggctggggccaagcagttaccaagtgtacattgaattgttttaaagttgataactagatattcgaatgaatatatagggccattcaacatagtcaccattgagctatctttagagcacagggcatttaataatgggcatctccctgtggagagatctggagctcaggagcattcaggatttccatgcccctctctctctgcatcctcctgcctctaatctagctatagcaaggacactacagcagttcactctttaagagtatttctggttacccagtgaagggtgggatcaactctcccacccaaaactgggttgggtgtcaagactgattcaccacatctcaggagggtgtggaaagatgtattgctcacatgaggctttctggggagagcagggcagccatccaaacgggtctagtttttattttggttggagagtgggctggggtgaggctacttatgaatgggcag

SEQ ID NO: 2698 - DNA, 349 bp, Homo sapiens
gtgaggtatgtcacttatctttctgggtctctacttgcttgatttttaagaatcatatacaaattccagatctgtgcctctgcaatgtgttgttttcctggtcagaaatgacctttcacctttcatcttttcaccccaacccttccacatgtgaggacctctgcaggtcgcacctcaaaccacagagttttttctaatttctcccttctctaaaatcatatataatctctgatttctataaacagaataaaaatacgaggctgctgctatttgtatatgattcttaaaaatcaagcaagtagagacccagaaagataagtgacatacctcacaattttttttttttctg

SEQ ID NO: 2699 - DNA, 629 bp, Homo sapiens
gcagtggcgtgatctcggctcactgcaacctccgcccccaggttcaaccgattctcctgtcccagcctcccaactagctgggattataggcgcccgccaccacgcccagctaattttttgtatttttagcagagatggggtttcgctacgttggccaggctggttttgaacgcctgacctcatgatccaccagcctcggcctcccaaagtgttgagattacaaacgtgagccactgcgcccggcaattctaattattttcttaaaacacatctaagtcttaaatttttacaagctgaagacttgaggtttcttatcattcaacttgcatgagggggaagctttcagatgaagcttttctctgcttggagaaaaagctgttgctttcaatcctgccaggttctccaggtcaagttctctgtatttcctcctgatcatcacgctgatgtttctggctactaaggagctgggggtggcgatgagtgacgcagatatgaatcagactgattttcaagcagcagagtttaaggaaaatgaaagaactaggcactggaagtgactgattgctggccgattcattgttgtaatgataagctggtactggacaagtgatcacaggcctgatttctac

SEQ ID NO: 2700 - DNA, 601 bp, Homo sapiens
aatatctcactgcctcccccgctttggagttagcaacttacacattccttttctgcctcttatcagcatcaggcttatctagtcctctgatgagccccacacagggaaattgtaccacctttgctttggtgaacctctcatgtcaaattgctcctctttgtctgctttaaaaagagacaggagtaaatgtgatgttactctcttagctaatgcatttatgcatttccacacttgtgaaggaaggtctgtttcagatgcttagtgtggattgtatagtcttctgcttctgtaagtcacatggaaaaatcattctagtattatgtgaagtgtaacaaataattgcttttggctttcttcttgggtgtgttagtccattttcacactgctataaacttccctgagactgggtaatttataaaggaaagtgggccgggcgtggtggctcacgcctgtaagatcacgaggtcaggaaatcgagaccatcctggctaacacagtgaaaccctgtctctactaaaaacacagaaagttagccgcgcgcggtggtgcgtgcctgtaatcccagccactcggggagctgaggcgtgagaatcgcttgaac

SEQ ID NO: 2701 - DNA, 593 bp, Homo sapiens
ggtgcatgttgggggttggatgacacaaatactgagatgaaatgtaaagttaactgttgttaacgcattttatgcagctaggagggcaatggaagaggaaaaaagcaggaagaacggataatgtcagtacaagtgtgacttgtgtgaggataagaagtactcacttctacggtcaccaggtcgtggctggtacagtctttatggccacgctctcccgtcactcctgcgtggtccctttgccctctgcaagcacctctgctggtcgtggttcactgtctggtggggtgacccaaacgttccttcccaaaaggcctatgctgttagcagttttgccttatggggtggttctggttttccagtggtgttttctgcaaggcttagaggagctacgtgatattacagacgatctcctgcctcccaaatttctcccccttagccccattctgtgatcaggttccaagttccccttgttgggctcagtcagccggaccagcacagggaccctcttctttgtcgaccccctggtgtgaggaaccggcgtccaggtgggcagtctcagcttcctgcgtaacgtgtcccctggtggaaacact

SEQ ID NO: 2702 - DNA, 595 bp, Homo sapiens
aagcctagagtttttgttgttgttgctgctgtttaatttttaattttcataggtttttggggaacagctggtattcgattacatgaggaagtacattagttgtgatttgtgagattttggtgcacccatcaccccagcagtatacactgatttttgatgtagagctctaacaactgaaaaagatgattaatacgacaaaaaggaacaaaccttgggctgaaagccagtcttttgttctagtctggattctgtccctaactgtaacactcactgttcatcaagttctcattgtgtcagacatttgacaaagtgcttttcatgcattatttcgttgatccttatcacttttccaagagaagggtactattcttattactcttttaacaaatgcagaaacagaggctcagagaggtaaaggagcttgcccaagatcccacaacttacaggcgttggtgctggtgtctaagccagggggtgggactctggaggtggagctcttaatcactgcttgcccagagtactgggccttcagagagtcaatcaaccgctttgagccacagtgtacgaaatgaagaaaatggccttgattcataag

SEQ ID NO: 2703 - DNA, 640 bp, Homo sapiens
atgccatcaactgagtggggagcattttttctataacccctgttgccaggtcatataacctattgccaggttagatgaccatcacaaggatgatcagccaggacagaggggtgacctggtgacctgggtcatggtactctgcagggctccctagctgtctggccagtcattggcagctctgcagaacatcaagcaagttacagtgtggcactgaaagctgatgggtatcgagaaggtggtggccacttagaagccccactggggccttcaagaagctgatcacaaggtgcatgttcttagatggacctctgggcagctgcagagtgcaggcttactacccagatcagaaaccccatgtagggtgaggattgtcactgagagaggaactggtggaggaagttctgctgaaaaagtcctggtgaccccatcccctgagcaaaatgcccaggtaagccacctcctgtctcttcctccctccttctctttcatgcgaacacagaaaaggcagcacagcagtgacaccaaccacaccgcagttcccacctggagaggaggtgaggtcaaaaaacacatgccctgccatgccggctggccctgaacacaccttcctccatgcacacaggtagacaggtgaatcctg

SEQ ID NO: 2704 - DNA, 600 bp, Homo sapiens
cgtggggctcagcccaacctcgaagcgctgagaaggcgcttccaaagtgatatccctggaatgatataatgatttccttaatacgtgagcatctttcaaaactaggaggatctggaattaagtttagaagtattaatcaaactcatgccactgacgtttctgtgtgtcaagaagtgcatgcatatttggtatttaacttcagcattttttttttgtttaaaagactacggccggccgggcgcggtggctcacgcctgtaatcccagcactttgggaggccaaggcgggcacatcacgaggtcaggagtttgagaccagcctggtcaaatggagaaactctgtctctactaaaaatacaaaaattagctgggcgtagtggcaggtgcctataatcccagctactcaggaggctgaggcaggaagatcgcttgaacccgggaggcagaggttgcagtgagccaagattgtgccaatgtactccagcctctgggtaacagagcaagactctgtctaaaaaaaaaagagccgggcacggtgactcatgcctgtaatcccagcactttgggaggccaaggcaggcagatcacatgaggtcaggag

SEQ ID NO: 2705 - DNA, 465 bp, Homo sapiens
tttcgccctgtttgccatggcgggtcgtcaaactcctgacctcaggccacccgcctcagcatcacaaagtgctgggcttataggcataagccactgtgcctggccggaaacattttttgatgtgtctagttccacaatgctgtttttgaagaacagcattctggtctatggatgtattatactttaaaacattacctactgttggccgggcatgggtggatcacctgaggtcaggagcttgagaccagcctggccaacgtggtgaaaccccgtctctactaaaaatatgaaaattagctgggcatggtggcgggtgcctgtaatcccagctacttgggaggctgaggcaggagaatcacttgaacccgggagtcggaggttgcagtgagccgagatcgtgccactgcactccagcctgggcgatggagcaagactcggcctcaaaaaaaaaaaaaaaaaaaaaaa

SEQ ID NO: 2706 - DNA, 559 bp, Homo sapiens
acaatattgttttaatgggtttacaaagaccttttttttacaatgaactcaaatctcttatatcaatgttagcaaagaaccaactgaaaggagtctcagcaactcttaggggctggacaagtttccttagttaatgctgtgaatagaagttttaaaagcatttatttctcacaaaaagtaaccatctgttctttatgatggctcctatcatttctaactacgtttctaaaagagatttttctgagagctgctttggaatgatggggaagagttcttaggaaaaactcactggctgaagtgacccaaaaccagaggagtatctggatggagcatatcctagataataataataataacgggttttgaaaaaaatgcccaaaatatgttccaaaattaccagagatttttacatctgatcatcaaatcctgagatcctaaggggggaaacttccaatcttgagaatcagataagcatctcaactcctggaggctatttgaatactaagataattttcatatcccaagttgcattagattctcatgggactaggttttacta

SEQ ID NO: 2707 - DNA, 633 bp, Homo sapiens
ggctcaagcaatcctcccacctcagcctcccaagtagctgggactataggcgtgtgccaccatgccgtctaatttaattattattatttttgtagacacgaggtcctgacatattgtccaggctgacctccaactcctgaccccaagtgatcctcctgcttcagtttctgaaagtgctgggattacccggacacagattcatcttctactcttctgctttgctctgtgccctgggtggtagactcctttggactggatcccttgtcaaataggttctgggtgcttccagccaatgggaggtactgtgaagtgagtgtagggagggaggagaaagaggttgtggtatttctctgccccatcattgcttccgttcatctcgagcagtagctgcattcctccacaattcctgccaggtattctgttcatctggggttgcagctctaacttggctcgaataaaagcaattcttcctttaattccttccaccttggaggtgtaatggcttcctgctgctcctaatctctaagcactgcatcctctctagatttatacttgtaaccctatctacatatcattaagtagacccttcgttaaaatctcttcatttgtaccatctgcaatgagttctctttc

SEQ ID NO: 2708 - DNA, 556 bp, Homo sapiens
aggtgttcattgtggtgttattgcatcggggtttaggtattttcctaacaaaaagttggggacaaacacagtacctccagagacctgctctcttcttattaaaagtcagcccaggtcacccccgtctgtttggctatcgttttttcacaggccattacgagtgagttgcgggagtcagagggggcagtgagccgagatcacaccattgcactccagcctggtgacagagcaagactccgtccacccaccctcccctgcacaaaaaaacaaaaagttgcagggccaggcatggtggctgatgcctgtaatcccagtactttgggaggtggaagcgggtggatcacttgaggccaagaatttgagaccagcctgggtaacatgttgaaaccttctttctactaagatgacaaaaaatcagccgggcctggtatcgcgcgcctgtggtcccagctattctggaggctgaggcatgagaattgcttgcacccaggaggcatagtttgcagtgagccgagatcacaccattgtactccagcctgggtgacattgccagact

SEQ ID NO: 2709 - DNA, 574 bp, Homo sapiens
agttggtttgttgtacaggttttgaaatcgctggattggaaatgagaaataaacctatgagactgaggggtagagatgaaagaaaacagagaaacggtctcaacattagaagatgggaggaagaaaacaaaattatttctggaaaattatcatagtctattgtctcataagaacaataaagtagatataataattgggaaataaattgctgaggtaaaagagatagatcagaggtgaggtctagatacattataataacccaaataataaaggtacatgagaatagaaggagaggagtaaattaaaggaagatgtggacaaaataaggatgagaaaaactagatacatgtataggatcaccaaggagcaaaaatgattcaagaaacaaggaattaaatttatttatcattcatattctccttcagttcctttctcttttcttttatctctttctctctctctctctctctctctctcacacacacacacacacacacacacacacacacagagaacagtgaacccagggattcagctcttaatctaccagcccagttctatctaatactgaata

SEQ ID NO: 2710 - DNA, 552 bp, Homo sapiens
atcacaagcgtgtgccgtcattcccagctaatttttgtatttttagtagagatggggtttcaccatgttggctaggctggtctcgaactcctgacctcaagtgatccacccgccttggcctcctaaagtgctgggattacaggcggggggcaccatgcccaggccctggcttattatttttaaaaagtaggacttgagtttcccaccatgtgatcttcccacttccaaatttattattggagagagagataaagcagaatgcatagaagttcctttgcaagctaacctggcagtacggcatgggggaggaggaaagggatgaagggagaagtgccacaagtggtttttaggtaacttagcagtttgatttccaagctgtttcagggctgctagttttgtgtgtgcggctgctggatggactgttttgcatatcactgatttatatctctacagaacaaatcttgtgtttcttttggagatccacgagcaactggcatttgaaaaaatcaggcattattgactttaaaacacagtaatgttttctatatctct

SEQ ID NO: 2711 - DNA, 386 bp, Homo sapiens
cgttcgctaccacgcccggctaatttttgtatttttagtagagatggggtttcaccatattggccaggctggtctcaaactcctgaccttgtgatccacccacctcggcctcccaaagtgatgagactacgtgtgagccaccgctcctggccaggttatgaattcttaaaaaaagaaggcaaaggatctagactttgtttttaaagttatctttaccgctaggactaaggcaggaggtctgtttaagacaagccaatctcttcttgttatcatctatccgccaaagacatcaaagttagtggtccaataaaaatcatcccaataatttcatcttttctgcaaactgatgtatccccactcaatacctagaacaatatctgggatac

SEQ ID NO: 2712 - DNA, 175 bp, Homo sapiens
aatacttttttattttgttttattttgaatgatgagccttcgtgcccccccttcccccttttttgtcccccaacttgagatgtatgaaggcttttggtctccctgggagtgggtggaggcagccagggcttacctgtacactgacttgggaccagttgaataaaagtgcacacct

SEQ ID NO: 2713 - DNA, 594 bp, Homo sapiens
cgccttgtataccattagaggtttttaaacagaggagtaacaagataggacctgcattttagaaaggcaattccccaaaactaggactgtgtggacaacaggcccactggatcttcccatctcaaagtgaagctgagggttcagcttctaaaatagccagctcttagtcatcgcattcagctccacagttgatccagccaactgagctgcagagctgctctagctggctgcctatgagaagtggaaggaaagagaattggagcaactatcaggttaataaactctgtggagagagccaaaccaaatttccaaggccccacgattagtttgtctaaatgaagcacaacaacataatgctgataggcctgacttcctttagtgttaatggaccttacagatcttctctaacttctgggctgtggccttgtctgtcttgtttaccacaatatctctagtaccagcagagggcctgccaatggtacatgttgataaatctatgatatgaatgactagtcacttgttctggagctctgggtaccccaagcttggctgaatgctcccacaattgagtctttcattattaattaaagaagt

SEQ ID NO: 2714 - DNA, 551 bp, Homo sapiens
attctgcttgctcatgctccacatgtcttagcactttggagtcctacgtgaaggaacagcccacatctggtacatgccacactcatggcaaaaggcataaagataaaaaaagctgcatagtcacatttaaaaccaaaacctggcgtgtaaaaagttgattaacattctaatggctagaacaagtcaaacagccaggctcaatatcagtggagtgggaaataccttcattctacaaggagaggggagtgaatatttgaaaatgagaaaataatttatcacataggaccaaatgataattctacttacatgcatgtctaaatggcccatgtaatcctacaaatcttctgagacctacaatttggctccactacttgtatttgaccaaaatatcttctcaaagccaagtatgtatcttctcagttatcgctcttccttgagacagtatagaacaatagagaaaagatagaacttcgaacttctgatcagaggacatgagttagagcttcagctctatgagaagctagtgtttgattgtgtttaagtcagttcac

SEQ ID NO: 2715 - DNA, 483 bp, Homo sapiens
cttcagcagatctctggagctgtatgtgcagctctgttatctggcattctgtctcacaaattctagtttccctgcgcccaccaaagaggcagtcatgttgtttacctcatttgtttttcctctctcagggtcacggttctgcaccaagtgttgtccaatacctgagaagttttccccctcatgtgttttgtccagttttcttattgtttatgattggaggacatttctcatgcagttacttttttatgaatgaaagcagaggtcaggtggcacaattgaacactgcacagaaagaagagaagagggaggctggagaaaaacattctatgaagtttaaaacatgattaccggccaggtgtggtggcttatgcctgtaatctcagcactttgggagggtgaggtgggcagatcacctgaggtcaggaattcgagaccagccttgccaacatggcgaaaccccgtctctactgaaaatacaaaaat

SEQ ID NO: 2716 - DNA, 318 bp, Homo sapiens
ctttgaaaaggggagctgctggaattggtcaaaaccggcgggctgtgtttgagcccagtttggttgcctcctggttcaagcacttgccagtcttacgcacaggccttgctcagatgtgtcggaatgggagcaccagggctggtggtgccctggatgttcctttcctagggaatctttgcgaaggtatgttttagactcccccaagaaccgcccagtccctgttcagttcaggtgccacactggggcagaggtagagaaaagaaaattctggaaagtggcttaattgtggaggttgggagtaggtaggacctgtgcctt

SEQ ID NO: 2717 - DNA, 409 bp, Homo sapiens
  misc_feature 258: n = A,T,C or G
tcttaaaacacattcctacataaaaaaacgaattccttctgtaaaacgacctcagtcgaaagcataataattggtataaattcttactcttttaaaataaagattaaattccagctaaaaattctccagatatggcagtatattgctctttgaattgaattgaggaagggcgagggtgagagacataaaagactaaaacagcaaaaggaagaaaaaaagggaaggaaaaaggtaaaaagaaaaagaggaatataggtngggatcacttgaggtcaagagttcgagaccagcctggccaacatggtgaaaccctgtctccactaaacatacaaaaattagccaggcatggtggcaggcacctgtattcccagctacttggaagactgagacagaagaatcactcaaaccc

SEQ ID NO: 2718 - DNA, 539 bp, Homo sapiens
tgagccactgcgcccagctgactctctgtctcttaatattcgtttattccattttccaaattaataggaattggcctgcacgtatgactgcctaggataaaaaatacacttccagccgagcatggcggctcacacctgtaatcccagcacttggagaggccgaggcaggcagatcacgaggtcaggaatttgaggccagcctggcaaacatggtgaaaccccatctctgctaaagatacaaaaaattagccaggcgtggtggcgcgcacctgtaatcccaggttcttgggaggctgagccaggagaatcgcttgaacccgggaggcagaggttgccgtgagccaagagcgtgccattgcactccagcctgggcaacagggcaagactttgtctcaaaaaaataaataaaagactgggcgcggtggcacacgcctgtaatcccagcactttgggaggccaaggtgggtggatcacgaggtcaggagatcgagaccatcctggccaatatggtgaaactctgtctactaaaaatacaaaaa

SEQ ID NO: 2719 - DNA, 603 bp, Homo sapiens
gtaccttctctcctaagaaaagtcaaggagactgtaaagacagtaaaaagaaaaacaaaaaccaagcctcttcctggtctttggaacctggaaatggatttatgtgaaatcttaattcctctaaagtaaagtgatatatgatatacaccaagtttaacctataaatcaggttttagtaaaattgccagataaatctgtacaatggtcaaactagagaaattcagtttttaatcctcccaaaatgacttgaagtagaatttactgtttctttactatatatcaaatttgtataactaggaagaggtacatatgctctcctactagggaaatacaacatatatattagctggataatgatttacatttacatttttgcacctttatgaaatttgataaacttctagaacgcttgtttttaaatgttttaacaatgtaaaagttgttcagcaattttttttaactcctagcattacagaagttaatttctacaaaactggttttctgggctcacaggtaaatgtaaccagaaaaagccctaaacaaattgatggaatatagatggatcaatttcttagtacagtcatgtaccacataatgacattt

SEQ ID NO: 2720 - DNA, 491 bp, Homo sapiens
tagcaccttgaacagaaaagtcagttataaatactttaataaaatatggtgtttgttatttttaggtttcaagccagcagagttgtaaactggcgtgtgactggagaaaaaggtttccattcatgtttctagaagaatattcacaatgagattttaaaagttttcaattcaaataaatcatgataccataataaaacatttattagtgagtatttctatatattcaaagaaccatattcaagtattcttaatttcccattgtattatgaggagctgatatggtttggctgtgtccccatccagatctcatcttgaattcccaagtgttgggggagggacccagtgggaggtaattgaaacatgggggcaggtctttcctgtgctgttgttgtgatagtgaataaatctcaagagatctagtagttttacaagggggagtttccctgaacaagtctctctttgactgctgccatccacataagatgtgactt

SEQ ID NO: 2721 - DNA, 323 bp, Homo sapiens
agatggatgaagtacaatgatattgctgtgacaaaatcatcatgggaagagctagtgagggactcttttggtggttatagaaatgccagtgcatactgtttaatgtacataaatgataaggcacagttcctaatacaaggtaagaatatatagggtggtgtgtatttttaaatagtcataaatgtggctctggtatgtggtgtgattagttaagtgtaattcactcagacgatgaaggatgtggttaggaaatgctactgggttttgacaagactgaattgaaaagtaatgtcgtcagggctaagaattcgtatatattttgt

SEQ ID NO: 2722 - DNA, 557 bp, Homo sapiens
  misc_feature 300: n = A,T,C or G
tggaatcgtagacatgtaccaccatgcccagctaattgttgtatttttagtagagatagggttttgccatgttggccaggctggactcaaactcctggcctcaagtgatccgcctgccttggcctcccaaagtgctgggattacaggtgtgagccaccatgcccagcctcaggcagtgagttttcaaagctgagtttcatgcacatggtgactcaacttttgtggggaggcattgacaattccagctgtattcaaattcattaaagagccccttcattcgggagtagtttgaaaacttanaaactctgaggctcagtgaccatccctgtctcatcttcttgtcattatatgaatagcagtggagaatgagatcagaacaccagcaagggaaaaaaagtgtgctagagtaaggctaaggatgagaaaacatgaaattatgctatttgggatggtgggtgggaactcctgggctggggacgaggatgaagtgtttttggtgggcatttcctctcctggtaataaccccagttttgttttgagggaagcatccttccccc

SEQ ID NO: 2723 - DNA, 538 bp, Homo sapiens
aaattcaaagaatcatagggcctgccacactgaagggaaaaataatcaacaccagaggcttggggtggcctcctttaccaggagtcaggtggacactaatgcagaaacccagaactcacagagtaccagcaagaatcaagggaaggacaggtcatccagagagggctagcaggttctgcctaggcaggaggaaagataacacattttccccccaagattatagaacaggccttggccaacatgctggaaccaggagaggaagagagctatatagagcagggccaccacagtcaacccctcaacatgagacaaagctgtctcagctgacttgtaaactcataagaaagaaatacacgtttcctggggtatgccattgagatcttgaggttgttctgcagctacagctgaccaatacaaagacagagtttaacgtgacttgatcataccttgtgacattgtctgtcaacacgagccacaaacacagtattagaatttagaggccaggcgcggtggctcacacctgtaatcccagtacttt

SEQ ID NO: 2724 - DNA, 534 bp, Homo sapiens
gagagaacaaactccttaaaaagagaaaaataaagaaatagaaatatgccaaaagatttgcatttaaaaaatcagaaaacaagaaacaactaaatgatatattgcaagatataataaagtgaacccagatgagtgatttaagatacaaaaaggaataatgaagaaacaaaacacaaattgagaaaagacatctgcaactcatatgagcaacacagaatttatattcagtatacaaagtgaaattttgcaagccaaacaacatttttttaacaaatacgaaaaaaacaggtattttacaaaagaaacattaataaaaaaatctatatagaaatattcaatctcatttataataaggaaatgcaaattacataagcaataagatgctagtttacactcatcgcctaagcaagtgtcagcatcacatgttggagatgacttatagcaaagggttgtattgtagcatatgattgtattaaattggtacgagtattttggaaaaccgcttctaactgtatttttaataagttttatctt

SEQ ID NO: 2725 - DNA, 442 bp, Homo sapiens
tacataggtatatacatgccatggtggtttgctgtacccatcaacctgtcatctacattaggtatttctcctaatgctctccctcctgtagcaccccacacgccgacaggccctggtgtgtgatgttcccctccctgtttccatgtattctcattgttcaactcccactcatgagtgagaacatgtggtatttggttctctgttactttacagagaatgatggtttccagcttcatccatgtccctgcaaaggaaatgaactcatccttttttatggctgcatagtattccatggtgtatatgtgccacatttactttatccagtctatcattgatgggcgtttgggttaagtcactcagatatacaccggctctttcagtaaccaccccccaacccagttttaaaataatgtcccttttctgattctttccctcccttaag

SEQ ID NO: 2726 - DNA, 347 bp, Homo sapiens
aggtatagaaaatgaacaaagtatatccctgatttttgcttacatcttttctgagtaagacattttgtgcttacatactatggattagttaatcattggtcagttaaatacaaaacatcatttcgatctggtagcttagcaacacttaaaaaaaaatcagctaatgcttagcaaaggtttccactcaagatattagattatgaaaaacttcctgcttaacaatagtaattccttgcagagtttatttgacttcattcaaaaccattcaccaatactagagttaggtgccggggtttcatatttccttttagcacttttagtgtttggttttatcagaatcccaaatc

SEQ ID NO: 2727 - DNA, 480 bp, Homo sapiens
  misc_feature 305: n = A,T,C or G
ttactttctacttgagttccattcacgtgcgttttctgatgctccacttatcatcatgtgcttactgggctctccccaaagaacccaggacaaaggggcccgccctgtcttgcctccctccaccctgctccagcaagctggcccagctaggagtcctgaggatacttacttattatggggcagcctggagcacaaggttctcaggtcatctgcaattaaggagatacaagattaatgaacatactggtgacaacacggtgaaatacacactgacgttctttgcaaggatgctagcaagacagcanaagcgcctcatactacatttccctagtgtcatttagaaactgagttctagccggggtggatcacccgaggtcaggagtttgagaccagcctgaccaacatggtgaaaccccatctctactaaaaatacaaaaatcagtcaggagtggtggtgggcacctgtagtcccagctactc

SEQ ID NO: 2728 - DNA, 552 bp, Homo sapiens
  misc_feature 234: n = A,T,C or G
gaactttctgggatgaaagaaattatatcttaagaagggcgtgtcacataggtgtatttattttgccaaaattcaccaaattatatacttataatttatgaatttcactgtatgtaaatgtggcactaaaaattacaacattaacaattataaacaaatattaaactcagtttgcctatcatggtggtatcagcaagcagttttgaaactacttactgtatattctaggctcangcaaatgagtaaacatattaataaggataatggaagccaggtttctctctgttacagaaggcagcagaaatacaccaaggaaaaagactaggatgtacctgaggtactgaattgaatgggaggtatcaatatgaacatatggtttttattggatagagaaaaatacacatatgtgcatatacttgtatatgtgtgaattttatgagccatattatgagtgtattatatattatagtaagtatgcatgtacatttcctacttctgtctactgaagtccataagtaatggtacacctatagcattgagcatacatagtat

SEQ ID NO: 2729 - DNA, 538 bp, Homo sapiens
  misc_feature 333, 367: n = A,T,C or G
taatcagcagataaaagctcagatggtcagaaacatatagaactataatgccatctccaaagtattgcatgcatacaaatgacgttcaatccgttgaatataatggagacacactatttcaaaaattaagttcttctttcttgagctttaaaagtatacacatttacccaaatgaattaaaaacatgcacacaaatatttatatcaaaagtgtacatgatttccaaaacttggaagtaaccaagatttacttccatgggttagtgcataaattaactgtgatacatatatactatggaatattattcagcaacagaaataaatgagctatcanaccacagaaagacatggaggaaacttaaatccangtggctaagtgaaagaagccaatatgaaaaggctacattctatatgatttcaaatatatgacattcaggaaaaggcaaggctgcagagacagtaaaaagatcagctaggtgcagtggctcacgccactttgggaggctgaggcaggtggattatctgaggtcaggagttca

SEQ ID NO: 2730 - DNA, 576 bp, Homo sapiens
ttaatgtaatatttgttaattcccccataaagaggtgtcaatatttttgcctagtcgtgttaagtggtaaaagaagttatatatcagagattttaaccacaagaaaaaataaaatatgaaataaatgttaatgggtacatttatagttagaaaacttaatgctatccttagattcactattttatgtgtatcctaaactataaaatttggtttgtgtgactcaaaattcatcaaaatattccagcaataaatcttgagaagaggagtagaaaaaagtaacatttatacaggaattactattggatgcatttgctaaatcagagatgaaatatcttaaccaatctgtaatgtctttctcaaaattaaaaaagataactaatgtagactaaaaaaagaaatgtagactaattacttgtcaaattttatttttaattgcaacccttttgtggtagcttttacaacagacccatacaacattctttagccttctctttaatttcttcaaagacagtcaagcacgaatctcttagtattaaattgaatagatggcaaacagaaactttggctggatacttt

SEQ ID NO: 2731 - DNA, 539 bp, Homo sapiens
tgtgcctggcacatgtgtctttctttgatattcttaaaatatcaagtttgttggagttggtatttggctcatggagcagattgtattcacatgtagacagtcacttaggtgatgcgattccaggagcccctagaagtccatgaatctccactctcttcctctattatctgtaccattgtgggctattctgtcattgacgtttattctttgtgttgagtcttcacctgttaatgctctgtcttggtcacactcacacaaattaatcaacagaacatgatcttatattaactactaatttctggaatgcttttgaatgctgattacagtatacatctataatttgtcaatttaaagaaacacacagtgctgatccgcactcccagagttcccgatgcattagatctggggcagggcctaagaatttgcattcccaggtggtgctgatgagcctggtcagggaatgcactttgagaaccactgctctaggctatatctggaccttaccatatacaaaaataaaatcatttaagacacaatta

SEQ ID NO: 2732 - DNA, 407 bp, Homo sapiens
ttttgtatttttagtagagacagagtttctaccttgttagccaggatggtctctatctcctgacctcgtgatctgcccacctcggcctcccaaagtgctgggattataggtgtgagccaccgcccctggccaagaacattattcttaagggaggagacctggatttcagtaccagttgtattttctgattaaaaggaaaaatagcttgcctggtcttagattctcctacaaaactaagtgggttggtctggatgatcattacattcccttatcaccttagcatttcttcacaatcctttactgtgctggttattactgaagagtatttagtagtactgtagctctgtaagattaatgtcaatgagaggctggtattgaagtaatttctgagacctttaaaaattatc

SEQ ID NO: 2733 - DNA, 575 bp, Homo sapiens
gcggtggctcacacctgtaatcccagcactttgggaggccagagcaggcagatcagtaggtcaggagtttgagaccagcctgaccaacatggtccaactccatctctactaaaaatacaaaaattagctgggtgtggtagcacacacctgtagtcccagctactcaggaggctgaggcaggagaatagcttgaacttgggaggcagaggtcgcagtgagccgagatggggccaccgcactccagcctgggcgacagagtgagactccatctcaaagaaaaaaaacaaaacttatgttttgaaagtcatgatataactaagtgagaaaggatgggatactaaactacacaaaattataacttagtaaataaaacaaaatcaaaataaaaatgaaaatacgcatcttaaatatattactattacaaacaaaaaaggtttaaacatattgactttattaaaaacagagtttttactatacttctagaatacaacttatgaaaataatgaaaggtattacaatgtttaaagatacaagttttaggccaggcgccatgccccacacctataatccctgca

SEQ ID NO: 2734 - DNA, 352 bp, Homo sapiens
ttgtgactactttactacacaggacagtttctaagtccaatttccagtctcccagtttactcgaacatactgacattacccaagccatgcccagactcatctaagatgcagtgtctcctttcacatcccaggtgaaactagacctcacctcccgtgtttattatttctactacttatggtaaaattgttattctctaaacttatcctttttttatttctctttgttataagggtattttctgaatatttatttcatttgtgcatcatgatgtcaacataacgttaagctaacttgtaaacaggtgtttcaagagtgcctgttatttgaataaacctggagaaacacagtatt

SEQ ID NO: 2735 - DNA, 544 bp, Homo sapiens
atcaccctcattgtcactactattcactgagcactaaactggtacacatttattgtctgaattatttcttgcagcttccctgtaaggaagatatgattaaccccctttgggcttggtgagatgaagcagcttgcccaaagttgctaggccagggagcaaagccaaaatgtgcaaacaggtctgtctgactctgaaggcagtgttctcatcctatcctccactgctgtacagcacccttctccttcctgcactgccctttctctccctgatgcagcccccaagctttcttctcttaccttttgtttcttccatctttgccattgtaatatggaattttctattattataaacagaaaatagaagctatagactattcaagcagaaagaacttcagtggtggagtcaacataaaagcaggtcactgtagcttccactccacaaaatcactgttcctaatgtacagatacagattgaggcagaaaccatatatttcactgtcacccatgtgggtcctgcctcagctgtcacacccaaagccatgctg

SEQ ID NO: 2736 - DNA, 542 bp, Homo sapiens
  misc_feature 291: n = A,T,C or G
gaggccaatccttgggacaatgaacccagggagaagaggcaaagtccttaatccaaggagaacagctggtggcatgttaatccatgggtgatgcagggttgacacaccagtactgcacattctcaggtcacttgctgagttcatggatgtgaaacggaatgctcagatgccaaacatctcatgaccatcacatagccagtcagcgacagagctaggctgtgaactcgtatctgtctcattccaagatccctgctctttctatattccgtattactccatgaaaaaccatanaggagggtggctgaggttgaaaagaaaagaggatgcagaaattagagggctgagtcttcaggatttgatgaatcttagctttcctgactacaacacaaaccaaagtccagtccaaggggctcctgaatatcagttggacacccagataagctcctgactgattgccaccctctagcccccgtaggccatactcctgcacttaaaatgcaagattcttgtctgtaatcccagcactttgggaggctgacatg

SEQ ID NO: 2737 - DNA, 531 bp, Homo sapiens; identical to SEQ ID NO: 2688

SEQ ID NO: 2738 - DNA, 546 bp, Homo sapiens
aatacatgtgagcttttgcaacaaagggttgcagccatatcgtccagttcttgttggttacatgtcaacaacctgtgatccactacacctgtaaaatactgttagccctattttcactctcattatttaatacaaatgatcactgttcttttctattattttctcttcctttaattttcttactcccagtttttctccaccactccatcttcttcttgcataaacctctgctggtatctaacattctttattctcaagggtggcatcttaaagggcgtttcagatctttgggtcttacattaatttagttgtgggtccacagctgggaagctcagtatcaagactgcccaattactgataagaagagatagatggtcgggcacggtggctcacgcctgtaatcccagcactttgggaggccaaggtgggtggatcatgaggtcaggagatcaagaccatcctggctaacacggtgaaaccccgtctctactaaatctacaaaaaattagctgggcatggtggtgggcgcctgtagtcccagctact

SEQ ID NO: 2739 - DNA, 521 bp, Homo sapiens
ttgtgatccgcctgcctcagcctctcaaagtgcttgtgaactaccgcgcccggcccctaattactgcttttgaatgttaactttaagtgaaaaatcttttagcaatgttttgttatgtaaggatattttcatattcagtgactatgtcatcgaaacacatgaattacttataggggtaccttctacattcagagttccttaatttgtcgtcaatgaaccacctgaataaaaaaacgtaaatatgtgacaatgaaggtccacgaaagctaggtgcaagattacatgatccgattcttcacaacacacagctaaatgaaaatacagctactctatgaacctcaaagatctttgatgacactgcaaatgacacaaaagcaacctaagctgtatgcttttttagcatctactatttaggagggccaccttataaaatagatttgaatctcaataaaagtctactgtatccgcaggaaaatcctaataccattcactcacacaaataatttaactatccatttcga

SEQ ID NO: 2740 - DNA, 305 bp, Homo sapiens
ggtctcttgttcaaaaattattaagaatttcaagacagtgacagcagaacgttaaatcacacgtgaggctcctgggattgcacagatcgcaggccttcaaagctggttagtaatgtgtgcggcctggggagtcagggttcaggggagggttgttaggcctgccaccaagaggacgagaaactgatcggggtagccaacctctgccctctagaccagtggtccccaaccgttttggcaccagggaccagtttcgtgaaagacaatttttccacagacagtgggagggatggttttgggatgaaact

SEQ ID NO: 2741 - DNA, 509 bp, Homo sapiens
  misc_feature 432, 433: n = A,T,C or G
caaaatatctaactcagtaggaaaaatattattcagaaaggacatttggtttatgaagaataaagacctattggattaagtggaatgttttacttaaaagtagtttcctactcttttcaggaatattattggcaattaatcattgacgtctaagccagttcacattaaaaataagaccacaccaaaagacattttagattgagaaactaatgtgaacaattcatggggagaaaattgaaatatggcaatagtctattgtacagctgtcttgaaggggaatttgaaggccataactgtcgaaggattttcctaacttaacagaagcctgtgtacactaccagaagaattgatgtttgcagttccacccactgtgtactttttcatgatcagagaaatcattcaggacaacgcagttagcaaaccataactcannatggcaatatataaaataagcataatactaatagtatataaaccataaagtaaaatgtttaacatatattatttta

SEQ ID NO: 2742 - DNA, 607 bp, Homo sapiens
ctgctaatcatattgatgtgcatttagtgttcttttacctacacctgtcaaagtggctaaagtaatccttcataaggagataatttttttcttgtaggtgatttttttccacataatactctaacatttccaattcaattttcctcaaaaaagtttacatgatatacatatacaattactaaaactttggctgcataaataatttaaatggactttatttcaaagataatatttactttgaaagttgtaaacctttgaatcatcagttaattagaattatcttatatctttctttataaaataaagtttttttgtccctacatatttatgatttggaaattttcacctgaaaaatttcattttcatttggatgccttgtctttagtataaaattccatatttcaatttcaatataattttttgatttttacttgaagttatgataaaataagaaaagtgaaaaatagagataaactttaaataccatgttatttgtgcttaataataaaatcaagaaaataaaatatctaaaataattataactatttaaataaacaaagtatcatataatgggcaaaatattcttctggctagtcagatgattttg

SEQ ID NO: 2743 - DNA, 187 bp, Homo sapiens
tctaaattaacactgtatttcatattctccaggtctgactattaaccagattttggaacctttagggcttattatttagtaatccctgaagctctcaagtaggcgtttttaaattcatgcattagaacggattaaaaattagctagaaacgcatgttaaatggcccactccctttcttttgctaatt

SEQ ID NO: 2744 - DNA, 496 bp, Homo sapiens
tttatgctttggtaagcttttttgttaagttataacatataaatagaaaataaggtgtaacatataaatagaaaatatatgcctaatgcatgtgtgactcggtggatctttctggagctcggctctttcttatctttgtgctgttttatttcccgtcattctggagactctgccctgcatattctggccaccttggtcttccccaggtctcgtcagtgtcttctactcagcaagatggcagggctctttttggattccccttcctgtgctgcaattcagatactgcctccaggcagaaagctgaggcaatttggggctcacttcagtctttcccttctacagagaaagggctgcactgccttttgtcccctatctgaaaacagttatttcatgtattttgtccacttttctagcaatgatggtgggaggctaagtccagatcctgtttcttccttatggtcagcagtggaagggaggggtccagaatcagatgtct

SEQ ID NO: 2745 - DNA, 305 bp, Homo sapiens
gagtatttttagatttagctttattttgcatatgttagtgagctagaataaaagaaagacatattaatctctttccaagagccctaattctttatatcttctctattgaatgatttgtactattgtgaaaatgtaaatttttagagttttgcagtctaagatttgcagttcagctatttaaggcagcaactgccacattatagaactgacatttattaaggatcttttatgtaccagacatgttgaaatccattgtctaaatcatcacaacaaacctataaaggtaattattatatctattttac

SEQ ID NO: 2746 - DNA, 448 bp, Homo sapiens
tactcaccatcgatgaaggtaccctgagagcactgagaattcccacaggaaagaaatctatttactttataaaaaccaatatttccccaatgtaattgctctcagactatgtttaactctgaggaatgcacttgtggatgcctgctttagaaagatgaggaggtaggccgggcgcagtggctcacacctctaatcccagcactctgggaggccgagacaggtggatcacctgaagtcaggaagtcaagaacatccttgcccaccatgatgaaaccccgtctctactaaaaatacaaaaattagctgggcatagtgacaggcgcctgtaattctggctactcgggaggttgaggcaggagaattgcttgaactcgggaggtggaggttgcggtgagccgagatcataccattgcactccatcctgagcgacagagtgagactctgtctc

SEQ ID NO: 2747 - DNA, 226 bp, Homo sapiens
gttgagtgtgagcctgaacacagcatgaaacctgggaagtctctgtgaagcagctgtgttccctgggtccctttctccaccaccccctgcagcaggtgtctgtatgtctcctgccctctaggatcccagagatttattcttgagatgttgaaatacagaggctttgcacatgagggcacttagacaaaggagctacagatattggttgggagacctcaaagaaaat

SEQ ID NO: 2748 - DNA, 520 bp, Homo sapiens
cagttgctataagaggtcagtgaacacaatgggcctggctaggtacctttgcttttccactcagtgctcctgagtatcagtgaaggtctacttcattcaacttctgatgccaaattattaaataaaaaactttagacaaattaaatttagtagagtttatttgagaaaagaacaatttatgaattggacagcacttaaaaaccaagagaggttcaaggagctccaagtagcaacaaaggaagaccatatgtatagatagaaaaagacagaaaaagggtgtctgtatttatagatgtaggggaacagcttgattggtaatagcttggcattttccttgtttagatatggtgagatgagtcattcactttagatggacatgatcttcttggttggcattctgtgattggctaaagcttggctgctaagattacttgagagttggctacttattttagaatatagtcttaatttgtgttgcagtttgcctacctactacgttaggttgcagttctgcacatag

SEQ ID NO: 2749 - DNA, 352 bp, Homo sapiens
ttctttaaaatgttacatttgtactttgggaggctgaaatgggaggattgcttaagcccaggaattcaagatcagcctgggtaacatagtgagaccccatctctataaatataaaagtaaaataaaatggtatatttgaacactacacatcgaagataaaatcctcaagtgttatagaaatcaagttttgcatcattttgctggaacccttgtttatgcaagtggctccataatccccttcccccacctttaattagaagcaagcataaaggtaaaaaaaatcaatatacataaaattggtgaggatggctaggtgcagtggctcatgcctgtaatctcaggactttgggag

SEQ ID NO: 2750 - DNA, 535 bp, Homo sapiens
gtttgaggtctgagttctccattatctttgggaaactgggcaaattacctacgttttctgagcatcacttttcttatttgtaaaatggtccaacacctgcttcatcttcccatggtgttatgcactgaccaacataatagacatggaagtatgctgaactgtaaagcattggagaaaaaaatgactttagtgtgtggtgggagataatgggacttggtggatgggtgggtgtagggtattgtgttttaaggagtgtggaggggggaccatttcttcttagccaggtgcaaagaaaagctcttcactgtgttcaggttgtgagacaagaggatccctcctgatagataagtctttcttctagtccagaaaagatgctcttcctagctctgtatggctctagataattttgctgtacatttctaaatcttgcttccattgtggtgcaaaactaacaggaaaacattcactctgcctctagctttctcttcctaaactctgcccttcattttacctggagaacttgccttttccttct

SEQ ID NO: 2751 - DNA, 564 bp, Homo sapiens
cattttttatctgccagaaactctgaaagttttaggtctttacaagtatttacttcaaacagtatttctcaaactactgctacttgtgaaacgtttattttacaaaactgtcattaatcccacagggctgtcaagaaaaactattaatagctagagagcgaaaaaattagaagttgaaagattttatatcagaaaacaaaagttataaaatcggcagcaaaagacaaggaggaagaatgtgaaataggaggagagtaatcggtcagatgaaattgaagtcaacaaggttaagacgaagagctcaatgctggttttgtcaatacctaagaagttaaaattaaaaattaaagattaggccaggcacagtggctcatgcctgtaacctcagcattttgggaggccaaggcaggaggattgcttgaagtcagcagttcaagaccagcctgggcaacatagccacaccttatctttacaaaaaatttaaaacttagctgggcatggtggcacatgcctgtagtcctagctacttcagaagctgagataggaggatcacatgagccctgg

SEQ ID NO: 2752 - DNA, 306 bp, Homo sapiens
gcacaccaccatggcacatgtttacctatgtaacaaacctacacatcctggacatgtacacctcaacttaaaagttgaagagaaaaaaaagaataagcaaagcaaaactaaaacaaaacagaaaacaattacttctattactgacttgtttttaggagatgtatcataggttctactggtctttagtacctttcacatcctgattccgggaggtaacttctatggggttggcttgccagaaagtgaattcaagtacctactctctgtgtgatacctttgttaaactagatttcttaacatttgcct

SEQ ID NO: 2753 - DNA, 563 bp, Homo sapiens
gtatcctaagacaataattaaacaaatgctcactctgtcatggtttataataacaatattggacattactagaaatgaacagagaaaggcctcattcaatagacacactcatatagtaccataatgtattgttaagtgaaaaagcaggctataaaatgtatgtagaatatgatcctggtttgtaaaaagacaaaaaaaggaggaaggaaggagaggagagggaaggagattgaagaagagaggaaaggaggagggggaaggggtgtctgtgtgtgtgtgtgtgtgtgtgtgtgtgtgtgttgagaggggggaggaagcattggggtatgtgtgaatagggaaaacctcagacaggatcatgaccaagtgttaactatgcttgtatgcataatttttcttctcttctatatatttttctagaatgcctgaatgcccccaaaagctattttcactacgaaaataaatttaaactgtaatcacatttgcatagccactttataattaaagagaaatctttcaacaaattctccatcattatcttcagaggcagtcagtgattattt

SEQ ID NO: 2754 - DNA, 565 bp, Homo sapiens
gtactagagtataatgcaactacatgaacaatagacattcaaactttatgtgcaaaagtctttcttctattctgcaatacattttacatcatccaatgttataataaaatctctattctccaggcttgttagctgttttattcatttatatccttgagaaaaagggacaatttaaattgatacaatttaacctacttctagaatttatcctaaggaaatcaacagaaaatgtaccaaataaatatccataaaatgttaataatagtatttactttatttcatttaattacagtatttttaaagggagaaaagtaagaattgtgtaaaatctcaaacaataagattatttaaataatgatacatcacacaaaggagtcctgaaaagcaataaaaatcatgatgcagaactatatttattgacatgaataaaggataagcccatttatctaaacaaacggatattgctatatgtttttaggcctatcagtgtatcttcaaagaaactctaaaacacactttgaattgtctataacaggactatgaatgagttgcctttattttttat

SEQ ID NO: 2755 - DNA, 383 bp, Homo sapiens
atacactcgaaaccagctataaatattggttattattgctaggatgctgacgttcaaatataaattgccaaaatcatttgggaagcattgcatactccattcccacatggagagttgcagggcatgtgattatctgtttgttcatttagtcacaatattgatcaatatagaacaaagcagtatattttaaaaatcaaccaggagcagccattctttgaagtgttatgcaaccattaaaaattaggtttggccaggcgcggtggctcaagcctgtaatcccagcactttgggaggccgaggcaggcagatcacctgaggtcaggagttcgggactagcctggccaacatagtgaagccttgtctttactaaaaatataaaaatc

SEQ ID NO: 2756 - DNA, 557 bp, Homo sapiens
tctatagttttgtttgggcacagagaatattaagtagtggtagttattgactcatgaaactgatcaatttgggggaatataatgatgaagggtagagggaagagtatgtttcagaacttctcctgtgtctctattgcttgatttatttaaacaggcatataatcttcgtgctttaagaaaaaagtcaaatgaagttaaaatcaaagaaaatgtaagctattaaagataaatttttaaaaggttgctaagaatttcaaaagacacacagtagtcaaagagaataaagattcaggaaaggtcatatgattagtcataagtcataaggtgacttaaaggttactgtacaatgttccatttaaaacaaagtgaggatgggaggttgactgagactttaacagcaaaggaggagaagaggagaaagcagtatgtatgtgtgtgtgtgtgtgtgtgtgtatatatgtaaaataaaaacatttatatataatatataaatatacataaaatatttatatataatatataaatacataaaacatttatatataatatataaatat

SEQ ID NO: 2757 - DNA, 518 bp, Homo sapiens
gcatttattgaatgatatattatgccctaagctctgaacttgaggctgtaggcaccagaaaagggggaggtgctctgctgcagcctggtctgcaggtaaaggcatacagacattgcgtgtgcttacacagtgccaagcacatccaagaagcaaaggcggttctgaaattctgaactgattcaaggcttattttgatctaagatgaccatatgtccaagtttgtccacaacagtccaatgtgtagctccgtgagaattgttaagaatgtcactaagtgctgtcaaatatgtcccagtttaaatagtaaaatatggggaccaccctttcctagtcccaaattaatctaagagggcaagatttaatcttacaggcagctcgtccctcttgctccttcctattgcagagctagggccctaggaagacctggtctaaggcagatcttgactttggcaaccacaaaattgccctgctaaaaatctccaagaaggatgtaaattcatacaccctctgtggaaaac

SEQ ID NO: 2758 - DNA, 565 bp, Homo sapiens
ctacgcttcccatggtcgttgtgaggaaccagtaatccgtgctgtcacggctcaactaggcagttgtagtggaccaggaagcaagacccttctttgctctgggcctctgtaaaataggacatccctctgtcctgattcatgcctcttgccacagcataattcctcgtagcacccacttttactttcagagctgccctggtttttggatgacaaaatatacgaataccttcagtaccccagaggttgcttatgagaattaaatcaaataactcatctcacttctgctgattcacagggtacctcaggcaagttgctttttccatctcagcttcagttcgcccatctggaaaatggcaataataccaagcatctggcagcctgaggatgaaataaaaatcacagaaccttagagagttcagatcaggcaatcctgaggttcagatcccaattcggcctcttgatggctgtgtggcttgggcaaattgctcaacctctctgtgctttattttattcatttagaaaatgcagtgtgaagctgggcactgtggctcatgcctgtaatccc

SEQ ID NO: 2759 - DNA, 414 bp, Homo sapiens
gcatttattgaatgatatattatgccctaagctctgaacttgaggctgtaggcaccagaaaagggggaggtgctctgctgcagcctggtctgcaggtaaaggcatacagacattgcgtgtgcttacacagtgccaagcacatccaagaagcaaaggcggttctgaaattctgaactgattcaaggcttattttgatctaagatgaccatatgtccaagtttgtccacaacagtccaatgtgtagctccgtgagaattgttaagaatgtcactaagtgctgtcaaatatgtcccagtttaaatagtaaattatgggaccaccctttcctagtcccaaattaatctaagagggcaagatttaatcttacaggcagctcgtccctcttgctccttcctattgcagagctagggccct

SEQ ID NO: 2760 - DNA, 563 bp, Homo sapiens
gataggttcaaagctttgattataaatcagttgtttagaactaggaacacattttcacatggaatcataatcatagttaaaatgtgatatatctcaataaaatcagtagtaaaaaacttacgaaatatcaaacaacacagaaagccaacagactttaataaaacataatttaatttactttagaaagtagcacttcaaggaaaagattttatgcgaggcttctaggtgattcagaagagattttcagagaaattctaaaagctttgtaagagctgatgaccctagttctttatggtttattttacctcaaattttatggtttccctttctttcagtataagcaaaacaccagtactcttatacttaatagccatgattgctatcatttatttcacaagcaagagagagtaattggggaagaattagaagaaggacaggaaagagaaaggagtcataaaggatgtgcccaagtacaaagaaaaaagacttagattagattaggtaacttcagtaggaaaaaataaaaaatgaaaaggaggtaaagcacagcattaaaatattga

SEQ ID NO: 2761 - DNA, 454 bp, Homo sapiens
gaaagtattcaagagcaccatgaccctagttgggcggagatgaagatgagataccttggcttcctgctttggaagacctaacagtggcttgtaaaacaggctggtgaggacccatgctcccaattacacagggcctggagaaggcaggaagaggctttccatttaattttccattttaagtagtttaatatttgtcagccagtagagctgggtttggaatggcagaagctttgggggtggactgttacaaagtgcacacagctgccgaggccttgcaagctttgggcagctgtgggctcaaagcagggttctccatacagtattcacatggtttattcagagcagtttggggaaatttcagacaatgctaaaccatcctttaaaattcctggacctttctttactctttaagctgattcgcatcatgttggttatatttaatctaaatattttt

SEQ ID NO: 2762 - DNA, 553 bp, Homo sapiens
aaacttcagcaactttccagttgtagagtaagcaagcaccttaagtagtgtgttaatgattgaaactgtaattgccttcgggttgtgctttagtctgtaaaattctaaaggagagctgctaaattgttttcttaataaacatttttctcatttgtaataatgtagtcttgttctttgtggggaggggaaaggagacagtcattttcctagaaaatgaatcctatccatttctcactgagcatcaatattggcttgctatttcaaagttacttgtcatagattatccttgtgttttattagagataattaaaaatttttttttcttaccatcttcaataatgaatttaagccatgtgcagatgttagctatggacattttaggaccatcatcatttgttaaaatgaatagaatttaaaaagatatttctggatatgtagtcttcccagaaaacaagaccatccccttgtatgtagtattatcttaattaacttgagttttggctgcctaacctacttcttgaaattttatggggtcattctactcatattatat

SEQ ID NO: 2763 - DNA, 412 bp, Homo sapiens
atcccagcactttgggaggctgaggcaggcagattacttgacgtcaggagttcgaaaacagcctggccaacatggtgaaaccccatctctactaaaaataaaaaaaataaaaaaataaacattagccaggcatggtggtgtacacctgtaattccagctacttgggaggctgaggtgggaggatcactcgaacccaggagctggaggttgcagtgagctgagattgtgccactctcctcaagcctggatgacagagcgagactccatctaaaaaaaagattatagacatttaaatttttctttttatctgtatttttaaagttttcctaatgaacttagacttgcttttgtagtaagtaaaatttgatcaaaattatttttagttaaaaaaaattaacttcaggctgggcgc

SEQ ID NO: 2764 - DNA, 554 bp, Homo sapiens
gtgctactgcgcttgctgcaggactcacaacataacttgttataacctggtatggagcagtatcgtgccaacacttccatttgacagaatatggacttgtctcccaaacatggttcatctgcaaaaataaaaagaaaataaactaacactagcatctaaacataaaataaaaggaggaaaaaaattaaaatttttaatgaatgtaaaaagatttaagtgcaatctgacactaacgggagtgatccacacgagcttttgcattaaaaatatgaatattagaatgaattcactaaaataagtagttctttgtctacaaagtccttgtgatgatcattattttaatatttccaccaggagtcttcagaccacagagggtatttttttctccaagtaggaacctatatctgattttagaatgggcaaagataatttatttaacgttgtggttaaatttttaggatgcaaaggggcatctgtatttttattttatggtatttctgactttctcagagggtactccctacattacgttaaaatgtgaaatcaaaataaat

SEQ ID NO: 2765 - DNA, 374 bp, Homo sapiens
gaaagggacctggacagccatggggtggccgggatgagccccttcctctctgtgccttggtttccactgtgggataagggggccttagcatcagcgctcagagctgtggagccaggattcctgatcgggcgctgtctctgccaggccagggcacttggacaccacgctgcaggaggctggtctcgcccaagcctctgtgggaagggccgccaggctgagtggagggccagccaccagctaattccagcccagggatcccccatcccaccctgactgcatcctgagaaggggggacgccacttcgggaaggttgttggggcagcacaggccctggggccctgctctgtgaccttgggcggccccctctgtctctc

SEQ ID NO: 2766 - DNA, 511 bp, Homo sapiens
caacaatatacttttgacacacacaaacctttgatttggtttcaaagattttgcaaaatagtaccaatgtaatttacaactgtcatctttgaaattgtgtaaaagtggaataattttctgaagaaataaatcctggtttgtcaatgagttgcagagactgtctgacattaactttgtcaagattaaaggataaagtatatgacaatttgtttcatcatgctcatgacattatgcaattttctccctagcttttaatttttggaggcagaaaattgagccagaaatttttagtcattaagtctcctagcaacaagctgtaaaccttccaacaagcttggactagaatctagacactgaaatgcacatacatgctttatgtaatgcagaatgcatttattggagaactcataaacatcctataaaattttcttccctgagatgcaactataaaacttggccctattctgagaatgcttaacatagatttcatccatactgtaacactgatttt

SEQ ID NO: 2767 - DNA, 372 bp, Homo sapiens
gcccaccaccatgcccagctaattttttgtattattagtagagacagggtttcactgtgttagccaggatggtctcaatctcctgacctcgtgatccgcctgcctcggcctcccaaagtgctgggattacaggtgtgagccaccgtcccgacttatttcagccatttttaatttgctaatagtcacgaaagatttttcctagtaaaaattctgaactcaacagcaaacaagttttcatgtttaaaacaatcaatcctcaaaatcctctaatcttcctaaatattctatgtctgataggaataaaatgatgagataacgcatatattttgctatagaattttgcacagaatttaaacagaaatgtcatttatc

SEQ ID NO: 2768 - DNA, 553 bp, Homo sapiens
actgcgcccggctgaagaaggctcttaattacctagtgatgatgcgatttttttgaagtggtaaaacaatctgtgctaaaagtgatagacagagcacagtacaaccacccttccatttatacaataatgacatccctttaaaatctagagtatgttaaaactaggtaaaaatattttgtgtttatatgtcaaagcagacttagattctaggttcagattgttaaaaatgtatcatacttatacatgaatgtccattttgatattataaagtcgtggtggatgtaggacaatccaatgtcttacaagactgtcctgcacattgtaggatgtctaacactcatggcccctgaccatcaaatgctagtagtctctctgtgacaaccaaaaataacaccacaaatttccaacattcctctaggaggtgctgtcactttgatcaagaaccatcaatatagaggataacttccaggctgtaagccatttatgtttgcattcatgaaaccctagatgatccatggccatcaaggtaatttgatgggcttgataatttgag

SEQ ID NO: 2769 - DNA, 554 bp, Homo sapiens
aggacggctgctcagagccactcctgtagggagtaaatgaggaaggagaaatgactccatctgcaaggagggaaactggccgaagtgagttctagaaccaaaaccacaatcacagatgcaggggctacccacaaatcacaggtgcaggggctacccacaaatgagttgaacagaaagctgggaggtaaatccagagagacttcctggaggaagggtgcttgtggttctaccaaaagaggggggagtcaaggtaagagggaggcattttgagtgaggaggggacacaccaagcactttggcttagacgaaaccacaagaaagcgaattcagagacagagagagtttgaagcagcaggtatagatgaaggaaaggtgggcagggtgcagtggctcatgcctgtaatcccagcactttgggaggatgaggtgggcagataacctgaggtcaggagttcgagaccagcctggccaacatgacaaaaccccatctcttctaaaaatacaaaaaattagccaggcgtggtggtgcatgcctgtaataccagctagtcgga

SEQ ID NO: 2770 - DNA, 493 bp, Homo sapiens
cacccagccggggaatcagcaagtccatctacgcttcccatggtcgttgtgaggaaccagtaatccgtgctgtcacggctcaactaggcagttgtagtggaccaggaagcaagacccttctttgctctgggcctctgtaaaataggacatccctctgtcctgattcatgcctcttgccacagcataattcctcgtagcacccacttttactttcagagctgccctggtttttggatgacaaaatatacgaataccttcagtaccccagagattgcttatgagaattaaatcaaataactcatctcacttctgctgattcacgggggacctcaagcaagttgttttttcatctcagcttcagttcgcccatctggaaaatggcaataataccaagcatctggcagcctgaggatgaaataaaaatcacagaaccttagagagttcagatcaggcaatcctgaggttcagatcccaattcggcctcttgatggct

SEQ ID NO: 2771 - DNA, 315 bp, Homo sapiens
tatatatttacgtattcgcatcctcctatctgcttgttccagaaggaagacattctgaccttgtaaatggcccatgcttacaatttattttaaaagaaattttaggtttttggaactacccaaagatattttttaaaaacattaggtgataggtaactaaaactaaatggtaagtttggctaaattcagcaaacattaggtaactgtaatgtataaggtattgtgtttggtggacatgagagaaagatgacaaaaacttgatgtctgtattcctgtggcttgtatgccattagctgactcagataaattcataaa

SEQ ID NO: 2772 - DNA, 551 bp, Homo sapiens
cactggtaagtagatgcagtacttgagctaaaagttttatttatttatttattatttttttaaaagacggggtttctctgttggtcgggctagagtgcagtggcacaatcttggctcactgcaacctctgcttcccaggctcaagcgattcttgtgcctcagctcccgagtagctgggattacaggcatgagccaccatgcgtggccaagataaaagttttttgttttaaaaacctaatgatttcataaaagcactatttgtatagatttttcacaggaaggcagaagacattgaaaatgatgccctttctcctgaagaacaagaagaatgcataaattatctgagaaagaccagggactacctaataaagattatagatgacagtgattcaaatctttcagtggtcaagaaagtaagtagcaggttgttgtatgtacgttcttactgataacccactggtcaatgtttttgcgttggtcttatattttggtaatttcaaaaatactcagtaatatgttgttattaatgcacagaagggatatgtgtgtct

SEQ ID NO: 2773 - DNA, 545 bp, Homo sapiens
caggggtgatgttcttctttcctcccaaataggccttcaaagtttccgctttatggttgattttccagaacttttgattttcaaaataacattctgaagattttgtcctgaaatagtattcaaaaactagtcttcccatatttaatgaaccctggattctttacttagttgcttttttcttcttaaattacataccacagaattttaacataaatgtagcatttaatttggctttttagaaaagaccagcacctgctgtcttcattgccaaattctatcaaacatgcaaagaagaactgatgccgcttttcctcaaactatcccagaaaaatgaagagaagagcatacttccaaactcattttagtaggccagcattaccctgatttctaaacattttgttgtgacaaggacacaacaaaaaataaaattacaggccaatattccttatgaacatagacgtaaaaatcctcaagaagacactatcaaataaaattcaccagcatattaaaaagatcatttattatgatcaagtaggagacattct

SEQ ID NO: 2774 - DNA, 387 bp, Homo sapiens
atttttagtttactaacaggaagtaatttctttcccttaaaattcccttattttaaaagaaagattgtgtataacatatgaatcctgtcatttttgtcttgttggtcaggaatcgaaaataaaatttaacaggttttaacaagtgtgattgagatttgtttcctaatcactctacatgttttttctcttttgcatatatgtcattatttataagcaacttcaaatagaacagaaggtagggcataaattatcaacaactttagtccaaaaagatgttaatgaaaaaagtaacaatatttgtggtataatatatgccgtgctggtgagtattgttggttgtcttataatcccaattgctgtgtgtagttactgttccctctcctttcc

SEQ ID NO: 2775 - DNA, 416 bp, Homo sapiens
gggagttaggacggcaccatatagattttgaggggcccatgatatacctgtggcttctactaatgtctttattccaacacagccacagtggttcctgttctgcaaacgtggcagagcctccgctcctccccttccccagctgccactccccatcagccacaggccccatctctaccatgccctgtcctcagtgccctcctggcctccccactgccctgcctcagcccagaccctcagctccctcccctacactcatgtacacctgaccggggagccagaaacgtgccccagccctgttactgccccagcagaatccttcccagctgaagaagagactgcctccattcaggatccttccctgacctctgcaggtgtgctcatccccatctacagatgaagaaactgaggacttgata

SEQ ID NO: 2776 - DNA, 541 bp, Homo sapiens
actaacaagggacattgtgactcccatggtttttttcagcttagagggaattgacttatcacccagcttctcaccaatgcaatcattctcttactgtcaaagttcctgggtgtttgtttggaatagtggtgatggtgaggcgggtggaaggagcaaaatgtcgattacacttgagggaagagatttcagaaatctgagaagaaaaataggagtcaccacagaccctgcttatccagagataggacatttctctattgtagacttcaaactgtggttatctcaggccatttttgtttgtgtgggtgtcttttttgcctgtactggcagcactctctgcagagtggatggtggaggttctatgggataagatagagaagaacatttccgtatgtatgatctcagtgactctctaaataaagattcctggtgtgtaaatgtgttggctatctatcatcgtgcctctgttgtcactgactgcttttccaacattaagcaatttaagattgtgtctacactgcacacacacagatgcacacacaca

SEQ ID NO: 2777 - DNA, 405 bp, Homo sapiens
cttcctgttctgagactttgttccaggggactttcacacttcagagaatagcacatgtcatcctgcacttttgtggggtgattaaaagctcacggtatccttttatgtttagcccatccaattcttccaactggcctcagccagaaaagcagggaaggcacccccagtttgcagctgagagactccagcctgggagagctgaataaaatcttttgcccagaggggttcctcagtaaatgctggagatgaggctcagacctgacctttggattcccagatggagtgctctgaaccgtgtacctggggctgtcttcaccactcaaatatcgatagagataacatagagatgtcctcaggaagataaccaactgttcccatcctgtgtggtctacagattgggagata

SEQ ID NO: 2778 - DNA, 563 bp, Homo sapiens
tatgcagaagctttgtaaagaaaaccagagcttgggtagtgggtagcagtaatctcttctcaatttcccctatgaagagataaactcattgcagtctatagctaccaaacacagaggtcacaagatttctgtgacaagaactcccactgctatggtcttccacaaataatgctaatggaaacagagaggaaaaacaattatcaaacaatcaaataaaggtctgactgtaagctctttttcaagattttgcatctgaagatatcagaaaggaaagcaattcagaggtgcaaattgcctaaagtgcaaatcaataacatgctgatctaatgctcgatttcatgagattgctgttatataaatgtagggaaaagcaaataatcaggagctaaaattgtctcttatcagagaaagttcataattagtttgcattttcacagagttccaaatagtactgattaattaagccaatatgtattccaagcagcaacagctacgaatagtcagcctgtgtggggagaagcacaaatccagtgaattcaaatttaatacccctaattgtacct

SEQ ID NO: 2779 - DNA, 311 bp, Homo sapiens
tacggctgccagaagaccacagaaggggctgcagtccctgtcctcatggagggatgccccaagctgtgcaaacagccattaagcagatggtcacacctgtgatggttgccaggcccaagaagcatcatgagctgtgaaaacgtggagcagggaacctagaatttatttctgtgcctccacagccagcctgttcccagcagctactcactcagtcactcatcaaatgtttgctgtgccttgttggaccaccctgaggaggtggagatgaatgaaagagcttcctgcctcaattaacagagagcacatttaag

SEQ ID NO: 2780 - DNA, 423 bp, Homo sapiens
ataagtatttttcttttgtactctatcattcaagttgctactatggttctgtcaagttagttatctcccttattacaaaggtaatacacttgatttgcttaatctgtgtcttttggtggaatttttggggagtcagcaatctacagagattacattctcaaagtcgctctggcttcagtcccttgatcttactgagtttttgtgtattgtcatctactcccttctcttgtctctgttctgtgttgaccaagacataaaactaactccctttcttgtttttttaaactccctaatccccagcaacaaccacaacaaagtccagtctcacaaagcatttgcatgtcaaacaaactttaaaaatttagtaacataaggattcatatagattagcaataacaacttacatttgaatattagatatcc

SEQ ID NO: 2781 - DNA, 528 bp, Homo sapiens
cagccactagagaggaacagaactgcgacggggccttatgctttccgacctttgccccagggctttatctgctaagaatggtaacagtcaccacatattgattgctggcattgagccttggcctttgcgtttacatgtaaccagtggcgaggcatctgccacagtccccacggttcaggtgagtcattgaggtgacttgcccagggttgcatagccaggagctggccggacgggaatggacctagagtccccgactgcaggtcttgtgctcgttgcccttctccacgcaggagaaatgaatgttccttttgtaaccacagagaggaaagaaggtggcaagcctttttcctcaggcaggtgcttgctggacttaggctggtgggctgagggtgtgagtgtgaagaagaaaagccgcgctaaagagcataggcacaattgtggaaatgagttgtctaaggctgtttaagtaggagaggggatctccgggctgacacagtgcccaggggaacatcaagatgattaacaacg

SEQ ID NO: 2782 - DNA, 386 bp, Homo sapiens
cttcataccaaccccttaaagtactatttgaaaatagtactttaggccaggcatggtggctcacgcctgtaatcccagcactttgggagccccaggcaggtggatcacttgaggtcagtagtttgagaccagtcttctctatgtggagaaaccccatttctactaaaaatacaaaaattacccaggcgtggtggtgcacacctctaatctcagccacacgggaggctgaggcacaagaattacttgaaccgggaggtggaggctgcagacagtctgggcaacagagtgagactccatactttacatcaagaatcagagaagagtgatttgactcaactcacatagctagtaaaatgcttaagctataccatctaactacttgactc

SEQ ID NO: 2783 - DNA, 554 bp, Homo sapiens
atgaaccagcatactttaatctgcttgccatatatcataatttgtttctgaatagttatacagtacaggcagtaaatgcctatagagcctagacatgagaaaaagagagtctttggagataactgtgagtgagaaagtcattggagggttttgagcaaaagagcgtatgatataacttgcatttttaaaggatcactctagctactgtatagaaaacaaacagggaggttgggggatgcctctagtagggagatcagtcagagaccattatatcaattcaggcaaggagatagagactttgacctgggtggaatagtggagatagggggaaatgaacagatttttgacatatttttttaaagtcaaagaagcagaacttgttggcaaatgcaataatgcaatatgaaaggagtcaaggatcagtcttaagtttttggcccaagtaactggaagaataaaattgccttttagatgaaattgccacaagaatgagtattgatagaaaagaaaagagactgaagaactaaaccttgagacacattagcaattagaaa

SEQ ID NO: 2784 - DNA, 526 bp, Homo sapiens
tctgggaacatttcctaatccgctttgtaagggtgcttcaatcttgtctgaaatctacaataaactaataggattttttcttaaagataagtaagttcctggcttattttcactaagctgagactaataacgcttcaattctaaacaaaatattatttgtatcttatggctttgggtcagattacccatctttccacactgtctctaaaaataatacaaatgacgaagaacaagttgtaccaaaagcactctgttattcccactctctggtcttttgcgagacaaaatgacataactgaaatagcaagtcagtctggctggggaatcaatactgagtctgtaaattatcagctgcatagccttaaacaaatcacttacctgctctttgcctcaaattcttgatttatccttcattctacagcaaagggagacaaaggggctttcccagttttctacagtttggactctagggtaagaggattttcagtaatcaatactatctaaagtgataaactgcttgtatatc

SEQ ID NO: 2785 - DNA, 302 bp, Homo sapiens
tatataatccttggttgcagttcattctctgttagcacagtgaggctataatcccactgtactccagcttcttttccccctcctaccgccctgatctagagctgctgtgcagggagagttgtgtcctgccagcagggaaacacatgtttccaaagaaacattatgcgatgtcacgggttctattatctgttgcagtgtctttgggctgagaagcctgcttagcccggcatgggtacctaagtaagacgggtaacactgtctctgttggaaatgcgtcacacatttttaaagctgagcgtaat

SEQ ID NO: 2786 - DNA, 541 bp, Homo sapiens
tgggtctcatgagatctgatggttttaaaaatgggagttgccctgcacaagctctcttctcttgtctgccaccatgtgagatgtgctccaccatgattgtgaagcctcctcagccatgtgaaactataagtccagtaaacctctttcttttgtaaattgcccattctcaaatatgtctttatcagcagtgtgaaaatggactaataaagcatgatatgctgctggtccatgtaccactctttgagttagcatcatttttttcccccagatcctgtgcccaggagacatttaataaaggtgatgatggtaaaatatttttgttgtagtcgggactttagacaagaaaaattatattccaagtaggcctgaaatctaggatctttgcccaagtttattcattacatttcatcataatcttcccatctttatggtctcttggaaatgtaaattggtattttatacctatttgagaggtggcgattgtgatcatcttatatttacttagaatgttcctaaaaagtcatgagattctctttggaaa

SEQ ID NO: 2787 - DNA, 432 bp, Homo sapiens
actagagaaattcagtttttaatcctcccaaaatgacttgaagtagaatttactgtttctttactatatatcaaatttgtataactaggaagaggtacatatgctctcctactagggaaatacaacatatatattagctggataatgatttacatttacatttttgcacctttatgaaatttgataaacttctagaacgcttgtttttaaatgtttaacaatgtaaaagttgttcagcaattttttttaactcctagcattacagaagttaatttctacaaaactggttttctgggctcacaggtaaatgtaaccagaaaaagccctaaacaaattgatggaatatagatggatcaatttcttagtacagtcatgtaccacataatgacattttggtccacaggagattgcatatgtgatagtggtcccata

SEQ ID NO: 2788 - DNA, 521 bp, Homo sapiens
gctccaccttctggttattacgctgttaataaaataaaaacatctcgtaaaagagataaacttctctttatgcaaacaaaggtggctaatggaaatgtctatctagaaagtcagagtttgttgtctttgttttgcatacctgggctctcgacaatggaaatgaagcaatgccaagagattcagggccctcacagtgccaggccaggtgctgtgtagctatagatattagcccatttaatccccaccacagccagatgaatgagatggcacaagattacaacaatcctcccaaatgacagtaggtgaaatgtggaaccaagaggttaaatcacttgctcgtgttaacacagctatgaaaggacagaggcgggatctgaacccaggccccctggctctagagatcatgctgtctagagacctctctgctatcctgcttcttgatatacaactctgaaatttcagggcagttaaaatgcggcagcaccatgtcactcccacagtggcactgtgagtgacagcgc

SEQ ID NO: 2789 - DNA, 492 bp, Homo sapiens
atcactcatgggataaaatctaagctcttttgcaacaaacccaagacccttcaagatccaggtcctacgatttgccttacctcatcatctctacacttccagctccaccccaacatgtaacttagtcaaattacacaactcagtagattttacatttcccattctttcacatttccatctcttactactccatttgcttaagaaactttcacccacttcatcacctagctcggccaggaccagctactgcacataattttgggggtccagtataaaatgaaaatacagtccccttgtttaaaaagtatgaagaatttcaagatagccagaatagatgtgcatgccatgaacccagccctgtcctcagctcaatttttccttccttgtaaatttttcccattttctccctaagagatgtacgtttcttctctattcccccttcaccccacagagtttccatgttaacatttaccctgtgctatttttattttt

SEQ ID NO: 2790 - DNA, 162 bp, Homo sapiens
ataggaaaagaaagcagtaacccatccccagcaaggccaattggcatctgagatgaacaaagacgtcaccaaatcttccaccaaagctccccctccagtggatttcccctgtgtgtagcaagagagagcattttcagtcattcagtataaatgaacattcag

SEQ ID NO: 2791 - DNA, 521 bp, Homo sapiens
ttgctttcaatgatcctgatttcctctctccaccgcagtatcttgattgcagtaaagcacatttcctcatcattctttccacacacattactcattcccatttctatccttttgcccagacattttctagaatttactcttacacattctctagcccagatcattagctgtaacaaatgagggttgcctcaatcatatcttttgtctcctaattgaaattctatcttgtattatttgttgcttcatatcagtgaagttgtgtccccaggtatataattagaacatttatagtaagcatcatatcttaatttctttaggaagtgtctaccatgtaaccacagatgaaaaataaactcttgctgattaataatgaatgtgattggcccggtgcagtagctcatgcttgtaattcctgaactttgggaagctgagatgggcagatcacttgaggtcaggagttggagaccagcctggccaacatgatgaaatctgtctctactaaaaatacaaaaattatctgg

SEQ ID NO: 2792 - DNA, 399 bp, Homo sapiens
gaagcatgcaatgtatcctctattttcaagattcacacagcctagatgaatatataaggcatttaaccaagagcaagttagtgacaaagtaggaacatgggcagtggttagtgcagaggatccgggaggggaaagaagctgggaaaccttcatgaaatagatgagcttgaagaaaagaaggattttcacacataaagaaggagggcatttcaggtgggtgagcaaaaaactaaaccaaggcttttacagagcattcctttttatgcacacttgaaaatctcaagaacttattctaagagagcattctttgcaaaaagcaggtaattgagaaactctgaagtatagatttattcataaagtttgttggtttctatgaggaagaaatttcatatatgatga

SEQ ID NO: 2793 - DNA, 537 bp, Homo sapiens
tgttgtatccaaaagtctctgataaattacagtggctgttaatatttcaagaggttatatcagatacctgggaaattttctcctgccaaattttgctatacttcatttttttaattatcagtttcataatttataccttttttcacagagtctttaaaaattttcctttgaaaaagttgatttctttctttgttaacttagaatttcttttcattttttaaaaatgtattttgccttttgtgttttggtataactttataccaaccaagagtgtcatatttagacaagaattaaaattatggaccttttaatggtaggttcttgagaagtttgtagttaagtggaagagaatatcagacatttgcgattttgcattctggattgtgagctctaaaaaggagataattaaaataaaataaacagtagtagactaacttctaaagaattaaaggaagtaggccaggtgcagtggctcacacctgtaatcccagcactttgggaggctgaggcgggcggatcacgaggtcaagagatcga

SEQ ID NO: 2794 - DNA, 571 bp, Homo sapiens
ttattttcatgtgagcctctcaacaacctgtaaggcaggcagggaaggtgtaactagtattactgcacagggactcatggagttattttgatagggtaatatataaaatcagaggtggggtgtacatttattgctgtgcatgcaacattgtctaccccatttcctgtaactaatatcctcaatatctatctggttctttgttttggtttttcacctatacctagtcaaagtttatatgtgtcactgtttattcattcagaatacatttgaggatacattggggtgggctggggggacgtgaaatgtggtaggtgttgtagtaatgaaaggacaattaaaacgaaagcttaagatttcttaagagaatcctcgcaaatggcagtaggaagtaaaattagctacccaattgctataaacacatacaaatgtttgatagagtataaccaagtatctgtgtatgcacttatatatgtatatatttatatttaaaatagatattcctaatgctagatgacgagttagtgggtgcagcacaccagcatggaacatgtatacatatgtaactaacctg

SEQ ID NO: 2795 - DNA, 559 bp, Homo sapiens
cagagccatagtaagtcaaacctcaaaagaatcttacttaagatatatttaagagaatggggcatgcagtgtggagtatgaaatgagaaggtggcatttaaactcacgttaggaagaatccctaattggtagttttgctaattcaatgcaaagatgctgagagtggtgggaatctccctggcaagttgtttgtgtaagtataacagtgtggagcagctttggacatgccagaaacaaagccgctcttaacaggagggctagagggcttcctgatgccaagcagtgctaaggagtccatcccccttgcagaagaggggcaccaactgttttccatgtcccccataacctacaccactcataccttataggaaacaggtgcagagaaggacttacccctggacttgaagtaagtgaactccaattggaatcaaagtcttgtgactccagaggtgggagagggataagttattatccctccggagggataatttaaggtagcaccataccgtggggttaagaatgggggctctaagtcacataaacttaagtttgaattttg

SEQ ID NO: 2796 - DNA, 495 bp, Homo sapiens
taattggctgggtgcagtggctcacgcctgtaatcccagcactttgggaggccaaggcggtggatcgcctgagatcaggagttcgagaccagcctggtcaatatggtgaaatcccgtctctactaaaaaaacaaaaaaattagctgggcatggtggcgggcaactgtaatcccagcacttgggaagctgagggaggagcatcgcttgaacttgggaggtagaggttgcagtgagccaagattgcgccactgcactccagcctgggcaacaagagcaaaactccatctctaaataaataaacaaatgaattttttaaaaagagtataattaactgggaacatatcaactttagtttttgtttgttttttagatgagtcaagggaaaaatacttcgaaaattgagttctcaggccaggcttggtggctcacgcctgtaatcctagcactttgagaggccaaggcgggtggatcacctgaggtcaggagtttgagacc

SEQ ID NO: 2797 - DNA, 539 bp, Homo sapiens
gttgacacgcaataacaaatatgaaagttgggtgtccataacacaatggcttttcccagtgacttgtaaatcattcagattgtgttctttggggatccaagaccaaaacgtcaacatatcccaatttgaaaacactattcaggaagttgcttctgatggtgggaaacatcccagacagcaatgtggcatgtagcactacttccttcttttatctttcgttaatcatcaataaagatttctattttgtttgaatcatatagattataaaccatctattttcctctcaaatataatttggtcacttgtggtaattctgggggaatttaaatgttttattttggtcttgttaagtttgaaatgcctattgaacatccatgtagaaatatcaaataggtatatgcatttgcaagcctagagttctagtgtaagtcagagatgaatatagatgagtataaaaatgaattaaataaaacagggtaaaaaatgttcaagaattaagatcaagggattacagtaacttttgggatgaaatgagggca

SEQ ID NO: 2798 - DNA, 477 bp, Homo sapiens
ggtacagaggaaagtttagaggcaactgaccatttggagttttaagacaattgatggaagagggcttggcatctggatgagaagtggagggagaaggtaattttccttgcattttaaactcagaccacatatcacatcagaatcacctgagggagacattttcaatgcatattcctgggtttcttcccttggaaatttttatttcttaaatcttgagttgtgctgatttatccatatttaccataagaattttggataattcctactttgggaggcccaggcagtggatcacttgaggtcaggaattcaaaaccagtctggccaacatggtgaaacttcatctctactaaaaatacaaaaattagccaggcatggtggtacacatctgtagtcccagctacttgggaggctgaggcaggagaatcacttgaatcagggaggcagagatgacagtgagctgagatcacgccactgcac

SEQ ID NO: 2799 - DNA, 510 bp, Homo sapiens
gggctcaggtacataattttatatgcaaaccaccattctcctaggttttctatacacatggcctttatgatactaatcattctttgaaattattaaaattaatgtccacaactggaaaatatgttcacttatactatttgggtaaacagtctacataatgaaaaggaattgatggaccctcagacatcactggggaacttacaagagattcaagaaactgctaaatgagcaaagatagagggaattattattcgatgcttgttaaatcttcatgtacatcaccacaccagcatatcaagataggaaaaatattactcaggaaagttaattccacataaaagtatcctttctatggagaagaacttaaaccaaactttccacttgaagtaatatgagaattggtttactgtaacatttaagtgcaaaagaggaggtaagaatgggatcactgtgtaagtttcataaagtaatcaactaatcttaatcctcccattttcacttggaaaggac

SEQ ID NO: 2800 - DNA, 187 bp, Homo sapiens
ataaatgagaataaatagacgtaaaatagatcttttcgaggatgaagtaaatggaatgaaaaccaaaacccaagctgaccagaaatcatagagggaagaaaaggttataaatatatggatttttcaaagtgattttaagctattaggaatcagttaaatgttgggggattttgtctgagaatgggct

SEQ ID NO: 2801 - DNA, 402 bp, Homo sapiens
  misc_feature 104: n = A,T,C or G
ctgacctgtctgatcttgcaaatgcagactgcctgattctttaaattgtcttaaaaataatacttatcagtttaatgcattttgatttaaaagatacagactgngccaggtgcggtggctcacgcctgtaatcccagcactttgggaggctaaagcaggtggatcacctgaggtcaggagtttgagaccagcctgaccaacatggtgaaaccccgtctctactaaaaatacaaaaaattagccaggtgtggtggtgggcacctctaatcccagttactcgggaggctggggcaggagaatcgcttgaacccgggaggcggaggttgcagtgagccgagattgcactccagcctgggcgagaagagtgagactctgtctaaaaaaaaaaaaaaaaaaaaaaaa

SEQ ID NO: 2802 - DNA, 555 bp, Homo sapiens
agcctaataatttctatttagatcttacagaaaaatttattgacccctggagtccatgatgtaccttcaaaaccagcctgctacacctacattctcaccctcttttcagatgagaaagctgacaccagaaagattaaatggcttgctcagagtcattcagtttctaaaggcagagctgggatttgaaccaaggtctgtcagactccacagcaaatgctctctccaaaacgtaattctataggttatccaccccctcagaggttgtgattttaattgcttttataatgttgggtttttaaatttttgcttttctagtttaggtaatacatatatgacataaaattcaaaaggtggctgggtgtggtggctcatacctgtaatcccaacactttgggaagctgaggcagaaggatggcttgagccaaggagtttgagactagcctgggcaacatagtgagacctcgtatttacaaaataaaaaattaactaggtgtgatggtgtgatggctacttagctattcatgaagatgaggttgggaggatcgcttgagcctg

SEQ ID NO: 2803 - DNA, 561 bp, Homo sapiens
cctgggcaacatggcgaaaccccgtctctactcaaatacaaaaaccttagctgggcgtgttggcgggcgcctgtagtcccagctactccggaggccgaggcaggagaatcgcctgaacctgggaggtggaggttgcagtgagctgagatcacaccactgcactccagcctgggcaacagagcaagactttgtctccaaaaataaaaaaataaaaaataaaataaaataggtcatttccccccaaaactgcacggggctccctttcccacacacctggcaggtgagtgacagggaaggtggattcctttcatttcttcagtctgggccaaaggtaagtaggaaggcacatctggggcggggcccagggccgaacgtgaacgccttcaggggaatctgccacactggatcactccttggacccctgattccttagaaatgcagtgagcgacaagaccctgaaaagccatccctcatttcttgtgtgtttttaactcacacgtgctccctgaggactgagctgtcttgcccttcctctagtgcccttgttgatggagctggagc

SEQ ID NO: 2804 - DNA, 519 bp, Homo sapiens
ctaaatgctataagcaaggccaaaagttaagacagatcagcagaaggaaggctaaaataaaataagatccagccaggcgcagtggctcacacctgtaattccaacactttgggatgccgaggcaggcagatcactggaggtcaggagtttgagatcagcctggccaacatatagggaaaccccgtctctaccaaaaatacaaaaattagccgggcgtggtggtgtatgcccgtaatccccagctactcaggaggctgagatgggagaatcacttgaatctgggaggcagaggttgcagtgagctgagatcacaccactgcactccagcctgggtgacagagcaagattccatctcaaaaaaaataaaaagtaaaataaaagatcatatttgaatggaatgccgataataatccccctttcataaatatttattcctgccatactattattcatttttcctctgactataaaaaccatctgcctgaaacactgcaggctgtcagtttcacactacaggct

SEQ ID NO: 2805 - DNA, 322 bp, Homo sapiens
catattctctttctataagtatgtgttaaacattagctaagtggctactgtgtatcagtcactgcagtggacaaaacaggggaagccaaggggaaaaaacaaaacctcatcttccttctgatgaataataaagattgaaatagagaccttatataagggtcggtactgctaggctcagtgaagaacaacaaagccaagtaaatgctgagggagtgagggtggtgggtggcggtggctacccaaggtgcaatggtcaattatgagttcctgttaatgatgctagaaatcaagcggcataggccaggcatggtagctcacacct

SEQ ID NO: 2806 - DNA, 491 bp, Homo sapiens
ctctgtctcaggctggtgcaggccagggcctgagcctgggcaaggcaacactgcacccctgtgaatcatgcacccagcaggggctgtaacagggctgcaaagccaccaccaggcagctgctggcaggactaggttagatggtggcatgcagggcaggcagggccttctgcacgtaagagggacagtggcacttcagtcccaccagaaaacccctttcgtcacccatatgttcagcagccacgcactacctcccgctgtggtgtatgcagtacagaggctgctgagtgattgtggaggcagccaggacagaagctgggaggcatattgtacagtgacaaagaacaaagacgttggagtcccacggtttcaggttcgaatccagactccacttcttagcagatggatgatcatgggaagtcattgagtctccctgtgtgccagtgtcctcatctgtatactgggataggacagcacctcccacaggggttctg

SEQ ID NO: 2807 - DNA, 94 bp, Homo sapiens
aggcatgagccacggcactcggtcccgactttctcttcttttccatctcactctgcagcgggcagtgtggagggtggagggagctgggtggttt

SEQ ID NO: 2808 - DNA, 173 bp, Homo sapiens
atgccccagcctgttttcccttgcaatacccagaagtctgccctttgtataagtgagggaccaaatcaaagccagcaaatggaatgtgtaggttatttacggattgttgctgagcaaatgtaatcaccagcctgctgtacctctatcatcatttcccttgacgagaacatcac

SEQ ID NO: 2809 - DNA, 102 bp, Homo sapiens
caacagctggaaaaagacctgaacctgatggacatcaagattggactgctggtgaagaacaggatcacactagaggatgtaatttcacacagtaaaaagctg

SEQ ID NO: 2810 - DNA, 514 bp, Homo sapiens
cctgtgtttcctgttttcttgaaatgaagcagcggtcccaaagtttgcagagtgttaagattaagatgtgtaggttgaccattcctgcccgacgtttgccagtgtgttcaacttggctttattggtttgttccttgcttgataaaaattgtgcatcgcagccctgaggaaacgtcccaggtttaagtattagggctttgatgtgcagctgggtaatagctaaatccagagtcatcacttgagaatcaagtcactacaataaagatgttgaaaatgatttttaaaaaaaatgttatttactatctcacgacactttggtaggccagtaaatttctgagcctatctaaacagtgagactggagatacattgtgcattttatatcctgttttttatctttttctcttaaacttatttacatcaatataataaaggaattgaggaaggctaagcttttcttcaccctttattttttaacaaatgaaaatgccgggtgtggtggctcacgcctgtaatc

SEQ ID NO: 2811 - DNA, 530 bp, Homo sapiens
gagggttttagtagaggtggggttttaccatgttgcccaagctggttgcgaactcctgagctcaggcgatacacccacctcgccctcctaaagtgctgggattacaggtgtgagccactgcgcccagccaggaatgacatattattatatatattattgtatatgcgtatacttgtgttaacattaaaaagtatcataccttactcagcaggctttattcctgatagccaagagccggaaacaactatctggatgtccttcaaggggcaagtagttaaacaaatagttggggtagttgtggaatgcagagaaagtgttttgaagatatatattggaggaagaaagggcaagacacagtcacaggtcatttatgacatggaagatacaggatgaggaaacaatttgctttttttggtggtagttgttcaacgatacatcttgtatatctacctatgttagtaaagagatttctctcattatttcaaaacactgcatgatattccaaagtaatagtaaatttgtttagggct

SEQ ID NO: 2812 - DNA, 313 bp, Homo sapiens
atttttagtttactaacaggaagtaatttctttcccttaaaattcccttattttaaaagaaagattgtgtataacatatgaatcctgtcatttttgtcttgttggtcaggaatcgaaaataaaatttaacaggttttaacaagtgtgattgagatttgtttcctaatcactctacatgttttttctcttttgcatatatgtcattatttataagcaacttcaaatagaacagaaggtagggcataaattatcaacaactttagtccaaaaagatgttaatgaaaaaagtaacaatatttgtggtataatatat

SEQ ID NO: 2813 - DNA, 430 bp, Homo sapiens
cttcctgttctgagactttgttccaggggactttcacacttcagagaatagcacatgtcatcctgcacttttgtggggtgattaaaagctcacggtatccttttatgtttagcccatccaattcttccaactggcctcagccagaaaagcagggaaggcacccccagtttgcagctgagagactccagcctgggagagctgaataaatcttttgcccagaggggttcctcagtaaatgctggagatgaggctcagacctgacctttggattcccagatggagtgctctgaaccgtgtacctggggctgtcttcaccactcaaatatcgatagagataacatagagatgtcctcaggaagataaccaactgttcccatcctgtgtggtctacagattgggagatagggcctacccaagtgtagaaataaac

SEQ ID NO: 2814 - DNA, 568 bp, Homo sapiens
gcccacctcggcctcccaaagtgctaggaccacaggcgcactttttttgtttttgtttttgtttttgttttgagatgcagtcttgctctgttgcccaggctggagtgcagcggtacagtcttggctcactgcaacctccgcctcctgggttcaagccattctcctgcctcagccttccgagtagctgggactacaggtgtgtgccaccacacccggctaattttttttagtacagacagggttttgccacattggccaggctggtctcaaactcctgacctcagacgatacacttgcctcggcctcccaaaatgctaggattacaggcacgaaccaacctggacccaccctaatatagtaatttttattatgcataaaaagttataaagtaaatatgcctcatgggacatcgttgtttcatttttatatgaaataaaataactttctatttttacatggaaatcagaattcatatgtctcacgtgtttttggtgttgttatccacaggagaccaatcattttgcaatggcaatccctaatgatctattccctaatcaactggaaatac

SEQ ID NO: 2815 - DNA, 564 bp, Homo sapiens
acctaaaaaaacaaaaactaaaaccaaatgtttaggcttaaacatttgaaaactacaaagtaattctgatcaattcattatgacatcaattttctaatgctaggctctatttccactcatcaccatcatgcaaaatgctataatcttagattattcctccatgtattcttgtaaatcaagtattttcttcctcatctaaatttcactctccagtcatcatcttcacgtaactacctaataaatcaaatccatgccttttaaacatttatatcattcatttgccaaaatcaatttgctttattctccatcagaaacatttatctcctttaaaactttgtgccggtcaaaattcttgcacttggctgggcacggtgactcacgcctgtaatcccagcactttggaaggccgaggtgggcagatcatgaagttaggagtttgagaccagcctggccaacatggtgaaaccccatctctactaaaaatacaaaaattagctggtcatggtggcgggcgcctgtaatcccagctacctgggaagctgaggcaggggaatcgcttgaacc

SEQ ID NO: 2816 - DNA, 362 bp, Homo sapiens
ttgctttcaatgatcctgatttcctctctccaccgcagtatcttgattgcagtaaagcacatttcctcatcattctttccacacacattactcattcccatttctatccttttgcccagacattttctagaatttactcttacacattctctagcccagatcattagctgtaacaaatgagggttgcctcaatcatatcttttgtctcctaattgaaattctatcttgtattatttgttgcttcatatcagtgaagttgtgtccccaggtatataattagaacatttatagtaagcatcatatcttaatttctttaggaagtgtctaccatgtaaccacagatgaaaaataaactcttgctg

SEQ ID NO: 2817 - DNA, 465 bp, Homo sapiens
accccttcactttggtgctccggtaggagcgcacagaaggttctgtacttgtttacacttaagcttgctgtgggtaggttagaccttgcacaaaaataatatcaggcttcaatatcatatggccaagacaatattgtagcaccatgtcctctctaccttggatcgtgcttcttcttgagttcacttgcttacacaggaagctgttgcatgttgccaagccttctggcaagggtaaaagcatttaaacagtgtaatacattttggaaccaaaagctgtggtcaggaggaaaagtaaatcatcttgagtagatgggggcatctccagtgatgtatgattataacatttgatcctactttgtgctattcagtttgctgttggttgtgtaacttacccctgggctcctaggttagagtaaatttaaggaagctggacttaaaatagatatttgtaatcacatttatgcg

SEQ ID NO: 2818 - DNA, 425 bp, Homo sapiens
tatagagtatgttataccatgatgcaggaatcctgggagccttcttagaattctgcttaccatgttgtctccagatggctggttgaatgacttttctttgtttaatggatgcaacttactgatgactcctaggtgacaagtactcaatagacaggtaaataactgttagtctgtatcccatagtgtagatatagaatatttctcaacaaataaaaacatggctggagtcaacttttttattttgaggaagcatcaattgctttttatctccttagaagtaaaccttatatcctccaaacaatttactgtaaaagcaaaagaaatttaatactagaaatatgacaagatatttgatatttcttatgttagtatttgtgggaaactatttttatataactaactcctgctgtaattcttatttgaca

SEQ ID NO: 2819 - DNA, 516 bp, Homo sapiens
agagcttggggggaacacattgaagactaagagtttttaggccaaatcatcgaaaataaataacatcacttgagaaatgatcagagaaataagaaagggccaccataacatgaataagacctactgtgaaggagaaggctttgccatttctatgctatttagggtgaactttgagttatggtgttctgttgggcacatcacatattgaaagaaaagtttgaaaagctaaagtcattgggagagcacacaggatggcaaaaagtcataaaatctttcttaacagcagtggttgaaatagttggagccacttattttaatgaagacaaattagtgaagacagtgtggctgaccccaaatatttgacaggctttcataagtaaaagggatattggcctcatatagctctgaggtatgaatggctgtaaatggaaattggacatctcttatgataaaaagaaatttcatatgacctagagttttgcaaaaagcttccacattattggatttatacaggta

SEQ ID NO: 2820 - DNA, 483 bp, Homo sapiens
tgcatgatggcagagtgtttattaccagcgcagaagatacagtatggtataggatagaaggaatacaatgcagttctataaatattgagaatttactatgtaccagtgctgtgcaatgaactgggtccccctaaaatgtatgtgttggagccctaagcccacagtgtgactgtatttgaagacagggcttatttggaggtagtaaaggttaagtgaggtcataagggtgaagcctcaatttcctagggctggtgtccttataagaaaaggaggaggccaggtatggtggctcacatctgtaatcctagcactttgggaggctgaggtgaggcgagaggatctcttgaagtcaagagttcaagaccaacctggccaacatggtggaaccccgtctctactaaaaatacaaaaattagtctgggcacagtggttcaagcctataatcccagcactttgggaggccaaggcaggcagatcacttga

SEQ ID NO: 2821 - DNA, 592 bp, Homo sapiens
agttttttagtgattaaaacacttttctttaataaaacaccattaacatgatttctcttttaaaacaagcctctattaaccctgaattcatcactgggctttttaaccatcccaaataccataccagagatattgtccctaagtccaagcagcctttatgttgtgtaaaggtcactgtttgaacaatggtgtctgtgtatcatctacttatacagaacatttaaaataaaagttatcacataaataacagatttcttatttgcagtacctttgaatatgatgatcaccaccatacctaagatttcattcaagctctaataccatatcaagtgtctatacattcttagattttaagagcttttaaaggcaaacacggccgggcatggtggcgaacgcctgtaatcccagcactttgggaggcccaggcgggcggatcacaaggtcaggagatcgagaccatcctggctaacatggtgaaaccccgtctctactaaaaatacaaaaaattagccgggcgtgttggcgggtgcctgtaatcccagctacccaggaggctgaggcaggagaatggcgtgaatctgggaggcggagc

SEQ ID NO: 2822 - DNA, 559 bp, Homo sapiens
ctagagagcgataacaggatatatctagactagaggacaacaaattcaaatgctcaattgaatttgaagggtgccataatgaaaactggggaattaggttaatctgcatgcttaaagatgagacccatatccccttttcctactcagctctcaagcttgttctctcctggcaaaagatgagaaattttgtctgggaaaacaatccagcacaagagaaaagatgtgtcactgggtgccctggtctaaatgcctatgtctccttaccccaaaattcacatgttgaaccctacttgccaatatgatgatattaggaagtgggatctttggatggtgactggatcaagaaggcagggccctcataaatgagattagtgcccttgtaaaagaggccccagagagctgccttgtctccttccaccatgtgaggacacagcgagacggtgctgctctgtgaaccagaaagcaggcttttaccagacaccaaatctgccggcacctttatcttggacttcccagcctcactcacaggaactgtgaaaaataaatttctgtggattat

SEQ ID NO: 2823 - DNA, 540 bp, Homo sapiens
accgtatgaaaagaagttgtcaatacaattaacttaataacatctacctccaatatgtgaagtatcaacatgatacaatgaatgtgaatcacctcatgcagagtcactgcagcagagatattacaaacaaatattgttacttataatggaaggaaaacatgggttattgtttaggtgtaacatgctgtttgtttgtatctcttcctaaattctgtttgtgggaatttatttgtgcaaatggaataaactgagaatgcacattgcattatgtgatgtcagggtccatgcgagttggcatagcattatgttgaggtctttgtaataaacgcgatgactaagcctgtgggaggtataatggcatctatgggaagagtcaggcatcgtcaattccacagtgtaattgatcccaattaaattttcggcactatttccatttcaactagggaggcgtatacttcttaatctcaattatagtaatcttacttatttcattttccttgaaaaatcttaaaacgtgtaaaaatacttgacattatctat

SEQ ID NO: 2824 - DNA, 464 bp, Homo sapiens
ggtgacagagggagaccttgtctcaaaataaataaataataataataataaaccaacacagtgcctggaatatagtaggtacttcataaatgctagttttcttcccctcaagaaacacttgctaaatgagctgattgtcaacaattaatcccaaaccagaacgatttttagggttaaacatgcaggccgggtgcggtggctcaggcctgtaatcccagcactttgggaggccgaggtgggcagatcacaaggtcaggagatagagaccatcctggccaacatggtgaaaccccgtctctactaaaatacaaaaaaattagccgggtgtggttgtgggcgcttgtaatcccagttactcgggaggctgaggcaggacaattgcttgaacctgggaggcaaaggttgcagtgagccgagatcgcgccattgcactccggcctggtgacagagcgagactccgtctc

SEQ ID NO: 2825 - DNA, 432 bp, Homo sapiens
cgctgtgggaggctgcagatcgactgtgctgatggtcgactgatgggtgcgctgagcagacttacagtttcccatcattccctgcagtgccccgctcccactgcaggcagccacatggccaagctgtaaccttgagcaggcccaggctctgagatctgcaggccaggaagccttccctaggtcagagggaaggggccggggcacaggagagtggcccccgtgcccattgtctctgagacctcacgtcccttggagtggtcaggaaggagccaggtgaggccgacagccagcactcctgtcactgtccctcgggttctcttggttctttcaacagtttcaaaatgcccactggctgggcgcagtggctcacgcctataatcccagcactttgggaggccaaggcagggggatcatctgaggtcaggagttcga

SEQ ID NO: 2826 - DNA, 443 bp, Homo sapiens
gtataaatgggggtagaagcttagagcaggagaatgaacaatagttttagtgtcagaaaatgtgagttaaattcccagcttaccttattactggacctatgacttgaggaagttttgtgggttttttctcttttgtttatgtctctgaactttgggggaaaatgtgagggggatgcataatcacatttgggaaactgtggatattcttagaacagaaaaaatagattagtgaggttttgaatctttccacttatcttggtaaggattatatgccaaagactagttattgtggccatactctttttccattagtggcattggagaaccagaaacatgggatccaaagagaagcttagcaatgttaagtcatgttaatactaatttaatttttgtttgccaccctacccccaccaaaaaaaaaaaaaaaaaaaaaaaaatttggg

SEQ ID NO: 2827 - DNA, 428 bp, Homo sapiens
gtttgcttgtttttgaaatggagtttcgctcttgttgcccaggctgaagtgcaatggcgcgatgtcggctcactgtaacctccgcctcctggattcaagcgattctcctgcctcagcctcccgagtggctgggattataggcatgcgccaccacacctggctaattttttgtatttttaagaaaggaagaaagtgtgtttcggagaagccaggaaacaaagtcaaggcacatggtgggaaactggtaggtaagctccaccccaccaagctagtacctctgccctctcagagtccagaagctaccagagggctgagcaagaaaccaaagctgaatttcgggcaaggaaggtaattcagaagcccaggccctttcttagaagcgggcacaagggggctgggtgcggtggctcaagcttgtaatcccagcg

SEQ ID NO: 2828 - DNA, 144 bp, Homo sapiens
aagaagtcattgctagaagatatcatgattaccaaaataaaagtaaagcataatagttcgtgtttagtcaccaaatatataaaattattagttgtcatatggaggcgataagggacgttggatgatctccttatctaacagctg

SEQ ID NO: 2829 - DNA, 593 bp, Homo sapiens
tgagttaatacgtaaagaaggaaaagatcttcatagtacaatgccaactaatagatgtaaaatccgtaatggtgttagaatattatcaatggaagataaagctaatgggtgaaaactgaatgaaaaaggatatttctatagcctcatttcatcactccacaacttataaattacaaacaaaaatatagttactttacattggcacattctggcagacagtattttaaccaagttcagggaatgtatgcatacacacacacaaacacacacacacatatatttatagaaggagggaatgattaaggagcaaaacaatacataaacaattggtagacttgataaggatatatgacagttctttgcactatttttatatcttttatctttgaattcatattaaaattaaaagttaaaaaataaaatatcatcgatgttctggtcccactgtagtagtataaacccactacaacccattgccccattgatgacaacaacaactctgaccaaaatataaaagccagctacctgaggactctgaaaagtaaagaaaagcaggaagattgtggagggaggggatcaaaacatggtaaagc

SEQ ID NO: 2830 - DNA, 562 bp, Homo sapiens
cacctggccggaggtgctcactaaatgcagttcctttcctctgctgtacttagacattttctaggaaggataggtccaataggactgaatattttatttagaagagatggcttcctttaagttgcccaacaagaggtttggaagaaaaccaaatgcttaccagccacttcatattaataccagtcattttctcccttcagtatcaatgcctaggagccaggaagctgtgccaatgccagtggttgtggagatggcaaaagaagggaggccagccacctgggacagctgaatccaagcctgactctcagccccagaaggaaagtgttctctgtgtggtttatgtcatttgcttaaagaaggtggggtaggggccgggcgtggtggctcacacctctattcccagcactttgagaggctgaggcaggtggatcacctgaggtgatcgagaccagcctgaccaacatgacgaaaccctgtctctactaaaaatacaaaaattagccaggtggcacatgcctgtactcccagctactcggaaggctgaggcaggagaatcgcttga

SEQ ID NO: 2831 - DNA, 573 bp, Homo sapiens
gtatattgttttatctgtgactgaaacaaacctgtaaagtgggtacaacaggttactccaccacccatctacagatgagtgaatgcaagtgacttggccaagatcacaccagaagtgaggggcagggtattcaagagccatggtctttctgctccccttgtcactgttaatttccaattgcatggccaatttctgagacaaacaatgtgacctagtggaatttgacttcattgttacttttctctccaccaccccaacctggatgacatgagaacttattattcattcataagccctctgcaaaaaatctaggataacagtggtgccagtaggaagattagttgaaatctgggatgccggccagacgtggtggctcaggcctataatcccagcactttggaaggctgaggtgggtaaatcattcaaggtcaggaggtcgagaccagcctggccaacatggtgaaatgcccacctttactaaaaatacaaaaattagccaggcatggtggtgggcacctgtagtcccagctacttgggactacagctacttaggcaggagaatcgcttcaacgc

SEQ ID NO: 2832 - DNA, 462 bp, Homo sapiens
taacagaagctggatttacacagaaacttctagtgtaatttgtagataaagatattaaaactgaaagtaaagaacattactccttctacatgtaaataatagaattcaacctaaaaagactagaccctaaaaaaaaaatttaagttaaatctaagtagtttttacccatccaaatagttgcccaagatcaggatttgatagaaaaaaattgataaaatcatttcacttcttgctcagtgaagagaaaactgagcctgagatagatgttaactaatgtgattcatctagaatggctttacacgaaacaaaaaattaggctgggcatggtggctcacacctgtaatcctaatactttggaaggccaaggtggaaggattgcttgagcccaggagttcaagatcagcctggacaacatgaggagacccccatctccacaaaaaaaattttaaaactaggatcatg

SEQ ID NO: 2833 - DNA, 626 bp, Homo sapiens
atgaaacaaaaaaaaggatatgctgaagatacagaaatcaggtattattcaatttggggggaaatggtttgttactttactctcatttgtggaattcaagaaatgagattttgttgattgctccaacaaaactgccagcaggtaaaactttatctccatttatcctaaagataagattactcagatattaaagtgggggaaaaactcgattataaaagtgcttttcagaattgtaatctgatttatcaaagtgttaatatgaaacttttccgtaggacatcctcattttgtaccacaatgaagaaaagtgcttgacagacccagacctattttaaactaagattatttaattagtaatttttatttccagtgagtctggcaataaactgtggggaatcatttcattttcattcattacaagaagccatagtttatatttcccccaggcagagatttttatctgacaatttgaatgctttggtgacagaaatatctgatgataaatatggtattaaggagatgccaagtggcatgatagcttgaatcatttttggtaacagctcatgattaataatcgtgcttatgtatgtattcacgttttttattattgaataacattttgcatg

SEQ ID NO: 2834 - DNA, 367 bp, Homo sapiens
tgcctcagcctcctgagtagctgggactacaggcgtgcactaccatgcctggctaatttttgtatttttttgtagagacgggtttcactgtgttgctcagaactcctggcctcaagtgatctgcctgccttggtctcccaaagttctgggattataggcattaatcaccacgcctggcctaattttgggaaatttttaatgcatttttgggactgctatttttcagatgttgccccttttacttctgacttccctatctcttaacttctatttttcaatttctttatggttttctataccttttgagagttccttaatctgaggaactgaaatctattcttcatctacactcattgtagagtatctt

SEQ ID NO: 2835 - DNA, 425 bp, Homo sapiens
aagctggattagaacatctgccaccagctgaacaggccaaagccagactacagctggttcttgaagctgctgcaaaagctgatgaagcattgaaagccaaagaaagaaatgaggaagaagcaaagagaagaaaggagggagacatgaggtctcactatgttgcccaggctggtcttgaacttttgggctcaagcaatcctcccacctcgaactcccaaagtgctgggattacaggcatgagccaccatgcccagtacaattgttaatcattcattttcttcaacaagtatttattgagccacctcctatatgccaggcattgttgtcatcctgggccacagtaggaaacaaaacatggagtgcacattctagtggaaagagacagataatgaataaacaaacaagtaaatgcatacagacatacc

SEQ ID NO: 2836 - DNA, 497 bp, Homo sapiens
ttgtgactactttactacacaggacagtttctaagtccaatttccagtctcccagtttactcgaacatactgacattacccaagccatgcccagactcatctaagatgcagtgtctcctttcacatcccaggtgaaactagacctcacctcccgtgtttattatttctactacttatggtaaaattgttattctctaaacttatcctttttttatttctctttgttataaggttattttctgaatatttatttcatttgtgcatcatgatgtcaacataacgttaagctaacttgtaaacaggtgtttcaagagtgcctgttatttgaataaacctggagaaacacagtatttccactttccaagaggcccacacttcatgtttacatatccaatggcatcaataatcatcaccaacattcatgtacaattatgcctccagtcctctaacggcagtatcaaccttcacatcagtggatataattctaagagaacagc

SEQ ID NO: 2837 - DNA, 384 bp, Homo sapiens
gtaaacttatttatctgatggccttgtcatcaagagaagagtgtcagcaaattaggttataaaaatattcttattaaattattttattaaatacttatattcgtatgaatttttttagtggactctgacatacctttagaaaatttgtgaactggtatttctagatattaaagtacttttcgtctagaacagtaaaatatttttggatctctaagtgaaataccttttgtggaaaaaagtaattatgaggcattttcttccctttttaaagattttgatggatcatcaaaatctgtcagaacatgtactctgcatggttttatatctgattgaattaggacttgaaaattctgctgaagaagaatcagatgaagaggtaagtag

SEQ ID NO: 2838 - DNA, 353 bp, Homo sapiens
tatcctttcttgaaattgagttgtcttacctctcattttgagcagtaccagcaataaagctaatgaactggcctctttttctgaaaagccttcctatgtccctatgtcctttgctcctttgcttttagtgttttgttttgttttgttttgttttgttttgttttgttttgttttaagacagagtctggctctgtcacccaggctggagtgcagtggtgtaatctcctctcactgcaacctccacctcctgggttcaagcaattatcctacctcagcctctggagtagctaggattacaggcatgcacgaccacacctggctaatttttttttctttctatattttcagtggag

SEQ ID NO: 2839 - DNA, 366 bp, Homo sapiens
cagaagggcaccctattcctttctttgaattcatttggtcagaacctgacacgtatcacccagtgccccagttcctacttgtcttctctatcactctgcctcaaaatccagagattccaaggatgataatttattgtgggcccaaatggctaagagaggctcttctgggaagctttcttacatcatataaatttttgttaacatgaattatttgtatttgaaagatttaaaagacaaggaagctatgtattgttcttgttgttaacaataaattacctcaacactatttgaacataataacaactaacttacactcctttcctggtgagttaccttgcattcaggtgttctgagccatgaaaacat

SEQ ID NO: 2840 - DNA, 450 bp, Homo sapiens
ctgtcacatgaaaaaccaattgacattcataggtttattttgcacctttggcagtcagcctacttctgacctttctttagttctgctatatctttagttcttgctcttgtatttcttagcactaaattatatatctgcaaataattttagttttatctcttcattttgcaagtttgtaccttatttcttttcttatttctagtgattccagaataatgtaatacatggttttttaaaatctagtttttaattgataattgttgtacatatttatggggtacatagtcatgttttgatacataataatgtataatgatcagataatggcaattagttttaaaagctgttatccttgtcttaatctgggctccagtaggaatgccagtcatggtttcctgttagctctgatatttactatttatttttaatagataacctttatcagagtac

SEQ ID NO: 2841 - DNA, 572 bp, Homo sapiens
agaagggataggaaagcaggtttcaaagacagtagtaaaaatatagtatgaagttgttttctgtaggtaacccacaaagttgaatcatttcacttgctctcctaaaatctgagaggcgggtggaagggaaggttctccttacacatgaagtaagcttaggaggttaacatgctaactttttatcaaacatcttagagcttatatacccaaatgaaggaagctttcttcaaaaaaagtcacttcagaaggctctagttcttttattgatgttgcctttgctgaaaatatctggaaatatctctttaggaattgctctccaagtttatagcacattctttggtaccttatccatcactaatcttacctgttagtgctaagctggatttttcaaaatagacaaaagttatttgatgccaaaactaatgaataggctgggtacggtggttcatgcctgtaatcccagcactttgggaggctgaggcgggctgatcacctgaggtcaggagttcaagaccagcctggccaacatggtgaaaccctgtctctactaaaaatacaaaaattagtcgggt

SEQ ID NO: 2842 - DNA, 457 bp, Homo sapiens
attcacgcatgtgacttgcagggatgtggactgctgggtgtcagggaagggcatggagagagactcagtgacaaacctggccccggattccagcagtgcttggtacctctggcaggtgaatgatgtcaggagtccacagaaacagccgaagagctttccctaccacctctgccccatcccaggcttcctggccttcctctctcctgcttactatgggatgtgggttgttatggtaatggaggaggctggatagagtgaggaccacattgcctccttccacactgcagttggcaacatcagtttttctgcagtgaatgaataaaagtgggaaaatgatgaagtttcttacagtggcatttgctttcattatctgaccccaggaccctggggaagccaccttaatagtggggcaggatttaggaggggaaagggagaggccacataaagagaacttaca

SEQ ID NO: 2843 - DNA, 621 bp, Homo sapiens
gtatgtgtgaatatgtgacgttgtattgagtgagtcatttcctattgcgcctcaaatggtaagtagggacagatcccttccccaggattactaaggaacaatagaaagaactttgaaactccatttccactctaatgatttcccctgcactcctccacacctgctgtgtaagaagagtgagaagaggaggggcagcaggaaccatggctctactggaaatgtggtgttagtgataaggtgttggagtgggaggtcacttccttccctcttatttgggaagggggtttgagccccagttctctcaaaggcaaatgaattgacagctccaagaaactggctgatatataatgggagtgattctctctgcctgcctgctcaactgctaaagttgagtcttctctgctgtggccaaaacagtgaaatgtggtgacaaagtaccagcaagaactggactgtgtttctggagcctaggggcaagttaatcttgaggattgagataatatcttgtgtgacgtttctgaatgtagaggcttttgagagtagccacaagcaacttggaaaaggtccatggaacagtgtccttgagaagatgaaagcaatagaccccccatgttcatctct

SEQ ID NO: 2844 - DNA, 542 bp, Homo sapiens
cgaatacaaaaatcctcctaggaagtgggttcagccctcccaaggaaaatggattgcttgttctggtaggatctccaactctgtgaagtcttccttatccaaatttagtgagataagattggaatgtcagagctgaaataatttagaccaatattctggttttctaaaagaaaacggaaccatgccattacctcacttccccgtttatttcttatttatttatttattgtgacaggaatctcgctctgtggctcaagttggagtgccctggcacaatcttggctcactgtcgcctctgcctcctgggttcaagtgattcttgtgcctcagccttccgagtagctgagattacaggcatgagcccccatgcccagctaatttttgtatttttagtagagatagggttttaccatgctggccaggctggtctcgaactcctgacctcaagtgatctgcccaccttggcctcccaaagtgttgggatgacatgtgtgagccaccatacccggcctcacttccctgtttaaaaccctccatctctc

SEQ ID NO: 2845 - DNA, 691 bp, Homo sapiens
ctttttatattgtgtattccttaacaaattattatatctattattattttaatagttttgtcttttaaccttcatactaaagatgtaaatgatttatataccaacactaaaatattggagtattctgaatttgactgagtacagttgtccctcagtatctgtggtggattgtttttcaggactccccatggatatcagaatccatggatgctcaagttccttacaaaaaatggtgtattatttgcttattacctatgaacatcatcacatatactttaaatcatccttatgatacttataacacataatacaaggtaaacactatgtaaatagctgttgtactgattattttggaataatgacaaagaaaaacgtctgttcatgctcagtacagatgcttttttttccctaaccattgttgatccacagttagttgagtccatgaatgcggaactcctggatacaaagtgccaactctacttgtttttatactttcatatggtggcatattactaattagtaccttttttttcttggcttgaagaattccctttagtatttcttgtaaggcaggtctagtaatgatgaactccctcagcttttgtttgtctgggaaagtctttttcatgatatccattcttgtcaaatcatagaaccatcaaattttataatcttgttgctggaagtgact

SEQ ID NO: 2846 - DNA, 492 bp, Homo sapiens
aaaggctgcagatcagtcagtctgtgggatgtcagcacattgctcctgcatgtggactgctgcaacactgaagacaataaagaagtaagaatgcagtaggaccacataaattatgacatgttttatatgggccttgagatttagtattcatgaaacatagggatccttaggtctgaggcacactggggcctctacaacaaggactgttaagggaggtacacaccctgtccacatccaagaagaccccacagagtgtggtgtggatggaggtgctcaaggaaaatccagcacagctactgtagcgagatggcccttgaaaattagatgaagcagcaggtagcagtacaaatcctattcctgtactggtgggtagaaaagtgagcagatcttgaggagaaatcaacattcttagagagtgaactgccaaaaaaattaaaaagtatgccccagtgcacatttattttactgtgagtctatttggcaatgaaaaag

SEQ ID NO: 2847 - DNA, 526 bp, Homo sapiens
aagtgggagctaaatgatgagaacatgtggacacgtagaagagaacaacacacactggagcctatcagaaggtgaaaggtgggaggagggagaggatcaggaaaaacaattaatgggtattaggctcaatacctgggtgatgaaataatctgtacaacaaacccccatgaaacataaacatgtttgttacatatttacctatgtaacaagcttacatatcctgtacatgtacccctcaacttaaaagaaagtttaaaaagaacttttatgctttttttaaaaaaaaatgtttgtttgtttctttataagtttagtgggaatgaaacatgagacaaaaatgctgccttcctgttgcctttcagattgctggaagtctgtccttcatacctgaggaaagttatgtgaagagccttttgagataaaaagaggaaacagaagacttgagcaatactataaatcaacaagatttaacttataaagagcattccacccaacaacagcagaatacatactttcccaatgtata

SEQ ID NO: 2848 - DNA, 511 bp, Homo sapiens
gaagggaaggatgggggttagggttggaaaactacctattgggtactatgctcactatctgggtgacaggtttaatcatactccaaacctcagcatcatgcaataaacctttgtaagaaatcttcacatgtatcctctgaatccaaaataaaagtcagaaaaaaagactacttcaagccacaagtgctcagcaaccacagctaatgtagcaccccctagatgtcttgcctgaaatccagcccagacaagaattcctgaagaattcagtctcatttaggagataaagtaacctatatgaatcaatcaagaatgttaaattgtgatgttctgctgaaaaaggaatttaaagaaggaagagagaaacgtggacaaaatagacaaagaggatttcatggaggatttgaacattagttgttggccttaaaggataagtaggagtcaacaagaagcagagggaagaaatttaaacagagaagtaaagaggtaaactataaaaagctatgaacaggtc

SEQ ID NO: 2849 - DNA, 576 bp, Homo sapiens
attgtttttcttccagtttttctttttccaaaaaagggattcaagctggcctgcaaactcaaatggcttgtacatagttgagattaaggcaaatacacaagattgtatcctgtttttttcagctacattatacacaagtatcttcccttgtgataatgtagtttttataaatataagtttttaataactaatatttcattatgtgatacatcatgatttattattttaaaccatttctgtattgtcttgttttcaacttgggagtgttctacaaaattctttaacaagatctgtatgcggcagactcagtggctcacgcctgtaatcccagcactttgggaggctgaggcaggcggatcacctgaggtcgggagcttgagactagcctggccaacatagtgaaaccccgtctctactaaaaatacaaaaattagccgggcatggtggcacgtgcctgtagtcccagctacttgggaggctgaggcaggagagtcgcttgaacccaggaggtggaggttgcagtgagccaagatcgtgccactgcactccagcctgggtggcagagcgagactccgt

SEQ ID NO: 2850 - DNA, 519 bp, Homo sapiens
gatgccatgctggtgagaggagaggcagcagagccacgcctcagagccctcagccccgttctagtgatggggaaaggcagatgaggtccgggtcttcttctgtagagggaggagggaaagcgaggaagttcgctgagctggtcacttctaagaaggcttatatttgggttttacaatatgccagaatctggatttatatagaaagctgcttttatctcactcattcacttattcattcaacaaagtcttcttgagaaccagccacgtgacaggctctgggctctcaaaatagataaaagtccttgggccgggcgcagtagctcacacctgtaatcctagcactttgggaggccgaagctggtgaatcacctgagatcagtagttcgagaccagcctggccaacttggtgaaaccctgtctctactaaacatatacaaattagccaagcgtgttggtgcaggcctgtaatcccagctactcgggaggcggaagcaggagaatcacttgaacctggcaggt

SEQ ID NO: 2851 - DNA, 611 bp, Homo sapiens
caaaggggactcaggattggcaacttggcctgtgtccagccttgctggttggagagctcagacctccccaaccccaaatactggtctaggagaagcagaacgatggagtgggtttctatgtgagtctccagcagctgcccctgttcagttcagttcagttcaacttgattcatttacattgaattcaactcaactccaaaggttcaggctagagtcttccttggggaaggattgtcacgattcctttcttagagctctcagtcctatctctgaagcccagggcactctgtgtgcaggaggcacgtaatgtttagaaagagaagtggaggccgggcgcggtggctcacgtctgtaatcccagcactttgggagactaaggcgggcatatcacgaggtcaggagttcgagaccagactggccaatatggtgaaaccctgtttctactaaaaatacaaaaattagccagacatagtggcgcacggctgtaatctcagctactcaggaggctgaggcaggagaattgcttgaacccgagaggcggaggttgtggtgagccgagatcgcgccactgtactccagcctgggtgacagtgggagactctgtctcggaa

SEQ ID NO: 2852 - DNA, 138 bp, Homo sapiens
atagttatagttaactgttatagctatagataatacaatggtgttgtattttctcttggccaacctaaaccattgctaacacttcacgctatacctgaactaacattacagatgaaatgaagcaacttatatctaagc

SEQ ID NO: 2853 - DNA, 428 bp, Homo sapiens
ccaacagtagttaaagtagtaaagacagatattaatcagtgatatactattgtaataacataatatgatattcttgtctgctttcagcaggtctaggatagaaattgttcataaaattttaagtctaagatcaggaggcccaccctattgcttttaaccctcttagttgtaagataggtggtatctccctcatacccctccaaataggtaaaaggaatacctgctctatcagggtataactagacatctatggtcttagccccctcttgtttatagtctttgggttcattgtgccttgtcgcttaagcgcttgtctagtggatgagaatgttattctctcctctaaatcaaccaaccttctatggagtaaagggtactgaagaggatatgtcagtcagttcgggctgccataacaaataccacacact

SEQ ID NO: 2854 - DNA, 508 bp, Homo sapiens
aacaaatgagaaacatatcatgatattgaaaaagaacactcaagatcacaaagataccagtttccccaaagtaaattgaaagtgtaatttagtcccactaaaaatgtaagtaagaattttgaattatatgagttcattctaatattaacataaatagaaacataaagactacccagaaaactcaaactacatagtaagatggaggggactagccttaccagatattaaaacatggtaaagctaatcaaaacagtgtggtattggcacataaatagacagacagaagaatgaagcagaaaggatagtgatgagaatgaacaggggatctacagaccaggagaaagtatttgcaaagcacttatcagacgaaagacttgtatacagtatatataaggaaatctcaaaactcaacaagaacaaacaaccaaatttcaaaatgggcaaaagatttgtacagacctacaactaaaaagataaatggatggcaaataagcacattaaaaaatgc

SEQ ID NO: 2855 - DNA, 572 bp, Homo sapiens
agccctgacacaaagacatttacttccttccatccttttaaaaataatggcctcctgttgaatggtagttgccaagaactagggggaagtacagtagaaagttattgtttaatggctacggaattttagtttgggaagatgaaaaaaacttctggagatggatgatggtattgattacataacattgtgaatgcatgtaatgccactcaattgtattcttaaaaatggttaaaatgatcaattttctgaagtgtgctataccacagtttaaaaaaattaaataataattaccttgttatcaaaaggggctaattagctcactcccttcactccatacaaatttatatcattggtttaagactacatctcccagaacatgctggtcccttttcagcttaggtgttccatttcttcttccttctagggtttctcttctttaccagccaagcctccagatggtatttcagtcactcagccaaacaccttcattgcagtcttttcccccttctcccccagttcacttaaaaataaattgtcttttttcgtaactccagacagaacatgaagcactc

SEQ ID NO: 2856 - DNA, 589 bp, Homo sapiens
tgtcccttggaatgcagcgtgtttccacttgcaaaatgcttagatcatctctaagtattgcttcttctgcctcttttcttcactacatcaaggattactgcatgactctgtgaagttttatacaaccactgcaatgttctgccctacagctaactgaatttcagcatcagtgggccaaatccacacacttacaggagcaaagtttgagcccaagttttggagtaggaaaaagccatgcttacctctttctctatttctgttcagcatgaagtcccttggttgatgtcttcacactgcctggtcaaatccctttgcctttgtgtctgacctaaagtaatctaaaactaccaggcaaggactaggactgccacagccttccttgaatgtggcactgtaatagggaaaacatgcttatcctagagataagttttgtcatgcttcggttatagccaagtcggtcagttatatgctcagtttgccatcttctgaagtttcctgaaaacacagtagaaaaatggtgcctgacacgaagaatcatggaaatctcaacaaatgtttttatttttttagtcagagcttcatatccact

SEQ ID NO: 2857 - DNA, 445 bp, Homo sapiens
ggtagccacgtccaagagtattttttttttagtctgggaaatatctcctgcttgaaactatattctgtcttctgctctcaacttttatccctttcctatgtttcctgacgtctgtctgtagacccctgttggtaatgggtatgtgtgggaagataattatgggtcagagaggccttctattgccaaggggagacatggtacttcatctctcatcctcttcctccacctaaacaccattttaacttttgctgccttgttaggaatgtattagaggattccatgttttataaagggataaaccagaggagagggccaagatcctgagattctgtaaatatccaatggaccactcttgccatccccattgtaattgaggcaatggaaaaaggtagcctacatctatgatatagaattaatctttgttaattattattccatctacatt

SEQ ID NO: 2858 - DNA, 491 bp, Homo sapiens
tgtatagatggtccaaaagcatcagaaaaacgaagtgatgaaagagtgtctagcaagcgggttctcgcacccctcaaagcacaggtcattatcaacctaggggaaaactgcaactgagttttccttcattttcttttcctattcaggaagaagcaactagaaaaacaaatgtaatttttgtttctttttagctgtaattgctggagttaatcttcattttcactactagaaaataaaggggccaggtgcagtggctcatgcctgtaatcccagccttttgggaggccgaggtgggtggatcatgaggtcaggagtttgagaccagcctggccaatatggtgaaaactagtctctactaaaaatacaaaaattagccaggtgtggtgtcgcgtgcctgtagtcccagacacctgggaggctgggacaggagaattgcttgaaacccggagcggaagtttcagtgagctgagactgcgccactgcactccagc

SEQ ID NO: 2859 - DNA, 432 bp, Homo sapiens
gtataccatacatgtttcaagtacatggaaaatatcacgaaattagagacaaccgcagaactatttcactattattttgttacttcattttccatcaaagaaaatgtcttttaagctaacacataaataaaacgaactaagaagaatataaaggttagttatcaacattaagtgatggagtatgtcaaaccctactttaaatatcagtgtaaccagaatcagagaaattagacgccagaagctcacggggtttatatatatactaaaccacatcagaaatctacccattccagaagaagaatatttccagaagtcagcaatttatatgaggaggcatccggaaatcatttcaaataaagaatagctagatgaactgctaaacttaccaaagaataaagtaggcagacacataaggggagctgctttcattca

SEQ ID NO: 2860 - DNA, 438 bp, Homo sapiens
aaatcctcggtgtctgctcaatatttcctacttatagtacaaatgaaatgtagtcataatgtttacataatcggtataaagacaattttataccaaacatacatgtaaccatctaataaacacagcttaaaatatattacctatttaaaaggaaaatgcttgcagatgaggcaattcaatttgaaaagtattttaagtataaatgtctaaagaggtaaaaattaagaaaagatgttaagctaatactgtcttataattgagttcttattagtgtatagacagcagttaattcagtcgagattaactagtacttaaagaaagtgaaagcaatttacactttggtgtgagcaacatcaattgtctttgcttttttgcctctaactaaggctattttgggctgtctgccacttgggaaatgctgcttttactgtatttcac

SEQ ID NO: 2861 - DNA, 557 bp, Homo sapiens
gttcaaatctggtctcccacatgttagctaagagacctacaaattatgttatgttacctctctgtatctcagtcttctcatctggtaaattaagctcaataaggacagagactttgtttactgtcataaatatcatcagcacctagaaacatttgctgtactgaatgaatacctgagcagagaatgaagggaagaaatatttcataaatgctgtggtaagattcacgtgagttaaaacatataaagcactaagaatagccatggcacagtaaatgctcaataaatgctaattattattatttcagcaggcaagttattagtcaaaaaggctcccattttgctcccagattctttacaccttttctcaagatatttatcagactcaaaagcacattacagtgtcttataagcagaggtaaagaatttgtattggccgggcgcagtggctcacgcctgtaatcccagcactttgggacacagaggcggatggatcacgatgtcaggagatcgagaccaccctggccaacatggtgaaaccctatctctactaaaaatac

SEQ ID NO: 2862 - DNA, 499 bp, Homo sapiens
atacactaaggtgaacacatagtacagctggatgcccgctgaaaaaaggcaagggaccctttatctcagaaagagcttttttccagcaggaaaatggaatttcaatccctgcattaacaacctagtaatatttgacttgcaaatgactactgcgtgtatcagttgcttgactatctagatataagagacctgagccatggcttgaaaggacatttggcatgtatgataaacctatcacagctgttactatcattcactttgcagattatcgtaaacaaactacagcaaccagaaaacatgccattcaaggtgtagctgaaattagttaacctttcatttaattgcattctttacaagcctgacatataacgatcaattgtaaaaatcataaatattatatttggtttttcttattgttaccaagaattttttgccttaataatatttaaatattaaaacaaatgttacctcttctgaacaaagcactaatatgagttgc

SEQ ID NO: 2863 - DNA, 470 bp, Homo sapiens
aagatttgtgggttcattatatttaattgttacctccattttcctttttaagccttctcagattaatcttcagttttgatttttaataacttttttaaataaatttatttgtggggaggttagattagcgatttggttggggatttttaggtacttttacctgctttttaatacagagttacagacgtgtttttcttcttttaataaattattcacatacattcccagatgccagcctatattttcctggattctcagcaatgttagaacacatggagacatcaggaagctcagagtgttaggaaaccaagaaaattaagaactttaaagtactgcaagttgaagtacaaggggtcagagtatggaagaagtattcagatccacatcaaggcaaaaatgaaaatttctgtgatattttccacccaagtgaaaagaaactgctggagtatagataacatgtatttttttat

SEQ ID NO: 2864 - DNA, 529 bp, Homo sapiens
aagaatggagactggactcagaggactaaagggacatgcctgagattatatcaaatatagtcaatggagctgagcttaaaggaagtctatcagaggccccacaatagcaattgcccaccacacaaaagtatcttcccaggttattgctcagaaaaggtgtgagaactagatgaggaaacacaggctgcatactttgtattctctgaagcagtgatcttgaccttaaatgcctaccatggcaagcatgtggcagtggtgtgtggatcaggcttgtggtaaggccctatggagaagaatgtgagtgaagctcactggaaacagcctgcaactgttcataggcttatttggtcttgcttttatttttgatgttggctcagtttgattcactttcatctttgtcaaacagatatgcgtattatttctggagctggaataggcaagggctttctggtcaacttcatgtggcttttgcttaaaaacagtgtaatcagctgggctcggtggctcaagcctgcaatcccagcacttt

SEQ ID NO: 2865 - DNA, 427 bp, Homo sapiens
ggaccttttaggtcttctctttcaactatgaacattatcttttattatgtatatgcttaaaaaagaatgagctatccctgaccatgacaagattctacagaggaaaataactaaaatgaggtcatagaaagatcttgcaggggttcagaattcttcctttatgcatctacttcttactatacaataacataactggttgacatgactgtgctctcctaagagttccttgagaataggaacaaaccatgtcttatttaccagttcctgccactctattgcaaggactccattcaagagagagaaggagagaaggggttttaaacaacacagtgtgcccaataaagtatactgatttatacactatctatgtctctttttagagaaaggatttagaaaagcagtatagggtagcagttaagagttctag

SEQ ID NO: 2866 - DNA, 562 bp, Homo sapiens
attgtaccaccacactccagcctaagtgacagagtgagaacttgtctcaatcaatcaataaaaataaaatgaaataaaatggcagagtacagccagcactccgtatccatgatgtagaacctgcagatacaaagagccaactgtaacctcctcaaaaatccactggagaagggaggcctctgaacaaccaactctaatttcaagttcctcacttctttagtgagagtatgaataaaatgctagggctacacagaggttactactcatttatggaaaatagcaaacataaatccttaaaagaaatgcaaaaaagctgcagcagatccacagagagctcatacaggccatgacactatactgaccacagtttaattcaagatcaacagaaggctgggcacggtggctcacacctggaatccctgcactttgggagaccgaggcaggcagattacctgaggttgggagttcgagaccagcctgaccaacatggagaaacctcatctccactaaaaatacaaaattagccaggcgtggcagcgcatgtctgtaatcccagctactc

SEQ ID NO: 2867 - DNA, 570 bp, Homo sapiens
catgtttaagataggctaggctaagctatgatgtttggtaggttaggtgtgttaaatgcatttttgacttactatattttcaacttatgatgagtttatagggacaaaatcccattgtaagttgaagaacatttgttctctatttgggtttgacaacatccctgtaatgtaggcattattaactccattttgcaggtgaagaaactgagtgtatccatatttgactgtttctcattatacgaattcaagaatggttaagttaaaattttatttctatcattttggtgtggaatagttatggatagtagatcagagtgatacaccagttgacttcttggcctaaacatttgaaatagacatttcaagattctttgacagtctctgttttggtcatcaaatgtgcacactgttgatgtgcataaagctttctgttgtttcaagtgaaattgaattttgggtagagcacagtggctcacacctgtaattccagcactttgggaggtcgaggcaggtagatctcttaaggtcagaagttcgagatcagtctggccgatgtgacaaaatcccgtc

SEQ ID NO: 2868 - DNA, 629 bp, Homo sapiens
ccccatcttccccctgtgccctctgcataaaatcccagatcccagctgctgtcacgatcatgactggccctttctaccgctcccttgttcctcacccctcccctccaccaaccctattgctatgctccagctggactgagccaccttcactatcaagttctcactcacctccatcccgatctttgcaaatgctgtcccctctgcctggcacatcttcctccttcctcttcttttatttattttttcaattgaaaaatgaaaaattgtatatatttatggcatacaacgtgatgttttgatgtatgtatacattgtgggatgattgaatcaagctaattaacatatccatcacctcacatactaatcattcctcatcctttagaactgtactcagaagtcatttcctttaggccgggcacagtggctcatgcctagaatcccagcacttttggaggccgaggtgggcagatcacttgaggtcaggagttcgagaacagcctggccaacatggcgaaactctgtctctactaaaaatacaaaaaagttagctgggcatggttgcatatgcctgtaatctcagctacttgggaggctgaggcaggagaatcacttgaacccgggaggctgag

SEQ ID NO: 2869 - DNA, 620 bp, Homo sapiens
tgctctgcagggtccaggttattttctttcggagcacaaaataattttattctgaggctaaaacatatgtgtcagtctttatttgcaaggtgttacatcctacaggaaggaaaatgctgggtggaggggattgtatgggaactttgggtaatctgggttgtgagacctcagagctctcatacggtttcacatgtctgaggccagcaagtaggtcagtatgagatattcagactggggaatgggcaaggatggagagaatcctccaatagaaggatgtgttcctggggctaaaaagcagtcagcctcgggttttacaagagtgaatgggaagttactgggcatgagtagtttcccaggagccttgactcaagatacacgcaaagacttcatttcccagccttccttgcaactgtcagtagtcacatgactgagtttagccaatagaatgtgagcagagatggtgcacaccatatccgcccatagcctctgcaaacctgccatattgcatgtccacgttctttccccttctgcaaccaagtgacaaaggccatgtgaccttgggaagccactctttgaaaatgacagaccttccatcagcctgagctctacagcgatccaca

SEQ ID NO: 2870 - DNA, 190 bp, Homo sapiens
gctgaggaaggtgtggcccgtgggcattcctgtccagcaagaacccctctggcttgtctgtattcattgccacccacatggacctctctatggttgcttgccaaagccgggagggagaagggtctccccttcctccaagcccaggatcaccgggaaatgcccttcccacctactggacttgactaatgct

SEQ ID NO: 2871 - DNA, 264 bp, Homo sapiens
ctttttaatgaattaaagcaggattgaactcaatccaaagacagcatgtttggccatttaaaggaagaaaaaatgaaagagaaggatgttttcttctctcctggcaatggtgtgcagtgaagtgttgatgatttagtatgggtagtcaacactccaggaaagctatctaaaggctgttttgttgttggtttcttttccctctaatcaaatgcaccctattggcttgaggcaaacagaccactccccattctttcttagataaac

SEQ ID NO: 2872 - DNA, 504 bp, Homo sapiens
ctgaaggatgaagtaaaggagactcttcagaagcatttgacagtcctgtagttctgggtactgactcgattcctgctacaaaaacaaatagtaaaaagaataaaattaaaatatcataaagaaatttctaggaacataaatttaaccctgaaagaatgaaatacaatctatgagacataaccaccaaatattataatgataaatacaatggatgctacatgtgcacaaatttacatgttataaattaaaggaaaagcccattatgttatataaacctaacttacactaaaatctccaaatttattaatgattccaccaacatttgccaatattaacattgattttctcatgtttatctgtaatttgcagtgctgctcaataacatatcagtataatattatgtcaatatttagcaaacatggtatgtaataagtaatgatctaacatatctcagaaagaggaaggcgaaatacagaaggaataaagatgattctgagaaaatga

SEQ ID NO: 2873 - DNA, 428 bp, Homo sapiens
caaatggcctggccacatggtcaggcagaagggcaacggaaacctggcctattaaagaaatgcccacatggggtatggccctatggaaatttgaggggtgtgttaaagtagaacaaatgcccatcagaagaattcccttccaggtctggaaggtgactggaatcaacaagtaggtatccctgtgtgctccctggaggtggccacctgggtccatgaaatgaggggacataggtcactgcagcgggcagagatgggctgaattgaggcatgctacctttgcaccctctctggcacataatgcaagtaagaattactctgcttgttaccaacagagacagaaattgtggatagctatgagacaggtttcctgatggaaaggccctcactgataagccttcacgagtgtgtgctcaccccgaacatgaacg

SEQ ID NO: 2874 - DNA, 472 bp, Homo sapiens
ttttggaaagatataggctgggtttatcattctcctaccaggagtccaactaagccagctagcccttcagtatgtgacagccttaattctggcaagaatccccaattcgagtctgatggaaagttgtttcctcttatcgagcagttttgatgttagaacagtccaagtaatgcctgaagaaaaataatgtatatagattatgatgatttattgctctaatttgtcttctcctttgtgtactcagggttcagtcaagagacaggaactatgcagagttacctgaatacatataatttttattttttatatttatttattgagacagagtctcatgtactctgtggcccaggctggagtgcagtggtgtgatcttggctgactacaatctctgcctcttgggttcaagcaattcttctgcctcagcctccagagtagttggtactacaggcgcccaccaccatgcccagctaat

SEQ ID NO: 2875 - DNA, 366 bp, Homo sapiens
tttaatcttcaggtaaatagattatgtctgctgtaggcaaaagaatggcctcccaaaaattttcatgtcccaattcccagagtctaacatacaaatatgttagatttcacggcagtgtgaaattggatttcaagtgaaattaaggttgcggaaaaatgatagagagattgtcttaaatggctgggatcaatgaaatcacaaacatccttataagtgaaagaagaagacagaagaaaggcaaccttggaggtggtggcatgagaaattactcaacatcactgacttttaagatacaagaatgaggacccagcgcggtggctcacgcctaatcccagcactttgggaggttggggtggggtggatcac

SEQ ID NO: 2876 - DNA, 426 bp, Homo sapiens
catcagtgtaataagttggggccaaaaatccaaattcttggtggttggtccctgatcttcacgaggaatatcctgtttcttactctgctcacaagttcacgcaacatgcaaaagaaaaggttaaatgggatgactttagttagatgtcactgtcaaatagaagatcaaagaaaaatgattgtggaaatgaaacttagattatgggagtcaaagctgttaaactcaggtttcttttcttcattgaatgacatcccgtagaataaactcacagtggcctggcttgtatttctaatcactttttaaatattgggttaacttccattgctttgttgctgttgttgtcgttctggattagaggtttttcctgcctctgatattacaagttcatgaccttaagaattattattattagaaattatgccttta

SEQ ID NO: 2877 - DNA, 498 bp, Homo sapiens
ctatttaacagagttcctttctaccagtacatcatttccagatttcaacaaaaaatttacaagatatacgaagaggcaaacaacacagtttgaagagactgaacaagcaccaaaagtagactcagctatggcagggatgttggaattatcagaccaggaactttcttaaaacttaataccctaaggccttaatggaaaaagtagacaacatgcaagaacagatggataatgtaagaaaagaagttgagattctaagagagatcaaaaagaaatgctagagatcactttaacatgaataacaaatacttttgacagactcaataccatactttatacagctgaagaaagagtatctaagcataagtatataatgatagaaacttccaaaacggaaaagcaaagagaaaacatataccggaaaaaaatcagagcaaagtaatcaagagctataacatacatgggaatatcaggaggagaagaaagagataaaggaataga

SEQ ID NO: 2878 - DNA, 519 bp, Homo sapiens
aaaaaaagcttaatagtcataatatatatgggatttttacaaaagaaaaacaccaaaatagaaacatgtataaaggaaattaaaaggaaatcaccaaagacaaaataagaaacccctcaaaaaacagcaaattaaaatgagacatttttgggttgggcgtggtggctcacgcctgaaatcccagcactttggcaggccgaagtggctagatcccttgaggccaggtgtttgggacgagcctggccaatatggcgaaacccctctttactaaaaatacaaatattagccagtggtggtggtgcacgccagtaatcccagctacctgggaggctgaggcatgagatcacttgaacccgggaggcagaggttgcagtgagccaagatcgcaccactgcactccagcctaggtgacagagcaagactctgtctaaaacaatttttttaaaataaaataaaatgggacatttttatccaatcagatcaatatagtttaaaatgttagtggagagtatgagaaaa

SEQ ID NO: 2879 - DNA, 518 bp, Homo sapiens
aacaatataattacattgtagtgtcttctaaatcccttattatacaataaatcttctgcttccaaatcatttttatatagtatgctattttaatgaaatacttttagagaatcaaagaacactggagctagataggactttaaagattatcgaacaaaaccattcattttaaggtatattggaaacttcatctcacaaaatcacgaaaaaccccaattcagcaagtcaagtttcagttatcctttagataccttctaatggagaaagaacctgcagcagatgacagaaattgtagaatactacctcacatctgaataagaattttaaaaatttccaagcactttttcatattctgtatttcacttgaccctccagctgaatgatggatcacaaatgaagtcattaaaaacagtaattcctccactttgtccaagagtgaattccaccaattaatccatcagggattctttcccatcggtgttcattttctctccctttctctctctctatctctcact

SEQ ID NO: 2880 - DNA, 435 bp, Homo sapiens
gtaactcaattacatttgagcatagcatatgattatagatattataaactaagattcaaatgaatattaataagtaaaatgatataaatcaattaaaattaaaattacaagtactggtaggcctatattctttaactaccaagaaaatgaaatgtctttaagattgattgttggactgtcttgactacctactataccatgtcaacccacatttactatgcccctattccaatctaccaaacactactagccagctgtgtcaaagaacagatccagtgatactaccatgcttacttaaaaacttccattatttcctatcactgctggaggggagaggcaaaaccagaggcagggagagcaattatgagactactgtaataatctgggcaagtgataatggcatcatgaactagaagggaagaagtagaggtagaa

SEQ ID NO: 2881 - DNA, 549 bp, Homo sapiens
gaagctatagttttaagtgtagtgacactcctgctctgtaccttagtaaaaagaagtgtcccccttccagtaaccaaatttaaaaccacaaagcttatagttgcagggacaggaagcacaatttccccaaaacacatgaccatgaggtccactggttctgatatgtattgtactttctaaaggtaccagtccaatagtgtttgatacccgtgtcaatagtcacagtaatttgaagacgaaaacactggatcagtaaaagggatttcaaaggggcatcaatctcatctactacagtcttagttctattataattctagccccattttatccccttttatagtggaaatgaatattgcaattttcctgccccaaacttctcattgtgtattgagagtatagtggacagataaattgtctctttaattcacaggtcttcagaatgagagaagatatgccaaagactttttatctatacctgttcctgttatgatgatgaaatcctggactactagactgaatctgataccaaaattggaagagtttttgggt

SEQ ID NO: 2882 - DNA, 518 bp, Homo sapiens; identical to SEQ ID NO: 2879

SEQ ID NO: 2883 - DNA, 465 bp, Homo sapiens
aaaaaaagcttaatagtcataatatatatgggatttttacaaaagaaaaacaccaaaatagaaacatgtataaaggaaattaaaaggaaatcaccaaagacaaaataagaaacccctcaaaaaacagcaaattaaaatgagacatttttgggttgggcgtggtggctcacgcctgaaatcccagcactttggcaggccgaagtggctagatcccttgaggccaggtgtttgggacgagcctggccaatatggcgaaacccctctttactaaaaatacaaatattagccagtggtggtggtgcacgccagtaatcccagctacctgggaggctgaggcatgagatcacttgaacccgggaggcagaggttgcagtgagccaagatcgcaccactgcactccagcctaggtgacagagcaagactctgtctaaaacaatttttttaaaataaaataaaatgggacat

SEQ ID NO: 2884 - DNA, 409 bp, Homo sapiens
tgtaatgacaagataagtacaaaaacagagagtaaacatttagagacttctagtgcctaaatcgctagctcagaaaggttgaaggaactttttataattctttttaatcaggaagcctaaaagttcagaagaaccttaaactttttggtagctagccctatccataagtgtttgaatatatcatggcagtttttgtatgttaccttcttggttaagaaaaggaaaggggcctgacctggtggctcatgcctcccagcactttgggaggccgaggtgggaggatcacttgagcccaggagtttgagaccagcctaggcaacatggcaaaaccctgtctctaccaaaatacaaaaattagctgggcatggtggtgcacgcctgtagtcccagctacttgggaggctgaggt

SEQ ID NO: 2885 - DNA, 590 bp, Homo sapiens
tgatccagtaccactagtagtgacaatagaacccacccattgttctaagtgacaacacactgatgcaggtactattattttctcaaacaattggaatatagtctaatttgccgacagctgcaaagcagcagagccaggattcaaacccaggcagtctggccccagagtgcctgcttcaaatcactacatctcttcctctcttatacttattcatcagtagatgcctagatgtggggctttacacttcagcagatactaagagggccatgtaccaagcgccaagtactgaggaatacaaacataaatactgcttgagggccaggcgcggtggctcatgcctgtaatcccagcactttgggaagcccggctcaacgaggccaggagatcgagaccatcctggctaacatggtgaaacgccgtctctactaaaaatacaaaaaattagccgggcgtggtggcgggcgcctgtagtcccagctactcgggaggctgaggcaggagaatggcgtgaacccgggaggcggagtttgcagggagccgagatcacgccactgcactccagcctgggtgacagagcgagactccgtctc

SEQ ID NO: 2886 - DNA, 563 bp, Homo sapiens
tattaatttggggaactaacaaatgtccatgaaatcttcacaatttatgttcttctgccgtggcttcagccggtccctccgttcaggttccctgacttcccgcaacagttccaggtggttatattcatttaaaagggctaattaaatctcatgcataaattaattgagtgaaaatagactcttgaaggggctgacttctccaaaaactaatttacttactaaactgtatgctgaagtctgaagcccatagaggggatgataagctaaggaaagtataacttgattgaattctcatttgcctatgcctgctaagaaaggtggctatgggtggcccttttaatccagagatctgaaatcacaagttaaatcaaggtgattatacactaatactcaaacaaataaagggagtggctaatgagtagagagtgtttgtcttttcagctttgactattattgtatccttggtgcctagcacagtagctggtataagtatatacactagaaacatttgttgtgtatatgaaagatattaatctaactacccaaaccttctaccttaatta

SEQ ID NO: 2887 - DNA, 290 bp, Homo sapiens
gtgtgaattttaaacagagatggaaaatatagtaaagaatcggaaagaaaagatagaaatttaaaacagtaacacagatgaagtgtcatcagatggctcattagcagacctcacacagcctctgcaccccaccccccaaaaaagtcaagtcacactgaaagacacggcctatgaagaatggaaacagaatactgtggcacaacaccaacaggctgaaatacttgagatttgagtcctagaagaagagagagtgaacagggcataggaagtgtttgaagggaaatggatga

SEQ ID NO: 2888 - DNA, 450 bp, Homo sapiens
cagaggcatttcttaaaagagggtgaacaaagttgggggcagggagagcaagctcagaaatcagggagaggttcttttgtggggatggtgcagtgcaggccagcaggcttgccagagtgcagctagattttgggcagccacccattgaataagaaaactatggcccaggccgggtgcggtggctcacgcctgtaatcccagcactttgggaggccgaggtaggtggatcgcttgaggatagacgtttcagatcagcctggccaacatggtgaaaccccgtctctactaaaaatacaaaaaaattagccaggtgtggtggtgcatgcctgtaatctcagctattagagaggctgaggcaggagaatcacttgaaccccaggaggcggaggttgcagtgagccaagatcaccccactgcactccagcctgggagacagagtgagactttgtc

SEQ ID NO: 2889 - DNA, 329 bp, Homo sapiens
aatacaacatctataaagaactattcttatagtttctttttctgtttccttgtgtatttactcttgcatctgtcatctgtattttcctcatgttctgattcttctttatttaccctcttgcctgcctaaagagtttcatactaattggattgttattattattttcaatgaagctatttgttgaagaatcacttggggagaaatagaaatagtaaaatgagccagtcagcatcttcttggaattgctgttgcaagtatcctcaataagtttattttcctttgtcctgggggcaactttcctgtccttgttattgttgttaatgtaagag

SEQ ID NO: 2890 - DNA, 320 bp, Homo sapiens
ttccctctaaggaatcattttcttattgataatatatagtgataaaatatttctagttttttttcaaaaatagtttggatttaaacaatttgtactttttttcttttctaattaaagaaatcatagaagtaataattcactgcatgcttatgtcaaacaatccagaaatggctgcagaaaagttatattcacccatccctctcattgatgtactcccagccatcaatccatcaattctacttccctcccaagaggtaacttctaattacactttggagttttgggtttatattttcttttttttttcttttttttttttt

SEQ ID NO: 2891 - DNA, 454 bp, Homo sapiens
caagtctatgatttttatgtttagatgcaattgcacatatcacatttagggatttgtgtcaaacttgggtttaaatggtgacaacttatttctctattttgaattgattcacaaaatgtcagagcccctcaaaaatcaatctctttgcaaaaagacatcaagttatttgagatttttactacaaaatctactatgcttcagatatgctatcttcttaaatgaaatcttagttggcataaaagttcatcatagtaggactcttgatggcttcagagaaacactttattagattctaaagcactcaagtcatacctccaaagaacaggctaacctacagagtctccataaattactcatagcccagctactactggggccataaaaggcaacctcaggaggatcacgaggtcaggagatcgacaccacagtgaaaccacgtctcttctaaaaatac

SEQ ID NO: 2892 - DNA, 363 bp, Homo sapiens
gagagaggagtgaaatattctatctaggtaacctttaacaaaattgcaagtttgttttcaaagtttatacggtaagagggtacggtggaagaaagacctcatcgttaaggcagagaacatccacagagcaagatcttgtctctgtagggctatattgcttcctttctaaaaaaaaaaaggttttccttcacagtgcatttacgtcaaaattctaaaacctctcacatgagcctatcacatcaaccttgtcaagtctcacttgttgaaatgagtgggatttgaaaacttctgagtgtgctattacattttccatttatgttcagggaatatggctgtgtgaaaaggaggccaaaagttgtgggg

SEQ ID NO: 2893 - DNA, 404 bp, Homo sapiens
  misc_feature 255: n = A,T,C or G
tatgtgtctgacaaactcaaaagtatgtaaactatgatacaactaaaggttttgattgccataactgaaaagttatacaacatttaagaagcttggaaaacactggggctgtttttaaaggaggaaatgactgtgaacattacaactcatgtaacctacgctttttgctgatacagaggtatctgtaaaccactataagatacaaaagtaaggccgggcttggtggctcaagcctgtaatcccagcactttgggngtggatcacgaggtcaggagttcgagaccatcctggccaacatggtgaaaccttgtttctactaaaaatacaaaaattagctgggcgtggtggtgtgcgtctgtagtcccagctacttgggaagctgaggcaggagaatcgcttgaacc

SEQ ID NO: 2894 - DNA, 230 bp, Homo sapiens
gtcagtcattacagggcaaatggtgtctgaagatgttagttgagtctagggatatcttttcaataaatgaaattcaatcaagacacatagaatttgtgctttttcagagtggacaaaaggcaagttgcagacctctgggtatagtatgataccatttttttgttattttgttaaaaaaaagaggacaaaaataatatcacaactgtgtgtgtgtgtgtgtgtgtgtgtgt

SEQ ID NO: 2895 - DNA, 465 bp, Homo sapiens
ggaagaggcatttttctcaatgaaaaatagggttgagagagtatttttgtgtcatcagacatctcaaactatgttttaatagtataacctaatttatatttcctttgtgtttgtctctgatttttcagttcattttaataaatactttttgagcacctgccatatgaaatgaaatgagccaagcactataaggataccaagttgtaatagtcaaggaaatggctctagctctgtaggaataaaacatcagatttcaggccgggcacggtggctcatgcctgtaatcccagcactctgggaggccgaggagggcagatcacctgaggtcgggagttcgagatcagcctgaccaacatggagaaaccctgtctctattaaaaatacaaaattaggccgggcacggtggctcacgcctgtaatcccagcactttgggaggccgaggtgggcagatcacgagttcagga

SEQ ID NO: 2896 - DNA, 496 bp, Homo sapiens
atctgcccccccgacaaattatggaactcagtggctaaaaataaatagcccctacagagggggtttgaacaggcagtgtgagaaagaaaaatcatcatgttaccatacttcaatttcattcaaactataattcataaataactaaaatgtttaatcaatagtttgtgaataataaaatatcttcatatgtttaaaaataacaagggattctacttttcttatagaatcaattaactgtgaaaacaaagcaaatgaatagtcaaacatgtaggaagtgatagctttctttttaaaaattatagaatgttgtgaacactttcattttatttccttctgtaaatttcattgatatgatcaacaaaaatataagatagaagctatagcaatgattaaaaaaatcttgggtgtcatatgattaatttatatatcaacttggtaagccacaatattaaaatatttggtcaaataccagtagagatgtcactagaaggggtgt

SEQ ID NO: 2897 - DNA, 457 bp, Homo sapiens
gaataaatcaacatcagagttttataaatcagagtgtctttgtactctacaaattagtatgcttaatatacaacttgaagtccttcagagaaaatattaaacagaaatgccttctacccagagatatgaatgtgcctttgcaataataaagaagagactaaaaattgtatagcaatacctagtatctgaccaatacattatttcacaaaaataataaagtatcttgcatcatacatggaagacagtgacttattcctgaatctactatatctacagactttcttgtaccaaatatttactataagtacatacaactatggaaaatgctatgctatgcctttgagaggtagagtactgtagaaatctacacttattaagagcacagtattttactcttttccctttcctatgacatctcttcaccagtccccttctttctatgtgtgtgtgtgtgtgt

SEQ ID NO: 2898 - DNA, 379 bp, Homo sapiens
ttaatatccggaagtagctgtcttcctacaccttagtcaatagctaatcaaacttcttaatcatgttaatcgggtatttttaaaatgctttcagtatagtttcaatttgcttaactcttacattgactgcaactgaggatcatttcatacatttaggagccacttgtctttcctttgaactgtctctgaatgtgcccacttgtctactgagttgttggtcttttctatcagcaagcgatcttgctttttaaaggaaattagccctttgaacatgctgcatggcaactatttcttcccagcttatcactggagtcccaattttgtttatactagtttttgccatgtctaggttgtctgtttgtttgtttatttatttatg

SEQ ID NO: 2899 - DNA, 534 bp, Homo sapiens
tatgtaacatttaacttccagtttgcttatttttttaagacctattaacaaacaattaataaataatgagattagtcttttcttaaatttatctaaagtaactttagaagaaagatatttctagcaccttttatatttatttacttttacaacttttcatgttttaggaatgacttctaacatttctactgaatcaaatgtgtacaagagtttgtaaaggctggctgtaagaaattattttcatgctgtatcagattaacaaatactatttagaaaattcttccccaggtacataaccccttttgcagtagtgtttattgaaatgaatatgaatttgcagaaagccacatgatactgtctgagcacagactttggagtcagacagaacttaaaggcacagcctcttgccaacggtgtgaccttggcttgttatttactctttcagaaggtcagtttgtcactcaagtaatataatatagaaatgaggtatgaaaaattattagcatattatcagacacaaattacattctgagc

SEQ ID NO: 2900 - DNA, 145 bp, Homo sapiens
gaataaaaacctgctctctcctgaaaatatggttcatgtagaaaagtggcttagagattaatagaaacttaatttagagactgatatcaactgcacagttactagtaaatgtcatttcatattactcatgataagagttgatatc

SEQ ID NO: 2901 - DNA, 250 bp, Homo sapiens
tagagatggggttttaccatcttggccaggctggtcctaaagtgctgggatcacaggcgtgagccaccgcacccggccactgtcttgtatttctaacgtccccctgacttttctgatcatgtaattcttaactttctcaaaactgagatttgtcacgtgtcctctccccactccattttgtgaatcagagtcttccaggggcaggacctggagaatgggtctttattaacacacatgtgaaaatgctttt

SEQ ID NO: 2902 - DNA, 444 bp, Homo sapiens
gaaatgatagacacctgctccatacgtcacttcctacccatatttgtatgtaaactgagattataggacaccaggttttgaatatgtgctcacttccttgagactatttaagcatctgtattgtggaatttctgaaagaaagtgtaaatggcaatgtgtggaactaaagggtaggcaggtagattaagcagtagattaagccagcagtaactgttctgtttgcttccgaaaagcatgctattttacccacaggccacagtttctccattcccagttgtccaggatattttctcctagagttgttccataattgcctatgtctctgatactaaggattcttaatatatgtcattcctccaacacacaggcatacacacatccatataaagttctattatattggtttttcagcaactatattaaaaatctacattgggccggacg

SEQ ID NO: 2903 - DNA, 312 bp, Homo sapiens
ccaccaccacacctggctaatttttgtatttttagtagagacgaggtttcaccatgtcggtcaggctgtcccaaactcttgacctcaaatgatccacccgccttggcctcccaaagtgctgggattacaggcatgagccactgcacgccccgtccaacacccttttttactatcatagctgggagcatggacaggggtgttaatgtcagatgagaaagtgtcttataaggaaaataagcctttttctccttgaatgaagcttaaggtgtcattgacaatggcgtagaactggctttgaaagagatcaagtga

SEQ ID NO: 2904 - DNA, 558 bp, Homo sapiens
acatttaagatctttatattacactgaatgtagatcttactatgataaaaaatcaactgaaaaaataaaaaaactcagagcttatgtgagaaaagttaaaaaacaagatgaaataagctatataatccaatatcatttatataaactaaaaatatgtccacacaaaataacaatacatgtttcataaaacacatacggggtgaaaaaacataacattcaatggtatagaatggttgctgtggttgggtaggggagaggggagcaggggaaggagtggtgcagaggaaaagtgagaataaacaagtaaagtggaatttgcttccatggacctttcacgtacgtattcctttcagatacaactttctgacctaaaatgcaacctatgcatttgacgaaggtctaatttccagaatcgataaggaacttaaacaaatttacaagcaagaaccaaacaactccattacaaagtgggcaaagaacatgaacagacacctttcaaaagaagacatacacatggtcaataagcatatgtaaaaatgctcaacatcactactcact

SEQ ID NO: 2905 - DNA, 492 bp, Homo sapiens
atcaaactcaactataatgatcagaaggttttaatatttaaatatataaatgggttgcccaaatagtcaccctggctaaatgctgctaaataaattagtgctccttcttatccttctatgaaaagaaaactgaaatcaaatgttaagatctttaatatgatcaggtttctgtgacatagcttcaccttaaatattagctttacagcctgaaaatatagagttttaatacagtttagctggagaagttgttttgtacacaatgcatttttagaggaatatcttaatatattgcccatgtgaagctcctggtgttacaaaaaaggcagtttatattcaacatacttcaagtttagaatagcagagcattttgtaatttagaacaaaggcatgttccctctagtagtttctgatatcaactgcaacttataaatttgccttgagacatgtttgcaataaaaattacaggttttctgattcagcatgttccatcat

SEQ ID NO: 2906 - DNA, 321 bp, Homo sapiens
aacatgtattaaaacttagatatcgcctcaccgtgaatgcatcagacactgtactgttctcaccactagggtgggccctctgcagccacaaatagaggagacagttggggataaaatcataactgatgaatagagagactgagtgcactagcaaacctgtagaaattctaggctcacaggaatagcaaaagacagcccactaaataaagagactgtcaagaagcatttcacacctaacatgagcaataaatgaattcccatccaccaacaacgtttctcatgattttcctcatccacaggttcaattagaagctttgtaaa

SEQ ID NO: 2907 - DNA, 217 bp, Homo sapiens
aaaaacagcagcagcatttacttactgaaagccatatggagaagctgtactctttcactaggtcacttggcaaacattacctttgtgctccctcgacatttcctgatctcaagagtaggaaaccagaagagaaccaaatcacttccttccctacttcctaaagagcaacgttgacctcatcagctgggcttcagggttcagtaaacccacatatttc

SEQ ID NO: 2908 - DNA, 551 bp, Homo sapiens
gatagtttcacttgcatggcaggacagctagatgttaaatgagaatatacaaagcacagggcttggcacacagtatgtagctttgcctctccccggcctgtctctgccccacagcgtttcttgtttggcacaactttgggccgcgaggatctgggggatggtcaggctatcaacgaggtctcagctgagcctgttggactcatggcccaatctgatggaaaagaggcaaacacaggcaaaaggtcagagccgttcagtagaatggtgacggcagaacataaccctgctccagccagctgcaaacctgcacgcttcccttctaggcatgacccagtgctgttcacactttgaggcccagctcaaataaatgacacctccttcaggcagccctctctgagcctccaggggaagtggtctccttatggtgctttatctgcctctgcatcgcaggaaagaaacagaaagacttggccgggtgcggtggctcacgcctgtaatcctagcactttgggaggccgaggtgggcggatcacctgaggtcaggagtttga

SEQ ID NO: 2909 - DNA, 289 bp, Homo sapiens
gatctgtgtcttgaactacacatttccttcctgacatatttcaagctcttcctgttcctgttctcagcagcagggtggtgtcactgccgtgcagttgcagactgaggcccaggtggcatccgcctcaggccagcaagtccagaccctccaggtagtggtaccctctctgattctctgtgagcactgcatgaacttctcctctcctcatgtctggtgctgtttgtgttaggatctccagtaggaatggcaaagtcagttgcatgtctttgatgctgctaacttgtctttg

SEQ ID NO: 2910 - DNA, 497 bp, Homo sapiens
attggttttgggccaggcacggtggctcatgcctgtaatcccagcactttgggaggctgaggcaggtggatcacctgaggtcaggggttcgagaccagcctggccaacatggtgacaccccgtctctactaaaaatacaaaaattagctggatgtggtggcacacacctttaatcccagctgctcaggaggctgaggcatgagaatcacttgaagacagaggttgcagggagctgaggttgcgccactgtactccagcttgggtgacagagtgagaccgtgtctccaaaaaataaataaaataattgcttttgccactgttattcatttgacataatcaaaaatgggactaaaagtacattatcatagaacccatgagttcttagtgggataaaagctgaatattgtattgtagctacagttaagatggacaaatatacttctggcatccaaaattcatactgtaaaaggaatttcctattaaaaatgtaaaaaaag

SEQ ID NO: 2911 - DNA, 675 bp, Homo sapiens
aaataattaactcgatggctgggcaatggttcactcatcaatatctcttcctaggtgctctgtaaagagttaagtccaatgtgacgtaggtggagctagtgttcatgatgtcaggccatccctgccatctgactcacgggcacccagacagggccacgtcatcagctgacaccaggtcccacaagcaaggcccacacagcttcccaggcttcaaatacttgctctgattgtcagcttcatggcagatcaagccaccaatgtgttatttagtgggatgaaagaggacgccaccccaggctctgccaagcacaccccctagtagcgcccctccagccaccaaggtggcaacacagcctgggagaaaggtcagagcccactgacttgcatttctgtcccagcaactagaggttgctgagctgtctccattccatgagtcacacctttgcatgtgggcacgtgaaagagcatacatcatcttgccagtaacgaaatgcaacaccaggccaggcgcagtggctcacgcctataatcccagcactttgggaggccgaggcagacagatcatctgaggtcaggagttcaagaccagcctggccaacatggtaaaaccccgtctctactaaaaatacaaaaattagtcgggcatgatggcaggtgcctgtaatcccagctact

SEQ ID NO: 2912 - DNA, 566 bp, Homo sapiens
agtcatgctagataaataagtcctagagatcttgtgtacaacatagtgccatagttaacaatacagtattgtgcactttaaaatgtgttgaggatagatcttatgttaagtgttcttaccaaaacacacacacacacacacacacacacacacacccttgggtgtggtgatgatatcacagttttatgcatacattcacattcatcaaatcgtatacattaaatatgtgcatttttgtatatcaaatatacctcattaaagcgtttaaaaacactgatatgatactaaaatatattcacattgaaaaatattaaaaataaatgcaaaccattctgttatataatgaatacttaaaattattagcattattaagtatttgcatgtttaattaaagattatattttattattatgggtctaagtaagccaaaattaaataggccaggcagaatacacattctcaagtaatccaaggtttttctatgcctcatcaacttgcagaggattataattttagagcaagcagttattttatatatcagcacacacatgaggaaacttttatgc

SEQ ID NO: 2913 - DNA, 468 bp, Homo sapiens
tacctcccatctcttccaagttaaagcctggcaaggatgagatattaccatctggtttaaatgtcaccaaatgatgagttggtataaccacagaaaattgggaggatcctgccttaaagaccttgtaattatgtgggcttgatagggatttgttctttgtttctggggttatgtgattagagtagtattaaaatgtttcagtatctgtagcctgtagtatgtatgccccataagaatatgtgcttaatgaaaagttccaatcaagtgcttgaaacacactaagtttaggctttagttctctgaacattacaatttggtcaagccagtgagatggcaaaaattaactcaagaatgcacaacaatctgcctaagggcacataaagtacatagctgggaaaagaaatcttagcctagctatctactcctaacaaaaatacctaagcatttgacaattttaaatggtacata

SEQ ID NO: 2914 - DNA, 615 bp, Homo sapiens
agtgcacatttattttactgtgagtctatttggcaatgaaaaagattccagtaaaagggggtgggggcggtcacatgcaataattggccaagccaatcctgtggctggagaccctgaggtatttgccgcctcagaagggacccgctgaggaattggaatgagaccaagcctgcagacagaacaaatgtacaggacccagcagtgaggagcttgggaaggcagcaaagccagaaatgaagcaaggactgacaaatccaccaatattgagttatgaaggctaccagacaagtcatatctctatttataggcagtcacaattttttcaatctaaagaggtgaatcaggaatatattagagagttgataaagcagatacagtctgcttatgataagctctgcagagaaattactacatttggaactcaaggaagaactaatcaatacagatatgctagtattaagatacatttgtaaacttctttgtatttttaaagagtgtttcacataccatcccatttactttggctcagtccatgatatacgggagacaggtaaattgaagcaacttgcttgaagtcatacttcttagtggctgagtttgagcttgaactgcaca

SEQ ID NO: 2915 - DNA, 644 bp, Homo sapiens
cccactttaacatttaactttttaacaaaactgtaattatcttcaaaactatataatttatcttttctgaagttaacataactcacagtgctgtgtttttagaacagctgggttgaatgcttgtgtgtgatataattaatagaaccctaagtgtaatagtgagagagggaagggtatagaatttaaatagtgatttttgtcagaaaaacctggggaaattatttgtgggtttagttacaattttccagggatttgcctttattttctctgtgttccaggtcttgcctgaaatttagaagcccctttcttgcccttcctttctggtgctatcaatggtggtaatcacctctgaggaagaaaagccctcttcccactgtccatggagaacactcagcatctatgcttgattttgacagggcagattttggatgaatcatgaaatgcttctaaagtagccaagagttaactcttcctaacctttttatatagtaagcatgttaccccacaaggtaacttacccaggggaatcaactacatagtggaatcacgttattcacacatttaacttacacaaattcaactctactgaaaaaaacatgaagtacatgagtgagagagaaaaataacaatcttaagtagcacat

SEQ ID NO: 2916 - DNA, 634 bp, Homo sapiens
tctgtctcagtaccccctccctaacttgccccacaccacaggcctgggaggagcagtgcagagcccagaacttagagtaagccagagagggcttggcccactgggaggggtcctcccggggagggaaggcagtgggctggcctctgtttcaggtcaaatgcaccagcacagaggacagtggcctctgactcttagaaacacctcaagtagaaactcagaaatggcctatctcagctctgtctctctgcccagggtcagaaaggctggtctggcttccccccagcctgggaggccctggtgtccttcctaggtgtggggctgccctaatgtcctcagctctgctctgggtggggggtccccagccactgcatgggagcatctgtttaatcattgcattccccctcctgctgcctgcacaggaacaagccatctaaggagctggttgaaccagccttcccacttgtgctcagggagacacctgccccagtgggcccccagcaggcctggccacctcccctgccctactcctgccccagtgctcagagccagagctaaggtgtcatcctgtttctgagccataccctccccaggagtcccttcccacccactcccttgaaggcctgatggctcactg

SEQ ID NO: 2917 - DNA, 206 bp, Homo sapiens
gagactcgtaacttgcactcgctgttcctcggaaagtctatggatggtgacagctgtaacactggatacagtaacatctgcaggtgtgctagcaacagcaatagcaccagtggtagtcctgttatgctcctctaactcaccagtggaggtagtgtgggtcaatgtagaagaatctgtgggacacagtagcactagatgctaacttt

SEQ ID NO: 2918 - DNA, 594 bp, Homo sapiens
aattcagtaagatcctccaaagagtatgtaatccaaaactaaaataaaaatcatcatcagtgttaggaagaaagcagggaagcaaaactggtaaatgttagatataattttatttatatatatcctcccttatcctaaagataatataaaataactttagcattttatttttcttttttgagacaaggtctcactaggttgcccaggctggccttgtactcctgggttcaagcaatcctccctgctcagcctctcgagtggctggggtgacaggcgtgcaccaacgctaccagcaagatgactttaagaattttagacacaactgaactaaatgaaaaaataataaaatcagagcaaacagcatgaaaagaatgaaacaatacttgtatcattaagtcctgtattcttacaagaggtgagccacaaattgctccttatgatttctttttaatttttattttaggctctttctttgaattctacatactttctactaggtcatttaaacagggaaaaggagctgattacatgtctcagcattggtaagattaaaaactccctagatgctcagtagaagtacaaactattggtact

SEQ ID NO: 2919 - DNA, 578 bp, Homo sapiens
gtgtctgtgtatgcgagaaactatatcctggaccatgagaagggctgacctggccgcctctgatataattctcttgggatgatgaggggcctccaaaactcatcattcttcagggaacgaagaatttttttctttgcctcttttctttagctctttcatatgcattgtgcttaataaatagcagatgctccccgctaattaattactgcttaacaaactatcatactcataagaattcagggggagaaaaaggaaagaaagaggtcaaatgcactatggaccaatattcaaggtagtttcagaaagccttttcttagttctattattgtataccttaaatatttcatgttagggaatctctatatttatattcctatcctagaaagaattgtcatttttattttttagttctaacactatttcccacttgaaaacaaataatgcattggaaacaaggaggtcaatctggttccaggagcttcattcatcttatgacgctcttaggagacccctagggaataccttcaggcataatgataaaatcatgaggatccatagaatctattacaatattttct

SEQ ID NO: 2920 - DNA, 493 bp, Homo sapiens
atagatgattcttaaaactcttggagactaacaatcacctgcagaacttcttaaatatatccatgagcagacctaggcacagagctacagaatcaggcgtcccattactccattgagattttaagcattgcctttgtttgcacatacagatgtaggtttggttccagatttatctaaatattttaagtttcttcctataaagaataaagggtttgatataaatatatgttataaattgtttacttaaataacatgatgttttagaaattgcttccttatattatctttttaaatcttttctttaaaccaacaagcacacttgactaggaagttatctttaagtatgcagggctcatgttttctaatactttgaaattgttctcatagttcttcataattttctcttgtttttcgcatataatcataaggtagaataaaaagttaaggttttatggctaagaggatctagctctgctagtaaatcatcttgctt

SEQ ID NO: 2921 - DNA, 648 bp, Homo sapiens
tatccagcaggtatctgttgatattcttgtccaccgttgtcttttctgccattccatttgttcctgtggatttaaacttttgtattcttttactgacacttaagtgggtttctaaggagtggaaataaacacgtgaatgtgtgtgtgtgtgtgttttcaatgtcctgcatctaagtggctataaattttgtaatttgattgataattacttctgagttttagcttatttcttaaggaatattgatccttaacacactgataaataaactcagtgtgggaatttataggccatgttttcatagcatttatttcagtgttggtaactcaaaaactgggttttcctttttaagttaaaccaataatatgtgaaaattagatgtgctaaccagggccagggttggtcttattcagttttgtgttgaccattcttctaggactttgtgcagacctttgcaaataaactttaaaacaaaacaaaaaccccgaaacccacaatgggttaatagagttaaagttttcttcttttcctcgataaacattttaatgatcacttacgaagtacaatgaactgctatatgagctgaatatatcatggtgaacggaacagagttcctagtgtggagggcttccctagtgagggagactaac

SEQ ID NO: 2922 - DNA, 605 bp, Homo sapiens
gtttatttctgggtgatataaatgtcctaaaattgattgtgaggatggtcgtacaactctgggaatatactaaaagtcattgaattgggaaaaaaaaccctagggatagaatctgaatgacctggtttgggctatatatctacccctagacccatcagctatggccagaaagatgtttagtgaatatgtctgcttccataaatatgtggacagaaggatgcaggggaggaaggggtaattttcaaaaagaagctgcctagatagataagtaacacatcagatgactcagagctaaatattctctctaacagcaagttagtagattagtacgatgaatatgaatactttatttaaacttaccttcccctcttttttatttagtccattgcagggtagctagaacttgttaaaaacattactggataatataagcaacattttaacttacagacaagttttgactcagtatcgtttttcttttgtctctgaaaagatatttttaaccaaaggctgttagtgaaaaggcaactgacgtttgctttatttgcctgtcctctcagaacacaaatactcctatgtgaaatgccacctggagacagtggcta

SEQ ID NO: 2923 - DNA, 538 bp, Homo sapiens
aggctatttcagaagtgcacttctgtttgggacatgggcattaagggattagattacttctgccatctttactggtgctatctgaaatgatactgaaaaatgccgatgccaaaggtcacaatatctaatatgatgagttgttgttaaatttatatgtggtttatatcttttaaccacagtaagcatgttctacttcagagtttatagcttaaatttgtacctaggtaacactgttttatccctttttttggtttgatttctctctaataattgatcttaaagaatagaataaacagaagagactctggccccaagcagtcaagttataggtggattttattcagtaaaatcaaggcaaaataaagacctattgattcctgggacattttgtcattttatctttcctgagttagacatcctgaccaccctaatagccaaatgaaatggatagcagcagcttgaagtcatttataattttaacctgacaaggttctgttgaaaaagattactacaggcatatgcaatcaatgagttgcat

SEQ ID NO: 2924 - DNA, 595 bp, Homo sapiens
gccatttagcatctatcactagctgagtgacttttaacaagttctttagccttcctgtggctttatttcttttgctgtaaaaggttccacttgtgagatgatgcatataagacatgtaatacaatgcctagcacacagtaagaactcaatagacttaaattttaagtaaattaagccccataccagatgtgtgaaatacaaagaaatcatgactacattctatactgaatatagagaaaacttaaagcaataagatttttttgtaggtttaatggagagttatcaatagtattgctttctactttatatgaaaaataatacatgttgaaactcctgcaatcttcggttgaagtaagataaatatgacataaaggaagatcagctggctgctgacgtggcacctcatgaggtggaaatttattagtggggtcactgggctctggttttgtaagtgaagaaatttgattttatgcagatcagaataattcagattgtctagaatagattcacactgaatagcatgacaagggtggatatgtaaatcaaatgccaatgtgttaatttgcctttctcaagtactgaaatacttgaactc

SEQ ID NO: 2925 - DNA, 604 bp, Homo sapiens
tgactaggctaaaaatgaacaaatcttaattaacttaaatatttctaacaccttgggcattcaggaaaacagctccatttatgttgtgaagtaatgggaagcatatggcagtggataaactttgaatgaaaatattaaacaaggccttaggagaaaagtgtaatatgcttattatagatacattaatttaaaaaattctctggcttaatatcattatactcaaattagactttgatttaaacataggtcctaaatttggattaaatataatagattgaccacaaatttatttcgtctccctctggaagcctcattagtcataaaataaaggttacacccatgaccagcacagaaggttgacagagataatttttagtaaatgctgagacataaaaagtagacaaaggagtggtaaataacacagaaacacaactttgctgactacagaaagtgactggaacagaagcgagccagtttgtcttgcagaactaaggcaggttgtgaacttacaggcaaatggcactttggaaagtagggtaaaatgtaaaaaaaaaaagccagcaaggtcagttgcaaatctctaactagagcccaaagtctacct

SEQ ID NO: 2926 - DNA, 631 bp, Homo sapiens
agtctacttgagtaactttatgaccttacatttgaatgtctgtgtattcgtccattctcacgctgctaaaaaaagacatacctaagactgggtaatttataaatgaaagaggtttaatggactcacagtttcacatggctgcggaggcctcaaaatcatggcagaaggcaaagaaagagcaaagggtcatctcacgtggcaggggaactcccctttataaccatcaaatctcatgagacttcactatcaggagaacagcccaggaaaaacccaccccattattcaatgacctcccattggatcccttccatgacacgtgagaattatgggagctacaactcgagatttgggtggggacacagccaaaccatatcaatctgcatgtaaaggggtatgatttctgctctcttttaaattaggccagatgacacgtgtagctttgattatgtagtgaaacatgtaatctccttgcttgagtcacacgggcagagcctgacaccacatcaaaaggccctgagtacagatgaagtacaaggaggaccgaatggaagaatgcctcttgtcattattcgagtgcacgatcccttgctcgcctctcaacattcatctctctttacgtcttatataaacc

SEQ ID NO: 2927 - DNA, 555 bp, Homo sapiens
catctacttgtgcagccactgacaactattagaacacagaactaaatagtggtcggcgctataaagtgaaaaatactttgtagatttaaaacattctgtaagtactcactaaactagaaaggacttgggaagcttctgttcaaaaccactacttttgacagaggaagaagctgagatttaaatgaaataatgggctgggtgcagtggctcatgcctgtaatcccagcactttgggaggcccaggtgggcagatcacttgagagctcatgagttcaatcctagcctgagcaacatggcaaaaccccatctttactaaaaatacaaaaatgagctgggtgtggtgtcgcatacctgtagtcccggctactggggaggctgaggcagaagaatcacttgaacctgggaggcagaggttgcagtgagccgagatcatgccactgcacttcagcctgggcaagagagcaagactcagtttcaaaataaataaataaacaaaataaaaataaacaaataaatggaataatgtatgtagactgcttagcaccacacttggga

SEQ ID NO: 2928 - DNA, 496 bp, Homo sapiens
gaaatgtagggaaggcagcaagatccaccaccaccaccaggatgtgccgcgaatcttcctcctagctttcaaaaggaatctcagccatttatcatcgtgacagtgcaatggggaaatgaaaacacccaaacctttagggtaacatacaagacatcattgcgatctacaagtcagggtggagcttatggggcttagaacataaatgacgtggccgggcacagtggttcatgccggcaatcctagcactttgtggggccaaggcaggtggattacttgaggtcagaagtttgagaccagcctgaccaacaaggtaaaaacctggctctactaaagatacgaaaattagccaggcatggtggcaggcgcctgtagtcccacctactcgagaggttgagacaggagaatcgcttgaacccgggaggcgggaggcggaggttgcagtgagccaagatcgtgccactattccagcctgggcgacagagcaagactccatctc

SEQ ID NO: 2929 - DNA, 547 bp, Homo sapiens
gtgagaccctgtctcagagaaaaaacgtaagtataaatcacttgacaaatttccagtttttataggcattattgttcaggccaagattgagcaaaacagagaaaaaaactaagtctatttaaatttgatttaaggtggatgaatgacttagaaattgagaaaacagaactaaagctttctcccctgctttgactcctgttcctacgacaaattgctcactgatcccccatatcccactaattaaaatgctgactacacaagcaaatcacattcattaaagaaatattagaaaatacaggtaagaatcaaagaatgaaattcactacaacccgtcacccaaagatgactattcaaatactaggatacatcatataaaataatcatgctctatatgatattttgaaccttatgctttttaaaattggtaattcacaaaaatttgatgttgataaatgtcataagtgccatttattgagtacttactatatgtgaggcatgttgcgaagtgctttgtacatgcgacattcattctcaacagcataactag

SEQ ID NO: 2930 - DNA, 229 bp, Homo sapiens
cgggcatgcgccaccatgcccagataatttttgtatttttaatagggaaggggttaacagtgttgcccaggatggtcccgatctcttgacctagtgatatgccagtcttatcttccctgagtgacatgagtgcgagtctgtcgattaaaacatggacttctttgtggggaccattattctgcctaccagaaggtctaataagtgtgaaatgcctataaagtgtccaagt

SEQ ID NO: 2931 - DNA, 627 bp, Homo sapiens
gtctcctttcatatctttgcttatagttcattatctgcctggcattatctttccttatttttaactgctgactgtacttcaaagcctactaccaacttaaagtttttgtagaatttcccattcaagatggattttacattactttgttctcttgctacattataaaattagcatatcctaccttcattacttttgcacataaatctatttataagccaccagagggcagggatagtcttgctctcctctttatttcttagcacagagcttgcacaggaagagactgaaatgtttgctgaattgtattctgcatatttgtgtatgcatatatatttagacccatttcatttgatatgtggttcatttgggggtgggaaaattactagaatctacaataaagggaagttcattgacagttacactcaaggtataacggaaagagtggactggatatttatgttcttctagctttgctacttattgattgttgccatgggtaagacataatatctctgagcaagtggctgctgtatctataggcggcaagtctatattccaggcaggaggaaggtgacagaacaaaagcaaaggtgaagacaggaagggcaaagggctttctcaactttc

SEQ ID NO: 2932 - DNA, 533 bp, Homo sapiens
gacgaccgaaggggcagagagagcttccccaggcccaggtctcaggccaactttgatgggtattatcttcccactgctatctttctgacacactcaaaaatgcctcatgctcatacattaggacattctagccagccttctcatgttttatccacatctcccacatctaagcctgcactcaccagcaatagcccatagtgtgggaaaaggcgcacacagtatttggggacgagttcaaaaacacatgggttggaaactcaggagctgtggaccctgtagcatggtttagaagggtacacgtaggctgggtgagcagatctctttggacccaggacccctcaccaatggggaaggtaacccaaataaatgccaaaatggaatgggggagggggaccctcaactatgatctaagagtactaagtcaaaataaactttagaggatatacacccaagttacatatacatcaaagtataatttcacaatgtttgtgtatgtcagtaatagaacctagtcataaaatgattctacagga

SEQ ID NO: 2933 - DNA, 588 bp, Homo sapiens
gagactctgcattttagcaagccttgcagatgattccaatgcacactacagtctgagagcacatgggctattatgaaccaacctatggttcaaatccctggaaaggcagataacccctctgctgtcacctgctgccgtgtcatactggtctgcccacagttctctgaggttgcccacagtgaattcgttcttgctcttccccttccctgaatgcccttccccattttgtcactttgagaatcttttaaatgtctgctcaaaatttatgtcttctttggcacttttcctagccccgttaggcagagcttataggcacttatttatagcctcctctttaaaaataataattatgatgaagataatgacaactaaaatatattgagtatattcattgtgctaattactgtatgcattatcttatttatttcttgccatgatgatgtgaggtgggcattaatcttgtgtcataagagagtaaattccccatgctccatagctgtttggtggagaaaccaggatttgaaaataaccagttgtttcagaaatgatttaataaagctcataacataaaatccaacatgatgatat

SEQ ID NO: 2934 - DNA, 668 bp, Homo sapiens
gtgtttagctgggttaggggcatcgaccatcaaggccgagttagccaggcacaaccacagagacacatccaagcctaagtccccgggttagtggcggccacgcgtgcacacacagctccttccacagggccctgccagggcaggcactgctggcggtgtgctcaccccctgcctcgcccgtgggctcagactctctgccctatatctcctctcagctcaacggggcatatggctgcttcgtcgtcctcctcacatgacctgcggagaattattcatagtttaaggtgctccctggctgactgttcccaccccttctgctttaccttccagcaacccagcatcttacaccacagaggaaacagctgagggggtcgttctactctgttaggggagagcattttctcttttgctggcagcagtgaaaggcctgaaatcaggccaaacagaccaactcacaccagacaagtcctccccatagatggtgctccaaagagaaatggaccatgctgggcacatggctcaattttggagtcttctcattttggtcattaccgtttggctgtgctgcatggttcctggggcctattccagaggcacaaggggttccacagggctcagtaactccatccataaataaaagaactctgtgctctactgacaaacttggg

SEQ ID NO: 2935 - DNA, 542 bp, Homo sapiens
cttacaaaaaatatttatctaaaaataagtgtccttttagtccatattgtgtccatttaacaaactaaatgttagaccttgaaaaagttctactctttttctcattgaggatgccacttttgttcatctgtgtgactcagttaatacatgattttgcacaataatatcctaattgacctgtaggcatttattatccaaaacatgtttgagttaacttgccataaactgttgcttacttaataaagaaattattgaatttttggcctggcacagtggctcacgcctgtaatcctggcactttgggaggccaaggcaggcagatcacctgaggtcaggagttcgagaccagcctggccaacatggtgaaatcctgtctttactaaaaaaatacaaaaactagctgggcatggtggcacaagcctgtaatcccagctgcccaggaggccgaggcaggagaattgctggaacccggcaggcagaggctgcagtgagacgagatcatgccactgcactccagcgtgggagacagagcgaacctccgt

SEQ ID NO: 2936 - DNA, 602 bp, Homo sapiens
tcccctattggcatcagggagccataaatagcccagccgccccagttgaatcaccagagctcgcactgtgtcagcgtttctgtataaaccggagcttgctaggggattagctcacagccataaaaaatttgctccaggctgaaacttggcctaaggaaaatctcagcccgagagtagactctgaaaagaaagccaggcgacaccacccccgagcctcctgaggacgagggtgccggtgaccaggacctcttacactgggctttgtggtcaccagcacagaagtagtcagcgatttcgtgcaccagttggggttgtcataattcaaaatttgggttgtttttatttttcaagctaaaagaaggggcattttctgctatgagaactttgaatagatctgactttgaaaatgtgtaatccaaaccctccccttttccctctgacagttaaatatcaagcaaaaagagatttgcctcagcagggagccagtgcccgtgttgttgcctgggacactgttgggacagtgggtgctgcctcccaccccaaagttttgtaagcaaggcctgggaacccaatagatcagaagggtagaataactccatata

SEQ ID NO: 2937 - DNA, 633 bp, Homo sapiens
tggcatttattttaatttgaaaggagaccctaacttctctcctaaccacccagaaactccactagggtccagggagacatccctaaaatgtcaccatctgggcctttcccacatgatcatattgaaagtttgggagagagtaaaagaatgaagaggaagaaagcaaaggaaaacccactgggagctacatttccctcccaaaacaacaacaaaaacctagtgcctggtacacagtaggttttccattaataatcttaaatggaggaataaatgatagagttaatgaaccagcaaacaaataaatgaagaactgccccataatttctccattcactcacaaggaagaaaataaataaaagctaactttggcagggcacctctgagaagtcaccaactataacagcaaactccctgcctaatccttcttactggaattgtagcactaagaatagccagtttgctttttactgactgggttcttacctgccttctttctggaatgtggtccaaaaaagggaagaattggatcttgatcatgatgaagggcacaggctatgaagtctatcatatttggattttagacccagttctgctaacatctatttgtaattgggcaaaagacttaatctcaac

SEQ ID NO: 2938 - DNA, 558 bp, Homo sapiens
ccttctgagactctaaccatgcctgatggtctgagatggaacagtttatcccgaaaccatcccccaactttggtccgtggaaaaattgacttccacaaaactggtccctcgtgccaaaaaggttggggaccactgctttatataatgtgtcttgctggcaaagagtaaagaggagcccaggcaggggggaagctctagacatataaacaaaggctttcttgctacatttttccttggagaatacagacacctgcctgattataattataggctcagttccctggcaggctgctaatccaaactgtttattctgaacatagtcctaaaattgcccagaccataacaaatatgtgaatactaggtgatttgctgagtagcccaacagtccaacttttttttttaaccatttcctacaattacggcccccctcaaaggtagatgaacagcttattcctgcattttgaaccaagtgaacctttcaagactgtcttctaaagcacaggattgcaacactcctgccctaaaagcaagctttgtgtttgacactaataatggctt

SEQ ID NO: 2939 - DNA, 517 bp, Homo sapiens
tagtgtatctccaaagtctagtttggtgcccggtacaaacattctttccccaaggtggagtccacttgaccagagtggagagttacagtgctggggaagagttggaagacatctctgcctgggggtggggggaagggcagagaaatctcttggggtttgttctggggaaactgggaattgtgggagaactgaggaggcgggaaaggggactttaagaatattattgtgggccaggcgtggtggctcacgcctgtaatcccagcactttagaggctgaggcgggcagatcacgaggtcagtagatcgagaccatcctggctaacacagtgaaaccccgtctctactaaaaatacaaaaaagtagccggccatggtggcggatgcctgtagtcccagctactcgggaggctgaggcaggagaatggcgtgaacctgggaggcggagcttgcagtgagctgaggtcgcaccactgcactccagcccgggcgacagcgagactctgtctcaaaaaaaaaaa

SEQ ID NO: 2940 - DNA, 594 bp, Homo sapiens
agtacagatcattagtaggacttatcaaagaaaaaaaagacattgaacagaatgagaagcgtggcttaaggttgacagatgttgaggatgaaagccgttaatatgattgtttagatggtcaatatgaactctagaaatgaaagaaactgaggatgaaaattattttccaaacatcacaatttttaccaatggaagaaatcctattaatgtaacattgtctcacaagtggtatttgaattgtgactttgaacacatatagatggaaaggtaattggtattcattctcgaatatgttcacaacaataatactgcaaatgttgtttattggcttcaattgtgagtcattgttcaggtcaaggaaaggcaatgttatgcttaaaggatggaatgaaagaaagaactacaaaaatataaaagtataactgatacaaaataaaatatggagaaaatttggtagagagagaagaggatttatattacataaggttaaaagtgaatcaaaagatgataaaatgattatagtttaatcattgttgtttatcttacaataattgatagaaaaaaactaaaacaattgtcaaacacagagataga

SEQ ID NO: 2941 - DNA, 477 bp, Homo sapiens
gatagatggatggaaaactatatttttttaaacctagctatggttataagggtatttggtttattttatatagtcttctatatctgttagattttacaataaaaagttttttttaaacactgagaaaaaaagagcaggttctctgatacaagacaaggatgctctcactcaccacttctattcaacatcgtgttggaagtctaagctagagcaatcagacaagagaaagaaataaagcacatccaaataggaagagaggaagtcaaactatccctgttagtagatgacatgatgctatatctagaaaactccatagtcttcagctgataaacaatttcaccaaagtttcatgacacaaaatcaatgtagtaaaatcactagcattcttatacaccaacaacagccaaactgagaactaattcaggaaggcaattccattcacaactgacaactgtaaaaaaaaaaaaaaaaaaaaaa

SEQ ID NO: 2942 - DNA, 558 bp, Homo sapiens
tctattcttttggttgttgaaaatactaaattttctccaggtcacaaacttcaaaatccatgctttctgaaccaattgtcaagatatgaccagcttcaaaaagtattagtgtgaaccactgaagagccttagctgtactaattattagacgtgcttggctaaagtagaatgctttttctcatttgaaatatttgtcccaaatgtctcaacttaatggtaagtaatccaagaacaagatgatacaccaaccctttctgtcagtaagttaaccagtaaggcatcaattatttctcttaatgagggtctgatatttaaagctatggctatataatattttgtttttcaaagatcccaggaaatatagagtgtttatattaaaccacacacatatactcataaaaggcaaatgcgcatacacaaaaggtgtaaatgatcacatttatacatatacattcacatatataactcagttatcagctaagccttatttaaattgagcccccaattatatagcttgtgaattgtattccccccaattgttaccccccaatcatagcc

SEQ ID NO: 2943 - DNA, 562 bp, Homo sapiens
tcatatctccctactgacctccacttttttctaactttgtcaccaaagaagtcacagaaataaataggaggattcaaaaagaataatttcagtacatttaaaaaattgtagaatataggattctcatctatgtttatcacgttcattcatttttcaaattttcactgtggcaccattttatgacaggcactatgctggggatgctggcgactagggtagggagttaaaatgagagtgtctacttggaaagatgaacagataaataatcaccgtgataagtgctgtgctagagatatgcagatgtcaaaagaccttagaaggtctacaatccacttggagggtagggaatatagaaggcatttcagtgaaatacggtgcctttgacaaatcattaagaatgagttctacattaaaaaggggaagagagggtgatagctgaggaggcagcataggcaagaacatccagcatgaaagaacagtgaaggacatcaggaacatctttcaggaacatcaggtaaaacagacttagggcccaagtcaaaggagctaaaataatacaccc

SEQ ID NO: 2944 - DNA, 262 bp, Homo sapiens
attgcgaagaaagaatatgatattcgtaagagctcagtgctaatattagcattggttatggtagtgaaagaccagataaatcttttagttgggaagtatgtcttgaggtatacttccttataatcattaagtaaataagtaaaactatattacatagataatgtgtaactctctgtattacatagaatgtctgcagaatgtagataggaaaaataaagtttgtcaataattttcaacatctttattgagatacagttaatct

SEQ ID NO: 2945 - DNA, 580 bp, Homo sapiens
tgtaaaacagacatttaagcaaagcactttcatagtatcattatcagaggcatatatctttgggcaagccacttccccacggcctcagttttctcatcttcaaaatgagaagactggaagagtccgtgtaagctacatggttcctcttccagttctttagtctaagtctacgaaaactgtacttcgagcaaaatctgtggctatactacatgcacaatctacaaaataaccaaaatccaacatcaatgcccagaggaggttctctaaacaagcaactctccatcccacaagtacaaattcctacaaaggccaacaggaaaggaaaggaaacaaacagcagaacaaacaggagaactaaatgcaaagggaagctgaacgggaaattactggaaataaagagcacagattcaggatatatgaaaaaaagcaaagcagaaatggaagaataagagaaccagagtataatcaaattgccttaaccacaactgaatttcactcagatcctgtgcacaaacatctgctaacttcatggccaccaaggacatacagaaaatgtaacacagcctttactaaaggccac

SEQ ID NO: 2946 - DNA, 574 bp, Homo sapiens
atacagtcacacagagctgcaagggagtctaggaaaaacagtctcaaaaagtagaggtggacagcttctcagggatctcccaagttctgatgactctctcaactctgcttctctctgggttccagactagattctctcagaaaaagtcttggaatataggatggaaaaaaaatccagctgcagcacctatagattcacagtctgagcttctcccaccaccctctcagtctttgctgatcaaattcaggagaaggttaactagcctgtcttgaacagtatgtctatctctgggataatctctgcacctgagaaaggctggcttctcagagcagatgattttgttgttgttgttgttaaactttaaaagatgaatcagatgttacaatgactcagggctgggcaggcaaagtcagagaactaggaaattgacgatggagtcagagattgaggtgctgggtgttatgtgatgaagtacagacagagaggccacatctttccatgagtgaatttatgaaagatctcagacacttaggtaaggatcctgaactattctctgcagttgatgagaagccac

SEQ ID NO: 2947 - DNA, 594 bp, Homo sapiens
ttgttaacagatacttttttacatggggcaggttttggctagagctacttttattataaaaacacaagattttcaaggaagaaacctaatgccctcattttatgttatgaattttagaaagaaataacaattaagcatcagtcaattaccttcacttaggagaggagaaagaaagcatagccctcagacagactggggaggcaggagagaattatgcaaaacaggaggtttactaaggtcctatagatacatgcctgggttcttccaaaaataccttcacccactctcagatattgggcttaggattctaaagtattgagctcagttcttgtggcaacaggacgtaagattctaaacagtcttggtttgaaatggaataagattatgtggaattgctttaacaaggcatgtgaacaagttgttcttcactgccaaccctttccctccacttttgcttcctaagatgtaaagccgtggtttcctgaaatgattttttgcataggtgtgcctaaatattgtggaacacaacagcatttgctcgttattaaatgtgtcagattcactatcttctactgtttattttcaatgctacat

SEQ ID NO: 2948 - DNA, 532 bp, Homo sapiens
aaatatcaaaacacacaagaaaaactccaggattgtcagtgttttatgagtttaaaggtaacactgaccaaaatgtttgaaagccactaaactacttttttccttgaagcaaaagcaattacagtttttatttctgtcactgttattcctagtgtagttgcaaccacttatgttaattatatcttttaatcatagtaacttctatttcataaaggaaattgggagcagggagatgggaaactgggagatgtcatacacaagcattgtctactgttttcagttacctgaagattttggaaattatcttcaagatgatgtttttcaaaacataaatactgttgaataaatgactaaatttagttgaacacagatttccgttttcatatctatacattaggaaaaacaaacccaagtagagtaagtgtattaagctttacactgataatagggagaagatgttttggttttttttaaactaaaggtattagtctcatttaccaaagttttcacttaattatgtaaacttggattc

SEQ ID NO: 2949 - DNA, 586 bp, Homo sapiens
atatgactataaaatctatcttcatctgtagggaaggtaatgaattagcataaatgccttcataatccagtctctctccctcccctcttttctaataaaaatgcagagagaacactgtgaagctcaagctgcctctaaagaaagtagagatttacagaacataacctcacaagatttgttgatgaattatgaaggaaggacatttattttgagaatcatgagcattataatatttattgaggattagaattttgttatgtggaggtgctactacctcctcatgagccacttctgcactcaatctcagtaagaagaaaatgattaatttgtaaaatattaaattatcatgattttttcacttttctgtcggttttttctgttgatgtcaggtagcttatctttagtctttatgattaaaaaatgggagaaagatatcatattaaaaatgcagaggctgggcacggtgactcacacgtgtaatcccagctttgggaggccgaggtgggcagatcacctgaggtcaggagttcaagaccagcctggccaacacagcctaacaccatctctactaaaaatacaaaaatta

SEQ ID NO: 2950 - DNA, 622 bp, Homo sapiens
aagacgtctcttctaaggctcatgggccatggaccctcaggcaccagacgggaatcagagacgctctattcagaatgaagcacacctgctttttcatggtgtctccctgcacacatgtctcggcatctcggaggagagagatgctgcgcatgctggagaggtggagaaatgctccgtcctctcacctgaacctttgctctgcctcagatgctcttgatttgtatcaaagagcaaccttgagattggggcacaaaatatttgcaaatctcatatacgtgcaaggactgctcatactcagaatacacagagttgtcaaaactccaatgggacaaacaaatgattctgttcaaaacccagccagagacttgagcagacatttcctcaaaggggatgtaaagaaccacttcaaaaagcgttcactgtccctcccctggggaaatgcacgtcaaatacaccttcaacaacaaccaagaagctctcccagaagccaccgtgacaatcactcaccatcccaagggctgcggagcatgtggagaagctggaacactctgacagtgctgcttggaatccaactgggacaacccccagggagaaagagtttcattgattcataatcaatgca

SEQ ID NO: 2951 - DNA, 624 bp, Homo sapiens
agagtctctcagtatagttccttagcaccagttcccatagcaacaaacaccattcctaatggccagcagttcaaatacaggcttctccacatctgatccatttgagtctgaccataattcagcagcttagtctgttggctcagtggattaatttactaaacactctccctctgggtgtctctctccaggaggcaaatggcttcaaaggcacactgtctcctcatgttcagcttgaaaacttcctgcctagttctagttcccattctctatcaaaagccctgactaggcatacagtcatcatattaaatataccccacacatgactttcccctcctattagatggaattagaatgctagaactcctatgcaatgaccagaattttggcagcatactgtgtcttctaaacaagacaggttaaaatggcattactacaaatatccaaagaatacataaaatgctccccaaatcagaaatactcttcaaaattataatagtgataaaactaaatgctatttctttataaaatctgaattacatactaaaacataagaataaccaccagtttttatagccaaccaccaaatttatgtcaaaggcatacctgtagggacacccatctttc

SEQ ID NO: 2952 - DNA, 426 bp, Homo sapiens
tgctttcaataatcaagattattcatcaaatttaaaaggtaatcactgagctatctatttctcagaggtgagaccattaaggaaaagaggacattacagtaatagagaatgtatggcaccttccactcacgtatcaatgcaatcagggtatatgcagcctttatcctggttcagacaatgtgatagaaaacagaaacaaataaacctaggcatagcttctgtcctcaagtaacaaactgtccagtagacagactgaaatagtaagaaaaatcttaaaactgtgaaaactaacttaatggttcaaaaataagaaataactaattaccttaaatttcagagaaagtttgaatgtatttttaacttaaaaatatgtgaataaggcttgggcgtggtggctgacacctgtaattccagacctttgggagg

SEQ ID NO: 2953 - DNA, 539 bp, Homo sapiens
aactgtaaggtggtatatacacacaacatagtagtatttagccttaaaatggaaagaaaattgtacacgtgctacagagtagaaccttggagatgttatgctaagttagatcagtcacaaaagcagaaatattgtatgattaaatttatgtgagacactaagaatagtcaaattgataaagacagaaagtagaagggtagttgccagaggttgagagggaggaaggaatgaggaattactgcgtaatggatacagagtttcagttaggaaggatgaaaaaagtttctggaggtagatggtggtgatggctgcacaacaatgtgaattttttatttgatatatattttaccatatttttaaaaactctattacaaaaaaaagaattggtctagcctagataatcttagtagccatgttttattgctattcaacttgtcactcatcaatttatataaactcaccagccttttaccacttagctgtctatactccacatcagttcttctctcagtgtttcttccagttcactgcaatttgag

SEQ ID NO: 2954 - DNA, 515 bp, Homo sapiens
atcccaaaaacagagcatcatcaagagtttaatgtgattcttttgaacataatgttacttcctaaaatagaagaaggaagcttaagtacgtaagcatgctcttatcttcctttcttaaggatgaagtgatcttccacctgccccatccaactgtatgcttgatttgtggtaggtggtgcatattagtgattgaggtatgaacatcagcgtcatgacaatctaggtttaaatacaaacgttgatatcccacagctgtgtgaacttggacccgttaacctttctaagcatcactttctcatctgacagttgagaatagtatcttccctctaaaactgcctatagatagaattccataaatgagagataacaccattttaatagtcacaggcatcaccattattgtcagcatcatctgattccctccaacacttacaaaactgttttcttatcacttttctctaagtcaactattttctcatcatatcttgctctttggttactttctgtctaaaccc

SEQ ID NO: 2955 - DNA, 591 bp, Homo sapiens
ccatgcctgttgtcccttgtaaagtctttgcataaaaccagttggaagaccattgttctctacttcatttaggtgatttgtgttttcttttatattgtccaagatccctttacttgtctgtaatatttcatcttcactgttgagacttcagcaggtacagacagttaggtgattgggatgtatttacagtttgatcacttaacctccttgggccttggtttcttaatctatataatataattctctcatgttacttttgttccaatattttatttttctaataccattctatgggctagcaagattccattatgtgttgactctcccaatttctattattcataccacagattaagttcaaaatctttgagaggaagtaagctggagtatttgaaattaaatgtttctctttcttgggggtcaggatactctataagtcttcagctaatcagaaaatagtagcttctggccagatgcagtggctccctgtaatcccagcactttgggaggctgaggcaggtggatcacctgaggtcgggagttcgagaccagcctggccaacatggtgaagccctgtctctactgaaaata

SEQ ID NO: 2956 - DNA, 158 bp, Homo sapiens
tgccgcgttgatagcacgtaacgctgctttgacagaatgtactgctgagttagttctttaagtttttaggtcacaaaattaagttagctttattttaataattaaatacatataaacacaatatgtcagtaacttggctgcagtctaataaatcctca

SEQ ID NO: 2957 - DNA, 558 bp, Homo sapiens
gaggagcctcctaggagatctttgacttgaccaggacaaaatcaggttttgccatattaggatagaggggatgagagaaacaacattgcacatagtttggataatgacgtgggtttgtaagacaactcttcaaacggtgtaaatgacaggagcacaggggccaggctggtatcagagaggggaacaaggaccagttcttagatggatttgtgtatcatttaaggaatttgaatttcacatagattggggatcccttgaagggtactcagaaggagttatattatcaggcagaaacatcactctggcggcagcatgagggatgggttgaaaaatttaaaacttgaagcggcaagtccattcaggcgactactgcaatagtcttggcatgaaatgacacattaaggcaagattgcccagggctttaacattgatattattttaaaaataaattgcctgtgctagtaatgtcctgtttctttgcttactggttgaagactcaatttttatagataatgcggaatagatttatacagccagtttagctgcaaagattaattt

SEQ ID NO: 2958 - DNA, 471 bp, Homo sapiens
aatctgcattttaacaagtgtgttatgtgattttgttgcaaatagaataacactggcctagaaatttcagactttaagcaaaattcagaagattcttaaaaaaaaaaaccaaaacagtattggatttgtttttctcaccacagaaataagaagaaaaattggtagttttatttgggaacaagaccaacattttctgatagaaaaggtaagagtaaattaaggtacttgattagcatctacagcttcaacattttctgaaagcatagcaccaatgagtcagattaagagattgatttatttattttgagacggagtctcactctgtctcccaggctggagtgtagcaacgcgatctcggctcactgcaacctttgccttctgggttcaagcgattctcctgcctcagcctcccaagtagctgggattatggggcgtgtgccaccacgcccggctaatttttttatttttagt

SEQ ID NO: 2959 - DNA, 550 bp, Homo sapiens
catgaccatcttaccaattgaggagttatgaacccctgggtaatcaattgggtcaaggtggctccaaataccaaaagacattgataggatactgagaaatgtaaaatatccatcattagaacttaagagctaagtatatccaggcctcacttaaaaacaatacagatgtgttttaatgcaacatgtttttttcctgactattgattcttggaaaataaagtttcttcccaaacacctgcatcagctccagactgattaatatgatggtcctctcaggaggtgggaatgggtattggtttaaggatgattagtccctatttcatataagccatactgatcagataaattgttggcaatagatccctctcatataattgcattaatagaaagcacatggaagagagccatttcaaggtccaacagctctgtgaggtagatatgattcttaatcctacctttcaggtaagaaaaccaagatttaagagagattggctaacttgacaagataatcttcatttcttatcttccttcattccttcctcctttctct

SEQ ID NO: 2960 - DNA, 471 bp, Homo sapiens
tcagtggcaatcttggtattggaaaaagcaactcagtttctagttcccctcatcctcaaattgaagggagcagaacataccttatttgcaaattactgggcatatctgttctaacctggttggaggttatttgaagaactgatgcgctagtctctgtctggcataatttggaatacaggcaaagaaagaggtcctcataaaagctataaggaactacaaacccacacatgcttgggataggagatcacacataatagaccatctaaggcccagagaggaagctggggtaagactctgggaaattaggacattgaatagtaactgcttacatacacacgggactttagagagtcacaagtgcatgtccagccaagactcatgctcagaaatgtcctgagaagaccttaagctttcacctcaaggtgagacctaggatcaaagcaagcctagctaaccggtgaatggctaccc

SEQ ID NO: 2961 - DNA, 601 bp, Homo sapiens
tactacaggtattctcaatttttattactaattttcttggaagcccctagtcccactttgacttgaggtaaggaaagccatagaacttcctaagtaacttcttgaaatttcttaggttgcagttgttgtcattattattattgtataggttggaaaggtggggatggggaaagcagcaacaggatgaaagttatttgctcacattattctgggtaacaatccccaaatctcaatgaacaaaggtttagttctcactcacattacttattcacattgactgtaggtcaattgtaggcctgttccacaacttctttcttttaggacctagactgggctcacccttatctgagagatcccagcctcatgacagagagaaaagaagcatgatggaaccacattatggctcttaaaattctgttcagatgtggcatataacacttgtactcacattctattggctaaagctagtcacatggccaagcctgacatcactggagcaggaagtatactcacctcaaagggaggttaaatgggctagatacagagaagcagtgaatattttgaacaaataatatgagctatcacagtcacataataaatt

SEQ ID NO: 2962 - DNA, 603 bp, Homo sapiens
tgtttaaccaactgtttaaccaagtgtacttagtaaaacagttgggtttaccaagaaatacatttttgccaagtgaagctgatgatgtgtgtaaaagtgattaaaatggttgaccatggaatttaagctgagcaatgaaggaagaaagggcatcaatggagtgtgacacaatgtgcaacaggtacgatccattgactgtgagtcctagtgaggtcaaaggattattggaatctgggtaccagagggtgtgaggtggcaaaacaaagatgatagtcatagtaggtgattagatgagggaatgagactggggagtgattgcattacttataatagtctaggaaagacctaaactatgccaatgggaatgagtatctgagatggaaaggagttcaaggaaccaaaagccagggagttgaaaggatcacctgtgagtatgctgaaatgaccaagaatgaagacagaggtaatgtcacagtgagtgaaaaagaaatgagaggaatgatgagggggttgctagatgaagactaatatttttatgagtaaagtgaaataatattcttaaactcatttttcatattttaaaattgtatagcatttgtgaca

SEQ ID NO: 2963 - DNA, 575 bp, Homo sapiens
ataggcgcctgccaccacgcctgtctaatttttgtatttttattagagacagggtttcatcatgttggccaggctggtcttgaactcctgacctcaagtgatccactcacctcggcctcccaaggtgtgggattacagacaatgagccaccacgcctggccagcatttttgtaggatagatttatagcagtagaattgttgagccaaagggtatatacagttgcaattgtgacagatattgccaaattgtccttaatgatcacagagcttaataaagaaactataatagtaccagaagaaaatataagaatttttatttttttatttttttggaggggaacttttcctaagcctgacaaagactcaaatgccacagaggaacagattgataaaatatgtccccagaaaactttttcagtttctacatagcaaaattataaatacattcaaaacataagcaaaatggagaaacaatacatgacatgatgaaggcttaatcttcttaatatataaatatgtcttataaatcaataagaaaaaaatatgattgcccaacagaatgagcacttataaaa

SEQ ID NO: 2964 - DNA, 538 bp, Homo sapiens
gctctgctttctaaccacgattttttaaagaacaaaggacaaatatattcatcaaatatgggccgggcggggaggctcaagcctgtaatcccaacactttgggacgctgtggcgggcggatcgtgaggtcaggagttcaagaccagcctggccaatatgatgaaactccatctctaccaaaaatacaaaaattagctgggcatggtgaagggtgcttgtaatcctagctactcaggaggctaaggcagagaactgcttgaactagggaggcagagaactgcttgaaccagggaggcggaggttgcagtgagccaagatcatgccactgcactccagcctgagcgacagagcaagacaccctctcgagaggaaaaagaagcaaacaacaaattcatcaaaggtaacaaataaaacatatactttggatttttccgtgtacttagcttttcttagagcatcttttagaattattgtttcacaaaaaacacttcgggaaacgttttaatttattaacaaatactggagggctagaaagaag

SEQ ID NO: 2965 - DNA, 519 bp, Homo sapiens
aaattctgaggggaatgaaggtggagaatagaccaatgtggggtacaaataaactactaaataatgacataaaaagaaaaaaagtaaatacgtttgtgtgtgcatacatgtatatgtatatacattgtatatatatttcaaacataaatgacactgcatttaaagaaattctatttttatttatgtaaattctttcttactataaaaactcccttagctttaggttaaaaccatatatgttgaaagtttcaaaaatatgtgagcctaaattattgatcattgttctccatacacacttcagaatttcttactgctatattttttgctggcactaggcctctaatctaacatagcccaacccaaatattctttatgatccaacttaaatgccatctcctccatgaaacttttttgattcttcaagtgttaagcacagggcctactgcagatggacactaaatgttattttccttacttccttcttcaactaaattataattgtattttactcatgttttc

SEQ ID NO: 2966 - DNA, 360 bp, Homo sapiens
gaattgtttaaaaccagagatgtgcctccactttaatcctgcagagaactccctgattgctttgtcttctgaattggtgtttattttcccaaaccctagccagccttttgtaatttgatcatcagggagaattctatttattgcaatatttggaaatatacttgtggatagcctcacattaggatgcagcaaccagcatgagggtccttttttcctcttcatttgcccagccaatatacttttgcttttggttagcaaaagtccttgtagaaattgtaaattacagaaagaaaacaaaatttgcccctaagcacagcacctagtaatagttattgttttttcttttttttttttgaaaag

SEQ ID NO: 2967 - DNA, 527 bp, Homo sapiens
actgctttacaagcacctacatatagcataacattaccaactcaccaagggtatctgcaccctaggcaccactgacactaccaccatgaccccagagctatagtcccttccatacgtgcctgtgcttcagacctaggctccatggccactctacaagcactactcatcagataccagtgcttccactactaggagcaagcccacaggctgcatccagtgtcagtgagtaactcactcagccacaacctcacagtaggagcaagagatcaagaagaacagtcctcactgctactgtaaacatccggaggttgatgagtgaagaccctgcactatacctgccatgcctcagacactggagccattgccatatgagctttgtcaacactaacctcagcttacagagttgcacaaagactgcatggaggtacatcttcactaataccagaactactgtacctcacccaacaagtggcttcatacaccccaccataggagaaggtctttctacagtgaaactagcccaaaat

SEQ ID NO: 2968 - DNA, 503 bp, Homo sapiens
caggtccctccctcaacatgggcattatgggatctacaattcaagatgagatttgggtagacacagccaaaccatataaaagggtaataatattatgtggtggaaacacatcggttgggagtcaacaagttcctttattggctttgcactaactggctggttggtcatgtcctttactgtctgtggacttcactttcctcttccataaagtagagatttatgttctttgagattacactctgagatgttattttgtttagctatgaaaagaataagagattccaggcccaaaagaaatcagtgtgattgcaattatttgcagatgtgtgtatgtctgtatgttcatttctcctagactgaactttttaaaaacatagataatgtgttattcatccttatattcccagtactggacacatattggatgttcagtgaatgttgaatgaacaaataaagaataaatacctctgtaactaatcagggaataggtataacacaaatta

SEQ ID NO: 2969 - DNA, 507 bp, Homo sapiens
ttacaggtaacaaaacaaccaaatcacattggcctaaactatgaggggctcaggtcaataaatagcttaggtgaggctttgtccagaaatcaagtgatggcaccaaggacttggtttctatttatctactttgttttctgaggtgttgcccttttcttcaggtcagcactgcttgtggccccaatatgccagcatctcccagggttgtacaggtccttgtacatgtcctgttggaaagagagagactggctgtgtcccagaattttcagccagtgtattaagattcactgtaattgggctgggcacagtggttcacgcctgtaatcctagcactttgggaggccgaggtgggtggatcacttgaggtcaggagttcgagaccatcctggccaacatggcaacaccctgtgtctactaaaaatacaaaaatgagctgggcgtggcagcaggcacctgtaatcccagctactcaggaggctgaagcaggataattgcttgaacctggga

SEQ ID NO: 2970 - DNA, 291 bp, Homo sapiens
cacacccagctaatttttgtattttagtagagacatagtttcaccatgttggccaggctggtctcaaactcctgacctcaggtgatccacctgcctcggcctcccaaagtgctgggattacgggcgttagccaccatccctggctactaggaatattttgattctatcttacatttaagaaagctccctcttacttcatgggagtgtaagcctttgagtctacaataatcagtttgcatacaacctcttcagaaatctgttctgagccgggcgcagtggctcatgcttgta

SEQ ID NO: 2971 - DNA, 480 bp, Homo sapiens
ggaggttgagataacagtgagctatgatcccactactgcactccagtctggggaacagagtaagaccttagagtaagaccttgtctcaaaaagagaaaaaaataaaaaattgtttcattcttttgtttttcttcagccaagtaaccttgaattggtaacactacagacagtaagtcttatctcaacaccagtagacaaatcagcagattcaaagtaggcagggaaaaaaaaaagataggcaaaagaactgagactttttcattttagggtttttaaaaatagtaacaatttgagttctgaattttctttcatgtaatttggccgtcaggtttaaagtgtgcactaaagaccaggtgcagtggctcattcatgtaatcccaacactacgggaggctgaggcaggtggatcacttgaggccaggagtttgagaccagcctggccaacgtgacaaaaccccatctctactgaaaatacaaaaa

SEQ ID NO: 2972 - DNA, 514 bp, Homo sapiens
cgggtacctgcacctctttgcctgagggcattttgggaccatgtgctttgcccagatgcaaaatggcagtccagaaagaggaaatggggaaattaatatccctgagaacccttaactgaggactaatgggacttggtgtacaaataccccagagtacttttcaaaatgcacactgaaatgtgttcttgggagaaaatcagtttgggaattcaggaatactggctgggcactgtggctcacgcctgtaatcccagcactttgggaggccaaggtgggcagatcacttgaggtcaggagttggagacctgcctggccaacatggtgaaaccctgtctctactaaaaatacaaaaattagctgggtgcagtggcaggcacctgtaatcccagctacttggaaggctcaagaacgagaatggcttgaacccaggaggcagaggttgcagtgagccaagatggtgccactgcactccctgggttaaaaatgagaagcctggtgacaaaatgagactttg

SEQ ID NO: 2973 - DNA, 591 bp, Homo sapiens
tgctgctaccaaaaacatgcacattttgggattcataatagttggatagtggagaggcttgcagatcgcagtgtacctatcatattccatgactatcagcagcaccatttcaactcctcccgtaacatggataaagaacttttgtatcatacaattatggaaggaaataactttacaatcagtaaaaagatcgtagatcaacctaggaactgtggtagatgaaaggctcaagtcaatgagcgataggttggccagcagaatatacatgtgggagtgtaagtgaggatcaaagatcactgtgaacacaatgaagaggtttcccaggataattcccacatagaataaagagaagaagagaaaaaggaaaaactgcatttccaaggattgtgcaagtccaagtaatacaaattctgttaccagagagtcatttacttggtccactgaatcagatagaagggaagtctgtgaagcaacctgaaagaaacgaaggaatcaacttagtgtgactgaaaataatgcgttaagtgctaatgatttaaaatttattattaacaaatcttttatttgatagtagattatttaaaaactagt

SEQ ID NO: 2974 - DNA, 514 bp, Homo sapiens
tctccaaagtcagtcttgttagatccctgaaaacagaatagggcaagtcctactgagcatgagccttttctcagatggaaattagccctcagagttcccaactcagaacttgcagcaagaaattacctctccagctccagccctgcttgcctttctctcctcctaaagccgaggaattgaaggggagtgagcttaacaggaatgaaggggaaggggcagggggctgtttggtcaagactttttcattaatttaaaaaaaggtggcccaagttcaatatcagtcccaaatggggtaagaggtacaggcataggatgaaatggttaaaaacatacccttttgttggccaggctggtcttgaactcctgatctcaggtgatccgcccgcctcagcctctcaaagtgctggaaccctgtctctaccaaaaatacaaaaatttagccaggcatggtggcatgtgcctataatcccagctatttgggaggctgaggcaggagaattgcttgattctggga

SEQ ID NO: 2975 - DNA, 252 bp, Homo sapiens
ctggcactgtccttctgatcgtctgaggtatttcggggggtattttctgcttctcggcgagagcgcgcgctgacacaggctaggtccaggccgccagcagccaggactcagggaagcgtgagcctgccagtgcgctgaggacagtattgctctccgcgcgacgcgtgggaagcccctggtttctagcggcctgtgcctgcctttcaatcaccattcccatacttaatatgaggtttttaaaatattttcctc

SEQ ID NO: 2976 - DNA, 358 bp, Homo sapiens
acacatgcgcatgcacacacacacgaacttacactgccaaaccaatgtttaactcctcaaagtagttatgttgaaaaataacatgtgccaataactctgtccagttaaaccacctgggtttgggtcactgctttgttgcttactagctatataaccttgggcacatttcttaacctctctctgccttaatttcctcatcagtaaactagaaatgatagagctgttgcatagactgagtgacttaatatatgaaaagtgtttagaactgtttcatcaggcacatagtaagcattcaataaatattagctttatatgacccatcttcttcatcagatttggctttgaggacagatgtgac

SEQ ID NO: 2977 - DNA, 473 bp, Homo sapiens
gaataatgagtgctgaagcccaaggaaagcatattgcatgccaggaaatacagtactgcagtatagtttaggcatagtctgtttataggaaactattaagggctgaaggactgagaaagggcttcagaatttattttgaaaaatttagaaattcatggaaagcagtaatcaggcaagaaggagaatcgatgtgtatttaagagagatcactctgtgaccactcactgtggagaatgtcctggaagtaggcatacctgaaattgagcattgtttgggattgaattccagcgtgcgggcccattcctgtcagtgctaccatagactttctgtatgaagtagtaaatgtggggtagaaagacctaggattggttcaagttctgccacgtgctaatcataggactttgagcacttttcttaatctcctaaggttcagtttcataatctggcatatggatttaataataatactcatc

SEQ ID NO: 2978 - DNA, 541 bp, Homo sapiens
gtagcattctccattctgcatctgagaacactttgcttagggcatttttttaaagcaaggattttgacaaagcagacaggagtcgttaggggagtgatcaaatttgaaatcttaaaatttaagaaactagtggaggaattggatagtacatgatttcaaaaacatgaaaactgaggacattaaatgtgcaagggttagaagtttgtcgcatgcaaaggggaaagtgaagatagcattttttcacatagtttcagagtccagttgctgaggttaatcaatgaaagttgtagcatcaaaggtttaacataaaacaacttcctaaaatcagccaggtgcagaggctcacgccggtaatcccagtgctttgggaggctgaggtgggcagatcacctgaggtcaggagttcgaaaccagcctggccaacatggtgaaactccgtctctactaaaaatacaaaaaattagctgggcatggtggcatgtgcctgtaatcccacctactcaggaggctgaggcaggagaatcacttgaacccgggaggc

SEQ ID NO: 2979 - DNA, 573 bp, Homo sapiens
atatttcacaaaaataataatcaattctgattgggtaggctttatcctgtgatgatgaggacaaagcactgaataattttataatcttgagtactgcctactgactttaagataagtgaattaagtcagacacagatagaaaatgatgcattgacctcacttctgtgtggaatctaaaaaaagtcatatagactggatgtaggctattggtattttttttcaagcaaacaaaacattaaaacacattctaaggctgcacgcagtggctcacacctgtaatcccagcactttgggaggctaacgtgggtaggtcacctgaggtcaggcattcaagaccagtctggccaacatggcgaaaccctgtctctactaaaaatacaaaaattagctgggtatggtggcacccacctgtaatctcagctactcaggaggctgaggcaggagaatcgcttgaacctgggaggcggtggttgcagtgagctgagatcgtgccattgcactccagcctgggcaacatggtaagaccccatctctacaaagaatatgaaaattagccaggcatggtggtgcatg

SEQ ID NO: 2980 - DNA, 359 bp, Homo sapiens
aggatatttttgctgactgcataattttaatgttctgtaccagagacacatggtcccttggctagaattatgcataactttgattgttttgagcacacaactgtgaggtcagtgacaacaataatgacaaataatattcaagtaacctcttgctgttaatactgggttttgtggccaggcacagtgcctcacgccttgtaatcccaacacttcatgaagccgaagtgggcagatcacctgaggtcatgagttcgagaccagcctggccaacagagtgaaaccccatctctactaaaaatacaaaataattagccaggcatggtggcacacatctctaatcctagctactcgggaggctg

SEQ ID NO: 2981 - DNA, 614 bp, Homo sapiens
tgatcttggttcactgtaacccccgcctcctgggttcaagcgattctcctgcctcagcctcccaagtagctgggattgcaggcacatgccaccaccccctgctaattttttgtatctttggtagagacggggcttcaccatgttggccaggctggtctcgaactcctgacctcatgatctgcctgcgtcgaagtttttctttatgtagctgctacccatttgtcctactggccccatccctttaggaaaccaacctaatttctcttctaaagagcatcttagctgatatctgaatctactgaccatttatttacccctatgtctccaaaggggaaaagatttgaggtgaatctaaattttccagatggtagatgattggctctatctataggagatcatcaggaatggtagaaagagcatgggttttggggtcagatgcttccaggtgtgaatctcccaaaccttagccctcttgcaagtcaatttctcagagcctccagttcccgatctgtgaaacgagaccatagcatctcccttgtagagccatagtggggattagatgagctggtgcgtgactcacaaagttactggcatggcacaagcattacaaaaat

SEQ ID NO: 2982 - DNA, 475 bp, Homo sapiens
ctagcaggtggcacataaaagctagcttcagacaacaatggtttgccaagcaatttcccaggttatttctgtcttgtatattatctattaatcttattactgttccctggtctccctgattttttggctcatcctcttggatctgaactgttagaactggtttgctggccattggctccctactctgcttctggcattgctttttctctaacatttatatcttctccagccacggaacagaccccccttcctcaaaaattatcgcaagaacatacaacaggaatataatacagtctagcctggacgcattaaggaaaagaacagataaggtagggaagagacatctgctaaaaagtgacatatcaaatgccccctgtgtggatacatttcctagcttcacttttatgtatggtgcctgtcacatgcctaaacgtggaatatgtagcgtttccatgttggcgtggcaagcatttat

SEQ ID NO: 2983 - DNA, 494 bp, Homo sapiens
agagaatcactctaaagcagtggttctcaacctggctgcacattaaaatcacctgggatgttttaagtctcagctcccaggcttcaccccaggttattatatgaaaatctggggttgaaactcaggcatcagtgtatttcaaagctcaccatgtgattccaaggtatgtgcatatttgagagcctttgccttaaaagaaggagcaggtgactcatactagcaagatagtgaacagatcaccaggccagccttgtgggtagaaataatcgtgacactctgacactgttctctactaagttaatcaacatgtttaccccatgtactacataaaaattacttaatcagcccgggcgcggtggctcatgcctgtaatccctgcactttgggaggccgaggcaggcggatcatggggtcaggagatcgaaaccatcctggctaacacggtgaaatcccgtctctactaaaaaaaaaaatacaaaaaattagctgggcct

SEQ ID NO: 2984 - DNA, 630 bp, Homo sapiens
atctaggtacttttataaaatcagattttaaaaagtggacatagtacatccagtctagtagatcataccatctactgtcatgtaatatggcaaactgtatcattgtcacttcagtagctctgtcaaaagtgctggactggaaggcaagagatccatgttcttaacctgagtctgttactaattacacacatgaccccaggcaagtcacttaaccttttatggtgtcagtttcctcatctgttaaatgaagggattagactagattatttccaggactccttccgaaaaagtacaggagagagttgtataactgaaaggcagaaagtggaataattgaggcttggaattcagggtgacttaaaaattactttaggctggacatggtggctcacacctgtaatcccagcactttgggaggctgaggtgggaggaccacttgagcccaggagtttgagacagcctaggaaacacggcaagaccttgtctctacaaaaaataattaaaaaaaaaattagcctggcatagtggcacatgcctgcagtcccagcttctcaggaggctgaggtgggaagatcacttgagcccaggattacaagactgaagttagctatgttcacaccactgcagtcc

SEQ ID NO: 2985 - DNA, 607 bp, Homo sapiens
gacgacagagggttaaattattgatgagtaaagagaaatcatcttagaggcttagggcacaagagatcctatgaaaagccactatggctattctcataagagattccattttgagcaaagttgcccagatggagatgagggagattgtcaaagtttaaaacattatacaacgttggaaaataagattaagacagctagtaactttgaagatatctgtttaataatcacattaataacagtaagtttggagacaacaagccacccaaattctcatgagatccatctatgtttgacttaaatgatcaaaatgacttgagatatatgaaattaatttgccaagtctatttctgtaatcttcaggtcatctgctacttacactgaccaggtaactctagctttgttttgaaagaaggtctgatggtgaaattaaataacaagttaggatcaaggagaccatttgagagagaaaaggatctaaattctagttctagaatggaatcccagacataacatataactgaccccaattattctttagctaaaaggtatccttttctacaacaggattgcagtcattcttttccaattgactcagcaatatataacc

SEQ ID NO: 2986 - DNA, 471 bp, Homo sapiens
ggctgccagccttgtgtgggacctggaggaggaaagggcaccattgatgccatctgctccttgggccatatgacctagccaacactgtgggaagagagcagagtggactttacttacgccccagtaggggagtcacagtgcaggaccggggtctaggcattacatccatccagcgttacatgcttcagaaaatatctttgggtgggttcctggaccctggtggaaatgggtcacatgaccatgtagtacaatgtatgcatgcatctagaaatgtccattttgagctgggtcctgtcaaacctggtaagttgcgaggcccagaagcagtccattttaagtgaaagatggaatatcccaaatgtatgcaggcagagtgcacggacacaccgcatgaaccacagaccttctaccacactgtccctagcccggctaatatctgtggacatatagggtagagttcttacacagtag

SEQ ID NO: 2987 - DNA, 476 bp, Homo sapiens
tctatggcttcctgtgtacgtggcaatatgacagatgttatgacatctgaaaatatccacattgttctgacttctaattgggtaagttgtatttaatatcagagatatcacccatatgtaactatctgacttggtttccaaattaatagacacacagaaaagccaacaagtgttcctaagttatctacgagtggtgactgacaaggcaaatgtgaatgttacgtaattcaaatcatgagcctaaaatgaatgtgttatttttttagggaaaataccagtgttgttttaatttttacttttttccttattacccattttaaccattggcatgaatacactctaattttgaattaatggtttcttatgtgagttctagaatactatttctttttctttctttctttcttttggtttgagatggagtctcactctgtcgcccaggaatgcaatggcgtgatcttggctcactgcaacct

SEQ ID NO: 2988 - DNA, 558 bp, Homo sapiens
atatattaagctcttattactatttgttgaattaatgataatgtcatatgagactcatagaatcaaagaatattcagtttgagagctacaaaatcaaaagacctttataagcaaaccggcctgtcttttgtaaaaggtacatatgttatcaacgtgccttgcatttaagaagcttattaaacactgtgatgcaaaatctctccatttccttctccatcagctgcgtatttgtatatgtgtatgtatgagattgtatttctttcttaaaagtccttgtattaggccatttttgcgttgctctaaaggaatacctgaaattgggtaacttacaaagaaaagaggtttaattggttctgggttctgcaggctgtacaggaagcatggcaccaacatctggcttctggtgaggcttcaggaagttttcaataacggtggaaggtgacagggagccagcatgtcacatgatgagagcgggagcaaaagagagagagaaagggaggggccagactctttgaaacaaccagatatcacgtgaagtcagagtgagaattcacttat

SEQ ID NO: 2989 - DNA, 579 bp, Homo sapiens
tgagtctgtttaatgtgttttcatgcatgcaagtttatctgcttagctcaaactgtttgaacttacagtcccatcatagttatttccaatatttttgaaaacaaacatatacttacacatattttaaaaaatcaccattctgcaatatttctgttgaatcagaccttacattatgttgtttaataaagtatggtaagttttggcatgtatgatttttatcatataagaagcataatttcttagccaaaaatttagcctttgactctttagtagaaagttgagttctgtacattgtgctctaaagatagacaaaaatctagagattttcttctttcaaagtaaaagcagatgaggcctttttccaccctctgaggcattaaattgctttgctcaaggttagacttttaatatatctgactaatttgataaatttatctggcaatttatgtaattcagcaatatggaattgtatcatgttatatggtgccatgaaatgctagtgaatgccacctcaagagctctggatgaaacatttaatatgtcttggttggtttgactcccattatcagtagataatgc

SEQ ID NO: 2990 - DNA, 545 bp, Homo sapiens
attttcttgatcctaggttaggattaaaataatttaagttattaaatcatttcctctcacaccaagcctggcacaaaatgcacaaagtgagaagcaaagtggcaaagtgtcccaagaatgctgccaacagtgatgcatagctccatgatgagatgttgagagcttcactggggatgcaaactccaattagagaatttgacactggaagagaattcacgacttgttctaagtcacctttcctctctgacctgggttccctcttatagaataaaaatagtgtgatccaagtaacttttgatgacagtatttagacaacatgtcctcacactaaaacttaaaaaaaaacaaaatactgaacaaatactgaactctagttaataaggtattttttcccccacaaagccatgggttagcaattctgaaactaggactgaataaataaataatataccgaggaacatgggagccagtttccccactggtagagaaaggagttacaaatacacgagaaggaaggcgagaatatgctctgtaggacatgactg

SEQ ID NO: 2991 - DNA, 556 bp, Homo sapiens
aatatatgactataaagactatgagtgataatattctgtagtgggtaaacattgagttctaatgaagtaataatccattcagcaaggggaggttggttgtaaaaggcttcctgttccccaacttctaactgcttccctctagatctaacccatatacctcctacccaaacttggcatgtctaccacatctagtaacatctgccatgccttgcctttctcttctcccagatatttttttaaaatctatactcatcaagttcccgaaggggacacacttgcttctcactggggccaatacacaaaaccatagggatttccctccccatttcctgactgcctgggaaactcatccttaaagaacctgctctagggttactactgggcaatattgatccctcaggcaaagggatcatgaccctcctttagctgtcccctagtccctgctctgccaccttcttgccatgatttgtacttttcagccctctttatagatccattttacctgtagactgtgagatctaaaggcaaccaccaggtcttagttcctttatattgc

SEQ ID NO: 2992 - DNA, 504 bp, Homo sapiens
gtttgaacattaattagcaggcggtccatatctgtgcaggtgcatatgtttgtgtatgtgaatctgtataaccaggacctaataggctgatttagaattttctaaatatagtctccatgaataaattatatataataatgtgccaatttttgtaattttaaacttgttacttgcgatttttagcacagagtaaaatttaaaacaagagatttaacagaacttgacaatagaatttattgttagctattattgttttgtgccaatagtaataaacctaagcataattcaggatagtaaatgatagtttaaaaataaaaaagataatatgtaaaattactttaaatggcaaaactcattttttctctacgatgcacaattatacatatttctaacaaaaatttttaatatggatccttcattttaaaattaaagatggtttagagacaagtttgtttccagaacagagctctcaaatacttggtcctattcacagaagtcttgtaa

SEQ ID NO: 2993 - DNA, 569 bp, Homo sapiens
ggtgaaggggaggcaggcacagtcttcatatggtggcaggagagagagagcaaaggggtagaagctacacactttcaaacaatcagatcttgtgagaactctattatgagaacagcaacggggaagtccgcccccatgactcaatcacctcccaccaagcccctcctctaacactgggcattacagttcatcatgagatttgggtggggacacagagccaaaccatattagtgtctttacccgtgaacatgaaataataagattgatgtaacaggattactgtgaagcttaaatgagatgatgcatgtaggtgcctagaactgcctgccactctcgaggacctcactaaatgcaagttctttatagtccttcctcacagttagcatctggcctggtggtgcacacactaacaggggggtttcttataaggacacaggacaatctcatgaattggcttcctgcgtgtggctcttggtttgttcttccccataatggaggcccgtctgtgacttcatcttgcgatggtgctcactccagctctgatattacatgctcttgcacctcagctc

SEQ ID NO: 2994 - DNA, 578 bp, Homo sapiens
acacatatgtatatgacatttttcactaaataactatggtattaagtgaaattgataaaaattggctcaaaagctcatgctacagccagttattagggtatatgctaggaatttatctaatgaatgaagatgttacaaattataatgtttaatcttcatatatggatttttaatttttttccttatggttgcattcagagatttacatggaaaataccagagtggataatatattatttgatattaaagtttaaaactaaagtctaaaattgtgctttaaattctgattaaaatcaggccgggcgcggtggctggcatctgtaatcccagcactttgggaggccaaggcaggcggctcacctgaggtgaggagttcaagaccagcctgaccaatatggtgaaaccctgtctctactaaatatacaaaattagctgggcatggtgacgtgcgcctgtaatcccagctacatgggagtctgaggcaggagaattgcttgaacctgggaggcagaggttgcagtgagccaagatcgtgccattacaatccactctgggcaaaaagagcaaaactccatctc

SEQ ID NO: 2995 - DNA, 589 bp, Homo sapiens
cagtgggcacaccaggacccttccaggcagatcgggtatgtggtcatccgcccattgcatagcatgtgtgggagttggggagaccagacatgggtctcgccacctctccactggcccgacctccctgcaggcccccaggacagggttagcatctgcttgctggcaggcctggccaccagagattttttcttatgtctaaggtccctgtagttgtggttcacaggatgggggctgctcctgagattcagcaccacacaggcactgcacagcactgtgccatggtggtgggcactcgctttccagatagggcccatgttgccagcaggcatgatgcatcatttaccctaccttgagtgcaatatgtggttttatagaaaaaaacttgggccaggtgtggtggctcacacctgtaatcccagcactttaggaggccaaggcgggcggatcacaaggtcaggaactcaagaccagcctggctaatatagtgaaaccttgtctctatgaaaaatacaagaattagccagatgtggtggtgggcgcctgtagtcccagctactccagaggctaaggcaggagaatcacttgaacc

SEQ ID NO: 2996 - DNA, 621 bp, Homo sapiens
tatacttttctagtatatactttttctgtctcatacgattttttgtattattttccagttatctagatacataaatataaaatatttatgtttgctattttaattaatagaatttggcatattatagtagtagatggttaattaagtttgctgaattcaattttgaatggatcttacatctatttcactgtactgaatagttgaaagaaaatagccataaaatagatattggtgcagccgaagtgaaaaacaacatctaagtctccatctttcctgtgattttctgtcctctttctagcctctccctgcctacctttccgtgtgaacaagtgcacacctatcttgtttgaggcagataatttattatcataggcaagggatattagagtgataagaaatgatgtcacccttgggccgggtgcagtggctcatgcctgtaatcccagaactttgggaggccaaagtgggtggatcacctgaggtcaagggttcaagaccagcctggccaacatggtgaaatcccgtctgtactaaaaatacaaaaattagcttgggtgtggtggcaggcaactgaaatcccagtgactcgggaggctgaagcaggagaatcacttgaacccg

SEQ ID NO: 2997 - DNA, 615 bp, Homo sapiens
aaaagaaaccaagaatagatgtgaggccaggtatcgggtactgacagcagagaggagcctcatcctgtcaatacactcagtattgttccaacccagagcagcaagctttgatgccccatagctgccagccactagtgaaagggagatacaaaatcccagacacttacagctctctgtgcataaaggggcaatcgctccagcaacccaagggtatcattctgaaaaagtgccccaggtgctagccatcaaaggtggaagcatattaaagccaagatgggagtcctaaaaatggttaaaaatgagccaatagcacagtacttgcattctctcctaccgaaggtgaggatgaatcagtcactcttcttctggaagtaacatatacttcctctgattataagatttaatatattctggccaggcacagtggctcatgcccatggtcccagcactttgggaggccaaggtagaaggattacttgaggccaggagttcaagacacgcctgggcaacatgacaagaccctgtctctacaaaaaattaaaaaattagctgggcttggttgtttgtgcctgtggtcccagctactcgggaggctgaagtgggaggatcacttga

SEQ ID NO: 2998 - DNA, 567 bp, Homo sapiens
tacaacctccacctcccaggctcaggtgatcctctggcctcagcccctcaagcagctgggaccacaagtgcatgccactacacccagctaatttttgtaatttttgtcgagacagggttttgccatattgcccaggctagtctcaaactccttgcctcaagcaatctgcctgcctcggcctcccaaagcgctgggattacaggcatgagccactgtgcctggcccccagatttttttttaacagaaaacaaagatttactacaattagttgtttctttttatttcttctaatttaattaataaacaatgtagaaaaatatcaaggatattcatgaaaatggagaatttagtcatttgagaaacctagtattaagaaactgcatctcataaataccacttaacacacagcgtttccttaagatgaggcaagttctcttaaggtcaagagatcagctcattcttcacctcagtattccaagaaacaattagagactctgaacagaagcaataaaatgttgattctgaattattcattagttcatgaatttaccatgattctacctcgac

SEQ ID NO: 2999 - DNA, 516 bp, Homo sapiens
actccaacctaagtaacaaagtgagactctgtcactaaaaaataaagtggaagacttctctacaacagtgagaatgaaacaagtgagtagttctactgtcctttcatcatttctgagcagtttgagattatcaacaaatgagctcactgattttgcagacatccttatgttttgaatatgtttcatataatttattattggtttaagaatcatttccttttaagtaatttttttggctcagctaatatcttagtggtacctacctttccatactttgtgagctttcttatttttacttgaataatatttctaaatatacttgtaaaaatgtaaatgttaggctgggcgcagtggctcacccctgcaatcccagcactctgggaggccgaggctggtggatcacgaggtcaggagattgagaccatcctggctaacacggtgaaaccccgtctctactaaaaaatacaaaaaattaagctgggcgtggtggcgggcacctgtagtcccagctacttc

SEQ ID NO: 3000 - DNA, 564 bp, Homo sapiens
gagggagaagggggagaggaagactgaagagagaggcaagcatatttgaaaatgcctaaaaagaaatcaacaacacattttggagtttgacttgaaaaggagggttgatttatatttcctaaaaattattgaattagaaggtaggagaaaaaacctctataataacagagctcagctcttctatgtttttgcacagaatgtgaaaagagaaaacagagaaacgtgtctgagaatttttaaagagagaccatgcatttgtgtatttgtgtttgggagggagattgaacaaaagagtgctgaagttattagaaaacataccactgtcctgaaagtaataatattgtacttcaccaaatcacaggcactactaattgtatcagacctgatcttttgaatgctgaaatgtgaaaacgtgatgtcttaaaattagtgagaagccacacacgtacacaccatggctgtgtgtctaatcataacaataaatagaaaaatgggaccacaagaagaatagatggtatgggagatttatgggagaaggaggagagaaaaaaataagaggagatg

SEQ ID NO: 3001 - DNA, 571 bp, Homo sapiens
tttattttactaaggccatagaaaaccccaagatatggccggggaaataagtcagtagctttgattttcctatactttatagatattgttaaagttgccattgttgagtttagacaagaacaatatcattaatgtctgatttctcactcttactttttttgtctctcgtcttcattcctctggttgaaaaggaaggactcagaatttgaaccttcactaaatcatatatttcttctatcttgggtatgtttgcccaagtcattgttggcaaaaggaatctcttctctgttcaatgtaaaacaccttgtaattggatcctttaggtttgatttgtggtctgctaagcgggaatttatctattaacatgaactaaattttttacttttaccttgttgcaaaatccaacttggatatcagaagcttaatgtaaactccacctctgtatgtaggagcagtttaagagcacaagctctgaaacgagaccactgaatttggatctccactctcacttactagatttgtaatcttgggtaagctctctatgcctcagtttatctataaaatagtaata

SEQ ID NO: 3002 - DNA, 587 bp, Homo sapiens
gacttagaatatctggttctatactcttgttctacggatgagaaaactgaggcccagagaggtgaggtgtcttactcaaggccccacggctagttagagggagaactttgaccagaagctgagtctcctgtctcttcatctgggttttcccactgcacaatgctgccaggccctggctctgaaactgaccacattaatgaactatttcaacaaatgcttgaggagactccatatgtgctagactcagtactaattgacatgatgctagtcactcagcctctagagccaacagccatcatacctgccatcaaggaactcatggtctagtgggagatgcccctggcctaagcttatttttaaagaaataggagataggctgggtgcagtggctcacgcctgtaattccagcactctgggaggccaagacgggtggatcacatgaggtcaggagttcgagaccagcctggccaacatggtgaaaccccatctctactaaaaaatacaaaaaattagccaggcgtcgtagtgggcgccagtaatcccagctactcgggaggctgaggcaggagaatcacttgaacctgcta

SEQ ID NO: 3003 - DNA, 614 bp, Homo sapiens
ggggtgtctttttgtcctgcgctgtcccgttatattctactctcgatttccctgtggaataagatttagactggagctgtggtttctgcctccttgtctcccatccttttttgttgttaagaagcccagacatcttgcatcaaagttccctcttttcctataggtttcattctcagctcagagctattcctctggagggagagccagggaggaggcattaggaaaggagaggtgggaagggggttgctagcattcccacctccacactcttggataccaacaggaaccagggtagtaaaactgcacctcccaggcctgtacctctggcctcaaccacagcaaccagaaccagcttgttggctctgctttccagcaagccaccctgcctcccctctctagcaatccctgccaactcactccaccacccaccagctccctgtcatctggaaggccagcccccattaccaggaacctttcatttgcctgtccctgtgttggatctggtgctggaagaagagtatggagagatggcagtcacaaactccagggttaccagtaatgacaggggagcatatttccttctttatcttcgtgaaataacccagtagtttaag

SEQ ID NO: 3004 - DNA, 511 bp, Homo sapiens
gggcatgagtgctttagctcatatcactcagtttccagcagttaatgaacaaaacaaacaggtgagaaatttaagtaaaatccttgcttagtatctgtggagtgggaaattggttccaggatcctccatggataccaaaatcctaggacactcaagtctcttatataaaaatggtgcagtatttgcatacaacctacataaatcctcctatattttgaatcatctctagaatatttataatatctaatgcaatgtaaaattttttattggtgtattattttttattgttttgaagtatagggtattttttaatccacagttggttgatccacagatgaggaacctatgggtagagagggccaactgtaatgatgagaaaagaaaaagatttacagaagactaaccaaggtttatattttaaaatgagaattaaactccactgttcccatcccacctacacatacacaagttttaaactgaaggtactttgcatcagttggataaacaggcc

SEQ ID NO: 3005 - DNA, 601 bp, Homo sapiens
attaaaggatcagggatatgaacactagacacagaattctgattctgtatcaccctgtgatcccagttcaacatccatgagatccaaatccagagaggtaaagaaagaaggaaaggcagaaagatggcttattagttaaatagatggaaagcaagcatgatgttgttagtcaccagtcaacaccttgtgctctggacagatctgttgctcaaatatcaaagaggaaacccacaacagccccttgtcagttctgtatccccatattagttttaatagatcagttttttataatctatcttatatcttccttctcattgtatacctgaaatgacctaaccagcagctgagagcacatacatcttattctcagagattctaaacagcaacttcctttatccaaaatatacaggaatgtaggagcttggtaaggagctcttgttcagcccaatttacagaacatcaggcatctctccctgaagagacacttggaacagggtttgaaaaatgcagcagtctagaaactagtaactacaggaatattaatactgcaaaactaacaatctaagcatgagtaccagctgtgaatgaggagtcacatcat

SEQ ID NO: 3006 - DNA, 414 bp, Homo sapiens
tggcatagtgagggaggctgggacccaggtgctagagtgactgatggctagcaggaggttgggagatgatggtgttgagggaggagtagaacggtggttggcaaggatggcatgggcatcaaaggaatggaagttttttatggaggtgaaagagcacaggttggaaagagcaataggaatgagcttggggaacgcactctgcttcttgccctgtttacttataaagaaagtatgtgtaatcccagcactttgggaggccaagttaggcagatcacgaggtcaggagatcgaggccatcctggctaacatggtgaaaccccatctctactaaaaatacaaaaaaatttagtgaggcgtggtggtgggtgcctgtagtcccagctactcggaaggctgaggcaggagaatggcgtg

SEQ ID NO: 3007 - DNA, 332 bp, Homo sapiens
gagagcctggacagctcctcctctccacctttcagagggcaagtgtttgtgaccgaggagcatctcacagtctaacagcgagaaaacactgctgacagcttacaagccacacacacactcacactcacacatacacactcacatactctcacacacactcacactcacacatacacactcacatactctcacacacactcacacatacacacatgcagacacatatacactcacatgtacacacaaacacacacgcacactcacacatacacactcacatactcatacgctcactcacccaccacattaacaacataaaaccctcattcaca

SEQ ID NO: 3008 - DNA, 353 bp, Homo sapiens
gctcattttcctgagtgccaacccttttcctgttcttgttactgttttattaggtcattggtcaaccatgcttttaataagatgctttaatatatttctttcagctctttacagagggaaggctagtttgaatcacctagtccaccactactaaaagttagaagtccttcatatgggatttgtgttgttttgtaatcattttcctgccaatatttaaaaatcaaatttcatttgaaagtccagatatcttgctccttttaaaatcagaaaacctggcaaccttgagctcacatattaacaatgcaataattaaagacagctgagcatcaccagagtgcccaccatgctctatt

SEQ ID NO: 3009 - DNA, 504 bp, Homo sapiens
ggtactgtacaaaggcatgaataccaggagtcactgggaactatgtctaaagctctttacctcaagagccccagttagtggccaaccacagcagctacctaaactgatttgatgaatggaatccatttaggagaatatctgtttaaaacaatcattcgagcttaggcatagttgatatttgataactgacaagaattaaagcaaatgtttcttaatgctactcttttcgtgaaactgaactaaaaacagagaaaatctgcctgacatctaagtaagtgagaatggtttgttaaatactgcagtgttaataagctaagtctctagcttaatatagatttttctctctctgcttttgccaaaataaaatgaaaggccaaatgaaaaatgacttaagataagtgtttataaactgttcatttacctgctaaagggaacattaggaatgaaaggatagacagcaaccctagcccatattaaagcttcaaaaagtaatacgtacagcta

SEQ ID NO: 3010 - DNA, 527 bp, Homo sapiens
catgaccatcttaccaattgaggagttatgaacccctgggtaatcaattgggtcaaggtggctccaaataccaaaagacattgataggatactgagaaatgtaaaatatccatcattagaacttaagagctaagtatatccaggcctcacttaaaaacaatacagatgtgttttaatgcaacatgtttttttcctgactattgattcttggaaaataaagtttcttcccaaacacctgcatcagctccagactgattaatatgatggtcctctcaggaggtgggaatgggtattggtttaaggatgattagtccctatttcatataagccatactgatcagataaattgttggcaatagatccctctcatataattgcattaatagaaagcacatggaagagagccatttcaaggtccaacagctctgtgaggtagatatgattcttaatcctacctttcaggtaagaaaaccaagatttaagagagattggctaacttgacaagataatcttcatttcttatcttc

SEQ ID NO: 3011 - DNA, 419 bp, Homo sapiens
atttgtgagtttttcattgtgctttaagaaattctcatagtggaattaggaggactttggtttatccacaaatgctcaataacttctaggtactacttatccttccctttcgtaatccccctttaaagaatacacatgtgcacaggctgagtgtaaatgtgctttcccaagacagatgccataagtggcacgtgggaaaactgaaatccttttgtttttcaagggacagggtgtgaaatattagttctttttctcttttatcagaagctagttttgagttgaaagtggcataagccggacgtggtggctcatgcctataatccaagcactttgggaggctgaggtgggtggatcacctgatgtcaggagttagagaccagcctggccaacgtgatgaaaccccatctctactaaaaata

SEQ ID NO: 3012 - DNA, 363 bp, Homo sapiens
agctgaatcacgaaagatgagcaggtagacacggagagtggaagcgtttggggtagagggaatcgcagaagcacagagggaggccaggcatggtggctcacgcctgtaatcccaagattttaggaggctgaggcgggtgggtcacatgagctcaggagttcgagaccagcctgggcaacatggcaaaaccccacctccataaaaaatacaaaaaatagctgggcatggtggtgtacacctgtagtcccaggtacttgggaggctggggtggaaggattgcttgagcccaggaggtagaggctgcagtgagctatgagggcaccattgtactccagcctgggtgacagagcaagaccctgtctc

SEQ ID NO: 3013 - DNA, 373 bp, Homo sapiens
ggtaaatttacttaaataatttttcttaatgtgatataaaactgtgtaatatcacaaatattaagacattggactagaccacaaagatttaaaacttacctttaacattgatgtctattcctggcgaagagagaagaagaatcaatttctccacttggttatttatgcaagctctatgcagggctggttctcctgccataaaaaattaatagattattccagagaagacaagatatcaactaaaaaaaataatcaaagggcatgaactaggagatctggccccatgccagaaatttatttattgagttcttcttttgactgggttaaacatcccctgcatttaaaaaggcgggggtggggggtgggaagggga

SEQ ID NO: 3014 - DNA, 451 bp, Homo sapiens
catgcacatggtttgatttcataagtgagaggttggcctatctgggatgggtgaggatattcccttagcccttgcacaggtcatcagtgaagctcaggcagcttgaggggataaggcaataggggaagtgcttcttaagtgatactttttccttggtgaggactctgtttatgtttagtttcttatgtgacataatgaattaggaactaaaggcaatttgaagatttgtgccctatgtgcagaacagaaatttaatgtatgaaagcaaaccacaggtcagttaggagagttgatcaatattgatattgctctttaatgaaaggaaataaccctgatggattttccttgggattgctgatgagtatgtatttgtactcaacacatggggcttttcattgatctcagtcaaattaaaattttattaacaagtcagacatccatctgtattttt

SEQ ID NO: 3015 - DNA, 137 bp, Homo sapiens
aagataaccaaacaatactccagaaatgttttgaaaaatatgataattatatgaaaaaacagaaagttcaagataatttaatgatataataaaccgtattctagagaaaactgacctagagctgtccacattgagac

SEQ ID NO: 3016 - DNA, 543 bp, Homo sapiens
aggttaagccatcactttacctttgtgtaaaactggtaatctatcctaatttcaaagtatcctgttactataacagataatagtacattatattcaagtatgaattcaaaaaaatatatatatatattttatgttcactgtatgtgccaagcctaatatgagagctatgtattatagagtttatgctacagccctaccttcaggaaacttatctactggacaaacaaaaattttcaaatatacaaaaaattctaaatcgaacattgtaattatctagcataggcaaatatagacagtaacagacaggtttacaattattaagaaagggcagccaggtgtggtggctcacacctgtaataccagcactttaggaggccaaggcgggtggatcacgaggtcaagagattgagaccatcctggccaatgtggtgaaatggtgaaaccctgtctctaccaaaattacaaaaattagctgggcttggtggtgcgcacctgtagtcccagctactcgggaggctgaggtaggagaagcgcttgaacccg

SEQ ID NO: 3017 - DNA, 367 bp, Homo sapiens
catccctttccaaagaaaatgggcaagcttgctatttaatacagctagaccttctctcactaagaattgaatgattcttcagtggaaaaaagaaaaaccatcagggctttaaatgttctgatgaaaccacattttatcatgtaccagataaagatacctggctactgagacaggtttcctaagttacctggacagtaatgacaagactcacttgtttattagagtcagaagataatctgtccttacgcattttcaaaactatcatgagaatattttcagtgaaacagattgcagaaaagatagatcttagaacgtaatcttaatatcagctgtgagcattaatagacagtcactgtaagaactggct

SEQ ID NO: 3018 - DNA, 488 bp, Homo sapiens
tggctccttgcttctaattgttgcatagtattcttgagtgtccacccattttataaattcatcccctcaatgctggtaaacaatggcctctaactcccagctactgcatgtaacattgtaataggcatcctcattcatatctcctttaaaagaggttctccttaatcatttgaagttgtcagaatctcctccacctagtataaccaaaaagatatctaatttagagaattcattatttttttaattactattatttttgattgacaaatctttatatacatttttggtgtacaatgtgatgttttgatatatgtatacaatgtggaatgatttaatcaagctaacaaacatatctattatctcatttaccaatcataaaaaagattgctaaatgagataatagatatgttcgttagcttgatttaatgatgcgttagatatttactgtctttggcagggtgcagtggctcacacctgtaattccagca

SEQ ID NO: 3019 - DNA, 556 bp, Homo sapiens
cgcgacctcagatcagacgtggcgacccagctgaatcttaagcatattagtcagcggcggagtaggaaagcagaagcaccaaagattcaagcctgggccgttgggaagcctgacgctcttacccgacctcccttgagtgctgcctcccttcctgctgcactgatcccttctcaatgtccctgcttctcctgccctcatttcaactgctcatccgtcttcccagacttttctacagacgtgcggcattgcagtactgctcttgctgcaaatgtcagatttccttggtcagatttgcttattgtgggactttctgctgagatatatcagagatgttacaactgcgagaaatgcaggcagttctctgcgatccatctgccatgcaatgacaagagatgcttaaaggctgtctggtagaactgccttctttagaaacctgagggccgggcgcagtggctcacgcctgtaatcccagcactttggaaggccaaggcaggcagatcacgaggttaggagatcgagaccatcgtggccaacacggtgaaatcccgtctctacc

SEQ ID NO: 3020 - DNA, 316 bp, Homo sapiens
tcagatggagatggtggttgacaacattgtggatgtactaaatgccactaaactgttcgctttcaaatggttgattttatgttatgtaaatttcacctcacattatttttaaaaatgatggcttttaaagaatatttactgacataggaaaattcacaccacatacctattattaaaactggacttacaatataatctcaattttgaaagattaaaaatgtacatgtgagtttgtgcatatatacatacatacagatatgcgcgcgcgcacacacacacacaccatatatatatatatatactcatcctcctcccc

SEQ ID NO: 3021 - DNA, 268 bp, Homo sapiens
caataaatgtttctcaaaaataggaagactggaagaaggaagcattacaagctaagctggctgttcttccttggagaaaatgaagattggtaaataagtaataaagacagacaaggtcaattgtagaaaacggccaagtcttgaagtgagtggagcaagagagtttctctgtccaattctttgaagacagtttaattctatttctgagcaatcaaaaatcacatccagtgccccttctaccttctcatctccttcgcagatgtggatg

SEQ ID NO: 3022 - DNA, 641 bp, Homo sapiens
attaggtgctaggtagcatgcttttacatggactttgctctttaatcctccaaaattctataagatatgtatcaccatttgacctatgaggtagaaattgacaaaaaataactacccaaagtttatgcagatagaaatgataaagttgggatttgaatggaggtaatctgacttcaaaatctacactcttaaccactatactcactataccatctctattaagcaccaaaatttcttgggggttgggtagaagagtaaaccagatttttgttaaaaagaatcatgaatactctaaggtaagacttctgaatttaaaagccactcaaggttgagcatggtggctcaggcctgtaatcccagcactttgggaggccaaggcaggaagatcgcctgagcccaggagttcaagaccagcctgggctacatggcaaaaccccatctctactaaaaatacaaaaaatcagccaggcatggtggcgcacacctgtagccccagctcctcaggaggctgagggacaagaatcacttgaacctggaaagtggagattgcaatgagacaagatcgtgctactgcactccagccgcctgggcaacagagtgaggctccacctcaaaaaaaaaaaaaaaaaaaaaaaaaaaag

SEQ ID NO: 3023 - DNA, 346 bp, Homo sapiens
cagtattttcacaggacataatttatacttcgtattactttatgagattatgcactcatatcagcttttcagaaacagaacatttctacctacaagaatatgaagtacttttgatttttttttcaaagttcagagaacattttttctcattagatgttctccaatttaactttgacatgctttcaattttctttgcatgctgagaaggatcaaagccaatctttttatcactctggtatgtgtcctgagtttctgttcctaaaaaaagtaaaattcccttaaaataaaatgtcacaatgaagttggttaaaattattgagttttaattttaaggcaactaattttc

SEQ ID NO: 3024 - DNA, 283 bp, Homo sapiens
gcatgtcagaacttagggaggtacctcattttaaaaatggctgtaaggtgatccattatatgaatgcactataattattctagtcagtttcctattaatgggtcttttaaaatgtttccagaccattactaataacaatggacacatatctttgcttatgtgttagacacatccataggagagagtccttgagatggaattgtcgggtcaaatagtatatacattgaaaaatgtgaaagatatttctaaattgtgcttcaagtggctatcccaatgtgcattc

SEQ ID NO: 3025 - DNA, 388 bp, Homo sapiens
gtgactgagcatgggtgacccgtcactgtgctgccgacagcagaatggactgacagggcttccagatggacaccgtccctgtaagagcatcttaatgcctcaggctaagtcccatgtcagagtcagggcttagctaacttaacaggtgggaagctaacttaactcacggcatgtttacaagtgtgataacatttataaattctaaaataataaagctaattgtattagtctgttctcacacttctaataaagacatacttgagactgggtaattaataaaggaaagaggtttaatggactcacaattccacatggctggggaagcttcacaatcatggtggaaggcaaaaggcacgtcttacttggcagtaggcaagagagaaggata

SEQ ID NO: 3026 - DNA, 486 bp, Homo sapiens
gcactcattatctctaaccagatgattgacttcctacaaatcctccaaagcttgggaaattcaactggatgagaaggtgaaggattggccagttctttcatgtggagggagtgagggagtttctgtaggaaccttaactgtgatgtccctggctgatgcgggcttggaagtaacaacaccttgtgcttatgcagcctcctgcttctcagcagttcaagtgcttcccagacattatctcactatttctcaccatcttcttcggaaagtggctgaaggcagctcttgttatcataccccggcacaccctgcaccagtgggttaaatggttttcccacaaccttccagtgagagtcaggaccaggacccctgccaccagatttagctttccagcctgctcattgcctcatgcagctttcaggacccattatttgcctcaaggagaagggaagttcaccatcactgttacaacaatttgagacatttgct

SEQ ID NO: 3027 - DNA, 403 bp, Homo sapiens
atcttacgtgtctgtaaaggggagataatagtagcactgtctccaagttcttgagaaaataaacacctgaggacatacctgacatgtaaaaagtgcaatgttgccagcccttccggttattctgtttttatttaaattcaaaagaccaaggccaggcacggtggctcacgcctgtaatcccagcactttgggaggccgaggtgggtggaacacctgaggtcaggagtttgagaccagcctggccaacatggttaaaccccgtctttactaaaaatacaaatattagccgggtgtggtggtgcacacctgtaatcccagctactcgggaggctgaggcaggagaatcacttgaacccaggaggcagaggttgcaatgagctgagatcatgccattgcactccag

SEQ ID NO: 3028 - DNA, 287 bp, Homo sapiens
aaccaaatcttgataaaacaatgagaaccttaaacaatgatcctaagaatttccctgaagatgacaaaatctaaaatagatatctatgctttaatagagagtaagaagctaatatcatcataaaaaagatttccaaaatagcacatctatgttctttactgacacatatattccaaaactttgttaatatagggataagaatcacccaatcaacaaaagctgttaatacacatacatgtaaaatataaaaacattcaaatgctaattccaactccaaataggaggct

SEQ ID NO: 3029 - DNA, 355 bp, Homo sapiens
gtcaaaggtcagagatcttatcctgcttgcgagccaataagttagcctgccacagttttatagacatatagatttagctatcttgacaggagaaaaaatggtttttggataagacaaataagttattatttacagcaaaaacagccagagcagcttctttccggaaagaaagacgctttctggaacaatttccccagctccagtctccatgggccaacatgattgagagtgtgatattacttgtgcatgtaacagaaatgcatccaaggagaggaattctaaacttatgaggttcagagcttatatagggactgctgtatatatgcctattttcatttccagagagaaaaagaga

SEQ ID NO: 3030 - DNA, 531 bp, Homo sapiens
acctaaacctaagagctgattgtgtggaaagtggttttagccttggcagaatactaagtcatgcaattttagtgttagagtaagaatatcagagatacaacacaagcatttaaagaacagatggagcaaaagaggccttgtgaaggaacaatcagaaaagtttcaagaaagaaagagagcaatgccacgtaaattgtcaaaggagtaatttttaggaaaaaagagtgcttaacagtgtaaaatgatacatgaaaccaagaaaggcacctggacacgtattgttattgtggttgatagtgatggtggtcatggtaatcatgactattacttagaagtatcccaggataggagacagaatttcatgttagatattaagagacctgaattcatattctagcatgttgctttctaatcttgtcacataattgtgagccgcaattttcacatttgtcaataagatgatataacctgtcttccctactttgcaaagttgcatgagaatcacatgaaagaaaatatatctgaatcact

SEQ ID NO: 3031 - DNA, 389 bp, Homo sapiens
aaaatatttttgttactcatgtaccattatcactataaataatagtataaaaagttataaggactacattatataagtaataaaatatttttagaggaaaaacttatattttaataactttgtactttttttcctgctctttgaacaaggggctccaaattttcatttttcactgggccatatttattatgtcaccaccctgctcggagggtaactattctgaggttttgcaggaaacttcagaatgggtctaagattcccatcttgccaaaggttttcggtgatttcattgagtacaagatagtctatgtatcctgtagcccagagacaaggagcattataattatagcagctctattcttactatcaacattcttaggagttttggg

SEQ ID NO: 3032 - DNA, 91 bp, Homo sapiens
tttatattcatttattttatttaagcctcacaacagctcattcttacacccatttcacagaggcaacaactgaatcacagttgttcattct

SEQ ID NO: 3033 - DNA, 343 bp, Homo sapiens
cagtgcatatatttttgtcatgtgttgattttaatagatttattctgctgccatattttcttagctgtttaaataaaatacttcttgagcccttatttttttttgttctgagccttagtgaatactgtaactatagtatttccatttacctcaagtaactaaaattgtaaattactcaatattatgtggggaaaactatatatattatgcttttatatgttctcagatacattaaaaatgcaaaatttaccaaaccaaagatttggtaaataaaaggttaggatataattttctttcattctctttctttctttcttccttccttccttcctttctttctttc

SEQ ID NO: 3034 - DNA, 387 bp, Homo sapiens
tggtaaaactcattgcagcgttgaagaacttaactgacgtttcaccagatttggacatcaggctgaagatggaagaatcccagaaggaacttgaatcatatatgatgagggctcagcatttactggggcaaagagagagccccggtgaactcatttcaaaacacaaggaagcactaataatttctaatacaaaaagtctggccaagtatttgaaagctgttgaagaactaaaaaataatgtaactgaggacataaagatgtctttagaagaaaagagtagagatgtctgtgccaaatgggagtctcttcatcatgaactgtctttatatgttcaacaactaaaaatagatattgaaaaaggaaagcttagtgacaatattttaaaac

SEQ ID NO: 3035 - DNA, 600 bp, Homo sapiens
cctgatataattatttcaggttgtgatttaatcagcatataatctagattcaagagacactaattattgcaaattaagatgttaatagcttcctaaaatgctccttaagattaacataacctaaaatccctaagtttcttttatacatgatattgttatgatccattttcctccatgctattcttataaatatggctttttagacccaactgcaatactttacttctgcccttattttagcctgtcagcttctttggagattgagaatgtcaactaccctattctccattcctcccattatcataacatctataaatctgatgttttcttaagttcacgaatagatgtctagaatagacaggagtgaaaacagagccatacgatatatcactaaaaatcacctatgagataggcatcaatgaactaattggcattcttggtctgctaacttttttaactgtactatcatctgatccacatttctacacttttcccacaataataccatcaaacagagacaaatacttgtataccttatttccctgactcacaactctaagtagaagttgatttctggctaactcaagtatacttttcatt

SEQ ID NO: 3036 - DNA, 532 bp, Homo sapiens
aattacctttgaagttcagccatctcaagactaggaacatgggcttacacacacacacacacacacacacccataccacactagtcattggctataggcccctccagggagtgttaacctcccaggcacaactgcctctctgtaaatgtggacaaatcagctcttgcagtccttgggcagtgctctaaagagagtcactggagtgtgctgtcaaaagcaaaagggcacagaagctggggggagtgtccttagaaatggtaaaaagaatccaaagagatctgagaggagaaccccaaaatttccactaccatgaccaaagagggtggttatcatagcggtgaatctttcagctcttccaagagacttccctaattaattgagcagttggtcctctggatgaggaggagaataaatgagagacacatggacaacagcagggtcaagacagtatgtctttgcatcacacctttggaattggaggtgataaggagtctttcgtgtgtgtgtgtgtgtgtgtgtgtgtgtgtgtgtg

SEQ ID NO: 3037 - DNA, 661 bp, Homo sapiens
tgagtatttatgatgttgtaacagttttaattgaatataagtcaatggatcaatttcttgattataaatcttacaattagatttcttcaatcagcaagtaacttttggcagatttcagtaacattaatgcactttctagcttaaatgaaaaatggctgataaaagtccaaaagataaagtacataagtaagaacttacttggttaaaacaaaagattatttagagtaacattttatttatttagaaaaagaaaactggaaattagtattatctaaatttttaatatcttcctgctaaagtttagtgaattttcttatgtgaagtagacaccttaatcttaaagcaataattggctgggcatggtggctcacacctgtgattttcccagcactttggaggttgaggcaggtggattacctgaggtcaggagtttgagatcagcctggtcaaaatggtgaaaccccatctctactaaaactacaaaaattagttggaaatggtggcgcacgcctataatccaagctactcaggaggccaaggcagaagaatcacttgaacccagggatggaggtttcagtgagccaagatcacaccactgcactccagcctgagcaacagagagagactgcgtctccaaaaaaaaaaaaaaaaaaaaaaaaaa

SEQ ID NO: 3038 - DNA, 475 bp, Homo sapiens
ttttgagggatttttaaagaaaaactactaaatttgatgattgataacatctgtgcagtgggctgggcttgcagggagggttatgagacatggtgaggccagagtggtcaagtgactgaatattgttgagagtgagaagtgagaagggcaggagaccagaactgaggctgagagtgcagctataatgataaagacgggccaggcacagtggcttacacctgtaatcgcactctgggaggccgaggtgggagaattgcttgagtccagtaattcaggaccagcctgggcaatatagtgagaccccatctctacaaaaaatttaaaaattagccaggcatggtgacacacgcctgtgttcctagctactcaggaggctgagtcgggaggattgcttgaggctgggaaggggaggttgcagtgagccaagaatgcagcactgcacttctgcttgggtgacagagcaagaccctgtctt

SEQ ID NO: 3039 - DNA, 532 bp, Homo sapiens
cttacgcctttagatttgagcctttaggccatgatgagacctatccccaagtctggtactttgtcctgggctactgacacataattaaaactgcttgcttcctgggcttgtcactgaacataagggttactaagagtttacattgtaagtaatttatgtaattaagactactagacataagaaaagcaattttacatccaaaggctctaaagaaaacagaatgcacttttaatttaaaaaagattgtaagaaggcaagagaatgtggtttttgttaaaggaaaattaaaatgtaagagaggttgagggagagagagtagtttttcatttacatgagagagaattctgtgtggtcgtaatataagggggaaaataaagtaaacctttgtcctaggataaaatggtaagacatgatacacataactgaaggtttaagcaagttgtagaaagtttgtgaaagagtgatcttgtgaaaataattttgtgtatgatcatgtgggctgaaattaaaaagaggtcatttagtttttcta

SEQ ID NO: 3040 - DNA, 332 bp, Homo sapiens
taaacatcggatacttagacatgatttgggtgacctcagcttaactgtgcaggtgcggcccttctagtgagaacagtgtttttttctaagctaatattaaagccttacaatacatcagtgtgttgcactggtctaaatagataggcaggccgggtgcagtggctcatgcctgtaatcccaacactttgggaggccaaggcgggcagatcacctgaggtcaggagttccagacctatctggccaacatggtgaaaccccgtctctactaaaagtacaaaaattagccaagtgtggtggcgtgtgcctgtggttccagctacttgggaggctga

SEQ ID NO: 3041 - DNA, 558 bp, Homo sapiens
cgtaagccagttcctctaataaatcccttctcatctagctagatagctctctcctgtttgttctggctatctagaaaattagggctaatatacctactcttgcagagtttacattctaattggaggagacagaaaataataaaccaataaataaatatgttataactaaatatattcatgtatctagcatgatgataaatatttatttattataatttagcatgcttaattaacataatgataaatactttgggaaaaaaatagagcaaaataaaaaaggcaggggtgggagtagcaattgcagtcatcaagaagtgacactggagccgggcgcggatcacgaggtcaggagatcgagaccatcctggctaacatggtgaaacccgtctctgctaaaaatacaaaaaaattagccagacgtggtggcaggcgcctgtagtcctagctactcgggaggctgaggcaggagaatggcgtgaacccaggagttggagcttgcagtgagccgagatcgcgccactgcactccagcctggacgacagagcaagactccatctc

SEQ ID NO: 3042 - DNA, 641 bp, Homo sapiens
caagtggcagagctgaacttgccaaaccatctatgctctgggttagtctccacatgtgatgaatgaattgacattatgagaactagtcatgaagcagtccatagtaatggaatttttaaaaatattactgctaactctaaggaaatctatttggacaatgactaatattacctattaatatttaaaactaatataaaagacgtctatgaatatttgctccaaaacacatgaaaaaaataaaaattggctgaatagagaaatatttggcttttatgtcatttcatattttaccatgtaatgaagggtataatcatttggagtgcatggttttttcttagctttaacgtaatctttaacgcaatttaatgtttatggtgaacaaatttaataaactttaaagttacaaatgtagtatcagattatttgagaatgtcagctatgtaaaaataaagatttattttcatttatgcaaaacacctgaaaaaacaaatatgaaaagtgtgagaggccgggtgcggtggctcacacctgtaatttcagcactttgggaggccaaggcaggcagatcacctgaggtcaggagtttgagaccagcctggccaacatggcaaaatcccatctctaataaaaatacaaaaatt

SEQ ID NO: 3043 - DNA, 565 bp, Homo sapiens
tgtattaccttgtgacattacttgcattgctatcttaagtgttttaggacactgggttttgtctccttttacatctttatacgttaactcccctaacaattatatgattgttgaaagtctgtgggtgctccataaaatgaatatttagacttagtcatatggatttttaagagttaaacatggatgacaagatctatgaatatatgtagaaaaatccttaggaatctacaaaaaagctactaaaactaataactaatgtagcaaagttatagaagccaagattaatgtacaaaaatcagttgtatttctatatacagtaccaatgaacaattggaaatggaatttaaaacagtttcatggtcaagcacagtggctcatatgtgtaagcccagcatactgggaggccagagtgggtggatcacttgagcccaggagttcaagaccagcctgggcaacatggcaaaaccctgtctctacaaaaaatacaaaaattagctgggtacggtggcttgtacctgtagtcccagctacttgggaggctgaggtggtaggatcaattgagcct

SEQ ID NO: 3044 - DNA, 339 bp, Homo sapiens
tgctggccacaccagccccctttcacctccagtgccacaataaacctgtacccagctgtgtcttgtgtgcccttcccctgtgcatccggaggggcagaatttgaggcacgtggcagggtggagagtaagatggttttcttgggctggccatctgggtggtcctcgtgatgcagacatggcgggctcatggttagtggaggaggtacaggcgagaccccatgtgccaggcccggtgcccacagacatgaggggagccactggtctggcctggcttggaggttagagaagggtagttaggaagggtagttagcatggtggctcatgcctgtgatcccagca

SEQ ID NO: 3045 - DNA, 391 bp, Homo sapiens
agtgcttgaagggtgtgttgcttctcacttggaaaattttgaaattgcctctattaaacatttccatttttccactagaaagatggagatgactctgggatagataggctaatctttccaagacacccatttccatatcactctcttgccaaaacatttttcagtggcatctttctcatggaatcaattagaagttcaaagttctgacattcaagatgccccatggtttggcctaaacttctcttttcagctgtgacttctacttaccccttacatgaaccttctgttctggatcatctaattcttgtcattcctgttctagaaattcttcccatttttattcttggaatcatgagaatgttttttcaaaactctaatatgatcaaggatg

SEQ ID NO: 3046 - DNA, 464 bp, Homo sapiens
tcttgactcactcactgcaacctccctctcccaggttcacatgatcctctcatctcagtctcctgaatagctgggaccaaaggcatgtgccaccatgcctggctgatttttgtatttttttgtagagatggggtctctctatgttgagagaaaaataaggtgcccacattcataaatgcaaaaaaaattggcagtatttaacaggaaataatgttacctaaaaatagtgaactaggaagtgatatatcttcatcaaattgacaaacatctgggacatgttacagaaagtcacactaaagtcagaaatgacactaaggagcttctagtctcctcttatccaacatcatcttggagggaatagccaaggaaatttaagaagaaagagcaagatgggagacaagaattgtcaattatagaggtaaaagtcattctggagcaagtgattcaatttctgtgtaatatat

SEQ ID NO: 3047 - DNA, 432 bp, Homo sapiens
ggactcacaggtttggaaaggtgaggaagagtttcccgtaggaagggaggagggaggtgcagtaccagcagaagagaaaagatgtgaggcagtgttagcagatgcccactacactatcgttcatgcagaaataatgagattgcctttacgacttgaattgtgtcccccaaaaagatacgtttaggccatgtgtggtggcttacacctgtaatcccagcactttgggaggccaaggcaggaacatcacttgagcctaggagttcgagaccagcctaggcaacatggtgagacccccgtctctacaaaaaatttaaaaatgagctgggtgtggtggcaggagcccatggtcccagctactcaggaggctaaggagggaggatcacgcattcagaaggtcgagactgcagtgagccatgattttaccactacact

SEQ ID NO: 3048 - DNA, 579 bp, Homo sapiens
atgtaacaggattacaatgtcagttacctaacattgatctgatagagtattttattattaccaagctaaaagtaccaatataggtatttatcataatcatgaacagagaattagcacattttctttgcaattgaattttttcccaaagctgcttctccttactaaaagttctattgaaattgtatgggaattcaaattcatcttaaaagctgaaacaatatactaataaataaaatatttcttattccttattcatttatttattagtttatttattcagttaacaagtaagtggctctgtttatgccaggtacaactttcttgggccctcaaaaacatattttaagctttatttggtcatggggttttctgaaattatatttactaaaagtcaaaagtaaatagccaaatggctaataagcacatgaaaagatgctcaacattatttatcactaggaaaatgcagattaaagtcacagtgaaattctactttgggaaacagttggacagttctttattctgttaaacataaaattagcatattagcagttttactacttggtatttactcaagagtaa

SEQ ID NO: 3049 - DNA, 420 bp, Homo sapiens
tttaataactttggctaaaacattcacataacccctatgagccctgcattatttggcacttgccctcagaaggttcgaagaaccaaccccatctcatgacattccctactacctcactgcttagcccctctattcaccccaccaagggccatctgcactacctgtcctttaactgcttaaacaatccatgctagatcaagcctcgagattttctctcttgctttttcttggcctggaatccctagttcacttgttttctgactgactcctccttatccttcacatcttaagttttaatatccgttacttggaaagaccttccctgacgtgtctatctaaattaagctccactgttacgttttctcagataaccctgtactttttcttcactatgaaaaccatgaagataggaagatgtct

SEQ ID NO: 3050 - DNA, 488 bp, Homo sapiens
aactccaaactcagtagaataacagaaataagcaattaggccaatggaagaaaacagagggctcagaaacaatgtaagtggcagaaaaagcatgcgtatcaatggacaaatgacaaacttcaaaaacggctctagaaaacttatcatccatgtgaggaaaaatatattccaacttctcaccatattaaaaaagagatgtggtagattaaagaccaaaatgtgaaaaacaaacttctagaagaaaagaaaaaacagtatttttatgactccaagtaggaaaggatttctaaaacaaagcgtcaataccacaagttaatgttaaacatttatattaatagaaggcactatttaaaaagtgatgacaatcctccaaattaggaaataattgagacatgtatactaacaaaggttggcatccaggatctataacaaactcacacaaactcaaagaaaagaaatgagcaataaaaatgggcaaaaaaaaatca

SEQ ID NO: 3051 - DNA, 549 bp, Homo sapiens
agtagtaaatattacagcctcatatgaggagaagtccccaggctgaaaatagttgttctttaaaacagcttaatgtgttctttaaagccactaatcagattaagcagcagtgtctttgaaggaattagctagccttgaaatccaataaataagtttgtctttcctacaaaatttgtctaagggtaatttttttctttccagagaggccctctgctgcccatccctttgttctcaaaatacaagttaaaaactataagtgaaggctgtgactatgttttagttttttctctatatacttttctattatttttaaatattctgttactttttattggatcaataacaaataaaatatcttgccctgttaccaacataatttcacatatttttaccctaatcttcatttttttcctgagaaattatcacatggattatatgtcacttgagtgaagttataaataaccataacaatttgctctggaagaatccacatgaaactgtaattctaactggtttatgaattttttattcccattaatggcaaatatc

SEQ ID NO: 3052 - DNA, 335 bp, Homo sapiens
caataccaaaaggtttttattctgaaattttactccagcaaaaatataaagctgtcctgacttggtgctgataacaacagtcagtactaagtagatgtaataatattttctgaggtgtctgggaactctggacaagttaaatattcatctcccgtcttctatgggcctctatacttgcctgttgcagctcaggagcaagaaggcttagattccaatgacatcaacagagatttgagcctgcgataaatgggcttcatgccctgtgtctgtacgtgtagaggcgatcaagttaaagcacaagaagcagctgtgatctgagaacaccagtgtttatg

SEQ ID NO: 3053 - DNA, 403 bp, Homo sapiens
ttaatataacatgacctgaagattttaaattactgaaaataattttgaaaatatgacacaggtaccctccttaatgtcttcccttagtcattctgtgagtcctgacataccaggtgcaatggtcaggatagaagaccgggctgtgaagactatatctggaggattcaacccctccccaaatagccagtaggcaacaggaaagcaggggagaagggagcatattgggcttggttctggcttgtagctgatggtctaggcactaagaacatgcctctaggccgggtgtggtggctcacacctgtaatcccagcactttgggaggccgaggtgggccgatcatgaagtcaggaggttgagatcatcctggctaacaccgtgaaaccccatctctactaaaaaatac

SEQ ID NO: 3054 - DNA, 505 bp, Homo sapiens
atttggaacactaaaacaccaagtagatgtgctcctaattattaaaacatcaacaataccatgaaacagattagacaggatagtataatatcaagagtcttagaatctaacagttttagaatcacatttggttttaaatcctcaatttcctcatttataaaaatagtactctgtatttcccaagttagctgtaagatttagatggtagtctaagtacttaacacaacgtcaagaatatattatctggctgggcacagtggctcatgcctataatcccaacactttgggaggctgctgcaggaggatcacttgaggccacaaggtcaaggccagcctggacaacatagcaaaatgccagacattaaaacaaattaaaaaaaaaattagtcaggcatggtggcatgcacctgtagtcccagctactcagggggctatggcaggaggattgcttgggcccaggagtttgaggctgcagtgagccatgattgtatcactgtactccagc

SEQ ID NO: 3055 - DNA, 437 bp, Homo sapiens
tcttagtccatatgactactttaaatgtatgatacatcacttgatgtactaagtatactatctaattaagtatgtctaattaataatagctgtctcaaagtaaactggaaaccaaaaggctactttgcccaatgtctgtttttaaaactactgacaaagaacatacagaaaggccgagcacgatggctcgcacctgtgattacagcactttgggaggccaaggcgggtggatcccttgagctcaggaatttgagaccaggctgggcaatagggtgaaaccccgtctctactaaaattacaaaaattagccaggcgtagtggtgcatgtctgtaatctcagctactctggaggctgaggcacaagaatcacttgaacccaggaggcagaggttgcaatgagccgagactgcaccactgcactccagcctgggtaacag

SEQ ID NO: 3056 - DNA, 582 bp, Homo sapiens
ctgataagggccttcaaggcgcccgacaacttgtttccgggccttgttttcagagattctccatttgatgtatcccggtcttgcagcccaggggtcagggcattggggaggggggaagcagggctgggtcgaggggcttctgggaagacttcctggaggaagggatgctggaagggagcgagggagggttagttgcagaagatggggtaggcattgcaggtggaagaacctgcatgggcagaggtttggagataagaaccttgtgacaggctgggggcaggggctcatgcctataatcccagcactttgggaggctgaggtgggaggatcgcttgagtccagaagttcaagaccagcctggccaacatggcgaaaccccatctctacaaagaaaaaaaaaaaattagccaggcagggtgcgtgcctatagtctcagctacttgggaggctgaggtgggagaattgtttgcacttgaccttgagaggtggaggttacagtgagccaggatcacaccactgcactccagcctgggtgacagagccagaccctgtcccaaaaaaaaaaaaaaaaaaaaaaaaaaa

SEQ ID NO: 3057 - DNA, 453 bp, Homo sapiens
tatgcttagagatactgtgagataataaagtctattcaaataatttaaatctaaaaggaagcctgataagttacctttaaaagtattatttaaataggtaaaagtaaatgatgacaccctcatatccatgattcagatttaacacttgttaacttttaccataagaaattactttttgcctgggcgtggtggctcacacctgtaatcccagcattttgtgaggccaaggtgggcggatcacaaggtcaggagtttgagaccagcctggccaacatggtgaaaccccgtctctagcaaaaatacaaaaaaattagctgggcgtggtagtgcacaactgtaatcccagctactcaggaggctgaggcaggagaatcatttgaacccgggaggcagaggttgcagtgagctgagatcacgccactgcactccagcctgggcaacagggcaagaccc

SEQ ID NO: 3058 - DNA, 530 bp, Homo sapiens
tatgaggacagagaagtttagtggctcatccaatgccacacctagtaaatggcactgccaggatttggtcccaaatagtctgacttcagtgctcatgttcttaaccaccctactcttaattcttcttctgatatttgaccagataaagatcactcagaaagtattctaagcctagaaagagaatttggaagcagaaatgagatgatcagaggaaagggatgttgcccatgaaaataaaaggagcagataggcctggcacggtggctcacacctgtaatctcagcactttgggaggccaaggtgggtggatcacctgaggtcaggagttcaagaccagcctggccaacatgatgaaaccctatactaaaaatacaaaaaaattagccagacatggtggctggtgcctataatcccagctttttgggaggctgaggcgggagaatcacttgaaccttggaggcagaggttgcagtgagctgagatcgtgccactgcactccagcctgggcaacaaaagcgaaactccgtcac

SEQ ID NO: 3059 - DNA, 450 bp, Homo sapiens
gaaatctgaatataaatttcaggtttatattcagcctgaaacctggatgactactgaactaattaagcttgtgtggtgaagaatccagggagcacataaaaagcatctcccagaggcataacgaaatgaacaatgttttcagctcctgctcagagacaggtttgctttatagtctgagtccagctatgttaaatcctttccattacaaaattctagccttcagaaaagcaaaagtgaatgcaatttccattatgtattagtcatattatatgatacaaagttaagaaatatgctaaacacacatagaaaaagtaaaatataacatagagggcaaataaattactagataccaacaccaatactacacagacatttcattctaaaaaggatcaatgatgaaaaggaaaatatagtcataatagctagaattttctttcagtaagtatatgc

SEQ ID NO: 3060 - DNA, 513 bp, Homo sapiens
atttaccttctgacctattataaaaagagcctgctgacctctgctcgccttacatgacatcattctagataggactctgggtaattgagttatttgtattggatttagacagaataggactgtaagtctgggaatgttatataagatgtttggccccagaggtgcattgcatcagtcattacccagtgggttactcaggagtattaaaaagtaactgttaaaaagcaacaagtatgagctgggtgccgtggctcacacctgtaatcctagcactttgggaggctgaggtgggtggatcgcttgagctcaggagttcgagaccagcctggccaacataatgaaaccctgtctctcagaaatacaaaaattagccaggtgtggcggcgcatgcctgtagtcccagctacttgggaggctgaggtgggaggatggcttgagctggggaggccgaggttgcagtgagctgagatcatgccactgtactccagcctaggcaacagagccagactctgt

SEQ ID NO: 3061 - DNA, 418 bp, Homo sapiens
caaaactctgtccttgtactgttctaattttaacatcagtaaagcatcattcttatttttgtttttaatttttagagacaacgtattgctattcaagcctctctgttgcccaggccggacttgaactcctaggcttgagcaatcgtcttacccattgtcccttgtgacagtgactttaagtgattcaaaaggcctttatagaaatgtcttttcttataaaacaagcatactaactagaaggggaaaagaatatttaaatattgacagtcattaacaggatcactcaaacactttgctctatgatgtttgactcttcttagaggagtgcagtggggtatcacacagcttctgctcaggtacaatcatgttttcaaaagaaaagggctgggcgtggtgacttatgcctgtaatcccagca

SEQ ID NO: 3062 - DNA, 114 bp, Homo sapiens
tgaacataaataattgcattatagttgaaatgtgtacaggcacgtgattcaaaatttgtttactcagataccagaactatttgattctttcaaataccatgcctacaattcaca

SEQ ID NO: 3063 - DNA, 465 bp, Homo sapiens
actataagtaatttcactgccaaaatagaccaaatgttgtcagtgcagaagtgagtagacaggagactagaatctactcttaagaatgtctcacaaagaaaggaagggggcttggagtaatgaaaaatgttgaacagaagagaaagaattagatttataggaaaaaaaagaaaagaaaaggaggggttggaagagtagtatataggagtgagacagtgagaagatatcctgatattatagtttcagaaggtatctccattctgtctcaagtgtagaaaacagaaaagagtgaatgtggttgtaaatgaccttaaacagagagagatggacttttttttatcatttgaaatgggaagccccaccctcacctctcaagtcatctgtttcccccctcctcccacatccacctgtcccttgcctctcaccaagtagaatgtgtgattaaaactttttcagcaagattag

SEQ ID NO: 3064 - DNA, 540 bp, Homo sapiens
ccggggtataaccttataagggggataatgaaacttaggcgatgtccaggaagataactctgtagtacttgaccaatgaggaactgggggaaggaattctgtgctaggagataaattacctgctgtaactgccctggttgtacctgcctaccagacacccgatcttgcaaggccaccattaaaagtcttgcttccggccaggtgcagtagctcacacctctaattccagcactttgggaggccaaggccaggagtttgagaccagcctggccaatatggtgaaacactatctgtactaaaaatacaaaaaatacaaaaatacatggacattgtccatggcaagcattcagtaaatagtcaaggagtgatttgcagttgaattggggttctaggccacaaatttccaagcatggtggtgcacacctatagtcccagctacttagaaagctgaggcaggagaatcgttttaacccgggaggcagaggttgcagcgagctgagatcacaccattacactccagcctgagcaacagagcgagat

SEQ ID NO: 3065 - DNA, 655 bp, Homo sapiens
cttcctgcctcctaatactcttcccaagaataagtgagatgcctccaatttcaccagtgagaggaaccagtcagttccttgagggaagaatagcatctagtaattcaccactatcttgtcaaaaaataacaatggcttcactgagtattaactatgctgagcactgcactaagcagttaactcgaatgacctctttcagccctcccacagcattaagggtaagtattatttagtcacccacattttacagaggaagaatgtagagtcgagagagatcaagtacctgcctatgatgacatgactagcaagtgactgagcaggaattccaacccaggccttaggactccagagactggtctcttcaccttccttccctccctggtgtccccatgcctgggacaaaataatatggaaacatagcatgtgctcagcaaatattttttgagtaaatatttatgcggatagctaagctgtcgtggcttgtggtattcccaattttataaatcaaaacaaattgattacatctagtatatcataaaacagtctgtgaattacttgcagtactagtctgtactagttctgtacaaagaataagaagggagcagcaacttaacacctcttgagtagaaaatttgagactcttctaaatgctgga

SEQ ID NO: 3066 - DNA, 395 bp, Homo sapiens
gactaagaccattttaaatagtactggggaataacttcaaggcaagaaagtgaatgaaaagctctatgtattttgaaactatgagagacctataatcccaaacctcaatctaatgtgaaagttaatatcaaattgagatgcaaagctggcagaccattattcgttgaaataagtgcatatgctgatgaatatcaagaggacaaaagctctcatttgatcccagggagataagttatagacttatggtagcagtttcctggacccagataagcatatagaaagaatgaagaggggaaggcagaatgagtcacacagatgagccatgtatgtgcaggaggaaggtattgagtgtagtattgggtgtagtaaaaggtattgggtgtagtaaactctac

SEQ ID NO: 3067 - DNA, 521 bp, Homo sapiens
gctggaggtgacaggcctatacttgattatgtcaccagctgtgatattttaatttttcataacatcttaatcctgtcattcccaggagaggatttgatcagcaggaaagagggatgagaagtttggggtggcagaagccctgggcctttcagtagcattgactcttataaaaagccttttgaccaggagtaaaagggcggagagcagtgggaaatgacggcatccaagtgagtgggggtgagagtgggtggggaggggtgagtacttccgttggcataacagggtccttggctggctttagttctgagttacttgttggtaggttttaagaattgatggagttaaataattatgagacaagatcaagtaaataagcaaagaatattgtttttcttagatctgtcaaagaagccataaggtctcctacctagacagtctttctagaaatattgaatttctctttattatttctgaagttaaacaagaataaatttgaataattaatgcattggtctctctct

SEQ ID NO: 3068 - DNA, 681 bp, Homo sapiens
acaatccgtatttgctcttacacaggagagatccacaattgcaacttgattgtaatcctcacctgggaaatctgaaatcaccacctgttttctttggatgcttgtgtgacacactccagttgctttctacagaatttagaacattcatttactccagtggatacacttggagctttactcaattcgattcattttcattaaacaactgactcaccagactcattagacctatgcaattcactatgtttcatagtcacatctttacttctaaatatatggtacaaacattgcttctagctaaaggtatattttcatataaatgctgtaattgtttgcccttcgttaaaaaagccaagatattaaatgtaagaaatagtctaatagtttgttactacgcagtcagttgtcttaagaatactggagaaacagaacatgtgaaataacatcaaccactccaaattctaatttacttcatatgagctcttctacattaaattccaaacatgttaatagaaactttattttttctattcaatattctaaaatatattgtaagaattaaagtaattttaatagacaaaacctaataatgtagacttacgattatctgcaatgtaaaatagcctattctacttttagcatttcatctcttgaaattatatgaatcatcatctgctactt

SEQ ID NO: 3069 - DNA, 536 bp, Homo sapiens
tatgtaccagagatagaaaaaatattataacagtctacaggtgttgcattagtgttgtgtgcttgtctttacaactaggcagataaataaaaacaaatatgtttttaaaattccaacatgtggtagtttgaaagtgtgtctcagcaagtggaatcataaaatctggctcaaattttagataaatttggacttaaatataaacacacacatgcttctagatgaattagtatttttattgtaatacgaacaactataaaaataaccaaaagtggtatatcagtgaccaaaacagaaattctttacccatctttttctctcagctctctgcttggaataaaattattgccaatgtagttaaagtttcacttggtgttagtaaatgaaataaattattatgccaatatctttgactaagacagttcagtgattcattaggcaatattctggatgaaacctcagacaacacagacattaaagaatgcttgccagctattaaagcctgaactaaatcctcatcatttttcccttcccgtgga

SEQ ID NO: 3070 - DNA, 490 bp, Homo sapiens
tcagacagagagtctgaagtttttccactgacagattagggcaaccagggacccacacattatgacctgtcatagtgttgcaggtcacagtacatacctgcaatatgccaggtcctacaagctttagactgacctatttaaaatcgttgtctattaatcagtaaagctcaaaaataaaataaaacaaaacaaaatagttgtctgcccaggcgcaatgtgctgtgacaaaggaccctgcctctttagttttctttagtatgagactttgagctagcctacttgggcccaggttcttcatgtgcaaaatgcgtataaagggaaattctggtgagaattaaatcaggggatgccaaagtagctttaagttttgttcctgccgcacaagtgccaaggattaaaatgattacatatacacacatttccatcagtatgtttcttaaacatcagcaatctgattcaattaacttctggcagtttaccacagggagga

SEQ ID NO: 3071 - DNA, 259 bp, Homo sapiens
  misc_feature 216: n = A,T,C or G
ggtcttccagggtgcaaccaagggggtggataaatctcctaatttttggctggccatcaatccctgttactgtacaagagcaggaagacagaggccctgagaaatgggttacaactgagtaggctgctcccatgtccattaagaacccagtatttttgcctgccgtttccagggttaccaaagactcctctatggagatggtaaggtgtccagtangagttgtagaggaccgcaggccccatcagtcctatgctttctt

SEQ ID NO: 3072 - DNA, 533 bp, Homo sapiens
catttactgagaatcaacaaaggtaaattctgtaccagataatttacatgtggtacttcacagcatctttaaatatagccttctgaggtattattatcccccattttgaggattagagtttggataacttattcaaggtcattaggattcaaagagaagcagctgtgttatacccagtttctgaacctcatgaagttcatgtgctttccactgtgcaacaaaattaagactggggtgagtaaaagataagaaaatgaaccctaaatgtagttggtttatatcacaagaaaactacagagtcaggatcttgatgctgaagctgtagcaagtagaataaagctttgtaaagtgttcttgaaatatcaccacactaggctaggcacagtggctcatgcctgtaatcccagcacttagggaggccaaggtgagaggattacttgagcctgggagggggagtttgcagtgagccaagatcacgccactgcactccagcctgggcaacagagtgagacattatcttaaaaaaaaaaaaa

SEQ ID NO: 3073 - DNA, 344 bp, Homo sapiens
tcttttacataggctggtgttgagtgcgatgagttcggtttttgtccagttggtggaattcaccaacctcagagtccatatgatgatatctaaatgctgtgctcacatcgagtaatttgtatttccaatgattgatatttttacataaatagtcaaaggagtttagcattttcaaatgcagtaaagacctgtactccgaattccctgaaagcaggaaatatttgtttctaatgccccaggagcttgcatggtgccttacacacagtaagcactcattaaatattaagtgagtgaataaaagaatgataatcgaggcgggcgaatcacaaggtcaggagatcgag

SEQ ID NO: 3074 - DNA, 429 bp, Homo sapiens
ttttccattttgtaagaagatgttaatcaaatgggaaaatttatttaacattaaggggggagcaggttgtaaaacagcgtgtacatggttatcctaattttgtttaaacattagtagggaataaaggctcaaaggataaacaaaatgttaacattgtttatcaccttcaaagtaaagggactgtgggtgacatttttctatcaggtgttttatcttcctgctttcctttctccattccccatcagaacaaactggcaatgtattttaaactatattcacaaaatctcattcctatttgacatttcgaatacagacagtccctgacttaggatgggtcaacttgattttctgactttacgatggtacccatacaaccattgtttttcatttccactacagtattcaagaaattatatgagatattcaaca

SEQ ID NO: 3075 - DNA, 78 bp, Homo sapiens
atgtgtattataaaaataaatttttgacaatgcaaatcaaggtacagaaaaccaatattcaaactgcaaatattcact

SEQ ID NO: 3076 - DNA, 539 bp, Homo sapiens
tttacatggagtcttgctctgttgcccaggctctcggctcactgcaacctctgcctcccgggttcaagaattctcctaccttgcctcctgagtagctgggattacaggcacatgccaccattcctggctaatttttgtatttttagtagagacgaggtttcaccatgttggtcaggctgctcttgaactcctgacctcgtaatccgcctgcctcagcctcccaaagtgctgcgattacaggcgcgagccaccggtgcagggcctaagtgatttcaatcacacttagtctaagtggatttacttaaagtttctatgataaagaatgtatgatatggaacaatagctggaaaaagttataatgcattcataatatgtttttcacgtattttaaacaataatgcatcacatattttggaatatttacttcagtaaatactttagtctctttgacctcaatggttagcttctagaacaaatactttaatgagatgccccaaacacttagctcttgaagaaactctgtgactatcacagggagc

SEQ ID NO: 3077 - DNA, 579 bp, Homo sapiens
gccaaacatcaagtgtaattcaatgaaacaaaatcctgaatcaacttgtgataattgtagtgtttcctgacaagacaaattggcaagtttgaaaaacaagaaaaaaaaagatgtctgattataactaatgaatgatattcatgcctttaaaaattacacacacatgcacacacacactcacaatctattatcacaagactgttctctctctgaagaatcaaccatctttctgtaagatgcttcatcaacctttcacattaactgcctttggagtaatattatatacttactttttcctagacagttgtgaaaacagggtgcagtgggtcaaaggtggtgtcaggggtttatgttcagattttgcatatttttacaaattgcagcaattaactagttcattactgtgttgatttaaattcttacaaaagcttccagacaaaaataaacactcatataaccatgaggaaaaaattcagaatagaatggagtccagaaataaggccacacacctatgaccacctgatcttggacaaagctgacaaaatcaagcaatggggaaaagacttcctattcaataaa

SEQ ID NO: 3078 - DNA, 588 bp, Homo sapiens
agatacacatctactaatgtgtaagcaatatatacactatattatttattgtgacttttttataatagaaagatattgagaagaacttaaagatccaaatagagaagattagttggataaactatgttacacttccgcaatgaaatactatgtagtactagaactaaatgacatggatctcaattcacgggattaagggcgggggttggcctaggtgaagagcagtatgtatgtttctttttgtttaagaaacaggagaataataacctatgcgtttatttttgcagaaagtaatacagaaaggataaatcaagacttaataaaaatgtgactgggcatggtgactcacgcctgtaatcccaggactttgggaggtcaaggcgggcagatcactagaggccaggagttcgagaccagcctggccaaaatggtgaaaacccgtctctactaaaaatacaaaaattagctgggcgtggtggtgcgcaccttaatcccagccacttgcttgaatctgggaggcggaggttgcaatgaactgagattttgccactgcgctccagcctagtggactgagcaagactctgtctc

SEQ ID NO: 3079 - DNA, 240 bp, Homo sapiens
ggggcaggtgtggtgggaaagaggccatcattacctgaaggtggcctgggctatggcaggccagtgaatgggactccaggcctggggcttttgtcagcatccttgtgcccatgccgtggtggcgggctggactcctcacatcttccacgccccacccagttgctgagaccttctcccaattcatctcaccaccccaagccctctcaaatatctcccaatccatttccactgtccctgcct

SEQ ID NO: 3080 - DNA, 542 bp, Homo sapiens
tctgctggatttttcattttgttttatgtcttttaaaaaatagctattttaggctggatgcagtggcacacacctgtaatcccagcactttgggaggccaaggcgggaaaattacttgaggtcagaagttcaagaccagcctggccaacatggtgaaaccgtgtctctactaaaaatacaaaaattagccgggcgtggtggcacatgcctgtagtcccagctactcgggaggctgaggcaggagaatcgcttgaacccgggaggcagaggttgcagtgagctgagatcacgccactgcactctggcctgcgtgacagagctagactctgtctcaaagaaaaaaaaagcaattttaaattctgtcaattccaatatctgcgtctcttgtaagtccactgctttcctcattttttctcttggtttttgatcttctggcatattctgtaatttttaatggaatgctggagaataaaatataaaatatattggagataatttgagggcctgaatggtatatttcctctagagaagaagtatgattc

SEQ ID NO: 3081 - DNA, 479 bp, Homo sapiens
caggagaattgcttgaacctagtaggtgaaggttacagtaagcaaagattgcaccactgtactccagcctgggcaacagagcaagactccatctaaaaaaaaaaaacaaacctaacattagaatagaaacttaaagaaaagatcagctgtgagttccagggagagatggtcttctaccttggaatggcaaactgggacctgtcttttttttttgtccgcctacccccatgtgcctccccttctcccactgggcttctgtccaaagcttgggggacacagggaatacaatttggggactggaaaaacccagcaaatcctctagtccaaaagttcttcatgttttgaacttcacagggcaataaaataaatgtgtcttaaaaggaaaacaaacagagggctgccttagttatatttttcaatataagagcaatggccacctccaaacacaaaccaacacaatcacccaccccccaaaccac

SEQ ID NO: 3082 - DNA, 550 bp, Homo sapiens
tacaggctcatgcctgtaatcccagcactttgggaggctgaggtgggccgatcacttgaacccaggagtttgagaccagcctgggcaacatggcaaaaccccatctctacagaaaatacaaaagccagatgtggtggcgcatgcctgtggtcccagctacttgggagactgaggtgggaggattgcttgagcccaggaggtggaggttacagtgaaccaagattgcaccactgcgctccagccagggtgacagggtgagaccctgtctcaaataataataataataataataacaacaacaataataatacctattgttctgattgccaatctttattgtttataatctgtttcatgtttagagacttttagaggaggctgtagagtctcctactgtcttctgccttactgtttaaccaattcatggtgaggaaactattctaacctaatctttcttgctgctaatgaaccagctcttaatctgtttattttaatcaagaatagcatgggagctgggcatggtggcactcacatgtagtcccagctactc

SEQ ID NO: 3083 - DNA, 581 bp, Homo sapiens
ggtagttcttaccctggctagttgttggtaatagagattggttctgtgctctgcccctctctgtgtgttcccttgggtagtcattccagatcaatttgctgatttataatgctgtggataataatgcttgctttcaccaagccattgtagaagatgaatgtttactgtgtgtttaagattagaaggtaaaaggtggtatgcaatcagaaatggtgtgttgaaaggttattaatgacgctcaaagctaagaggagagggacaggcaattctctttagggctcagtagcatttaatgccaggcaggagcacacttatttttagatatacatttccctgttcattgaagacaggattcataaagaaaaacaatattttgacatgtaataggattacaattttttagaaattaggttaaaatcgtcaagaaaaagaaacatccgaataaaggtcagatgcgaggctaacacctataatccaagcaatttgggaggctgaggcaggaggatctcttgagcccaggggttcaagaccagcccgggaaatatggcagaaccccatctctacaaaaatatataaaaatc

SEQ ID NO: 3084 - DNA, 551 bp, Homo sapiens
cagagcaggcttcccagacccgggtaatgtctcctgggctgataggaagccctcaaccccccaagtccttgtcagccataaaccgcctgagcacagagccagagggaccatgttggggctgggcctcccgacttcagttcctctcattctgtgcaaaggaaaaacaattcagaatctacagaggtttagacgtgtgtagatgtggacagagaagtccgggcacagtggtttactgcccaagaagacagtgagtccccggaggaatagaataatatacatcatgctaatatatgtcatcccagtactttgggaggccgaggtgggtggatcacttgaggtcaagagttcgagaccagcctggccaacatggtgaaacaccgtctctactaaaaatacagaaattagttggctgcaggggtggatgcctatgatcccagaaactcgggagacagaggcaggacgaactgcttgaacctgggaggaggaggttgcagtgagctgagatcatgccattgcactccagcctgggggacagagcaagatcccgtctc

SEQ ID NO: 3085 - DNA, 526 bp, Homo sapiens
aatgaattaaagaaaattcttttaagttcagaggattcactaattcccaggtagaagcaacagaccctaattcagccacattctcattcaaatatttttctaattccaaagataaaacaaataatgattgtgtgtgtgtattgaggagatacaacagcaataaaattcaaataaaatcagattgcctaaaagaggaaaaaattggcttgatgtgaaagctctcttttataatgctgaatggaataatgtcccatattttgagaagaagaaaatatgacagaactttataatcagtcaaactataatttgtaggagaacaacagaaatacagtcttggacatataacacgttaaagaaaaagctttaaacaaaataaatttgttaacagactttctttgagcaaagaaagattggtgaatgggcatcactcagaactggaagaggttccaagagctctgctgcaatagcataagcagtgagcttttacaggttgatgtggaagtaagagaaagaaagcctatttgat

SEQ ID NO: 3086 - DNA, 576 bp, Homo sapiens
cctgtgctcaagattaaaaatgagttgtgaaacaagacaaacaagtaaaaagttatataacaatacgagatacaaatgatattctaggacaataggacagatgacacaaggcagccaattattaattgccatctggattgcatacacaataattgccaaaaatgtccagaggagggtgaggtcttttcaggctagctcaatcacggcaggtatttatgaagaggacagaatttgatatgggtcttgaaggataattcagatgatagatttagagaggaggaggacatatttactggcaaaaattcaatgtaagaaagctaggccaggcatggtggatggcgcctgtaatcccagcactttgggaggctgaggtgggcggataatgaggtcaggagattgagaccatcctggctaacatagcgaaaccctgtctctactaaaaatacaaaaaattagccgggcgtggtggcgggtgcctgtagtctcagctatttaggaggctgaggcagaagaatggcgtgaacctgggaggcagagcttgcagtgagccaagatcatgccactgcactccagcct

SEQ ID NO: 3087 - DNA, 554 bp, Homo sapiens
ttacaccttacttttcaatatagtctttttttaaataaaaactcctcaagtatcaagttcttattataatcttccagtatacttagtacctgatacagtccctgagaacatagtagacactcaagataattctgtgaaatgaataaatgagaaaatgaatgggttattttaaaaagataacatcaattttctcctaatagtgattactgttctctttgcattcaccctttatataataaccgtggccccttcagttcagagagaatccatttaataattccacaaatatacagcaagtgtctttatgaggctctgtagggactcggctagtaataaattctatattcctcaagaatcttttatcgtagctcagcttcttctcagccatgacccctggaaggtccatggaggggcactaggaattcacacatcttttctacatgcctaagtacattatttttctggggaaaaatttcagagctttcaccagattctcactaggggacaaaattcaagaaatattggacacagtaataccaacaaatacactcacc

SEQ ID NO: 3088 - DNA, 617 bp, Homo sapiens
ggccaggctggtttcaaactcctgacctcaggcaattcacccgcctctgcctcccaaagtgctgggattacaggcgtgaaccaccacacccagcccaccccaatagtttcatgactgttatgtaagccaaaattttgaaaaaaggataatacccagtgctgacaaggacatgacaaaactatatgcacacccattaccagttatggcactggaaattggtccaatccttctggaaatcaatctggccatttggggaaaagcctagaagtgttaaaaattgatgagaattttttccgctctttgacaaaggctagacattcattacagcattgtttataaaggtggaataggagcaatctaaataccctccctcagaataaagcctgaggtctccacttaatgaaatgctatctgtaggctgggtatggtggcccatgactttaatcccagcatttcggaggctgaagcaggaggattccttgagggtagcctgggcaacagaacaagacaccatccccacaaaaaatttaaaacttagcccgggtgctaattagctcagtagtatgttctcatagtcctagctatcaggaagactaagatgggacgaatgcttgagc

SEQ ID NO: 3089 - DNA, 519 bp, Homo sapiens
agtttacagtggagttaataaacaaaattacaactgctgcccattaaaaaaaacaaaacaacaacaacaacaaaaaaacgcatgtcaaatggttggagaaggaagagtttaatacatttactgatattctgaacaactgagaattatcatagatagaataaaagggttctcaatttatcaataagtagacttaccttaactactttacatatatatatgtaaaccaaaataacaattctattcattcagaaaatgtttattgaggaccagctatatgctagtcacaaagtaactgacaaaagtcctgtcctgggcagggcacagtggctcacgcctgtaatcccaggacattgggaggctgaggcaggtggatcacttgaggtcaggagttcgagaccagcctggccaatatggtgaaaccccatctccattaaaaatacaaaaattacccaggcatggtggcacatgcctgtaatcccagctatttaggaggctggggcaggagaatggcatgaaccc

SEQ ID NO: 3090 - DNA, 509 bp, Homo sapiens
ttgccgaattcagtacgagcttcttgagaaaaaaactgtcttacttatttctcggtgctttgcactggacctgatatttaacaagcactcaatatttacagaatgaatgtgtgagactcttttaaatcagtatgtagtcttagctatgcagatttataactacagagtgaaaaaaactattatctagaaattagcttaaagaactaagagtgaaagaaattgaacatcttaatttagccttacctagaccctgtggaaacccacggccacagtatacataaaggtcctccaaaataatggacagaccattcctttttcacaaaggtcctactaaacaagcaggcaccacgtgggcctatgcttgtaatttaatcctatacaggaaggcaacggtgttctgtctcacaggtctgacatacttcacccttttgatagaaatacctcacactgggataacccaaagattccaaatttcacatgcttacagcttctgatccctttgatagagc

SEQ ID NO: 3091 - DNA, 462 bp, Homo sapiens
gagctcaaggctgcagtgagccatgccatggcactctagcctgggtgacaaagtgagaccccatctcaaaaaagaaaaaaaagaaaaaaagacacatgtctatatatcatatacatgtatcatggtagcaaaaaatcacttgtttcttcagttgtttctacaatggaaagtttcaaaaataaggaaatttagaataaattatgatatatccggctgggcgcagtggctcacacctgtaatcccagtactctgggaggccgtggggggcggatcacttgaggtcaggaatttgagaccaccttggtcaatgtggtgaaaccccgtctctactaaaaatacaaaaattagctgggcgtggtggcttgtgcctgtagtcccggctacttggggggctgaggcaggagaatcacttgagcctgggaggcaggggatgcagtgagctgagatcatgttactgtactc

SEQ ID NO: 3092 - DNA, 561 bp, Homo sapiens
tattgaaaaatgatagctaatggtagaaatacatcactaagatgtcttggattttcttttggggaggagaggtgggggaataaaatgaaaaaaatatgtatatggccaaattggtctgtgataccattaattcatgttcattaattcaaacagtgtacattgcatacctactatgtgctaggagttgggttgtactccagaaataaaaagtcaaataaaacgtgtttccctcaaggaaactatgttctccagcatctgcacatgtaaactaccaattccagtttagtatgacaaactctttggaagtattatattttgaatgtatttcatcgagaaatgaatgcgggccaggcaaggtggctcacatctgtaatcccagcacttagggaggctgaggtgggtggatcacctgaggtcaagagttccagaccagcctggccaacaaggtgaaattctgtctctactaaaaatacaaaaattagctggaggtgttggcctgagcctgtaatcccagcttctcaggaggctgaagcacaagaatcgcttgaacccggtaggcag

SEQ ID NO: 3093 - DNA, 365 bp, Homo sapiens
aaatgtgatacagtttaacaaaacccattgttctgtaactatacatagattttcaaaatgtcataaaaagtgcagttatgaattgttaacatgtcaatacacagttcctttattccagcactttgggaggccgaggcaggcagatcacctgaggtcaggagttcgagaccagcctggccaacatggtaaaaccccgtctctactaaaaatacaaaaattagccaagcacggtggtacacacctgtaagctcagcacttgggggggcctgagacaggagaattgcttgaacccaggagacaggttgcagtaagccgagatggtgccactgcactctagcctgggcaacagagtgagactccgtctc

SEQ ID NO: 3094 - DNA, 493 bp, Homo sapiens
  misc_feature 383: n = A,T,C or G
gagactggataaagaaaatgtggtacatatttactgtggaattctacacagccattgggaaggacaagatcacttcctttgcagcaatgtgagcgtagctggaagccattatcctaagcaaactaatgtaggaacggaaaaccaaataccgcatgttttcacttataagtgggagttaaacattgagtatacatggacacaaaaaagggaacagcagacactgaagcctacttgagggtggagggtgggaggagggcaaggatcaaaaaactgcctattgggtactatgtttattacctggaggacaaaataatctgtataccaagcccccatgacatgcaatttacctatataacaaacctgcccatgtatccctgacctanaacaaaagtaaataaaaaagctaacaaaaaatagagcaagataaccaaagtcagcagaagaagagaaataataaatagaagaaacaaaattgaaattgaaaaacaacgga

SEQ ID NO: 3095 - DNA, 518 bp, Homo sapiens
ttgttacaaatcacattggcatttaactgaacaagtaattcttgcctttttcacccactttgagttaaggcacaccacctgcaggaagaatgaactagcatctggcccctgaagatcactttggatcttttcctcgtttgcctacctgccttcccatgaggatcttgacaacaccttccccaacaatcaccatgtatccgttagcttttctcccctacaccagctctctctggtaccatatgaatatttttctgtatatattagtacatttcagacagaatttgaagcacagttcagctcagcacttcaaagttgacttcttcaaacacagtggaaaaagtcagctaggaagaccatgggttagttctggtctcattgcttaatgaccatacagccttgggcaagtctatatttcacttgaactcagttttctcatctgcaaaatgtgattaattcctgtgctgcttctctctaatgctttgaggatagacatacaatttgagtgttttcaaagaatt

SEQ ID NO: 3096 - DNA, 462 bp, Homo sapiens
tgataatttacttaatagccctaaagaaaaaaatctcaagggaaagttggggtcacatgaatggttattcgatgaccagtaaattcaattgtgctggatggtcaagccttggtcagcaccctttgggtagaaatggaaaaatctcttgcacacaactgcctgaaaaatctcaattttggtgtcattcgtttatatattcagttatccaaaaatacttcctaagcactttctaaattctagcattgtgctactagggaatgaccatcgcagacatgaaagaaatggccctgccctctctgaaggaaggtagctgagctgtgcctattatttgaaagaagcgaacaaatggcctagaaaacctgaggagactggatccaataggtaaacaatattgatacgaattctaagggcaattacaaaaatttaatgacattatatttctatattaaatataacgtggtc

SEQ ID NO: 3097 - DNA, 388 bp, Homo sapiens
tggtgaatctcactataaccctgtgaagtaggaactatcactctacccatttcaccgatggaaaagcctatctcctgtgaggctgtggcttgccaaaggtgaaatagccaggaagtagaacagccagggagtgaaccccaaaagccaggtgggagcccatttcccctgcccactgcacgagacccctccccggtttgaagatccgataggggcactgctgttagctccccctgcgtcctggcagcagcacagtcagcagatggtcactgtggagaaggcggagctgaccacctccattttcctataagggagctagggccaggagaggtgcgttcacctggggaagtcctgcagcatcaaactaaagctccgggccaccctctcccag

SEQ ID NO: 3098 - DNA, 642 bp, Homo sapiens
aagaggaaatggctcctttgttctttattacaaagtgttttagggaaaaatagaaaagggagaagaataagtaaaaagagaagatacaggaaatttataatcatatcttttttcttcattgattatgaaagcgaatatatcaagtagctcatagatatttgttagagggttgatccaggactggcctttattggagtaggcaagaagatgggatgtaagatcttctgatccgaagttgaacatcaggtgcttttcccacagagactctcaggggaggactgcataatggttagaagtgaggactctgactgtgacaacccaagtttgaattagttcatgtctctgtgcctgtgttccctaacctataaaatggttatgtacctctaatatgtataagataattaaacaaattactgtatttaaaagcacttaaaagggccaggcgcagtggctcacgcctgtaataccagcaccttgggaggccgaggcaggcagatcacctgaggtcaggagttcaagaccatctggccaacatggtgaaaccctgtctctaataaaagtataaaattagccaggcgaggtggtgggtgactgtaatcccagctactagggaggctgaggcaggagaatcgcttgagtctg

SEQ ID NO: 3099 - DNA, 456 bp, Homo sapiens
taaacagcatcatatagtgtataatgaattacaatttgttattatttaacggtgcaattagaactttttttccccacatattggtacctgtaagttaatatcatcctctgtaattattatatagcaatctttagataaactgatttattagttgcctatcaatttatacgtagtaccagggatggatataaagaatagaaacaggtacagctgtggagaatgcaaccatttaagagtgggacagaagttatctctgcagactgtctggagaataaagaaacaaaggaacagaagctacttggaacagaggtgttgatggaaatgaagaaatagaagtccctaaaaggggtcaggtgctgtggctcacacctgtaattccagcactttgggaggctaaggcaggtggatcacctgaggtcaggatttcgaaactagcctggctaacatggtgaaatt

SEQ ID NO: 3100 - DNA, 533 bp, Homo sapiens
gtggttagtcttatggtattacaagcaattctattgtacatcctactacacttgtctttgcacacacatattggagaacaaatatccagtaatagaatttctggatcaagtaaatgatatcttcatttcttatataaatattgctacttttctcaaaagaaactgtatgacccaatattcttttgcaccccatttatcatattctatttaatctaatgcattatttatttcagcaaatattttgaataccgactacatggagtctgctaggtgaaaatgtacatatttgtggggtgagggttttgacagaacatctggtaattgggtgttattgaagtaaattaataaatttgaagactatctatgagagtcaagcataggccatttttctgttcatgagaaggcttaatattaatgaaactagagagaaatgccaattaccagccactagaatacagataaatgaagccttttcttctttgtggtgattgtttaaaattaatgagaagaggcaaagaggtcattatttcaaa

SEQ ID NO: 3101 - DNA, 539 bp, Homo sapiens
tttagtagagacggggtttcaccatattggtcaggctggtctcttaactcctgacctcaaatgatccactgcacccagctcattgtaacttattaatgtggctactaggaagttttaaattgcatatgtggttcccatatttctgttagcaccgctttagaatattattttgaataacatccaaatttcagtattagccaaatgattatcaaccaatattgttcagtctggacttagttctatttgactaaatcaactaagtacccactggtttgttaataatttctagagtgattatgaaacaaaataaagctctgaactagaagttgtagaagaagacaaggagggcactgccaaaatcataaaatacagtcctctttctttaaaaagcttacaaccgaagcctggaaagacagagttgaaacacaacaggttatgttcaaggtcaaaacataacacaactgaattacttttcttgagaaacaatggaaagaagattaaccagctgggtgtagtggctcatgcctataatcttagca

SEQ ID NO: 3102 - DNA, 576 bp, Homo sapiens
ctgggattagaggcatgagccactgtgcttggctgtttgtttttaaatttggagtaatttcagcataaatcttccaaccccatccatccctaggtcctcagcatcattttagaaattacatgaccatgtaatgcaactttttgagaacttccaggtgctgttacaaatcaaacactttgggacttccattataatgacaaattatccaggaaaacatgaaatgaaaaaggtttctcaactagtttttgttcaacactttgcttaataattggtctcatcaatttatcaatttactgaagtaagggatgttttcggtatataagctcatttcaaagaagaccaactgagttatttaagaagcatttttaggtctggtgcagtggtgcacacctgtaatcccaactacttgggaggcagaggcaggagctcaggtttgagaacagtctgggctattaaatatagtgagaccctgactcaaacaaacaaacaaaaaaagttggttttgttttttgtttttgagatggagtctcactctgtcacccaggctggagtgcagtggcatgatctcagctcact

SEQ ID NO: 3103 - DNA, 457 bp, Homo sapiens
caaatataatagggtatacggcaaggggagagaggatggctaagaaaagcatttggccccagtgaggctcagggacctctggaggctgccagctcccacctcgtatcctctgcccatctgaatcctgctcctcaggacaaaaagtggcttatagcaacttgtagcaacttagagcaggtgggacaagtagctcatagggttagagtgtgaggggggtaggtaagagctcactgaagacggaagctagaggacatcctgaagctgtgggaagatgttagggaattttcacaaaggaatgatagaaatggatttccaaccagaagtatgtgtgggtgtcaaaggatggaccccatagttacaaagttgtggagtgttcattaacgagagctggggagggaagattgctttcagctgctggatcaggtagtaggtttgcttaaaaatattaaaaagggaa

SEQ ID NO: 3104 - DNA, 500 bp, Homo sapiens
gtgtcatctttactgcttggttcatagcttaatctgcatgaaaacccttagtaggaaaaacagtaaaaatgcagctggattagtcataaataataatcacttccatttacataacgcctttgaaaaggtccctagaaactcgctaacttttgaagtcatgcatcagattacaaaagcaaaacgttttgctaatgtgatgttgaggttacaaatttaaatacattgaggtcaccaaatgcaagaggtttggttctcattatgacatctcgtccacataaacatgctattgttcttaatattctttatttaataattcaactgctactgaaaatattttgtctatctaagtatttagcacaacaaaattgaaacattgtgggattgttgtcttctacgtgttgctttttaaaattatagcataaactcggtccaatttgaattttgattgttgcctacagttatgaatgaaatgaaaatgctgatccagaagacaaatagaa

SEQ ID NO: 3105 - DNA, 582 bp, Homo sapiens
gccaacttactgccccacttctgtttccagaagtcacacacactagagtcagtttcatttctttgtagttaccctttttgcaactacagggctattacaaagtcacctgaggccactactttaaacagaaacatagtactacaaagccctagaatctaagacagccccccaatctgagggtcatctcagtccttgacactcctttctttgttaattccacaagaagaagaaattatagagctggcaccaatggtggcttcagcaccaatagtaaagggctggaggcaattgtaaacatcacctccacaatgaaggtaaccttattactcatcacattcaaagtgcagccctaaagaaaataatcacttcttattccttttctcgtatttttttcttggccactcattttcagctgagtgaagtattctactatgtgaaaatgattactagaaggaggtgttaggagagagaatgtttataagatatcttagtaagaaatgtatacttttgcctttgggaaacaaaggacaactttgttgctgtgtcaaactacttaatactcatacaaataaaaatatggct

SEQ ID NO: 3106 - DNA, 543 bp, Homo sapiens
aattaagcaagttctcagtcaattaaaaaagtaactttcacctcaaccagctctgcaaaattcagttaaaccggagaggaaacagaagagacagctagttttgatatagtcttattaccctatagtagattagtgattctggtggcaaaaaatgcatgcctgttacgcatgtaggagaaagcaatgtttacaatggcctggacttttgtcataaattttcaatctctaaatgatctttgtattctaatttaacacactgtgattcttcaaaattatagttttgcaaagttgaagagttaagcaaatgccaaagccacaaattcaattgttacagtgaataaggcagattaatatttaacagttcattttcttgcaggtgaaaagcaaagaattcacagcaacatacctgcaagtctcacatctccagcctcaacatccttgtaagttatatttgaaaaaagaaaagtctccaatatctaaactcattttccccaaaagtcccactcttcaatctctatttgtctcaaagtgaccaaatctatc

SEQ ID NO: 3107 - DNA, 627 bp, Homo sapiens
gaggtgaaccccatcccccaggagacctaaactttggtgaggaccagccctaagggaaggaggaatacagcttgccaaagccaccccttgggtcaaaggaaacacgatcactatatcagctgctgaaaggggcacaccaaagcctgggaacagattcagagaggtggtcatctcttgtcctctgtccccttcctagtgcactgctgcagatccagcagtggtcatcctgttggggcccaaggaacgtgggctgaatgaggctgcttcttaggtttctccagcagctctgcccctgctgaagactagtacacactgggacagggcacttttggcattttgtcacttctgcacctgtcgaggacaagtacacagaggagaagaccctgcagccagctgttactcttaagcactgtctactggactgaagcctgaattacaccaccaaacaaaaatacatcaccacaccaagccaccacaggagcctatctgcaaccaaggagcttgtacagagccttggtcctctgaaagtacccagaaatgaagcaaaatgatcctatacaacatagaccacagtcatacccttaagagaaagaaagaatgaaaaaaaaaaaaaaaaaaaaaaaaaaa

SEQ ID NO: 3108 - DNA, 448 bp, Homo sapiens
cacagtgtcatgcctgtaagcccagcactttggaaggccaaagcgggcagatcgcttgagcccaggagctcaaaactagcctgggcaacatggcaaaaccccgtctctaccaaaaatgcaaaatttagccgggcgtggtggtgtgcgcccgtagtcccagctacttgggaggctgaggcaggacaatcgcccgaactcgggaggcggaggttgcagtgcgccgagattgcgccactgcactccagtctggacgacagagccaacctcgtttccaaaaaaaagtgagttgtgcactgggtcgccaagatgtcgttcccaaagtatactccttcacccctggccactatgccctcaaaccagccgaataggacatgtcttcggaaacccagcgggcgcaagccaagtgattgaccattaagagcctggctgaaacctgcttaccctaact

SEQ ID NO: 3109 - DNA, 451 bp, Homo sapiens
caccttggcttcccaaagtgctgggattacaggagtgagccaccatacccagcagccaccataaacttttaaagcatgagcagtcagaaataagctaacactgccaacaggctttcctgttagccacagcactaccactttatttctatgtcagctattgcttctggctagcatttgtaaatgtatgtactgtaggctgatgcattaaattatgaaaaggttaaattatgaaaaagaaactttccacataaggatggccatttgatatagaaagagtaacacagtttacctcaggtagaactaagtaaaaatcaggcaggatggcagtgagacgcagtgggtcataaaaagtgagagctttggagcttaaaatacctacatgtgatatcagccatctatctaagtgatattgggcaagtgactattctgaggctccttagcttcttatcag

SEQ ID NO: 3110 - DNA, 108 bp, Homo sapiens
ttgtttgacacagatgtttctcccagtaaagagaggataaggagctggaactcgtggcacagttccctacaaaataattaattgatcatgtctactaattaaaatttc

SEQ ID NO: 3111 - DNA, 373 bp, Homo sapiens
cggaccacgtgcttggcttcccatggtcctgagaatagagactatgttccttactgaggcctacaaggccctacaaggtctggcttcttcctactttgccagcttcaccttatgcgtcttcatctcccctcctcatctggaactgctacccaccctttattgttcagccagtaatcgcttcctttgagtactgatccgtgaatcactgactaggttaaatccctcctattgcatgatttttttatgtatatatatttttctcttttttacattcataaaggttgattaaactattggatgatcttatagaaccatgtccctttccaaatttgtaaaggttgtcaaagttactatttacgtttatttgagtgat

SEQ ID NO: 3112 - DNA, 554 bp, Homo sapiens
tccatccctttgtcacttttcaactcctcagactgaatctagggataaatgcacacctgagtacagattcggtgtgtggggaaagttatgttctaatagaaaaggaaatttagaactcgacagtgattacctgtaatactgttagttgtggataatcctttatatttggtagctctcacttagtttgactttatttttgtaatttcattcttctagcatttcattatttattaactttgatttttctgtatgacagccttgcctcactaaccacttggactatacagccatctggggcttagaggctattagtggcatccctaataagtaatagttgtgcagtctgtgcttgagtttcttgtttccaaggcagttcattcctgctggagatagttttatttattaagaagctcttcttggccaggtgcggtggctcacgcctataatcccagcactttgggtggctgagctgggcagatcacttgaggtcaggagttcgagaccaacctggccaacatggtgaaacctcgtctctactaaaaatacaaaaatta

SEQ ID NO: 3113 - DNA, 613 bp, Homo sapiens
gggaccacactttgaggagtgccctaggcaatgccataggacattttactcaacaactttacatacaagttgtgggaccttaaccacatttcctatcccctctgtccctcagttaacatattaaaaaaaaataggtatattacctacctcatacagttgtgggtaaagattaaatgagatgttgctaaaatatttatcaagggaattggcttatggcacgtaatattgctgtttattattatttataacaacacaatataaggcctctcccctaattgtttttaataaatgttttctggctagctgaattgtcaccaaactttcacaatcccaaaagaaagttgggtaaggctacacactcctgtccccgcctctgttcccatgtccataccctaacaatgacaggaccaagaaattgccctctggtctatcctgcctgaagcctgagcatgtgtccctctaaacccctccagaccccgctatgaaatataaagaatgtcagcaggcagcaggcctccgttgttaagaagaggaaaccggccgggcgcggtggctcacgcctgtaatcccagcactttgggaggccgaggcgggtggatcatgaggtcaggag

SEQ ID NO: 3114 - DNA, 379 bp, Homo sapiens
aaagcatttgtacaatttatattacaaagaaaatttatttctacttaaagatgtaccctatttttttctccaaaatgccacttactttcttgcttgaaagtagagaaattgattttaaagaggagccttcagtcatcccatttatgcctacagtgtgtcttttagtttgtgcataatcgttctctctctctctctcaggctctgcatacatcaagtgtagatggctcagagtctacatacatcaaatcatgtcatagacctagaaaagtaaaatttaaggttggggaggggactggtggatctgagatacagtaagtcatttaacaacgtgattagagtagccaaagttatgaagaagcacagctgagatgaagatctt

SEQ ID NO: 3115 - DNA, 315 bp, Homo sapiens
atgttaaaagtaaccagtccatttctctgtctcatagggttgtggcaggcactttagaaactttaatgtttttctaacttcatttaccgtaggtaagatgcctaacaaatggatgagctcagttgtttcaagagtttgtctcccatgagccaatgcccatcacacacacacacacacacacacacacacacacactcacacacgagcaattatccttaagaaaaataatatttatagcacttagagtgttatttaagcaacttttcctgcttaattccaaagagtgacaatacatcaaaaaaaaaaaaaaaaaaa

SEQ ID NO: 3116 - DNA, 654 bp, Homo sapiens
gttgttttgtttgctttaataaaaataaataacttcctgaatgaagtctgagtagaaaattgatagattattcagtaaaaacatgtattctgtgatattataggactttcttttgctcatttaagtctttttttgttttgtttttgcttctgattttcaggatgaaaatggtttctgtggttttctactgaacaactgatgcattaactcacaccagcagtgggtgtcttgtgcagaataaaaggttacctctccagaaagggattattacactaaccaatttttcatgtcgtggcttcagtgaccagttcgttctttagcagaactatagtgctggtcacagagtagcagtccacattacaaccttttggtcactttgaaatactcttatctgcttcagataaattagtttgggttctatttggagggataaaatgaagtttatggaatctcaagctcattcctatcttgtcattccatgataaatcatgttggttacaaagccaattgtcctttgggggcaaatataaaattgctctacaaatatatcagagccatacatctattgctcctggtaaatgtttgctttttaaactcagtctcaatgtagatacatttcagatatgtaaaacaacttggatgctggtgatagct

SEQ ID NO: 3117 - DNA, 510 bp, Homo sapiens
aagcgattcttctgcctcagcctcccaagtagctgggattacaggtgcccaccaccatgcccagctaatttttgtatttttagtagagacagggtttcaccatattggccaggctggtgtcgaactcctgacttcgtgatctgcctgcctcggcctcccaaagtgctgggattacaggtgtgagccaccacacccagcggatatgtgcttttctaatatgtatgttgtaatttaataaaaagtggacgatctacaccctggtacatatgcgacctggagaggagaccgacggacaacttgagtgcccgacagatctgtgtgcaggacgcaagcctacctctaggcacctggaccagctgcatgtatgccttgtacaggttcccccggcagactgggctggggtcattcagcaggaaggacagggcaaggacgatgccgtgctctagaaaggcgtatctagggaagggagggtggacagtgacataagtgagaccatgccctgagaggctc

SEQ ID NO: 3118 - DNA, 460 bp, Homo sapiens
tagaaagattagtgattcatcttcacagcacatttttaatcaagcagttatttcaaccagcacattcgttttgttcatattcactatagaatgatatcttgtaaataaagacattcagcacactgtgaaaatgtatttgtgcacctgctttttaaatatttctactaaaaatgaaaaaaaaaccccttagacctgtagatagtgatatcgtaatattaattgttaataaaatagtcactgccattaaaatctgcagaaaatactctttactttcctatgctaaatgtgcactgcacagaaagaaaaggagcaggtttatcttatataaaccaaggaccattctttattattattcagtacttcttttgctaccaaatttttaagaaaagggagaaatccctcataactaaaatcctaaaaaatgataagtgcttcaaggagattaaagtgtcaggtatta

SEQ ID NO: 3119 - DNA, 551 bp, Homo sapiens
agtacatgacaggaataagtcaaatcaccttcacacctctcaaattgccactgtgaaggaccacaatcagtaacggtggaccattaacacaaagtccaaaatttacaaacacacaggaaaataattcaccatgaaagagattcatagaaaatgcaaacacagaattaaacagtaaatgaattcaaaagatattgagctggattaaaatattttttaaaagtgtatcatgaaaaataaaagattgaagcaacatattataaaaacctagagccagtcagatttgggaaagaagcgaagacaatttccaaaatattaagtttttttttttaacatagcagatatgttatacaactaattgtatattgctgaagagagaattaatgatctagaagataaattcaaagaatttaattatacagaactgggcatagtggctcatgcctgtaatcccagcattttgggaggctgaggcaggtggatcacttgaggtcaggagttcaagaccagcctggccaacatggtgaaaccccatctctactaaaaaatacaaa

SEQ ID NO: 3120 - DNA, 517 bp, Homo sapiens
cccaaataggttcgctgactttcttcactaaggcacccaccaaatatttgttgagcgcttaccatgggtcaggaactgttcaaggcactggacatagggtgttgaacaagaaagaaagacatgatccttgctgtcatgaagcattcatttcagagtcatacttcttatgttcacacacaagtgaagtggtattggtatttcagagtgaatgtgttttataaccaatattgatatttttcttctctagaggctccctttatttcttagtcacaaaacaaatatttttgaaagatagcaatgaaaacttggaacttttagaaaagccatttattgctagaaatgggctaagcttacgttttcctaaaatatctgtagaatgaaaacataatccaaaaaggcacacattcgccaagagtgcagcacgctggtctttgacttacataactctaaggaaataactagttagtttctgttaatgtttgatgaactttgacaaattagcacgaagaattagatc

SEQ ID NO: 3121 - DNA, 434 bp, Homo sapiens
atatgagccttaactcagtgacccctaccctgatcctaacacttgaaattaaatattacctccagttgtcaagttcttaccagctctaaaagaggaaagaccagttaattccagactaaggagttcagtaataaaaataagacagtatatctgttttcctctctcaaaggaatagaatatgcacacagagcataaataataaaaaggtagtacaacagcattgaagcaactatggcccagttacaagataaaaaaaaatataattacagtgatggtagatatatttgttcactggggagaattagcccccaaaagccattatttgatgactaagaaaatattaactgattgttgccttctttaaaaaattattttttctcagaattttactccaatgtttaatcctcatcagtaatacagccacttctactact

SEQ ID NO: 3122 - DNA, 434 bp, Homo sapiens
gctgggattacaggcatgaactaccacatccggcctattttaccatttttaagttacagttcagtttgctttcctcttagaaagaccttgtgatcttgggacgtgggtgtctttagggggctgttattctgtctaccttccttcaagccaccagccacctcacgcccacaatcacctgtgtccctgttggatctgggctccccaagggcagggctaggcccgcctccatccctgctatgtccccagtgcctagaacaaggcctgagacacctgaattccaacatgcattagcacttactctaacttgggcatgggaaacagccattcttgtgaaaaatggtcaaacctccatttcatcgggtccgccctaacttgcatgaggcacaccacgcagaagcttacccagaggacctcgcccctccgaacaacagtct

SEQ ID NO: 3123 - DNA, 397 bp, Homo sapiens
aagaggctgttgatcgggttttttagttctacgtagcatttagagatggggacatgggatggcgaagtgttttaatactgtgggaacaacataggggaagatttagtggcaggaaaatgtaggcacatggtgggacaagggagcctttggttagcacagacaagcaatgcagggatggtgggggttttggaagatgtggagtaagttgggaagcgcttggatttcttcgctgaggataggcttagattatattcagcaggcagtgaagcactttggacaccagaatgatgcaatcagagtggtgttggagaagagaaaactggcctctggaaggggcagaagagtggtgggaattgtagaagtgggtagattgatttgaaggctatagccacagacc

SEQ ID NO: 3124 - DNA, 389 bp, Homo sapiens
tgaggattaattctgttaacatacattaagagctagaatcagtaagcttgggctatttacgttagtcccagcctgctcgtcaccggccctgtgacttaggcagctcgcccccttgacagtgaatctcctcatcagtggaagaggtatgataatacgtgcctcaacattaagaagagtattggtcgggcatggtagctcatgcctgtaatcatagcactttgggaggccgaggtgggcagatcacaaggtcaggagatagagaccatcctggccaacatggtgaaaccccgtctctactaaaaatacaaaaattagctggacatggtggcacatgcctgtaatcccagctacttgggaggctgagggaggagaatcgctggaatcagggg

SEQ ID NO: 3125 - DNA, 622 bp, Homo sapiens
gccaacttactgccccacttctgtttccagaagtcacacacactagagtcagtttcatttctttgtagttaccctttttgcaactacagggctattacaaagtcacctgaggccactactttaaacagaaacatagtactacaaagccctagaatctaagacagccccccaatctgagggtcatctcagtccttgacactcctttctttgttaattccacaagaagaagaaattatagagctggcaccaatggtggcttcagcaccaatagtaaagggctggaggcaattgtaaacatcacctccacaatgaaggtaaccttattactcatcacattcaaagtgcagccctaaagaaaataatcacttcttattccttttctcgtatttttttcttggccactcattttcagctgagtgaagtattctactatgtgaaaatgattactagaaggaggtgttaggagagagaatgtttataagatatcttagtaagaaatgtatacttttgcctttgggaaacaaaggacaactttgttgctgtgtcaaactacttaatactcatacaaataaaaatatggctaggtaccgtggctcacacctggaatcccagagtcccggga

SEQ ID NO: 3126 - DNA, 147 bp, Homo sapiens
gggaatcagggttcgattccggagagggagcctgagaaacggctaccacatccaaggaaggcagcaggcgcgcaattacccactcccgacccggggaggtagtgacaaaaaaaaaaaaaaaaaaaaaaaaaagggggggcctttttt

SEQ ID NO: 3127 - DNA, 504 bp, Homo sapiens
gggcaggactggggattagatcacacccaaatgcaagctctgtggcactcctggtatagccctgctgtccccctgtagcctggccctgggaggggggctcccagacttcacaccccctcacctctttatccaggggaccggctgtctcttcctccttcatccccagcctctgtcagggcagggtagttcctcctcgagacagaaaattaccagatggaagtccaggcatggtggctcacgcctgtaatcccagcattttgagaggccgaggtgggtggatcacctgaggtcaggagttcgagaccagcctggccaacacggcgaaaccccatctctactaaaaatacaaaattagctggacgtggtggcttgttcttgtaactccagctacgcaggaggctgaggcaggagaaccacttgaacccagtaggcagaggttgcaatgagccgagatcgcaccactgcattccagcctgggcaacaagagtgaaactcccccgcaaa

SEQ ID NO: 3128 - DNA, 373 bp, Homo sapiens
gtatgttttccccaacattctacagttccttctcttatttataatttatatgtctccttgatttaaaatttcatccaatacctccagagatttgatagtttttcaggctttagttgcatacttatctacttatcttgcattagtcaattgtctgaatgcatttcaggagcaaaagtaatacagtttcttctgctagtgggcagcttcctttcttatttgctgttaagtctttgcttgctgctctggaagaggaacatatgagagtgttgtcaatcttccaatgaggaatatttgctttaacaatgtccaatgtataaactaatgctgtatttctatgcctttctgagtacatgacatattttcattatgactt

SEQ ID NO: 3129 - DNA, 638 bp, Homo sapiens
attttaacagcaaatatctttctttcttagtgatttaaatcagttgactataccttgcttaaatccagtttctcacaaaatagaataaacagcaaatggttttatgattgtagcaaatgattcttaaaaattttccctttgataaatattgtttctacctatgtagacataatgtggcgatttggagagtgacattagcttaggatcaaataggattccatgactgagaacagaaggaagattctttctttcttttcttttttcttttcttttcttttcttttcctttctttcatggagttttacttttgttgcccaggctggagtgcagtgacatgatctcggctcactgcaacctccacctccaaggttcaagcgattctcctgcctcagcctcccaagtagctgggatttcaggtgcccgccaccatgcccggctatctttttgtatttttagtagagacagggtttcaacatattggccagactggtctcaaactcctgacctcaggtgatccgcctgcctcagcctcccgaagtgctgattacaggcatgagacactatgcccggacaaggaagatgttttcttaagtttcacactggcacttgaccttttatgaattcacggagtctcgggt

SEQ ID NO: 3130 - DNA, 629 bp, Homo sapiens
tggaggggaacaacatacacggggggcctgtccgggggtagagggcaaagagaggaagagcattaggacaaatacctaatgcatgcggggcttaaaacctagatgatgggttgataggtgcagcaaaccaccatggcacatgtatagctatataacaaacctgcacattctgcacatgtatcccggaacttaaagtaaaattaattaaataaaaaaaaatgaaaatgaaaataaatgttgttatgagaactcatagtggcatggccccaattttagaaactgagcttaatacagttaataggtaaatgttagatgaatacctcaaactgaatgttaatgccaaaattaagatcattctttggttcaaaatatagagcatgtttatatcttaattaaaagcagtcatacttaaatctctccttttcggccaggcacggtggctcatgcctgaaattccagcattttgggaagctgaggcgggtggatcacctgaggtcaggagttctagaccagcctggccaacgtggtgaaaccctgtctctactaaaaatacaaaattagctgggcatggtggcacatgcctgtaatcccagctactcaggaggctgaggcaggagaatcgcttgaac

SEQ ID NO: 3131 - DNA, 470 bp, Homo sapiens
ataatttataaaactctgttgttcagattcaggtagtactttgttaaagtacatggttaatgtgagaaattacgtaaagatgacataatcaacctcaatcctaatgctcatctcattttcaattatcagttaactaagacaagagaatatggacagaataacaaatctatcatcactataaaaaacaactctcgctgggcgtggtggctcatgcctgtaatcccagcactttgggaggctgagatggtggatcacctggggtcaggagtttgacaccagcctgtccaacatggtgaaaccccatctgtactaaaaaaaataataataataataataaaaattaaggccaggcgcagtggctcatgcctgtaatcccagcactttgggaggctgaggcgggtggatcacctgaggtcaggagttcgagaccagcctggccaacatatagtgaaacccccatttctactaat

SEQ ID NO: 3132 - DNA, 542 bp, Homo sapiens
  misc_feature 216: n = A,T,C or G
gcgaagtgtttacattgatgcaagagatgaagaacttgaaaaagatactatggataattgggatgagaaaaagctggaagaagtagtgaacaagaagcacggtgaggcggaaaagaaaaaaccaaaaactcaaatagtgtgcaagcatttcctggaagctattgaaaacaacaagtatggctggttttgggtatgccctggagggggtgatatttngaaagaagatgaaatttcattagaagatctaattgagagagagcgttctgccctaggtccaaatgttaccaaaatcactctagaatcttttcttgcctggaagaaaaggaaaagacaagaaaagattgataaacttgaacaagatatggaaagaaggaaagctgacttcaaagcagggaaagcactagtgatcagtggtcgtgaagtgtttgaatttcgtcctgaactggtcaatgatgatgatgtggaagctattgaaaacaacaagtatggctggttttgggtatgccctggagggggtgatatttgcatgtatcgtcatgcac

SEQ ID NO: 3133 - DNA, 642 bp, Homo sapiens
gcaaatcttatggtcaaacggatcactatgcagctgtgacagtgatcatagctgtcctcaggcagctttggagtttgaatttaccctatctacatggtctaggaacttccaagctgagaaattaactcaatattagctccaagtttgtgatatttctaaaacagaaaaactgaaaaaccactgtagaggtgtacaccttccatcctggctgccaggattcaagagacaaagctctgttaatgaaagctcacagtcccaaagtataaaacatgtaagggaaaaatcaattcattaggagtgagaatcagaagatataaataacaggaccatacctaaaggaactttggatactagaaataagccaactaaataagtatatttaaaataataaaaactataaaggaggaactgaaaacaaaagattacaaaaagtgaggccaggtgcggtggctcatgcctataatcccagcacttcgggaggcggaggtggccggatcacttgaggtcaggagtttgagaccatcctggccaacatggtgaaaacctgtccctacaaaaaatacaaaaattagccaggcgtggtgtgcatgcctgtagtcccagctactcaagaagctgaggcagaagaatggcttgaacccg

SEQ ID NO: 3134 - DNA, 618 bp, Homo sapiens
gtggtttccctccagtcttgttcattattcaagtgactctccttggtctagcaacaggctaggaggtaactatgacattttgttcaggttaagcaggaagaagaaaacaaaatctacattctcttttttatattttaaacacaagccaacaaataatttggaaagacccatgattagacagggaggattttatgctccttcaagagtaattgagattgtttaattgtatggaggaatgagcatatctcaaggggaatcgagaaggtataatatttggatgacagaatcattaagaactggctttgcaccctggctacaccgttgcacataggaaatattagggtgcaggggtgcatgcctgtaatcccagcactttaggaggttgaggcaggtggatcacctgaggtcaggagttcaagaccagcctgacaaacgtggtgaaaccccatctctactaaatacaaaaaattagctgggtgtggtggcacatgcttctaatcccagctacttgggaggctgaggcaggagaatcacttgaacttgggaggtggaggttgcagtgagctgagatagtttcattacactccagcctgggcaacaacagtgaaattctgtcac

SEQ ID NO: 3135 - DNA, 611 bp, Homo sapiens
tgttactccttccaaactccgtactcaggacaagtcactggtcgacaacacttctgttttatgtgtctttgtctcagatgccactttccttgtataacccagtagctcacaccctggcatggacactaatctcagtgtactgaaaagcttttttaagtgccaagtctaggaatgtatttccagagattctgaatcagggaggctattggagaacccagactgtctgcatttctaatgggcatcccacatgatcctgacacaggtgccactgggactgcttttccaaaattgctgacatagacttgtgtcttgggcccatcctcagggaaggaggatgccagctatgagggatttgtgttaggactgtagaatgacctcatggcagtcaggagtcagggcacccaacagacaggagggctaagtacatcaaacaggagagctctgacttctaagaagctgatcaaagtaacgcagaccccaagttcttgaaggactaaaatcctgggagggccatttgtaaacacttttataatatatcacctcttcttctcatgtcagagccaggtataatgaccataacagatgaaggcattgacgcaggagaaacaaca

SEQ ID NO: 3136 - DNA, 558 bp, Homo sapiens
gtgatataaggttgttaaatctcttaaagatttttacttttgctatatatttttaaaatcttaatctaagtttatgtgaaaattttctagtaaattcaatagagacaggaataggaagcaggaataaaaaaagacagttgtataatgcatcaagatattgtgcaatgtaccaagaatgagtggtcatgcttaatttttacccatatatagatacaaaagcactgaatagaatcatatatcacagagtttggaagagagacttaaagagattatctaaatgctcgttctttgagaaaactaatagctacttataagcaatatgaacaaatacatttaaaaaatccagactttggccaggcgctgtggctctcgcctgtaatcccagcactttgggaggctgaggcgggcagatcacttgagttcaggagttcgagaccaacctggccaacatggtgaaatccagtctctacaaaaaatacaacagcctggccaacatgatgaagcccagtctctactgaaaagccggccatggtggtgggcgcctgtaatcccagctac

SEQ ID NO: 3137 - DNA, 559 bp, Homo sapiens
catcatgcctctggagcaaaagaggtaacagttgtgaaaatagtttgaaccatttaaaaatcaaactatgtaataatcacatgctaatatgattaatgttttattttagatcatgtttgttgggaaaaggtcaagagcaagggctctagagacagatggcttgtttcagattcccgcagtcttttctgcttcctgaccttagatcaataaaatacctaaactcttggagcctcagtttcactggctgtaaaatagaggagttgtggcaaggctgaaatgagtcattccacagaaaatttgggactcattggcacacactcaatagccaataaatattaactctgttgcgatgattcccctggagagccagggtttcagactctgtctggaacacaccagtttgctttgcaaagacaaactctgtcccttggctaaactttctgcccctcactttggctaacaccttcgaaaggcatgtttttaagggtcctcgtgagagggtacagacgaatcaactagtaaaaaatcaagaaagtcagtggcaccttgtccatatatg

SEQ ID NO: 3138 - DNA, 595 bp, Homo sapiens
gaatctcatcaacataagaggccacgctaagaagcctgggaagcctaggaagccctgtcgttgttcacgcgaatggtcaattgcttgcagttggaagctgagtgggaagtctggcaaacgtcggtattgcttgtgctccaacttcttaagtaacattttcctacaggacgccttcagcagggagcctggaaggatcagaagaagatgggagaacttccttcctgctggtcacttaggagccagaatgacctttgttacctggacttttccttttctcctcctcatcattgttccatccccactaagaccttcattattttggaaatattaagttagaaatctagtcatggccagcatgagagagggacagggatgcatacaggaatcaaactgaatacattttgtgttttcattccccgtaggtacttctgctggtgtcaatcattgggactggattatgtctaagcatcttcaacctcacaggggtaatttgaaaagttgaggaggggtttgcttttgaagagataagctcatataatgcagaatccagcctttatggggatcagggggtcactccaaccatggccttcacaaa

SEQ ID NO: 3139 - DNA, 534 bp, Homo sapiens
gaattcaaatccagctgtgcctccagccacagctcatgcttttgaccactgcgctctgagtagcagcacatacacagcagagaaggcacttgatcggatgcttttgatgccagctctaagagcatccagttctacacagatcagaaatagacacataggtcctctggttatttaactgaattcagtccatttggggcgtaatttttgtttggcttcattttactaagttcagccaaactgatttatatgaagcctccaattatcttttcagtacaccaatgccaaaaattttgttagggaaacactcttctcctttctccctctcagggagagatgattaagaaaaatcaagttctagtggcagctgggtcttagagagaaggtttttcctacctgattatccagttgttttggggatggcagttcacactgcttggagcagagtctaatttcccgaagattaataatattaaagaaagttaaatgaagcaaacagcatgccacactgtgcagagccccagtcagaaccacact

SEQ ID NO: 3140 - DNA, 511 bp, Homo sapiens
gtcccttctcttcttccattctcccttccctccctctcttcttcccactgcctccaagacacctgtactggaactttgtccattcttacactcacacacacacacatgcacatgcatatgtgtacacacaaaagtctcttgtccatcagatcatacaaatatatgcttgggacaggggtgatcacatgccccacatgcccagtggacatttaggctcagataggacaattctttcacaaggatgacaaaacctaccttccgtggttgctgtgagaacaagaaattgtacatacagtgcccattctacagcaaacccaacaatgatttaaaatccacaataggccgtgcggtggctcacgcctgtaatcccagtactttggggggctgaggcgggcggatcacgagatcaggagatcgagaccatcctggctaacacggtgaaaccccgtctctattaaaaatataaaaaattagccaggcatggtggcaggcgcctgtagtcccagctact

SEQ ID NO: 3141 - DNA, 556 bp, Homo sapiens
ggcagctcaccctgcttgtaacccgtatgttcatttgggcagctgtgttttccttttattcctgctgttaagttggactcaatgcctcttattttacactataaatgtttcctgaatcagtgagtaacatggatttttctgaagattgtgtgggagaactagatattagggttgacaatgcatacctctcagtatttccctcagaatattctcattagttatgtctttttatttcgtatttcccttctaggctacaatcacttgtcccaatcctcagtctcctcagttggtttcctttcttacccagggcagttttcctctctcagctttttcctccagacttcttgtaactcacatcatcacttgataccgtgttgaaataagtgaaattttgaagatgtaattgtctctgtgaggccgaggtgggcagatcacctgaggtagggagttcgagaccagcttgacctatatggtgaaaccctgtctctactaaaattacaaaaattagctaggcgtggtggtgggcatctgtaatcccagctacatgggaggctga

SEQ ID NO: 3142 - DNA, 643 bp, Homo sapiens
gtcacttcctttgtaaaaccttccctgcttccttattgcattgttaatcacccccttctgcttaatttccttacctacttacagaagttactcttatttattgagtacctacaatgttccaagcactatgttaggcaccagagattcaaggaaaaataagttatggttactgcttttgaagaatttataaacaatttgagggaaaagaaaataaactggcaattgcaatgtaacataaaacattgtgtgacagagtgtacatttaaaaaaaaattccaactaatttcaaggtggcaattgacagcgggactacattttatagttataattcattaagtgatcaatgtatgtgttatgagaaacaagccacatttgcataaaccagtgagttagagaggctgagtagagaaacctctgctaagatgaggtctcagagctcagagataaatcaaatgatcatatttatttctcatatttttttagaaaaataaagtgatcgcataaaggcagaccacatttgaatcaacacaaaggaggaaagatactaccaaaaccgtgtaagacatacaaggttttaaaagtgaaatagaaatgaacataacacactgaattcaacaacacattaaaaagattattcatcaca

SEQ ID NO: 3143 - DNA, 602 bp, Homo sapiens
gtaaaaactgacaattaggaggcattacaattcctgtctttaaattctgactccttgaagtctatactagacatgcccaggaaaatgctaaaaccggcctggacagctctggccatgatgcacatagtaacggccacctattttgccatcacggatgtgttgtaggattaaaaatagacttatgcaagtgacaattacaagccatttataactataaaacttaacaaaatagctgccagtttgctgaatctgaaaaagaaacctgtcacatttactgaattagtttaaccatagaattcagatgttaaaagaaactagactaaaggaagaacttctacaagctctcctgtcataagatttttacagtttctcttgactggaaacatgtaggttgctacaaaaagttactaaaggaacttttatctcacatctgccctgttttcctgaactttacgtaaagttcttaactagcttaacttaaatttaacaaacaggttggccgggcactgtggctcacgtctgtaatcctagcactttgggaggccaaggcaggtggatcacctgaggtcaggagtttgagactggcctgggcaacatagtaa

SEQ ID NO: 3144 - DNA, 184 bp, Homo sapiens
aatttctaaaacatatgtatattatttttatcatcataaaatattaacatttctataacgaaaaatttcaaacatacattgagagaaaagtccattcaactttcacacatgcaagttcctattaacaattaagatttgccctagattgcttcatctatcccttattttattttcttttttcaat

SEQ ID NO: 3145 - DNA, 387 bp, Homo sapiens
aggacactggcttgccaaacaggagtctgggcacttagcagccagtgctctgtgcaaaccagccagtgctctgaattcagatgagagctttgtgtttgccttattggaaagcccttgattcctgggcttctagaggtatgtatcactcaaaatctctgcagttcttttagggtaagtgaacgctttacttcttcatctattagaaaattattctcagatcatgaggtcaggagttcgagaccagcctgaccaacatggtgaatccccgtctctactaaaaatacaaaaattattccgggtgtggtggcacacacctgtaatcccagctactcaggaggctgaggctggagaatcacttgaatccgggaggcggaggttgcaatgagc

SEQ ID NO: 3146 - DNA, 401 bp, Homo sapiens
gtgagtcctaatgtgattttctgctcccatctgctattgttggttggttttgctttgggactgactgcttccccatgcctcacctctggttcatgacatcatgcctcctttgtctcctcctctcaccatcctctctggataccaaccatcatgacatgccctctagggaacactttgtactgttcccttgaacatgtgcatggtttatgatccagctccatcttaactttttatttatttatttatttattttgagacggagtcttgctctgtcacccaggctggaatgcagtggtgcgatctcggctcactgcaagctccatctcccgggttcatgccattctcctgccgcagcctcccgagtagctgggactacaggcgcccaccaccacgcccggcta

SEQ ID NO: 3147 - DNA, 92 bp, Homo sapiens
taaaaagcctacattcaaaacatgcagagatgttacattggtttttcactttctggtgcagtgatactgaaaactgtgggccatgatataaa

SEQ ID NO: 3148 - DNA, 649 bp, Homo sapiens
tcatccatcctttcaacctccagccgtctacacagcatctacctctctactcaccctctgttgattctccaaccactctacctccatccacccaatcctcacgcagatcccataatccgctggaatgcctacagttttccagttatatcttgactttccaaatatgatgttattttatgagagtactcaaacactgcttcctctgaggagctttccctgatgctccttctccttcctctgaaactttgaaacaacctgtctacacctctcaggacacctagcttgtctgctatgtctgggtgcagttatttgtatcctgagggcatgtggaaaaaccaggcagggctaattcaaactcggctctcacagatggggagctatgtgtccttagtgataagatgaaaggatggattgaggatggatgcagggttgatcattgatggactggatggagatcagatgagtgacttattggaggttgatggaccattagatggatgtacagatggatgacaagcatccagaggcatagatagttggagaatatgagaaagaataattaaatggaagagtaaaggctggaacaatgaatacaaggggtggatgaatggatggaaggaaggaaggatggatggatggatagatggac

SEQ ID NO: 3149 - DNA, 554 bp, Homo sapiens
aaagggttacatttacaagttagctatgcttccctcagtatgctttctctgatttgcttgtatttgacttgaaaatcaaaagtcagtgttcagtggtactgctattcattggctgtgatatttattttatgagatactcataaagggagggagtattttgaaatagagctatttacctttagtagctctaatgcatgtgctcgttaatggcactttctcattatccaagatagggcacttgaattgataaactgatgctgcttggtttggataatcaacttctgtgaactgagtgtgcaatacacttagcaagcacagtatgggaaactagaattttgaggaatatgcctcctaggtaactagttttcaaagcagaatcactacacttccttaataaaaataagaccatagagtatgcaaaacatactaacattttagttaatgtatccttgcttcttggaaatacaaagctaaaatttacctttaaaagtcatcttgtaaagaattctgagatggaaaatctgtaaatgtttgaagggcatggagaatttgag

SEQ ID NO: 3150 - DNA, 85 bp, Homo sapiens
agaagcacatgtagaataatcttgtttataacattaataacattaaattagcatgtagtatttattgagtctttgtgctaaacat

SEQ ID NO: 3151 - DNA, 484 bp, Homo sapiens
acatcagagatggaaacaaatctatcaacctacatccagtccacctacataactgaaagagataataaacttttgctattttaagccaccattgttatacagcaatatacagtaaaaatgcgtacatgtctaatagtagttagtgatcttgtcccaatctaataaacaatggtggtaaatcagcagcaggagtgaagaaagccacaccacacagcttaagaaaggctcttaatatttaattttaaaaaaagcaatcttatagctggttcctgtgcgcctcacccaggagcctggggaccagccagactggccagtcaccaacacacactgatgcctgggcacctgaagaccaacccaccagtgccactaccagaatctgtgtagcccggcccagggatgcgagggccaatcaggaagggcctgacactgctaccactggctccccacctaggaccttaagattggctcacccaggacacacaac

SEQ ID NO: 3152 - DNA, 426 bp, Homo sapiens
gatggtggctttaacagaagcctctgagcaaagagcagatttggggagaaaagaatgggaaccacagcatgtttcagacagaacagttcaaataaccaggctatccagcttcctctcagaaatggccatctgacctcattctgtctttatctcacatttttactccacaaaagagattctaattgagtcagtttcctacattccaacacggagcagggcagccatgcgccaggctacctcctgggcccctcttgtgatcactgtatacttgtcttcttttccttggaaactgatccttggtctcaaggtacaagacatggccacttcattcagatagactgagactgtggtatggcaagaacttagagtttcaggtgtctccaatacagccagtggagcttagcagagatggtcgaggatggagga

SEQ ID NO: 3153 - DNA, 453 bp, Homo sapiens
tcactgcacaatgtgctataattcatgtctctgtagaggtcattgctctttgccacacccatgcctgccctcatgccactgttcctcttcatggaaatccctttcccatccatctctgcctacccaattctcagctccttttgggccctcgtcaaagaaaatcacatactctgagaaagctttcctgattctctttagcctaaattaatccctctctgctatcatagtccttcatatatagtatatgctttttagtatatagtatatacttttctagtatatactttttctgtctcatacgattttttgtattattttccagttatctagatacataaatataaaatatttatgtttgctattttaattaatagaatttggcatattatagtagtagatggttaattaagtttgctgaattcaattttgaatggatcttacatctatttcact

SEQ ID NO: 3154 - DNA, 499 bp, Homo sapiens
ataggatacagtctcattggctaggtacttttcttttgagggcaaatagataaggaactgcccaaagatttcagacagaggtgacagcctcagtttttataatgcacaaggactgcccacaaaatgaccaaagtgattgagacacaatatttttccctcaaaagcttaaagcctgatggaggaagcagaattcatacaatgtgcaagaacttaaatagaaacggcttagacaggtgcggtggctcacagttgtaatcccagcactttgggaggctgaggtgggtggatcacttgaggtcaggagttcgagaccagcctggccaatgtggcgaaaccccatctctactaaaaaatacacaaattagccgggtgtggtggcaggcacctgtaatcccaggtattcgggagcctaaggcaggaggatcacttgaacctggaggttgcagtgagcttagatcgtgccattgaactccagcctgggtgacagagcaagactctg

SEQ ID NO: 3155 - DNA, 407 bp, Homo sapiens
tgtggataaacttgccctaacagaaatcaagacatattatgaagccatggtaattaatgtgttttgggactaggaatagaaaaataaaccaatggaatagtatagagagcctggaaacaaggccacatatgtatatagcacttgttatgtgatacatgatgtgggggtgattggtgggcgaaaatggtctgttcaataagtgttgctaggatattaagaacaacatggttattcatgtggaaaaattgggcttgggttccctacctcacaccatagacaaacaccaattacagatgcattaaagtagaaaatagattatgacttttgagtgggaaaggatttttttatgacagagtacttaagcatttaaaaaaacctccaggtttaattacattataattatgaac

SEQ ID NO: 3156 - DNA, 485 bp, Homo sapiens
aagttaaaagtggggaaacttcaccaaaaaatttcacacacaaaagtaagaatatctggcaagtacgcccatgttgccacttcacaagaatctgctggagcttcacaacagctgctccctttggccaagctcatttgctgtgtacactcacatcactccagtgtattatctacctggctgtggcaggcactttagtttgcaacccttgcattaaggcatcaccctattaaggaagaggcagtgggcagacacacttcactttaggtgcgtaaaagagggaagggtctcaatatctcacataggtctgctaaccttccagaaataggattagtcaacaaacaaacaaacagaaaacaacccagatgagcactgaaggttacaataggaaatgtaagtagaaaaacacaattaaacatgacatgtgtactcatataagtcattcagttcgagagcagcctggtcaatatggtgaaactcgatctcta

SEQ ID NO: 3157 - DNA, 625 bp, Homo sapiens
tgcccatcctggcaaatgggaatgaagaagtaatttaataaggtttagaaaaaataaagaagtgtgatggttcttgaatcgaggtgttgagtagcaaactgttaccctctagtcccgtaggaattaagccattgtggtcagaagacaggcagtgatattggccattttgcagcgagatctccacctgatgctgtcacaatgcaaataaggcacatactctgcctattaataagttaaatgtactgttgactttgctttttacaccttcacttccctgtaaacataaatatttacatttgtgaggacatttacaaagcactttcacagatctctatgagatcagaaatcaagccaagaaaggcaataatataccttatggaaaaaaggacaagactcagagagggaagtcaaataaaatcataccaacagagctgggaaaaaaactcaggtgtcattgatccacaccctgtcactgtccacgcagacctcaaggaatttagttccaaagggatctcatgttttcccaaattgcatccttcctcttgagtttccactcttgagaatagcaccattaccccatcacccaagctggaaatttgggcatcttcctaaacatcccacactc

SEQ ID NO: 3158 - DNA, 514 bp, Homo sapiens
ctgcctcccaggttcaagcgattctcctgcttcagcctcctgagtagctgggattacaggcgcctgccaccacactcggctaactttttgtatttctagtagagacgaagtttcaccatgttggccaggctggtcttgaactcctgacctcaagttatccacccacctcagcctcccaaagtgctgggattacaggcgtgagccactgtgcctggcctctaggattatattaatagaacaatcttcaattattttatctttctttatctttcttttcatgtaggaaatgtcctaaaattttcaaaccctcaatttgaaagcacttttaaaatcatacatagtcgagcattttatataaaaacaactaaaaagtctgtgaaattttgcagtataaaaatgcaatggcagcagcaggccttattaattgagcctcttggaaatgtggctggtcctaggtccgtagcctcaaaggccctggcttgtaactgcaggagctgaccagcacagctctata

SEQ ID NO: 3159 - DNA, 579 bp, Homo sapiens
gactctcctgcctcagcctcccgcatagctgggattacaggcacacaccatcatgcccagctaattttgtatttttagtagagatgaggtttcaccatgttggccaggttgatcttgaactactgacatcaggtgatccgcccacctcagcctcccaaagagttggaattacaggcgtgagccaccacgcctggcttctaattgtttttctatgctcctaacattatttccaagaaagaacaaattcttcctttgctgcatttgcatttttaaaaattcacttttacattgtgaccactttgagtctttatcattacacaaaaaccagtcctgtcttcctctaatcttaccttaatggtctactcgattgttatttataaaatatggtatcatatagctccatttttaaatactcaataaattgttcttaaaataatattcaaacctggactggaaatctactcacctgcaatgtaatgccttcaaccttatcctctataactcttttattccaggcttgggaaaagagacaaagcaaggccatatgccatatatttaaatatttaaaagatgtaagta

SEQ ID NO: 3160 - DNA, 128 bp, Homo sapiens
aactatcattcagttatctgaagaggtcaatgctgggggtttctgaactgggggcatcaggcacagtttagggcaggagtattatactgaaaacaagaggtttaaataaacatttatacatgtgaaag

SEQ ID NO: 3161 - DNA, 597 bp, Homo sapiens
gacagaagggaaataaactcatcctgccttcttccacctgttttgacctagccacactggcagctgattggatggggcccactcccagtgagggtgggtcttcctctcccagtccaccaactcaaatgtcagtcccctctggcaacaccttcacaaacacactcagaaacaacatgttaacagccatctaggcatccttcaatcaagttgagacctaatattaaccatcacaccatgtaacttcaactttaatttgtaggcaatgattaattacaaaaaaatgtcattagcagaattaaaaacttcaagataacgatttatctgaagagattaaagcaatggttctcaatgtatgcttcatgaaccagcagcagcagtatcacctaggaatttttcggaaatgtttatactgggacatcaccacaaattctaccagacctacaaagcagagctagtaccaatcttactaaaactattccaaaaaaattgaagaaaagagagtccttcctaactcattctatgaaaccagtgaaaaccagtgtcaacctgatgccaaaatcaggcaaagacaaaacaaaaaaaaagaaaactacagac

SEQ ID NO: 3162 - DNA, 527 bp, Homo sapiens
taatttacgggcaaccagagagcataaaccaaagtagatatctatctagatagctagatacatctccacatcattgacaggatacattctggccgagtgtgagtacaacctatggatgtggttggagagaacaagtgttccacctgaatggcagatcaggattattccttctcatctgctgcaatggctcaatgtgttaaggagaggagcgagacagcaagaaccgcattcattcagtcatacagaccaaaaggaggaatgtcgcccagccctctaaactgacccagaacccagctcatgtctcaactgctacttctcctacttagaaagaagtaactccaccaaagcagggttctggacaaatatatttttattgatcatatacaaatagatgaagatggacttggatgttaagaaaaataatactatacaaaatcgagagtagacacagtcgcccctagacttaaattaagggtgtgtacattagataatttaatccaatgtatcaggtaaaaacttgaacaaac

SEQ ID NO: 3163 - DNA, 436 bp, Homo sapiens
tttaacattctcagagctgatgctatggagcacaaaagtaaacctgctataggctttacaaattgcaactgttgagacaggaaagaggactgtgatagttccttctgcctggaaatgaggaatataggaacaagaccagagtgaacctggaacccagtagatattgtcctggctgggactgtcttggttagcagggcactctgcttgaaatcagagatactttaagctccaaaagccattcaaaatgatatacaaggtatgacacaggcattaaggatgatgctgtagatcccaaagagttcacatcaatggttcagttatctctactaaaacaattacaactcatccatttttcaggtatgttattggtgcacggataatgggcataactctacagaatacttaatgttctaaaggccaaaaaaaaaaaaaaaaa

SEQ ID NO: 3164 - DNA, 173 bp, Homo sapiens
tatttatcttctatcttgaacattaagcttatttgctacttatgtgatcacaaataagacagcactgaacatactagatttttaatactttgaaggcatttatgctaagactatttttattggatgagttggtagctttactagaattaaaattagtgatatttctaaaactc

SEQ ID NO: 3165 - DNA, 582 bp, Homo sapiens
tttctcagaacataatccagttgttaagtgatgcatgaccctactcaatgtgctgaatacctcactccaaaccatttcagaaaattcagatattatcaaccctcattgcactgccttccattagaaacatgggaagttgttttggaaaagatgtacctgcccctcaaccaggcccaggcgcctgctgagcctacgacagaagttgctacccctaccccaggtgaaagtacagcaggacactctttccaagtttatcatgagaaactaagcaaaccaccatccgatacccaacccaggcccctgttctacatagaagacagataggaatattcactcagattgataagaaaagcatcctgcacatctcaggatggtcaaacctccatgattgctatgactcttgaatgacaccttcccccggagaaacagacaagaggaaatggattgaaattgatgataggccgggcatggtggctcacgcctgtaatcccagcactttgggaggcagaggcaggaggaggatcacttgaggtcaggagttcaagatcaccctggccaacattgcaaaaccccatctctact

SEQ ID NO: 3166 - DNA, 609 bp, Homo sapiens
tttatgatgaagcaaaagtgatagctttgaatagaatataaccattctgcttttcactttcagtacaatattcaacaaattacataaaatatccaatactttattataaagtgggttttgtattcaacgattttgcccaattgtctgctgatgtaagtgttctgagcacattaaaggtatgccaggctaagctgtgatattcagtaagttaggtattaaatacatttttaacttactgtattttcaatttataatcagcttatcaagacttaaccccattgtacattgaaaagcatttgtattgcattaaacatgttatataacatttttaattgaaattactggcaacttttgaaaaaatgcaatgaaataatgtgctttgctattggttaaaatgtttttgggcagggtcagtggcttacacctgtaatcccagcactttggtaggctgaactgggcagatcacttgaggtcaggagtttgagaccagcctggcaaacagggtgaaaccccatctctactaaaaatacaaaaattatctgagtgtagtggcatgtgcctgtaatcccagctactagggaggctgaggtgtgagaattgcttgaacta

SEQ ID NO: 3167 - DNA, 610 bp, Homo sapiens
aaaacagggttagagtaacttgtttaagtggcagagcttagactgtaatggaactcattcctgaatccaggttaagccaacttattccagagcctaagctcttaaaagaagcagaggaaaggaatcctgtcaattaacctaccaaagaattattaaaacccattaactcttgcctattaccttaaagttttaagaccagcttaatttgaatgaaggttacctctcacagtgaaatactccatgcttccctatacttgaccctgtcctaaagtgatgactggttttctctcatcttttattttttactcaatttgtttgtttgttcatttacatttttctaaaggaatcttctacactaacagcaagcaggtctgggctcagaaaagatagcctgtcctttgagtggaaagaattactcagggtgcttactttttgagctggattagacactgagcaaatgtgtttcctgttctgggctctaggccctgcttgccagagcagctacgaatacttattacagccttccagaggctgttcgcagagtctccgagattggttagtaattggcatagaagaaaatgccattggcttaccttactctgggcttttt

SEQ ID NO: 3168 - DNA, 618 bp, Homo sapiens
agccctcatgaataattaatgccaccataagaagctcttaaagaagtaaattcactctcttttgatcttctgctatgtgagaacgcaatgttcctccccttcagcagacacggcaacaaggtatgagtttggtgcaaaagtaattgtggtttttgtcctttcttccaatggcaaaaactgcaatcacttttgcagcaacctaataccatcttggaaccagagactgaacctgccaatggcatgatcttggacttcctagtctctagaattgtaagaaatatacttctgtcatttataaaatatccagtctcaaatattctgctatagcagcacaaaatgaactaagatgccttcccccaaatgtgctctgctctttaatatcaccaaagttttatacctactcttttttctgcataagagtttattcattattttactcaacctaccaatccctctcactctttaaaacccagctagcaggtcacctttctaggatattttttcccaaatctccagatataatcacttgtatcagtcaaggttctccaaagaaacagaaccaataggaccacatacaccacacacacacgttcccattcactcacccacacactacac

SEQ ID NO: 3169 - DNA, 375 bp, Homo sapiens
actctttttgcatttttaataacaacttgaactcctgatatgtcgtggaaaatataaccccttcaacagccctttcaatgggttgctactattttgctcaccccatcttcacctgcctaatcatgaggaggtggggtatatacaatttcagttaatttgtagttatcagtctattatagttctttccttctgaaaaccaacaagtaaataaaccagcaagcatcaccaataaactttgacagtttatggttcataacgtacgtctacaccaaactttccattcaaatgctttttcaaacctttgtttggtttctttctctattaagacaacttttgcttttggctttcaaagacattctctccattataaactct

SEQ ID NO: 3170 - DNA, 399 bp, Homo sapiens
tagagtttttaactgtcagacctatccacactgagcccccaacaatggatcaactacagtacatattttgctaacccaccatggcactggtccccatggtggtttctgccccagtaagccattcttccctctattcacttgtctatgacttccatcttgagggcagcaatttgccctgtgtcctcactgctcttaggcaaccaaaaagtgttcttaatttttcggtctgttcggtttttacttgttgttaggttggagtggcaacatctaagccccttatatacagaactggaaagtggaagttctttgcaaacgtatttattgttgctttttactgactctgacctgagcatgctgggtcctatttttctgcatgttgatgcagcaatggagaatttt

SEQ ID NO: 3171 - DNA, 433 bp, Homo sapiens
tggaccaaagggacccaacctcatctgggagaccattgaaggaaatgacatttgggctgagacctaaaaaataagtagagttttgcttggcaaaggagagaacaaagagtattccaagatagaaagacctggaggtgaaagggaagatctagtaaattttaggaactagacgttccttgtgaaaggccaggccagaaggagaaaaatgacaggcatggagttaaagagcaatcagtgcaggagcctgatcatgaaggagcttgcctatggtacagacttccagcgttttcagcagggaatttagcaaaatcaattcagctggagaagttaagcgaggtcacagagagaccagctccctgttataagccagctgggtttgtggtcttctgatgctggagctgagggccaccttccaatggaagccaccatttat

SEQ ID NO: 3172 - DNA, 431 bp, Homo sapiens
aatggagaaggcaccaacttaaatctgcataacaaacctaacccttgtttactatgcttttcctgggcatctcctcattgctgcccccttcacacacacatacacacacacacacacacacaccttctacagaacaaacttctactattttttctcttgttaatctgtcttttgttacaggggtctgtctcaactaagaaccatgaaggatagaggaaaaattatttttcctgtcctacagatgacatagagaaaaagagtaacccatacaaatccagccttcaatccatccttgccaaggtgccagacatgtgaatgaaccattggttattgcagcctgctatggtttgaatgtgtcccctccaaaatccaggggttgaaacctaataaccaatgtgatcgtattgagaggtgggtcctttagtaagtga

SEQ ID NO: 3173 - DNA, 532 bp, Homo sapiens
tctttcgaccattcctcaggatctctcagagaaggcccaatacttatgatcttacactgtctcatctctttctccatcaccgtttattcagtcatactaatctactagcagttgccctgatgtcacaagtgttctcacactccaccctagctcatgctgctctctctctacactgaatgtagtttatgataaactcctatttattcaagatttatgtcatgtgtcatctaatgctttagattgggttaggcctctttatgccttgcttccctatttccaaccataactcttagcaaaatcctttattaaaaaagagttttgttggccgggcacagtggctcacccctgtaatcccagcattttgggaggctgaggcgtgtggatcacctgaggtcaggagtttgagaccagcctggccaacataatgaaaccccatctctactaaaaatacaaaaaattagctgagcattgtggtgggcacctgtaatcccagctactcaggaggctgaggcaggagaatcgcttgaacccg

SEQ ID NO: 3174 - DNA, 396 bp, Homo sapiens
gttaatatgtcataagatggttgtgaggattatgagcaaatatactaagtatttagtagcatgattatttcattgtactacaaagcatttgctcttattttaaattagacatttagtagtagatagagaagacttcttgtcccttcatccttaagcctttttaccagcttttttttttgttttctatagtaacaacagagtcataactgatacttgaatacatcctccttttgcaatcctgaagtggttccattttcaggaagctgattccctttggcaagcacaaaattatcatttgacatttgcaggtgatgcatgtcttcggagaaagaaatgtaagcaatgtcagagttctcctgtacatcagcaaaggaaacacatgtgagccccaggctg

SEQ ID NO: 3175 - DNA, 587 bp, Homo sapiens
  misc_feature 334, 335: n = A,T,C or G
gaggttaagataggttctttggaaattgaatatgaagaacatggaccataatgtttataatcctttttgttatggcagacacataacttgaccatcctccatgcccaccatgcatgggattgcttttggctgtatttatcagagagtatgatgtaggaattcctagtaattcaaaatggttttcctattatcagtacctcaaataagaaggaaaaaagaatcagacattttaagacataaacactagttcgtttccatgccaataaggaaaatatttttctccttcatagaaaaaaagaaggcaggaaactatgcgtgatcagaaagttacatnntaaagcaagagagaaaaccaacaaacagtacgagaaagactaatgaaagactgaccgggcacagtggctcacgtctgtaatcccaacactttgggaggccaaggcagatggatcacctaaggtcatgagttcaagaccagcctggccaacatggtgaaaccccacctctattaaaaacacaaaaaattggtggcagatgcctgtaatcccagctacatgggaggctgaggcaggagaatcgcttgaacccgg

SEQ ID NO: 3176 - DNA, 630 bp, Homo sapiens
ccatgggtcctttgtgtcttgcagaacttttttcggcaggtgttgtttacatatggttcagagcttaaagaacagctgtgttccaggccagggcagaaagcacaggcctgtctgggaggggcatcatcactcctgcctgcctgcccaaccgacctgtcggtggactgaatgggccaagtgttcagaagtccttgggaagaggatagtgtcctgaatcataatgtggtattttctggttttttgtttgtttgtttgtttttggtaaaatgttaattgcagaagtatacaggttattttatttatttatttatttttttttgaggtggagtcttgctgtgttgcccaggccggagtgcagtggcatgatctcggctcactgcaacctccacctcccaggttcaagcaattcccctgcctcagcctcttgagtagctgggagtacaggtgcatcccgccacgcctggctaatttttttttgtattttagtagagatggggtttcgccttgttgcccaggctggtcgcaaactcctgagctcaggccatctgtccacctcagcctcccaaaatgctagaattacaggcgtgagccactgcgcctggcccatacaaaaaaaaaaaaaaaaaaaaa

SEQ ID NO: 3177 - DNA, 459 bp, Homo sapiens
  misc_feature 396, 397: n = A,T,C or G
taaaaccctgtctctacaaaaaatgcaaaaacagttggatgtggtggggtacacctgtagtctcagctatgcaggaggctggggtgggagggttgcttgagcccaggagattgaagctgcagggagcaatgattgtgccattgcactctagcctgggcaacagagagactccacctccaaaataaatacatagataagaaacgtaaacctaaagagtaattagaagatgcctttaaagtgaaaagcaaaggtttctcctctaattctggcagtacattttagaagaatttctttttattaacattcagagctttcaagtgaatctgagtgatattcaggtagtataaataggaaaagactagtgcatcatgctaattgctatataagcattaccannatcagtgttgcttcgtctataaaaagcatagtcatatattccttgagtgggatagataaccc

SEQ ID NO: 3178 - DNA, 558 bp, Homo sapiens
tgggaggatagattgtagcagtgagtatttaccaatttcatttgactaacaggtccccttttctacagagagcctctagaatatgcttcaaaaataccattggtggcgtatgtttttgaaaatcttaagtttgtccaaatgatatgttttcttaccatctggactcccactccttcaccccacgtctggttggttttcagtttcccccaggctcttaagaaaggctgcacgggtgaaaacgaggacagtggttctgacccccacatacagtggagaagcagatgcgctcctgccttctctgagaacagaagtgtggacctgggggaaagggaaggaagggcagctggggcacggcgatgttctgcctaggtaagcgctaccaacatttaccgatagaagttggcttaaacaaataatctctctcctgggaaggtctctaaatctcactttcctcatagaggaaatctgggctcttctagcttcagattattacacaccattaactctgataaaaagctgtcactttactcttgaatttgttcttaacagtaaaggact

SEQ ID NO: 3179 - DNA, 547 bp, Homo sapiens
tagcatttacattgtttctaatattttgatagaataaattaatactgcatcagattcttatgcctgtgtcctttggctcttatttctaacagtagaacagctgagttaaagagtatacatgttgaattttgataggcactgccacactgctttccagaaagattgaccaattaccattctaccaacaaagattgtcctttgttcacattctcaccaacagtggacacttcagtgtttttaattttgacagaactgattggcaagagcatgctatttattttgatttatagttacctgattagtagtaagattgagctcattttcagtctctccttttactatggctacaataaaagagctgaaagtgtggtttttgatttatttcttttagatataaatgaccaatccaaatagtgatattttgaactactaatttctaagaagattcgcattggaatgttacatatctccatattaggaaaatcagtcataattgaactcccaaagtcaaattacatctgatgtttattctgggattcatataatt

SEQ ID NO: 3180 - DNA, 615 bp, Homo sapiens
agagctacagatataaaagaatgctgagaacaaagcgagagcagtcaaactggctgcatacaccctcaggaggtctggataaggctggatactgctggagaagcctggacactgttgagaagttcctgaagagccaacaacaatgccagcaagccaagtccttcatggagctgtggccagcaacatctctggctctcgagtccctacagactttgcatggaatgagatgcttgatggtgaaagattccatggtacaaaaaagcctcccaaacctaagcagacaaggagaaaaactgccagaattctcagctgtaactgaattggtacaaactgcacaaactagaaaatactaataaaaacctgcagcattttacttaaggttgaaatatgaaggtgatgcctttattttcaaagataaagctactgctccagtatctattgattagatgcattgagtcatttcttggtagtacttggtgggtttttgttgaatcatcatactcctactgagttccctgagcaaataatggtaagaatggattggcagtggtagaaagagaatttgcatcagtactctggggaagactgatgaccatttaacagtacacaatctca

SEQ ID NO: 3181 - DNA, 599 bp, Homo sapiens
acatatgtttaggggctccttgattaatgtctgtctcctactctctcctttaagatccatgaaaggaaggattgtacttatttttgtttttcattatatttccagagcccaactcagtacccagcacatggtagatattccataaatattcatcttaaaaaaaaggaatttagttagttcttagttaaaatgcccttcaccctagaaccacttccctaaacccacttctacttctcaaacactgatgggcccaggaatctaatctcattggcctcattcatagatcagttggtttacgtagctaagcagtatttccaccgggcacggtggctcatgtctgtaatcccagcactttgggaggccgagttgggtggatcacgaggtcaggagatcgataccagcctggccaacacagtgaaaccccatctctactaaaaatacaaaaattagctgggtgtggtggtgcatgtctgtaatctcagctactcaggagactgaggcagaagaatcgcttgaaccaggaagtcagatgttgcagtgagccaagatcgccccaccgcactccagcctggcgacagagcaagactccgtcccaaaaa

SEQ ID NO: 3182 - DNA, 570 bp, Homo sapiens
tatccatcttttgatctttcttcctgaaaatttggtccaaggcaaataccttataatcctatttaaagaatattcacaggctgggttcagtggtaatctcagcactttttaaggcccaaggtgggtgaatcacttgaagccagggtttgagactagtctggtcaacatgacaaaaccctatctctactaaaaatgcaaaaattagcttggtgtggtggggtacacctgtaatcccagctacttgggtgcatgaggcctgagaatcacttgagcccaagaagcagaggttgtagtgagccatgattgcaccactgcactccagcctgggtgacaaaatgagactctgtctcaaaaagcaaaaaggatactcacaaattcagtacctccatcctatttcattaaagctctgattaaacatatatgtttatgggccgggtgtggtggctcacacctgtgatcccagcactttgggaggccaaggtgggtggatcacctgatgtcaggagttcgagatcagcctggcaaacatggtgaaacctcatctctactaaaaaaaaaaaaaaaaaaaaa

SEQ ID NO: 3183 - DNA, 560 bp, Homo sapiens
gtttcctctaccactaactactctagacactctcaactttttcgcccacatcagcatctatacatgctaaagtaattccagtttgagcccccactttaagcctgccctccacacccaaagcaccttttacttctacccattatgctcttaaagtttccaaacctctcactttttttagcatcaccaacctatagctcacaggaaaaatatggcctgcctcctgttttcatacagaccataagctaattatcatttttacaattttaaagaatttgaaacaaaaatggaagaagagataatgtagaccatatgtggcactcatacaaagtctaaaatatgtattatctggtctcttacagaaaaaaagtgtcaatgcccaatttagacaaaagcaaaactggtggttgatactatttccccataaatcttagcaccttagggtggttcttacctcaggaaactggtggaagaaaacaatcaattcaatagcacatggttgcagtaaggaaactcaactgttttgctttcaacacatgtgctttaaatatcttggacatcag

SEQ ID NO: 3184 - DNA, 513 bp, Homo sapiens
tacctactgtcaggaccaactcctgccctatactactttattctaattccactccctcggctctctattgccagtcatatatgtatactccattcaccttttgcttttactttcccgtctaaatgacgacttgaaggatataaaatgaaacctggaaaaatgcaaacattttttcctatctgtgcatggtagatttttattttgtgactttgacaatttttccaaatttatttacatctttagaatgttagctggaaataagaaactcctgtctcattttcatcatgtttaaattgaactatatgaagccattttcatcaacaaagaaattgaaatatcagaaatttcatatgatctaatacaatattttgcccatgaaaaaaataaaatagtgcacagtcttgggtcacacagggtttgtgatttctattctggcttcacatgccactgtgccagctctttaacctaccactatcctcagaaataaaataacagtagctaggtgcggtggct

SEQ ID NO: 3185 - DNA, 542 bp, Homo sapiens
agccaagattcaaacctaggtcaaagctaagattcaaaatgaccttcgaagccatgcttggaaagtggagggacggttggaattgtgcatggtttatttgcgcttttttttttctccaatagcacctagcactgtgatttcacagtagtttgcatagttgaacacttttaaatgctctataaactgagttgtgtaatgatcagtgtgtatatatgtgtctgtgtctgtgcatgtgtctgggaatgtgaaagaaagcaatgaagagctgtcttcccaggaggaagagattggatattcaggttattaatctacgactatgatatactatctatgagaaaagtatcatcagaactttcaggtgtagaatttcaccaatctagcattgttcaataggtccaaaatagtcttcgataatattttttacatgtaagtacatatacttaagcaccatgtttatgcagtatatattttacttgaactaataaacgaccacccatacagctagaaatgttaactctctctttctctctctctctctctgg

SEQ ID NO: 3186 - DNA, 612 bp, Homo sapiens
atttgctttaacatcaaaatcatgtttcttctaaaactaaaggggaaattgatactctaggcgtatgtactagttgtactgtggcacttcatcatgtccccagaggggtgcacacctatcagattaactgccttttccaaaatgctctccttccatccgtgaaacacatctacaaatcaagttcctaagagttatttgtccaaggtgctgccctgaggcccaaggcaatagttaactgaaccagagaagtattcagctcagggcagccaaggagattccctgtccagagaatgtgagaaggagatgaagagtgagggtcagtctctctttggctgaacctgtagccatatgttccacaactatggtccaagaagttggaaaggcggtctttagaaaaggaaggaatgaagaagacactcagagagaagcagacaccagaggtaggatgggaatgctgcctgttcctcacagagccctgtctatggggttacgcttcctggggctgggctcccatcatttggaagctcagcttcctgagtagtcacctcagcatacacagaacactcatgtgagaaacacaagctaagtgacaaaaaaaggcaggcacaatag

SEQ ID NO: 3187 - DNA, 568 bp, Homo sapiens
tctctatttcatctgtcaatcaatcaatctaaatgtcacactgcactgacccactgctgaatgtcgtaaccctgatgcttctgatgccttattatgaagtctaggtcagtattaacctggacagaatgacttctagaggctttcctcctccctggaagctgtagccttgtttaggtgaagctatcaatttatcagaactttcaaagcttgtatgtactccacaccagagggacagagggactgtcttccttaacatctcatcaaatctctcctctcagtgatgtttgactcagtttgccccaaaacctctcactgagcacatacacttgcggtagaacctgtccttggatacagggtgaattagactcagtcatcagaattgatgagcaggtaagagaaatgagaattagtgacggaggtattcaaagggtgcagtgagaccattatcctggcctttcaggtgggtggagtgggttggacgctggtctctgtgttgggctcaggaaagccctcagataaaaaaagactggaggctgaggcgggcggatcacgaggtcaggagatcgag

SEQ ID NO: 3188 - DNA, 628 bp, Homo sapiens
atctaggtacttttataaaatcagattttaaaaagtggacatagtacatccagtctagtagatcataccatctactgtcatgtaatatggcaaactgtatcattgtcacttcagtagctctgtcaaaagtgctggactggaaggcaagagatccatgttcttaacctgagtctgttactaattacacacatgaccccaggcaagtcacttaaccttttatggtgtcagtttcctcatctgttaaatgaagggattagactagattatttccaggactccttccgaaaaagtacaggagagagttgtataactgaaaggcagaaagtggaataattgaggcttggaattcagggtgacttaaaaattactttaggctggacatggtggctcacacctgtaatcccagcactttgggaggctgaggtgggaggaccacttgagcccaggagtttgagacagcctaggaaacacggcaagaccttgtctctacaaaaaataattaaaaaaaaaattagcctggcatagtggcacatgcctgcagtcccagcttctcaggaggctgaggtgggaagatcacttgagcccaggattacaagactgaagttagctatgttcacaccactgcagt

SEQ ID NO: 3189 - DNA, 579 bp, Homo sapiens
gtaaggttccccaagctattttctatttctttcataacatagtcttatggcagggtcatcgaaagtactcagcgagaatctcttcaaaagaaaagatctgggtcttgatagcaaaaagtgctagatggagtaggagttgggaagtggtggggaagaggaggcatgagaagagagagaatagagagtgagtgaatgggaatttacaaaaacataaatacttgtcaatttattttatctaaaaaaacccataaattccaaaacccatgaagaaaactaaattaaggtagagaaccaataaaataaacattaacagttggaattttaattcaaagcagataaaataaaaatgtatagaactttggaataagtacagtttggagcttcaaagaagtaaaagaaggaaagatatccaataggtagaaatagtgaaataaaacgtgagtaagaaataaaatcaagaagaaaccttaaatgaataaatcacaaataggataaactctagaacagaagtgcttctatctttcctgcagtggaaggcttaatggcagagtggggagtgtgggcatagtggacagacag

SEQ ID NO: 3190 - DNA, 469 bp, Homo sapiens
gccaatccctggactttgcaaagggctattttcgaaggaccaccctgtggctggctgtgacaaagccacagtcctgtatgctgtgctcatacaactgagagtcccaccctgggccctgtgggtgatgcaggaagagccctgaccacagaggacatggagaagcaaaggcagctccaagggggactctgaagggaacctccctgtatgatcccctagggctgccatagcaaactaccataatctggggagcttaacacaacagaaatttattttctcacagttccagaggccagaagtacaaaatcaaggtgttggcagggttggcggcttctggaggctctgagggagaatctcttgtgtgcccctctcctggcttctggcaattgccagcaatccttggcattccctggcctgcagctgcattactcgcatctctgtctccatcatcacatggtcttcttccttggat

SEQ ID NO: 3191 - DNA, 477 bp, Homo sapiens
gactttgggcatattaccttaggcatgtttcatgtacactttcttcattcatgacatagtaataatgatgtttatattatactttgttgtatgaaataacttgagaaaaatgctaaagccaatatctgacatacagtaatgcagatttatgagcaatttgaaataattaatattctcatcaaatgaaagctaagtcaggcatggtggctcatgcctgtaatcccgacactttgggaggctgaggcaggcagatcacttgaggccaggagttggagaccagcctggccaacatgctgagactccgtatttacaaaaaacacacaaaaaattaattgggttttgtggcacacgcctgtagtcccagctacttgggaggctgaggcacgagaatcacttgagcttaggaggtggaggttgcagtgagccaagatagcaccactgcactccagcctgggtgacagagtgagactctatcac

SEQ ID NO: 3192 - DNA, 422 bp, Homo sapiens
ctgtggtattctgttatagcagctcaaatagattaagacacatagtaaaaagaaatacacatttattgacactctctatgtgctagatattttcatacattcttgtatttaatatgtgtaaaatccttgtgaggagtgcaactatgcctattttatcaatgagttcactgacgtttagaaaggtcaagtacttcagagtaaggacttcaagataaggcaaacctgatcttaagatgtaatgcaatcatttactttggacaatttacctcactttttgagcctattttctcatcttaaaattgagtaacaccaattttatagattttctgtggggaataagtaaattgacacaagttaaacagtcttacatatggttggcacagaggttgtttgcaataagttgctattattgttttcaacag

SEQ ID NO: 3193 - DNA, 595 bp, Homo sapiens
ggcaggcggatcacctgaggtcaggagttctagaacagcgtgccaacatggtgaaaccccgtctctactaaaaatacaaaaattagccagacgtggtggcgcatgtctgtagttccacttaggaggctgaggcaggagaatcgcttgaacctgggaggtgggaggttgcagtgagctgagatcccaccactgcactccagcctgggcgacagagcaggactccgtctcaaaaaaaagcaaaacaaaaaacaaaaccaaaacaaaagaggtgcaggccagaattgtccccgtggacatagttggtcaattagattgcatactttaatccagcctcagttggtgtgtctgggttttctggctaggaagaatgctgctgtggaatgtgctggaacagatccttacgtgcgctgtgttggagtctttccaggtcaggggttctcaaacggatttcaggaccctttacatcatccagaatgatccaatagccccaggagcctgtgtctgtgtggattatgtctgccggctgttagtgtgttagaagttgaggccaggcatggtagctcacacctgtaatcccagcactttgggaggctga

SEQ ID NO: 3194 - DNA, 422 bp, Homo sapiens
gtttcctctaccactaactactctagacactctcaactttttcgcccacatcagcatctatacatgctaaagtaattccagtttgagcccccactttaagcctgccctccacacccaaagcaccttttacttctacccattatgctcttaaagtttccaaacctctcactttttttagcatcaccaacctatagctcacaggaaaaatatggcctgcctcctgttttcatacagaccataagctaattatcatttttacaattttaaagaatttgaaacaaaaatggaagaagagataatgtagaccatatgtggcactcatacaaagtctaaaatatgtattatctggtctcttacagaaaaaaagtgtcaatgcccaatttagacaaaagcaaaactggtggttgatactatttccccat

SEQ ID NO: 3195 - DNA, 434 bp, Homo sapiens
acagtgactacacttagtaacaatattatgtatatgtcagagtaactagaagagaggacttgaaatgacaccacataaaaatgataagcactcatgatgatggagacttgatcattacacatcctatgcatgcagcaaactctcacatgaaccccataaatatataaaatatgacaattaaagagaaaaaaacaaatatccatatccaaggtatataaggtgtcctatttaaatgagtagctttcatttaaagtcaacagtatatcttataaataagtttcaagaattattctaccctgaaatacattcatggatatgaaccatagtgatcttgagcactgcttaaataacaggaatgggatgactcataggaaataatatcacagtataaaatactttgtaacatatcattggctaaaatctatgagttactg

SEQ ID NO: 3196 - DNA, 611 bp, Homo sapiens
ctatcacttgagcccatgagttcaagactagcctgggcaaaatagagaaaccccagtctacaaaaaatacaaaaattagccaggtgtggtggcatgcatctgtagtcccagctacttggaaggttgaggagggaggattgcttgagcctgggaggttgaggctgcagtgagccaagattgcaccactgtactctagcctgggcctcagagtgaggccctgtctcaaaataataataatgatgatttatttttttaaaggaaaaggctctaccaaatatccttataaccggaaatcccaattataagcccactttctctactaatttgatgaacatcattggatcagtctctcacctataaatcaagaatgacacccagcactttgggaggctgaggtgggtgtgtcacctgaggttgggagttcaacactagcctggccaacatggtgaaaccctgtctctactaaaaatacaaaaaaaaacaaaaacaaaaattagctggatgtggtgatgtgtgcctgtaatcccagctactcaggaggctaaggcatgagaattgcttgaacctgggaggcagaagttgcagtgagccaatatgataccactacactc

SEQ ID NO: 3197 - DNA, 599 bp, Homo sapiens
ctcgcttaaatttgaactttcaaaaccaagcataatgatggcacatggcaagttctcaaatgttggttgaattaatctatgcaaggcaatcactaaattgggtaattcaggtatttcctacaaaagaaaataagaaaatattgcctcttttaataaaatattttcttgtgtgtgtgttaattcaaatttggatgttagctaatattttgaaacaagctaagatgaaaaagacatatatagttctagcttacatccattcgtgtgcaaatctttcactactttgcactttttaagaggtgcaaatgcacaacaaatgtctgcaataaaaaaatctaaaaaagatgtgaatttactatgctatgttatttgcctgtaagtagacttaaatgcaaatctggctttattgctaaataatttgctaaaggtgagctctaaaaaaataaaataaatggtagtaaacgaaataatgaaattaatgaaaacgtaaatccttatagccatactgagatactgaaatgatgcattatatgtcaaggaagcaaattattttaaacttatatgtgcgtgcatgcaactgtattcatatttcaggatagtct

SEQ ID NO: 3198 - DNA, 446 bp, Homo sapiens
agtccactgattcttttaaagagcactactcctgtattccaggtcctatgctcactcagagtaaaaatctaagtccttacaatatgagatctgagctcatattccctctctggcctcatctctcgcctctccttgaccactctgctctactccactgacctccttactgctctcagaccccccatcctctcagctacactaccccaggacgtttgtaccagttctctcttagcctggaccatccttcctccataaagccacatgactaatgtctcttgatcctcaaacttttattcagttgtcgcaatgaggcttacccttaccacagtattttaaatcatcccccccgacacacacaccaccccgactctggtactccggtactcctcttatatttccatcattgacttactgctctacgtttgtgtaatttacttttaattatg

SEQ ID NO: 3199 - DNA, 487 bp, Homo sapiens
gaatgtaacttataaaagctttactgaatataagttataagcattttattcattagaactccaaaatagatgttcaaagttcagtccttgccatttgactgagaccacatggtgtgccccttgagtgaggctaatctttaggtctttcctatagaaaacattcttcctccatcagtagtcctttatttgatattcagaagtggaaagctttttcattctccagtagaacttttaaaaattgttacagatacctagctcttcacagatatcatgtactgtaaacagtcatgtgtcttaattttattttctctatttgagtgcataattatcctaataatcccaaagacactgacaactcaaggaacagcagtacagtactattagaagttaagtatgttgttgttatttcacatttcatttaattgtggataaatgttagacatctgttgaaataagctcatatggtggaaacgacaactatattatg

SEQ ID NO: 3200 - DNA, 536 bp, Homo sapiens
aaccgcatcacttgtacagaaagtgtatgagccacgcatgtagggaagttttaatatccgtagggaactttaccaactgcaggcctaccttgccagcaggcctttctcaggaagcagcctcagatctattcattcttttctgcacacactatgcttttagataggccagtggctttcaagctgcaaatccaggccagacccaggtcggtttcacctgccactctctattccaatttgaagtctcatcggcaccgtaagcataacacagccctgaccctggactccatccctgccttccccatcgtgcccacagctgacccctcccgagttgtagccacgaccacctggacctctgtgaccacttcctcatgggtttcaggtcctcacctctgtgtttcaaactattttcagagtgtccttacgaaactgaaatcagtgtcacctccttgcttaaagctctccccaggggctggggtgtgtggcttatgcctataatcccagtgccttgagaggcagaggcaggggaatagcttgag

SEQ ID NO: 3201 - DNA, 403 bp, Homo sapiens
atagaaatgagagctgttcaagggaaaaacttacacattttgtggatatggaaagtgaagaagatgagctacatgtgggtggtttcatcctttgaacattacaggcaggcatgtaaatacttagtaaattgaatcaaagttaaaacccaaaaaggagtggggaattggagacaaagaaccaaatttcccatcactatatcagctgaggatttcctttctatgcctgtatttctacaacaatgataatatttgaaaatctttatgcttctattcatcttgtcaccattctagtccaagccatcgttgtctctcatctgaattattgaaattgcctcaattatttactaaggagattcacaggactcagaatatagtcatactcacacctgtgatttattacagc

SEQ ID NO: 3202 - DNA, 426 bp, Homo sapiens
tccatgagcaccccggctgggtagtaattgtcctggagctgccttgtaaacacagttaagttgccattaggtctggctgcagataaagcatctaaaccacaaatattctattgattactctctgttatgggtaatgcagggttttccttcttgttcctaaatcaatgctgttgctttatataaaataaaggagaaaaaaataacagtcttgcaaacatttttatttgccaagttaagctgacctccagggacacaggcattctagcacttagaagccaactctcattgacacttgtttgccagaagtttctggagaaaactgtttaataaaagcgcccaacaaacaagacccattcaattttctccaattatacctggagagtaacttttgctcactccatagttttcctctttgcctcgggtctt

SEQ ID NO: 3203 - DNA, 563 bp, Homo sapiens
aataacctaggagtccatcttctcacagtactgttttgcagaaactatgtaagacagttgtagaatgttgtttctgcctgtctgctgtggaaggttataatatataatacgaagtctggaggagctaaaagtgggcataaaagactgaggcctatgtgactcaagcagtataaaaaacttgtgggaagttgaagttgcaatttcttgtcgtcaaccttggctctcatctttggaagccacataggccccaaaggggaaaagaagttgcttacttgggtagctgagaggcttccaagaagatgaagatactgtacctgctttatcatctgtcctgtattcttttataaaactaaggaggctgggcatggtggctcacacctataatcctagcacttcgggaggccgaggctggcagatcacttgagctctggagtttgagaccagcctgggcaacatgatgaaaccctgtctctgctaaaaatacaacaattagccaggtgtggtggcgtgtgcctgtagtcccagctactcgggaggctgaggtgggaaaactgctcgaaccc

SEQ ID NO: 3204 - DNA, 495 bp, Homo sapiens
ctggtggccattatcctaagcaaattaacacagaatcagaaaaccaaatacttcatgttctcacttataagtgggagctaaacaatgggtagtcatgccataaagatggcaacaatagacactagagactgcttgagggagaagggggacaagtgttgaagaactgttgggtactatgctcagtacctgggtgacaggatcattcataccccaaaaacctgcacatataacccctgaacccaaaataaaagttaaaaaaataacaataatatgccgagcatcagagacaatattaataataattaataattttaaactgcctttatcacattgctcttgaccattcagatttttaaaatctagagccaaaggactgacaaaggaagttgaatctctttttttcagcatcataacattaaaaaaatcatttctagcaactgagttcctggtaaataatcagctgtgtttcatcatgtacatgcaatgtgcaggaag

SEQ ID NO: 3205 - DNA, 634 bp, Homo sapiens
gcaacaggtaataaatgattcaacttctttcagaaatcaccttagttgatttgctgaaagagagcaagaaaataaaatttccttaacaacaatttgattgtaggaaaacaaggtaactacctttgaaagtagagatacaaaatattcaccaatcaaaagttaacatgaaagccttctacattactaaagaagcaaccaatagtttctgataccctctaatgacttcccattaaaatactcccagtattgaaaactaattttgaaaaacaaaaaaagaaacctcaaattcccagcaaaatacatacaaaaactaaacctggaaatatacttgtaatgcatttccttgtccaaaaacatacttgtagatcattttaatgcctgcatagtactctactgaaaggatttaccagcatttatttggctgattctccattattatttgcatgtttttaaatcttcattactgtgatatattactatgataactattcttgtatttacaaacatctttacacacgattgttttcttaaactaaattttagaagaggaattgttaggtaagggagggtgaagtgtgcttgattataaaggatttaataaatatttgattcatctctttctcatacccaacat

SEQ ID NO: 3206 - DNA, 533 bp, Homo sapiens
tccttagtcaaattgcgaatctgggaggtttatatagagttaatggagttaatggttttatagctccagctttcaaaatccctatgctctttctatagataaaactatcgttaagaagaatccaaaactcacactgatgtatgaaggtctaacaagttatatttgactggaagtctagaaaatgaggctcttctcttggctttgagatgacttactcaccaagcttcctgcctctctgaatctctcttccctcaaatataaaatgaagggactagttatcatggtgattcccaaactcaattacacataagaaatacctggagaggttttggacagacatatagatgccaaaacttcaaccacagaaactatgatttaatagaactgagttggagcctaggtaattcaaattcaaaattaaattgagaattgctggactttgcaagaagaattccaaggctccttctagtatgaaaattctagaatacaattatttaactgagaataattatccttttgaactacaatcatag

SEQ ID NO: 3207 - DNA, 592 bp, Homo sapiens
cagcctcagcctctaggtccaaaagacaagggtaaaagtcttagcgtctcattcagaatatctgtgagcaataccatgttgattataaaatgtgtcttttcaagggaaagctgcttaatatcaataataagttattttatacagcttagcttgtaatataaaatctgaaacattgagaaataaattatattttagaatttgatagaggatctacttattgatctcctattggatgggaagttaacccaataaaaagggtccactgaggtcatgtgctgaatgagagcagataaattcttctctgaaaatagttccctgctcctgatggtgaatgttttagacagaatttcctcacatgccttagagagatgatataagcaagctatgctggggagaatgatgtgtttgtgggatggtgactggtccaggttgactacagcagagaagtacttgcgtaggaaagtagacagagaaaacgacactgatggatgttacaatatgcatcctttataattataaaataacatggaaaacatgctaatgaaggaatcattggaaaattcagagaagtgaatattttaataaatcaata

SEQ ID NO: 3208 - DNA, 570 bp, Homo sapiens
cccatctcctccaaaatacaaacatcggtcatcagaaaaacaactcagctgtgtgaccagacttaatagcatactatacggataacagccttttttgttagaaaaaatatatgtaatataaaaagtctgaaaaaatatgcttatctatattttctagtttttcttcacatattatttgggaaataaaagtgtttaaataatagatttagagtgaaaaaagataaaagtaatattgcaaagtcacaaagcattatttcttagtattcacagctatagctgaacgatttatctggattcgtttgtgttcattcaccatcaaattcttgtaattcgtatgcttagaagaccttcagaccttcagaagacacactacatatgtgtcaaaaagttgagtcatgtctcgtactctgaataaactagaggcagaagaattacagagtttaagtccagttacatagttctgctttgaggatataaaagataatctatagcaatgtcattttccattatttaacaacttacttccatttcattatcatctgattcctcttccacttctacttcatatat

SEQ ID NO: 3209 - DNA, 554 bp, Homo sapiens
ccaggccatatataaatgacgtgctaatcgcttggtgcggacgattaacagggcgcctgggaaataataaagcaaaatgccaccgagcagccaggcacagggccaggtggtgccgccttggggactagagtttggctgtccggacatgaatcctcctaggagacctcaaacgagagatttctccgtgctgaacctcattcttctcatctgtaaaatggggatgtgtgtggcgcctgcatggcggatatggaaaccaaggaggagatggaataagaagctaattaggccgggctcagtggctcacgcctgtaatcccagcatttgggaggctgagcgggctgatcacctgaggtcaggagttcaagaccagcctggccaacatggtgaaacctcatctctactaaaaaatacaaaaattagctgggcgtggtggtgggcgcctgtagtctcagctacttgggaggctgaggcaggagaatcgcttgaacctgggaggcggaggttgcagtgagccaagatcacaccattgcactccagcctgggtgacccagtcc

SEQ ID NO: 3210 - DNA, 629 bp, Homo sapiens
tgataaaaggcctgtagcaaaaggtgcagcacccagaacccagcacagattattgttgtctgtgtggatcacaacagctgtgtggccccagaaaccaggatggcaccaggcactctttgctgaataaagtagaaggcataattcctaggagaaggtacaaatcttggcagatggcaccaatcttggcagacagtgcaggtctgaaaagcctgcatggctctgtgggattgggacaaagaaaacaattctggtacttttatttcactatggaaagaaaatagtggagcttgcgcctaatgtcccagcattccaacgcacagtccttgggaaaatgcaagagtggccctcaataaccagcatggctctgtgggatgggtagaaggtgcaaaattttaagatttttttccacaaggaaggaaatgagtgtaacatgcgcacatataaaaaaaaattgaggcattcccagaatctgtagtaaggctaattagtgaaggtctttccctgccaaagccagcctgcaaagaccagaagaggtggctgctttttcacatgaggagacatgtaaagctacaagaaacaagaaaatacaaggaaatataatgctaccaaaaaaaaaaaaaaaaaaaaaa

SEQ ID NO: 3211 - DNA, 533 bp, Homo sapiens
aacattcttttatgtgctctaaaggcaaggtttctatgcagttacctttgtaaatagaataagtttctatagaatcagtcttaacttttatgagtgagtttgagaactctcgatgcaggattatcatgttggaaagctggctgtgatctccaggtcagtgaactgcagttctggcctccataggagaggtgtggcaggtggtggtctatctctacttcacagatggtgaaagagggccagacaggggagaggaccttgcttgggatcatggtggtaagctaggggccagttagcagaaggatgaggccttgatttctcactctgactggtgagctctgttgtgggttgagtcgtggcctcatcaaaaaggtatgttcttggccgggtgcggtggctcacacctgtaatcccagcactttgggaggctgaggcaggtggatcacttgaggtcaggagttagagaccagcctggccaacatggtgaaaccccatctctactaaaaatacaaaaattagccgggcatagtggcaca

SEQ ID NO: 3212 - DNA, 527 bp, Homo sapiens
tcaatttctagctcttatggactaacccgtaataaggcaagaactgaaggccaaagggtactataagtaatttcacttccaaaatagaccaaatgttgtcagtgcagaagtgagtagacaggagactagaatctactcttaagaatgtctcacaaagaaaggaagggggcttggagtaatgaaaaatgttgaacagaagagaaagaattagatttataggaaaaaaaagaaaagaaaaggaggggttggaagagatagtatataggagtgagacagtgagaagatatcctgatattatagtttcagaaggtatctccattctgtctcaagtgtagaaaacagaaaagagtgaatgtggttgtaaatgaccttaaacagagagagatggactttttttttatcatttgaaatgggaagccccaccctcacctctcaagtcatctgtttcccccctcctcccacatccacctgtcccttgcctctcaccaagtagaatgtgtgattaaaactttttcagcaagattagt

SEQ ID NO: 3213 - DNA, 447 bp, Homo sapiens
catattttgcactataagttacttggacatcttgtacatattccatatttttaataaattgccacattttattagagattctataatagcacccccaatcatgagatataaaaagtctagtgaaaatatgatcatactataatgaggtatatgtttagaatactgactctatgaaaaatttttaactcgtatttttgtttttgctctggcagaacatgtaaaaataagcaaccttattaatacagcagtgaaaacattcatactaatggaagacttttttgctatcactttagataatattcatagtaaaactaaaccttttaaactaaatatttaactagctttaaaatctatccttgatcttagtgagaaaaagtaaatttctgtaattatggatgaatttaacaaattttgcatataatccaagaaactaaactaaactcacct

SEQ ID NO: 3214 - DNA, 474 bp, Homo sapiens
atatatgaggtagcatgtaggagagacctatcagttttataatatttttgaagaatgtgacaaggtgtatttgtaaagtattatttttagcatatgggacaaacaacataagttaaaatctgtttatattcttgtgatgccaggagctttatttcttttactacaaaaaataagggacaattaccgtccgggcgtggtggctgacgcctgtaatcccagcactttgggaggctgaggcaggccgatcacaaggtcaggagttcgagaccatcccggctaacacaatgaaaccccgtgtctactaaaaaaaaatacaaaaaaattagctgggcgtggtggtgggtgcctgtagtcccagctactcaggaggccgaggcaggagaatggcgtgaacccaggaggtggaacttgcagtgagccaagatcgagattgcgccactgcactccagtctgggcgacagagtaagactccgt

SEQ ID NO: 3215 - DNA, 545 bp, Homo sapiens
attttttcccaggtccttgagagaaaaatgcagcactgctaacttcttcatttaagatttctagcttcctgaaccgtaaaagaataactttatctcattttaagcgacctgatgtgaaccactttgtcacagcagatataggaaattacacctccttaaagaatgcagaatcctggcccgtgcttgcctcatacctattgaatgagaatctaagggctctagaatctgcattttgaaactaatacataatacacaaagagaactcactaagtactctacatgcacttcatcctcacaagccatgaagtagtttactattataattctcattttacatatgggaaactggagcattaaaagattaagtaatttgcctacagtcactcacataaccagaaagtggaagagctgggattcaatcccagttccagacatcctgatatcctgggttcagacaccacacacttagcaactattacacacttagcattattattattattattattttaatcaccatctccaccttcttaagcactcaaaag

SEQ ID NO: 3216 - DNA, 628 bp, Homo sapiens
cccctattgcccctgttcatcttcattggtgagtattagatgctcaccgtacattgtggcttagtcctcagacactgccagccacaaagtacattttgtttcttaaatggatggttcgtggatagaaagctttcacagtcagactcccaaaagaaagcagcccagaaaccctgtagagggtttgtgaagaattgctttagagaagaaacatttcctggtgtgcttttttcgagcaatataacttggtggggggaaacaggcttattttaggttaaaagtgaaaaacgtaattcagttgttacaagaaaccacaaacatacaaggttgtcagagatttcaaattgagaactagaaaattatttcctttccagttctctcagtccaaatacagctttcctcacaactgactttgggccctgtaggtgcggtggaatgatcccggtgcacaatattccttagttgacaaagagaagctgccaagattcccattttcaattgaccaggaaggagatatttacgtgactcagcccttggaccgagaagaaaaggatgtagtgagtaaaagagaagagtttcacaggcgacaagacaaagtcctatgcccatctacagttgagagcaaaatgga

SEQ ID NO: 3217 - DNA, 572 bp, Homo sapiens
aagacctggaactaaacatggtactggaagtgaaaacaaaagttagattacatgattcccaaaggaaagcaaatttagaccttgtgattaaccttacggtcctgacactgtatcacaggagcttttgtgacttggctccaggttgtcagaattaatgagattacatgatctttctactaataacaaatccacaatgagtgaaagtgtataatggggagtctgacagatgtcaagttacaagacatctgaatagggacataggtctcccccaaatttgtatcataacttgggccctgaatttctcagataaatatttgatacacataccaggtgtccatgtatcagtaaatagattaggaagggagaaattatgagatagactgtgaaatggaaatgtaggttaaatcatggcataataatgtacagacaggaagagaataacaagtcttcatataatctttctttccagctgtcaagaatgacaacatgaataatatataacttttgggaaaatgttagtatgttcacattatacttcttcctactttcctacagtcatttaattcatatac

SEQ ID NO: 3218 - DNA, 601 bp, Homo sapiens
agctggtaagtcgtagtccctggagttggaccagacacagtcctcgagtctgtgctctactcactcttttagctgcatttccactgctagatttttaaaacgaagcatgggcttttctatttatttctcttcaattttatctcattagagttcagtttatcgtttaagccagtcaataattttgggatgaccatttatcattatctcttttcaccaaccttccagtttcttaccccattgaaacttcactggccttccactaatattttttgctagtcattaataaaatgattagtcaggcaggcagatatgaggacaaagtcctatgacaaattaccagagatttacttccaagttgatcaatcttgatcaatcaataacaaatttaatgtaactatagcatagtccctatttatttatctcatctacagagagaagcaagaaagatatcgttagtcaccttaataagatccagtcatactacataaaagcactctctgaatctattgctctaataaataaaccaattaagaaagaaatttggtttagtgacatatatttcacttttagtgaatccatatcaactctaaatgatcatctt

SEQ ID NO: 3219 - DNA, 509 bp, Homo sapiens
aattccagacacacattatacattgactccaagaaactagtataattatggtgagaccttgggaaagatactgttttccacactgaatattccctgaaaagcgtagcagcactccacttgggaattcacgttatcaccattatcagaccaactgctagaatcaccttttctttcctatttagcttattcattcattcattccacaaatgctcattaagctcctactcttgccaggtattatgctagaaattggggatataaagatgaatttaaaacatagtctttgtatttgcccttaagaaatctacagtctagtaagaagaagacataagtaaataagaacaatgaaatacaggctctagaagagatctatatcttggaaatgtcagtgacagaggtcagtagaggacttcaaagtgttcaccaagctcaatcttgaatgaaagttggtacctatcagggagcaaagaggaaagactataatggtaagaacgagaatatgaatgaag

SEQ ID NO: 3220 - DNA, 375 bp, Homo sapiens
gaatggagaagaaggaatacaccatgctaggctcagacgtggggccttgggtgggatgtaggcagtggctccttgcacggggtgtggctataactgggacctccaggtggtggctcatggttgcactggggaagtaaactaatctaggcataaaagttgatgaagctgtagcaccaggagtccaagctgtgaaggaagttgagtccttcctccgccagcagcagactgtgagctgcagagtcaaatatgatggaaagtttccttttgagaggagaaaaaaatggtgaaaagaaaattctagcaaataaaaaatgatttgcaaggcttctcctgtacttgctaagctggagtgcaatggagtgatctcagctcact

SEQ ID NO: 3221 - DNA, 323 bp, Homo sapiens
ttactttttagccatgggcaatggatattgaatttcagttcctctgatctggtaaaaggcttgttagagaaacttctttattttccctgtgattacttgttccatatttcttagtaggtctgggtcacagactggtcaagaatctgaaatgtactaaagatgggtcattgcttactacaaatttaatgtctgttgttggttgttatcactattgcctctatagtgttattaaaaggcgatcaggagttcgaaaccagcctggtcaacatgatgaaaccctgtctctactaaaaatacacacacacacaaaattagccaggcgt

SEQ ID NO: 3222 - DNA, 305 bp, Homo sapiens
ctgggttaatggaagaaatagttctattcatcacttcctcattttccctaaatctacaatctccagatgtcactactgaattaacagccaacaattccacaacattacctgggagacactggccctttttcttcctcttcttcatcatcactttcattttctgtaaataaattcagagaagcaggtcacattaagcaattcatacttcacatatgaccaaatcactgtccagtcatagcacaaggacataactattctcagtgcaagaataaggattctgacaggaatattctagggtgccctag

SEQ ID NO: 3223 - DNA, 301 bp, Homo sapiens
gaaaaacaaaaaaacaagaaaacaatgcattctttctgttcctgtatccccctggccaccagataaatcaccaagatcagataccatcacgcctgctaagggaggagtggaatcaaaaattgaaggaactgcaagaccaggctaatacacaccagcagaaactgaaaataagcccgggaatggatactacggggcctagatcaaggggtgaggggtgagggctggggagcaaataagagagagtttatagatatgtgggcactttcctttaatacagatctcacactttgtcaaggatgct

SEQ ID NO: 3224 - DNA, 334 bp, Homo sapiens
gttagccaggatggtctcgatctcctgacctcctgatccgcctgcctcggcctcccaaagtgctggcatttcaggcgtgagccaccgcgcctggcctaatttttgtatttttagtagagacaaggtttcaccatgttggccaggctggtttcaaattcttgacctcaggtgatccacacctgcctcggcctcccaaagtgctaggattacaggcgtgagccaccatgcccagacaaaaaaatgaattatttgataaatcactttctcaggttgagaatgttcttaggatttaagtatataaatatcctaatcaaatgaaagtccttagaaaacc

SEQ ID NO: 3225 - DNA, 490 bp, Homo sapiens
tcacctcatctcaccttgagacctggcagtgagaaaaaccacaaatgataatttccatgttgaaccaagactgataccaacatggagaaaacttcctagtctcccacccgctaggaagaaatcaggcttgaaccatatatgttcttagtggtcctaggactctgatggttttttccaagcaccttaggtgtgcagtacccagatcacatatacctgtacctcttacctgttccaggaacaccgtactgtgcatatatcttgcctgtatctatttcatttgtcctttcttacgtttcctttttcacacctggccctcagataaagacccatgtagtatccatgtccccatatttacaaccaatgagactcagaaatgtagtcattgcctgctttcatgagtcctggctcagatcgaaagtattcagttctctaacatcatcaatgaaacctgatatccttagtctggtatttagcctttcatataatgact

SEQ ID NO: 3226 - DNA, 483 bp, Homo sapiens
cgctgtagtgtttaattgttaaagccatatgtgtttcaagggaaattgaatccatatgtttctgattcatttgcactgagctcatcaaattgttgttttataagagccgtttgctgtccaggaagaattccccagtgcccctccccacaccgttctatgctgtctaatatctttaaaacaggactctgttctctgcccagcaaaaccctctatcactaccgtactactgcaatcaccttctccactgtaacgttttacatgataaaagttagcctcttttcatggagtaagacaagacggtatcttacagaaaagccgcctaagtgtctcccatgaaaactgcagagtgaagattgagttaaacaaagttaagcaagtctcttcgttgatatctcaagactttacatttcaaaaaagtgaaggagccagacatagtggctcacgcctgtaatcccagtggatcacttgaggtcaggagttcta

SEQ ID NO: 3227 - DNA, 489 bp, Homo sapiens
tgggattacaggtgtaggccaccgcaccacgtctggcctgttcaaaaagtattatctcacctgcatctggaagaatatttccaactttggtttcatgggtatattaaaatcgtatgtaaaaatagtggatatttgtagttttctgtggcgccagtgcacaggtgtcctcagtgttatgaggattacatgagttattacaagtaaatcatctaggcaaatgtttggcatacagtaagcactcagaaagtgttggctattactgtgcatggctttgtaatggaggaatggttgaattgcatatattaggcactaaatacagtagtccctccttatctgaggttttgatttctgcagtttcagttacccatgatcaaccacagtctgaaaatattaagtagaaaattccagccgggtgcggtggctcatgcctgtaattccagcactttgggagaccaaggcgggcagatcacttgaggtcaggagtttgag

SEQ ID NO: 3228 - DNA, 401 bp, Homo sapiens
cagtgtgtaaaaagaccaagaagagagagaacaggccacaaaaccatgagacagaagccttctttttctaaactctgaaagaacaaaataaatagtctaactggcctccaaggattgccagatggattagttaacgtctgcaaacaatttttttgatgaaagccaccacagaaaagctaaatcttactattaccttagctgaaatactttgctaatttgtccatgctgcattaaagaatctatagaaaaaattccacacacactaacttaatgacctttgaaggaggaaattttcattcatgcacactgtggagagggccaaggagtccctgaatgtgtggtctattgacatctaaggcccatatttaacacacctgactgagatggaggcctatggggac

SEQ ID NO: 3229 - DNA, 344 bp, Homo sapiens
cttgtggctgtcccagggcactgagggctgactgggcaccagcgtcatgtggaatagtttgggaagtaggaaagagacatgctggcctgagaggtccagatggacaactatatatttctgagggggagcactgacatctggagttgagtccaggccactggatgatgaagaccttacttcctctggggactgggaagttttcatgattcactgggaactggagatctctgcggtaagacagtgcctaaaggttcccctgccaacagctgatgcagcccttcactgtccctctcccactgccctataggccctggctgttccctacagtccctttggcagagcgc

SEQ ID NO: 3230 - DNA, 216 bp, Homo sapiens
tcttttcctagaaactaatgtttttaaatgtccattcatgctcaaatctatcaagaaagagactcatgttactaattagaattctgatttaaagcttaaatagaaacagtaaaaggcaaatgcaagttgaatattggtctattttgcattactctatataccttggtacaacaaaccaggggcagggactgaatcaatggtcctttttaaagcaat

SEQ ID NO: 3231 - DNA, 269 bp, Homo sapiens
cattggctaaaaagtgaaccagatactacattacctcagggcagttgtaagtactgagtcagatgccttaggcttgtgtgatgggaagtttagggcgagaccaatgtcttgctttaacaacagtgtgaataagttaacttcttttgagattttattactcaatattccacccagaaagaaacacagatgacactcagccaatcaaaggccatctgggactgacaaacgcagagcttgttgtagatgacaaggctcagtggatggatcat

SEQ ID NO: 3232 - DNA, 472 bp, Homo sapiens
gcggtgcttactctaaattgcaaatagaaagcctttcccggggccgggcgcagtggctcacgcctgtaatcctggcactttgggaggccgaggtgggcggatcacgaggtcaggagttccagaccagcctgaccaacatggtgaaaccccgtctctactaaaaaatacaaaaattagccgggcgtggtggtgggctcctgtaatcccagctactcaggaggttaaggcaggagaatcgcttgaactcaggaggcagacgttgcagtgagccgagatcgtgccactgcactccagcctgggtgacagagcaagactccatctccagaaaagaaaagaaaagcaagaaagcctttccagggcccacagccctgcatcggccagccctgcccacctcttaaaccacctcttcccccattccccctgcccattattcactattttccagcaaaaatacgcagtgctcactccacac

SEQ ID NO: 3233 - DNA, 595 bp, Homo sapiens
cagtgttaactgtgaacacctggctgtctctcttcatgaatatttatggagataagtgttgggcattgtagtaaggcgaaaagagagatgaaaagatgaatggatgaagagacagaaagaaaactggcattgtttagtaataaataggtttaataacaaaaaaatcaatgttactcaaatttaaaaagaaaaagtaactagagaactaaagaaattgctgttcttcaagagaactatattgaacaagaggaaatccttgttttgtaatatttctctatgagtgaaagaaaagaggtaagacagttatgagagactcagtatgtttgtgtccacatgattagacattcaaccttgcttacatttcttctccctctcttttgtcctctatggactgttttttaaattgttgtaaaattatttttactttgtcaagatttacttatttaaatttttgttccggacccatatttattcctgtaactgtttttctcaatttaacatttaaattctcattataccatgtgttctacattgatcaattaaatggttccaaccaccctcttacaaggactaaaaaaaaaaaaaaaaaaaaaaa

SEQ ID NO: 3234 - DNA, 373 bp, Homo sapiens
gccacctgtaaagtattttccccacgagcaatggtatggagactgttataataaacacatgttttaggcagcaaggaattcagtggaagttgctagacacgtaggttgttcaaaactaagcaagattctcctaaacgaatgattcatccatagtaacaacactaatgcattattgactttcagtttatatctattttcattttttccaatctgttgcagtgcaatagaagtggtggtttgttgtgttgttgttttaagatgttgttttaagtacataatttcactccatttgtgccaggaaaatgcccaaacaccttcattagaaataaggcaaatctgttcaacagtactctgaacagcaggcactgtatgc

SEQ ID NO: 3235 - DNA, 471 bp, Homo sapiens
tagttctatctggactctgttgcctctgtagcacattttctctcatagacctccaccccaaagctaatcctacttttctgtcctattttgaggaattatgtcatatccaccctgttgaccaaatcaaatctgagagtgatcgtagatttttctttctctcaagattaagtgactctctcttaatcctcctcatattctctcactattcatctcccgccatcagattagtcactgagatgtgttccttctagcttctatccatctttcatattgagtgtctcttctccagtttacttgtatcccctcaatccaagccttcatcatacctccatatagcctagtgggtaagagtgtggggtctagagttagaatcctgaatttacgttctgactgtatcatttgttagctgtatgattttgggcaggttatatatctcttaatctttaatttcctactctgcaaaatggagat

SEQ ID NO: 3236 - DNA, 484 bp, Homo sapiens
gaaaggcttaaagtactataagcaaataaatgaaataaatgttaaaatgtagtaaacatctttttttctaaaaaaattaacaaaattataggaaagttagaaaaaataaaatttaatatatagaataagtaagataataataattaaggacattatttgaatgaaatgcagcaaatatttacatacaggcagaaaacatttgaaggaaaatattacagtgtcattaataaggagataatgcttactctttttgatacttttgaaacaattgtaaaggatgaacagttatttaaatcaaaacattctaggaaactgatctaaccttagtcacaaaataagacaacaacagcaagaatgaaagtcagaaagacggcagaagcagcaccaggccacagcctgcatctgtaaactgacttaacaacaatatatggatcaagttgcctttctgagaattccataagccaattaaaaaattgtagcacat

SEQ ID NO: 3237 - DNA, 294 bp, Homo sapiens
cctctctcttggaaattgtcattaactttcccacctcactacctcataccccttcacatctttcatccaactaccaactagattttttataaggttttgtgaatttcaaaaacattttataattattgttatatacccatttctatatactttattcccaatgagctatgcatgcagttggcatggtgaggcatgtggtgttacttaccatttttcacataaagtgatgcgtgatggtttaatcactatgaaaacagtggttcataggctcatgaaggagggttgacttgggct

SEQ ID NO: 3238 - DNA, 297 bp, Homo sapiens
tacggttgaaacaactggcttgagttttattgatttaactagctcttttggtgtcatgtagatacagcttttcaaactaataaagcagagtcattgtgtgtctaaaaaaacattggttaatctgaaaatcttgtacatttgatcttggcatgtgttttttacttatgtttgaacatggatgtgtctgacatcctaagagttcatttcaagcaaaatattgaatcatagaatgaaaaatctacccagatattttagcccttatgtagttttccctttttctcatgttcatgctatgac

SEQ ID NO: 3239 - DNA, 404 bp, Homo sapiens
taaaataaaaaagaaatgtacttcacctagtgcctacatattatcagctctctataaactgtagctgtattagacctcactttttaacatctgggacatgctatggggtggaggtgggaggatgacatgaaatgtaattaaactaaatggtcaaacttcaaagaggtcaaatgcttacagtagcctgcaacaatgttccataaagtgaccgtgaggactcttgtgacagcacctgagcatttctttgaatctaaccaggtgtgttggtttttactttatgctaaaaggatctcatgccatgagtattttgtgaccttccagctaatttaaatattgcttactgatttggtgttatacatctgttgtccaatacttctatccatcatccactgattccacattct

SEQ ID NO: 3240 - DNA, 402 bp, Homo sapiens
gcaactatagattctgggacattttcaatttctacctacttttttgcagtgcctgtcctgacaggcccccttgtcaaaacatttattattatccttcttcatatatcaccagttttcaaagcttttgcatccattaaaaaaatacttctacctttctaaaaagaacttgggatgaaatctggtctcgctttcactcttagggccttggcacgtccttgccatcattagtagggcttctgcttggtggagccctggtaaagagacaccctcggccaggcgcgggggctcacgcctgcaattccagcactttcggaggccaaggcgggcgcatcacgaggtcaggagatcgagaccagcctggttaacacggtgaaaccctgtctatactaaaaatacaacaaa

SEQ ID NO: 3241 - DNA, 367 bp, Homo sapiens
cagatcacctacatcaataatgctaccagcttaagcttgctctggggagacattgtgtgtgacagactttattttcagggcaaactgccattgaatgcagttgcagaatccattgctctgcccagttaagccagaactgtatttgatcaatgggccttatgggtgagtgtcagaataataaggccactaatcatttgcaaccccatggcaccattcatcaagggatctcagagaactttacctgagttaattaatactggcaacgtctctgtgaactagataagtgttattattcccattttacagatgaggagactgagtaatggagaaattaacccaatgttgctcaataaagggatgaaaactc

SEQ ID NO: 3242 - DNA, 613 bp, Homo sapiens
cagggagggtttcttggccattcagagccattcaaatattccaagtaaactcaaggatccagaaacccactcgcagtcatgaaataccagtgaatggcctctgtgagtctcttcaaggttttcaaagatgactgcctgagaaggctggccaggaagtcacccaagcccaaccttctgcaggacgttctatgacagccagggacccagggaattgccattgaacagaagggaggaacagagacggcacgcctgagcttctggaaacattctaagtgcccttgttggcccagaaaagactggtgctaccatatgagtcacatacttggcaacctacctactccaggaaccacagaaggtttaaaggttcccaggaagtcccaggaagggcagccatagccctttagagccatcagattttattctaagtctacttgggagacagtgctcttagcttcataaaaacaccagtggtggtgctaacacttgccccagtatccagtcttttctacctcatctcagagccaggcagccactatttcccaaagctgctgtgcaatgaaaggggaatattctaggtgctctcctgtgcccacgaaattctgtggctgcgctg

SEQ ID NO: 3243 - DNA, 547 bp, Homo sapiens
cctcccaagtagctgggattacaggcgtgtgccaccatgcctggttaagtttttgtatttttagtagagaccggttttatcatgttggccaggctggtttcgaactcctgacctcaagtgatctgcctgtcttggcctcccaaagtgataggattacaggcgtgagcctccgtgcccggcccctttgctacattttaatgataatgaaaatgtaatccaagtgtcagattattcagtagcttcctgtcttttggtttgtgggaagtttgatacgttattttttaatgtttcttagtcctttgtatatttcatggatagtggggaagtgagtctgtgacttgattgaaatatattgtacaatgcattcatctgcatcataggcacttggcttttaatggtaaagtggaaactaaacttctccttaggaacaatttgcactaatttatttaactgatattgatgatgctccataaagataaaaatgtcattgcatggaggcttacttgtgatgtaatttgtactttggagaagtaaatcatagtatgat

SEQ ID NO: 3244 - DNA, 600 bp, Homo sapiens
tgcttcccttcctccctgtccccttttgccttgagtcaaggtcatcctaggtttctgctgcgcctccaagataagctcagctgacaatctaaaggagacaccccaaagcaaaaggggacagggaggaagggaagcagggggaaaggcagaccttgctggcgtttctgcctctcctttaattgctattagaggagtggaaggcagaagaaggaaaataaacctgtgaagcttcggggaagcagggaggactgtggaaagccctgttctattgctgagctgtgtgaagtcatgtgacatttggagtggaagctgctgtctcccattctatgtaccaggagtccttattatcagccaggtgcaccttagatgacgttcacagccctggaggtactgagtttcctgtgacctccacttcattttaaaaaattacaagtgtttactgtaactaattcaggcaatgcagattcttatgcagtaaataaaaaagttaacctttctttccagtagtgtcagcttttagctcagcagattgtttagtttctttgcttttttccttctatcttgccttccctcctaaaaatcagcactttggggggttga

SEQ ID NO: 3245 - DNA, 565 bp, Homo sapiens
ccatgtaaggacacacaaagaaggcagccacctgcaagccaggaagagagccctcaccagggaccaaaatggccagtgccttgattttggacttcagcctccaggagagtaagaaataaatttctgtttcttaagccacctaatctgtgatattttgttatggccatttgaactgactcagacagccaggatcacttatttagttgttcattaatttattgatccattcaagaaattcaacaactctctattgagtgctttatgtaccaggcactgtttttggaggtcaggatgcatcagtgacagaagacaaaaagattcctacattgtaagcttacctgtagggacagtaaacaatcaacattagaagtaactaaatctgtggtgatgatactatacattttgtgatgtaccttaacagtacataaatgtcttttacacccattattgcatctgacctggcagaccccgggaggtatgaggaaatgaagcccactctccaggtcacatggctggtaccaattatagtagtagctaataagtatttagctgcttattatgtgct

SEQ ID NO: 3246 - DNA, 497 bp, Homo sapiens
cttgcccaaagaatgagagatgcttcagaaattagcaaatgctccaatataaatcaagtgatagatataaataattcagatatgggataaggaaaatgggtagctttctcttatttaggaactctatgtcaggcttctgtgagaaactgtttacgaagcagtctgacaatagctattggtctgaagtattagtaattagtacagaagtgccaataaaaatgtattgagggattatcatgtactatggcttggcatatactggtgaaaaacaataatgtaggattgccttaataaattttctggtcttgggaaggaacagacaatgaataaatgaataggcaaatatatatgtacttgcaaattgtgatcagggttcagaaggaaaatagggtgttgagagtcaaggaaaaaggagacactttacgtagggcaaccaactgggaataggctatctttaaaagtcacatctaactgagatcagaagtatatgaataaga

SEQ ID NO: 3247 - DNA, 574 bp, Homo sapiens
tgggtttttatcagtttcaatgtaaattataaaagcatcagtgaaccaaatcttgagaaaacaatgagaaccttaaacaatgatcctaagaatttccctgaagatgacaaaatctaaaatagatatctatgctttaatagagagtaagaagctaatatcatcataaaaaagatttccaaaatagcacatctatgttctttactgacacatatattccaaaactttgttaatatagggataagaatcacccaatcaacaaaagctgttaatacacatacatgtaaaatataaaaacattcaaatgctaattccaactccaaataggaggctaaggttaatttccctttaactttacaagttaaattccataataaaagttttataaaacaaattctaaacctcattcaacaatatttactataaccaaaatgtcaaatcaagagtttgcatttgctcttggaattcaccaaagaacaggatcattcttgaaaagcagactaaggcatggctactttaaaaggaaaatgatccacagccaggcatggtggctcacatctgtaatcccagcaattct

SEQ ID NO: 3248 - DNA, 563 bp, Homo sapiens
actaagcaaaattagaaatgtcttggtttatatatttcttcccatgctttctgtctctacaaccagaatataagcttcagaacaagagtattcaaatctggtgtgtttatccccagactcacaacactgggtccagagcaggtcctcagtagatgtttataaatatcaggatgtattacatatattaactttttatgagtagttattatttattatattccacttagatatggaattattacttcaggtggtagctgacttgtactggaaaagtgactgagcccaactctaatgctaatgttaattggatttatatgaagtttctttggttttaattgcactttgaatgaattcaagaatttcactagctataacttctatctatggtaagaagcgttgtccaagccacagaacctcaagattacaacagagatttaaattaaaactcttctaattgttattattgtaattattataattcaccaactggacaattggaacaataaactcttggaatttaaattaagtatggaatggggatggatgtttggggtgctttatag

SEQ ID NO: 3249 - DNA, 602 bp, Homo sapiens
acccaatcctttgctttagcttttaaaaattatattattatcagaaagttccctttttttctggtccaaacttcaaaattcttaaagtcccacctcaaatggcatctctttcttcaaagtcttcccaactcaacctctgtgacaaaatatctgatctctttctactcctttggacccaatattcatttttcatttagccttatccttgatttttctattgagagcccttacacgctcttcactcagtcgtaatctaaaatctcttgcaggaaaacaactcagactcattcatacgtgttcccttggtgctcggcttagtgccagagagtgaacagatactaaatgtttctgaatcaaagagactcatgcgagagtcagaccacatctctgaaatccagttttcagtgcaacaaactatgatttaattgctttgacctggcaggaaggaatatttcctttaaacctcaaacacagaagacctcaaaattaaagctcttcaaacgcataaaatgcctcagcaatataacaaactcagggtgatgagagttttatgaagagtcagaagaatcatcagaaacagagggagtagattctaacatgtg

SEQ ID NO: 3250 - DNA, 537 bp, Homo sapiens
cttgtgcctgtggtcccagctactcgggaggctgaggagggaggattttttgaggccacaagtttgaagctgcaatgagctataattgcaccactgcactctagcctgagtgacaggatgagaccctttctctcaaataaaggaaaaagaaaaaagtaataataacaaaataaaaagagtaatttaccaattactgagggagtctagaaaggttaagtataccccctctaaattggaaataacagtttaaaaaatattttattggtaaaaaataaaagccactttttatcctgagagagtatgtagaacttgaattttggtttaaagcacttattactaagcttaacgtaaatactttggcaaattgattctaacaaagatatccttctcatgacttaaaagagccactaattttacttttgaaatatgtttaatttttatattaaaagctaggatggctgggcgcagtggctcacgccagtaatcccaacactttgggaggcggaggtgggtgaatcacccgaggtcaggagttcg

SEQ ID NO: 3251 - DNA, 596 bp, Homo sapiens
aatgagagtaagagacttgagataaagtagtttactaatcgtcacacaagtagcaagataaacacatatatacatacttttgtgtataaacacatgttatatacatgtatgtatataatgtatgtatatatatgtttgtcttgctacttgtgtagcaatctctctctctctctcacacacacacacacacacaaacacatacacatatttgtttaatgcttaaaaatgccttcaccctaaatttgaaagcagggactttactgtaattcaccactgaatttataagaacctcgcaggttcatgattaacaattattcagtaaatgacttcaataaagacaaattattgtctgtgtttattgatatgaaatcatatttattgagtacaaacactgcactgtaaggtaaagtgagcattactggaaaagtagaaggcattgctaaaggattttaaagtagatttaagaaggtagcacaaatgaaaatttaatgttcaaatattctttcatttatttctcacatatatattcaatatctactctatgtgaggaaatgtacttgttgcttgatctgtaataataaactcatgtttttaaa

SEQ ID NO: 3252 - DNA, 615 bp, Homo sapiens
ggcaccagaaatgcaactcaaagaaagaaacagcagaagggaaataaaacaagaacaagaagctgggattgaagccagatgaggtggaatgagcagaggggctgagagatatagaatctaaattctacattacgctttgccacaacccacctctgagagtgttggccccatctctttcatcattcttctgcttcttaaaaaggttgatatgatgaggaaaataggaatgaggagagaggatctaaagtctcgttgcttcaaagctttagctgttcaatatcttctaagatttctgtgattctgaaacttacacgtttaaaaatttagagcctgatggactagctctgaaacaagcaaagcagaaggtagagccagtgagcataggatttgctgtccatgtgtagggggaaaggagaaaaagtagtttcagatatccttgaagtaaaccagtgcaggtcaaaaaagaaacaaagacagacatttaggacagactaatgatgttactaccatggtgaagtagaaatgattattatttagattggtagccatagttttatgtgtacatatatatgtgtgtgtgtgtgtgtgtgtgtgtgtgcatatatatacatacac

SEQ ID NO: 3253 - DNA, 541 bp, Homo sapiens
acttggtggatctaggcagtggttatttaataactgatatggaggtgtttcaacattatagcaacagatgctgtcatgctgatgcacaccagctggttataggcccctgttttttcattagtttttaattttatgtgaagtgctaagaggtctcattttgcctgaatgaattcttttcctttgattttcacttgctactctcggatctcctctggtagcaataactttgaaaactgtgtaggttttcatttttggcttctgttgtttcaacagcggtgatcctattttctttaatttgcctttggctatatgccctgtcataaagaagaatgaaaagacagaaaatcaaatagaataaattttcctagtaactgctagtgcttgaggaacattactgttgattcatttattcaagtatttattcatgtattcatcaaatttctttgacctgctgtcgcacaaagggagtagtcctttcttcagaggtgtcaagaagaaagacacaggctgggtgtggtggctcatacctgtaatccgagca

SEQ ID NO: 3254 - DNA, 341 bp, Homo sapiens
gattacaggcctgcaccaccacgcctggataattttgtggttttggtagagacagggtttctccatgttggtcaggctggtctcctactcccgacctcaggtgatctgcccgcctgggcctcccaaagtgttgagattagaggcgtgagccactgtacccggcctctgaatcatttttatttgttttatcatatgcatccacttatttaataaaaaaagctatattgataaccatttttaaaattatgggacatccataacagaatagtatatagcagttaaaaaaatgagctcctggctgggcgcagtggctcacgcctgtaatcccaacactttgggag

SEQ ID NO: 3255 - DNA, 228 bp, Homo sapiens
tccatgttggtcaggctggtctcggactcccgacctcaggtgatctgccagcctcggcctcccaaagtgctgggattacaggcgtgagccaccgtgcccagcctgagagttttttgaacaatagaataccatgcacgattaaaggataaaattttaattttgtgaaaaatcagtctggaagctggatttaggagccaaaaaaaaaaaaaaaaaaaaaaaaaaaagggg

SEQ ID NO: 3256 - DNA, 565 bp, Homo sapiens
cctgggctcaagggatacttccacctcagcctgctgagtagctgagactacaggcatgtgccaccatacctggctaaatttttttaatgtgtatttttgtagagatggggtctccctatattgcccaggcttgtctcaaacttctgtgctcaggtggtcctcccaccttggcctcccaaagttctgggattacaggcatgagccactgcacctgacctataacagcatcttttggagacctattttaatgagttattcttccagaagtatgtatattttaaagaagatggggaaagaattcagagatataactctgaatggaaagagttcaggtcttgggacacctgcatgaaaaaaagaattttaagcagggagtcctgtctgagccctttaaatcatgttgcgttgaagggtcaagtgtgcctactttaccaatcgttataagaattgggcccacccacacagtatgatcataaaggtcttaccatgagggaagctaccccagaatagcttgaggtaaacgtctggggtaggggcggtggctgaattgcaaggaaatagcatg

SEQ ID NO: 3257 - DNA, 539 bp, Homo sapiens
ccacaaaataaacattaagaacaagtcctcaactggtgaaacccctgagtttcttcaccagaagcaaatgcagagccattttgtaggaactcttccacaatcatgcccagtaaaaatgatcttgcaattttttttttaaaaaagcaaaagaccacacgagagagccattcaccaagagggagtagacacaataaattgagaattagcaccctgaaagggtgacataatataactgtgggtatcattagtgcaaacactattttcagccctttgccttctgggcacctaagattacacctcttggcccacttgagggaggagctaaatgaacaacatgtgtatgacttgtattaaaaagacaggcagcccgggcgcagtggctcacacctgtaatcccagcacttcgggaggcgaggtgggtggatcacctgaggtcaggagttcaagaccagcctgaccaacgtggtaaaaccctgtctctgctaaaaacacaaaattagccaggcgaggtggcacgtgcctgtaatcccagctactca

SEQ ID NO: 3258 - DNA, 612 bp, Homo sapiens
atccagacagcaaaaggtataaccagaattagaacttaggtctagtgatctccaaagatattttatcattttaattgcactctattctcatggatttcaaaagcagtcttagaatacagagaaataagtaaatatggcttggcatgaagaagaatatagtaacagagttctcaaaaatgggaagtgttgagctctcattcacaggaagtgtttcagcacatgttggatgatcatgtctctgtgatgttgcagaaggcatttctgcacatgttaaggaccaagatagattatctctatgatccctttttgctctcagagatgtggtggtacccagattgcatgaagaggtacttgagagacacgcccttggcttttggatcacacccagtgtcttcattatagagcaggtgctgtccaaaaaagtaggctcttaaggagagagaaaatgtggcagtgcaggatagagaaatgtgattaaaaaaaatttgatgcttggagtggtggaacatgcctgtaattccagagctttgggagactgaagcaggaggatggcttgaatttgaggctgcaggagctatgatcgtgccactacacactagtctaggaaacaga

SEQ ID NO: 3259 - DNA, 507 bp, Homo sapiens
tgcgcggcaaccagagagggtggcggggtcttctgtgttggaagatgagcccgccagaggcataccctcggccttaactcgctgcaggcgctggaagaagggctctggcgtcttgttcccgaccctccggtgaggaaccaacctcctaatactattgacctgaggctggaaaagcttagtgatgattaagtgtgctacagatgagactacccattattgaagccaaaggtccttagccagtggagtgaggcaagaaaaataaaaggattgaagattaaataggaagaaacaaaattatttttttcatagattatgtaattatgtacgtggaggccgggcgccgttggctcatgcctgtaatcccagcagtttgtgaggccaagacgggaggatcacctgaggtcgggaattcgagaccagcctggccaacatggtgaaaccccgtctctactacagatacgaacttagcagggcgaggtggcggacgcctgtaattccagcctctcg

SEQ ID NO: 3260 - DNA, 230 bp, Homo sapiens
agttgttgcatatgtagtattttgttgctgtgctgatgttgctaatctctacctgtattgtggtcagaaaatgaagtctctaccatttcttcctttttaaatatattgagcttccctctgtgagcaaatatacggataatgtttgtcaatgcttcacaggtactaggtgtagtctccattttaagggataacattcaaaatctatccatctgtacaaccttaataattat

SEQ ID NO: 3261 - DNA, 604 bp, Homo sapiens
tcagagcccttggaattttcccatctccacaacccaaagacagtactcacaccctgcacccttcccttctctgacttcaacctgatactagagctactccctttcctacagcaatccttggcctatacctgtgctagaaccgtctctacctgccatgaaaatgcaccacccagatctaattaacagcactgactcttccaccatgtttgcaccaaggccaggcttcccatgagctactctcagacagagaatgagtctgatgggtatactgaggtaggcccagttttgcaagagacagactcctctgttgtgtgactttggctcaaggagtccccactgatctggctgaaactttttcttagaactgtgtggccacctgagactcttccttgacttcctctccttccttccccctctcctggcacaggagtcagaccagcatcactgcctggcagccatccccacttcctccttcagcaccctcctcttgctattcccatcttaccttctgtttctgagaggatgtgattgacagaataggggtcccccaaagatatctacaccctaatccccagaacctgtgaatgtattaccctccatggca

SEQ ID NO: 3262 - DNA, 530 bp, Homo sapiens
gatgacttatgtaaatagccaaactgtgtttcagaattgttttatacatcaatctaattcttaccattagtaccgtggcttcctctcctctttcctggtgtccagattgtcacagctaaagggcatttcttcctatttagcaaatataaccattatcaatgtttaaaatgagattttcggccccttcccttttgtgttataggtgctccatacttgcttgcagtgcctacgtggctctggctttgggtgataacctcatggctttgaatcatgcagataaacttcttcagcagcccaagctgtcaggatctcttaagtaagtgtgacttgccctgtgtgtccctggtttctttagttttgaggtttctccttggtttgtggtttatgttgcttcttttgactcctccagtggaatatatatttgtaaggaaagcaactgtttaaaagaacgttttttaacccatgcctcggcagtgaaaatgttttcacttgtgctgtactgagcgttaggagacaaaaacctcggactc

SEQ ID NO: 3263 - DNA, 245 bp, Homo sapiens
tattgcaatattcactttgatgtagtaatctggaaccacatttacagtacccctgatgtgtatgccggtagtaagatatgccttgtcatatattaagacagatcacaaagccattttgattaaaaaaaaaaaactggcacatttcagacaataaaagaagagcctagaaataaaccacacatggaatctggtatttggtagagacagcattagaagtcaatgaagtacaaacagattgattagta

SEQ ID NO: 3264 - DNA, 521 bp, Homo sapiens
ttgggccagattacctggctggtgaagatgggcagttcatcatttcaaattttattcaaaacaaatcaagaattgccattcaatattgatttcatttattctgcactgaatccacacttactgagagaactattccaggtgtagtccttgttttcatcttccagtttgtttgtggagatggggatggatgtaggaatgaacgatgtcaacatctggcacaggtgctaaagtaataggatactacattgggggttcaaagaatgaagatgctttcaactcaatcttcaacttcacgcctgtctactaaaggagtccccaggccgggcacagcggctcacgcctgtaatcctagcactttgggaggccgaggcaggcagatcgcaaggtcaggaaatcgagaccagcctggccaacatggtgaaaccccatctctactaaaatacaaaaaattagctgggcacggtggtgcacgcctgtagtcccagctacttgggaggctgaggcaggggaattgcttgaac

SEQ ID NO: 3265 - DNA, 498 bp, Homo sapiens
acagtacccttgttggttcctgcctattttgcccttcggtgcaccatgttctataaaccatctccacagttccctgtgggtcaagcccccttggctacccttctgactttgtagtaattgtggccccccacttctggtggtgagggactgctaccagggctccattatttggggccccattctgcaaataaccattaataagtccagctttgtgagtgtctcatctacagttagccctacccagcctgctgaggacaggtatcactgaattgattagtgttctttgtgaaccttttggcagcttattcctggtggccttgttgaatgatgggttcactgagcctacccatggagcataatcttctagtgggtcttttggcctcatataatatatccattccagcatgtcttacttatgaatcttgctgtgagtctaaggtaagactaagcatagattaattcctccattgtcatttagttagcctatgcacagtgata

SEQ ID NO: 3266 - DNA, 510 bp, Homo sapiens
tcagatcagcctgtggaaatgagggctgaggagcattccaagagggacatcatatgcaaagatcctgtggccaatagatgcatggtacatacaaggaacttgcataagagaggaggagcaaagcaggacagaaggtctgagggaccaggctctacagagtctgttagctgatattaaagatgccggtctttttcttgagaacaaggagttttaagcaggggaatgagacaatcctatttgccttacaggcattttagctttataaattatggattatgatttatactttatacagcaattcaataaagaagatacaaagcagcgttatggaaatagctcggaggaagcttagcagccctataatcgttgtcagccaccccgaatgagcatacattcttatcccagacaaaaagagcagtgcacctattgtggaaatgcagcttctgcacaagcccttaagcactccatcctaacacctggctccacccatattcccctaggccccgggag

SEQ ID NO: 3267 - DNA, 586 bp, Homo sapiens
  misc_feature 302: n = A,T,C or G
gagcctggacaacaaatacaacaataactctaagaaaaggtgtaacaaaaatggggaacagataaagggatatagcagttaggaggagaatgagatggaagcattttaagggatcagatacagattcatcaaggagcgagactgcatattagatgaacttcaatgacatgtagaaggtctcctaggtagacaacaaaaaatgagtccaaggtgccttgaagaagagccaggggtatgggagaggaatatttcagacttgtcagggaagagggttcccttagaggagcatgataatgtctttntggaatgggagctatgagcttgagtctggaacacaggacccgtgagttacggtaggctaaggcacttacagttaattaggtagccagagaaacacactgaatgctttttcagcaagaagattagaacttcaaaaattaatcaggtgcaggtgcatccagattaggggttttagcattggagaaatgacaactcaggaacacagacagaaagacagagacagagactgagagagcagattaaattctgtgatgagaggacagtacagaattaagcagcagcttgg

SEQ ID NO: 3268 - DNA, 584 bp, Homo sapiens
cctttactacttcttggttttctgacactgagaaggtcatttagcttctccagatttttgttttctcatgtgcaagataaaggagttgaacaaagacagtggttttcaaactggattccgaggaaccctagggttccaagaagacatgatggtgagaagagcaaggcaaaagggaaagaagacaattgttaatgagcaggacccccacttctacccagattgctccttcttgctctgttttgtctaccatgcttccacacaatactacacttaatcaaagggttttggcagggcacagtggctcacatctctaatcccaacgctttgggaggccaaggaagatggatcacttgagctcaggagtttaagaccagcctgggcaacatggtgagacaaaaaatataaaaattagctggacgtggtggtgcatgcctatagtcccagctacttgggaggctgaggtgagaggattgcttgagcctgggaggtcgaggctgcagtgagccgagatttcaccactgcactccagcctaggtaacagagtgagaccctgtttcaaaaagaaacacacatacacgcacccc

SEQ ID NO: 3269 - DNA, 565 bp, Homo sapiens
atctgtagaagcaactgaggcttcacctatgatgaaagactttggagtcagactgcttaggtttaaatcccagttccattatttatctatttgccttatgactttggaagttacttaacttctctattcctgtttccttgtctgtaaaattaggataataattgttcccaaatcataaagttgttatggggagtaataagatagagtgtgtaaaatactccatacagagcctggaccatagttaagagtaagtactctacaaaaacttgtttttgtcattagagatacaataaaaagttatgaaccaaagtggccagtaaaaaaaatgaaagtttttatatactgagcatctataatgtgtcagtcattatgttaaccagttttcatacattatttcttttaattttttgtcttcgaattattttaaaagaattaaaagaacacagtatgatttaatgtgaaaacgaaaaagagaagattccagctgggcacggtgactcacgcctgtaatcccagcactttgggaggcctaggcagttgaatcacgtgaggtcaggagttcgag

SEQ ID NO: 3270 - DNA, 235 bp, Homo sapiens
gcagcagatgttactgaaacgtgtgggtggagcagtgagacccagcagctgagccacatgctctggatgttctaagtcaaggcttgctggattctagggtgttgggggaatgttcaaaagctgagcaattcgggagcagatgaggttaccttcttcaaccttccagagggatggaaccttctacagatgctggtcgtggtaaaggacgagaatgactttttttttttaaggctcg

SEQ ID NO: 3271 - DNA, 559 bp, Homo sapiens
tgccttgccctaagcttttagactagatataatgcaattgttgaaagacagtcttcataccattttaaagcccaagatgcggattgtttttttctcaatgcagaagcaaaatcatcttcagagaaatttttgctattaaagaaaataaaaattaaaaagttaaaccacaaatattttttaagtaactatacttaactctgcttgacaggcactcgacagtgaaagtatgaatcccaagcaagaaatctgcattctatttacataccaaaatcttttgactttcgaaatgattattattgttaaacagtatttttcttggccaggtgcggtggctcacgcctgtaatcccaacactttgggaggtcgaggcgggtggatcacgaggtcaggagattgagaccatcctggctaacacggtgaaaccccaactctactaaaaatcaaagaaaaaaattagccaggcgtggtggcgggcacctgtagtcccagctacttgggaggctgaggcaggagaatggcgtgaacccaggggcagagcttgcagtgagctgagatagcg

SEQ ID NO: 3272 - DNA, 517 bp, Homo sapiens
  misc_feature 291: n = A,T,C or G
gattgcttcagtccaggaattcaaagctgcagtgagcgatgatggtgctattgcactccagcctaggcaacagagtgagactctttctctaaacaataacaacaacaacaacaacaacaacaacacaacaacaagtgagtgaagcagacagggagggggaggaggccaagcaaaggtatgattttaggcaaagttcccagagagtagcttaagcctaatcctgcagagaaactctcaaatggaagtgatacctccaagtcgatcccagcttgagccaagggagctgggctntcctacccctgcaccagccagtcactggccaagggcttccatgtgaggtacgaacttccagggcttccagctttctgtagtcagagagcagtcttacagagagagagtagcaggtgacagcctagcagcagaagcacctataagctgggggaagcgtgcacaggaatgataaaagcagcagtatggagtatggagtggtatggagtatggagtatggagacatacc

SEQ ID NO: 3273 - DNA, 487 bp, Homo sapiens
agagagtgagacccaaatgtcatagaacagacttctgttcactgatgtgtggttcaatatccacttccaggcatagaggggattatgacccatcctcttgagggttggcaaagccatgagtcttgctatttattggcaaataaaatatcagtatttaaaaccttgtgtgtttctccatctgtccttcccccagctcaggcaaatgaagacattgcaaatggtgaaccctgggcccctgagcaaagaagggctgacacaagaccccatgccatgccattatggactactgcatgagtaagaaataaaactttgggccgggcccggtggtttacgcctgtaatcccacccctttgggaggctgaagtgggtggatcacctgaggtcaggagtttgagaccagcctgatcaacatggtgaaaccctgtctctactaaaaatacaaaaattagccgggcatggtggtgtgcacctgtaatcccagctactc

SEQ ID NO: 3274 - DNA, 186 bp, Homo sapiens
aggagatggtatttggatagaactttggaaaagcagtaaaagttcgcttgacagtaaaattgtggctggaggggtgggagatagtatctagagagagggacagtatttgaaaaccaattgacaatgatgagaaaaacatttgctttttagttagatgaacattacttttaaaaatcatattgtaga

SEQ ID NO: 3275 - DNA, 500 bp, Homo sapiens
ctggaactctgagaaggcttcaccattatggtcctattacttggtctttcttctgcctggaatgttcttccgtcttacatttccaaggttcaccctttttctagctccaggtctctgcttaaaggcacctaatcaaaaaggctttgcttaactatcttattcaaataacaagcctcttcacagcattactggatcatagtgggtgctccaaaatatttgaatgaatagtctatatttcaaggaatagtctccatcttggaaatgagtaccttgtggcttaaattgtaggagctaaagcgttaggaactaaagaagattttcaagttaatattgggatttatatccccataagataactaaggttttgaagtaaaaaagaattggattaaagtttctgctctagaatttaaaaatataaaaacagaacatttatttaaggcacaagtgggagataagtgatgagaacacattgacacatagaaggcaacaacacacgctga

SEQ ID NO: 3276 - DNA, 620 bp, Homo sapiens
cctcagaagtcatttcttttccaccaggcctgagaatcccctccttcaccaggatacttgtgggtgggagatgctggtgagggaggtgtggaggggaatctccaccacaataagtagctaggcctggaagcactcttcatccagtcagaccagagactttcttttccccacctagaaacataaagaagcctagcctagaaaaatgtgttctgtcccctcaggcatcacagtatagacccctgggagccccaccagcaccagatacacaaggcccaccaaaataagaccaaaaaatcttggaaaattaaattgtccttagaactactgcccactaaagtaggctaggacctacgatgtaaacctaacagagttactacctactaaaataagggatttaaataggacccagagtctcctaaaatgaacagagcctcagaaacccatgggacaaaaccaaaagatcccagaagttgagaaagagagtaggccctgaaggagtactgaaagacacaatagctgacaatgtcacaaattttgtgaaagagatagaccaacagattcatgaagtgaaccccaaataagataagccaaataagataaattttttaaaaaatccatgc

SEQ ID NO: 3277 - DNA, 357 bp, Homo sapiens
cctatcctataaacgaagaactaaaagtgcgcttttgtaccttgaactatatcaaagtggggctatctatattttttctgcgccccaacatcatatgatttgttatagtcttagtcctttcctgtctttatacccattcccacatgtgggatgaaagagaaatagaataatagcatatgaggtaaagagttttttttataatgataagtaagaaaatgatacaccagtttgaaatgcagcgtttcagacagtcgctttcattgttattctgaatattcaaataaaaaagaataatctcagtggattcctttggaaaaacaaataaattacaaaatgaggaatgtgtatttgcccatc

SEQ ID NO: 3278 - DNA, 523 bp, Homo sapiens
gcttcacaaaaatatccaacctactgacaaaagagttgtggagtatttcatgatacaatagtggtcgttgttctgggtctgtgagacctccttgcgtcattttaccttggtcacttcaaatcctataaacaaacatttactgagatctcatgtgcagcgggcacggtgctgggggtttgttctcaaggctaaggaggtggaggagattgggcttccaaggaacaggtgaataaatagattcattgagttgtggtggttctatttcctctttccacccaaaacccatgcgggaaacatatttcctcaaagtctgtggtgtgggttttaagttttttcgtgttcttagatctaaaagaatcaggccgggcacagtggctcatgcctgtaatcctagcactttgggaggctgaggcgggcggatcacgaggtcaggagatagagagtatccttgctaacacggtgaaaccccgtctctactaaaaatacaaaaaacaaaaacaaaaatagcccggcgtggtgatgg

SEQ ID NO: 3279 - DNA, 509 bp, Homo sapiens
gcaatattttaattaatgtatttttttatggaattacataagcaaaaagtcatagatttctgtaaatgacccgaagatgctcatagtctggttgtgacaactcttcatgaaacagaaaatgaataaaccgtattgtgtatgttcaatccaatgacttaaacatgtgataacactggcttggattttataggagatgcaaagaggaagaaaatggactccttctctcaaggaaagtgcattatgatgaagctgataggtaaagaacttgctgtaaaacaagacagaatgaaatgagtgttaaatagtgatacaagcagcatattgaggaaatacaaagatcaaaaccctgaattctgacagagggtatcaaggaagagtgtacagagtatatctcttttatgagtcgtaatagatggacagagaatgtgagaaagtattcctggttgagaaaaaaaatggcaggtaaaggcacaggagcatgaaggtgcacatgtgaaaaagtgttgagt

SEQ ID NO: 3280 - DNA, 555 bp, Homo sapiens
tcagccattattgtcacccctctagtttatgtaacaggttcttagatagcatttactgtattccaggtgttctaagctgttcatgaatattaactctgtaatcctttataacaatcctgttcagtattgctacctccattttttcccaggtggagaaacaaataggccactcagctaggtagtgctttagccactgaggtatactgctttttcatgttctttttttctgacccaactgtttctctaactttaaacattaatttttccccagctcaccattcagcattcgtaatctcttatctagcgcttccacaaaaaggattacctagctggcatgcatttctttgtctgatgtctctttgggtactacattatcatttctggccaggtgcagtggctcacacctgtaatcccagcaccttgggaggccgaggtgggtggatcacctgaggtcaggagctcaagaccagcctggccaacatggtgaaaccccatctttactgaaaatacaaaaattagccaggcatggtagtgcacgcgggtaatcccagcaac

SEQ ID NO: 3281 - DNA, 609 bp, Homo sapiens
aatctaaattatgagatagtcttaaagcctcactgtcaccaccaatgactggctctgactctagtataaatcagaaattatccagacagaggtgagaatgtaaatatacagcatgaggaagacagcctccacattggaatcagagttcataatcttatttgcattttcttctattaatacaagctttcccttataatttcactgttcagactccccttcattgtgttagggttttcagtctattcctggtttttcatatccaaattcatcatccatccttgatccattgttttcttagatcactcaaacccccatgagtagacccatggtcattaccaaatctggtcatttgggtactattgtaggtttaaccctagggcaatattctcgaagtttagttcagggatccatggggttccccaagactttctggagcacacagcttcttcaaatctactttcataatgatgctaagttatttgttttttcagtctcattgtctcattagtatatagtggcactgtccagatgctctatgctgtattgtgtcataaaagatgaatatagaaaaagaaaaaagaatctagctgtattctattaagctagaca

SEQ ID NO: 3282 - DNA, 548 bp, Homo sapiens
aatagcctggaagagctaatgttatcacttttgtggccagtttaacatcttcttagtacgatcatttttaaataagtcatcatgacccagggaaaattacttcttttggcagcagaaaagtggggatagaggagataaaaaggggatatcacaggctcagcatattttaaatattcacattaggtatcagtcatgttttcatgaacttggctaaatatatcctaatagacactgtttgtagaagtaatcttttatggattttattacctgataatcctgctgtttcctggttagatggcagcatgaaaaatgtgttgttctccatcatactgaatggacaaaatctggaaccattccccttgaaaatgggcacaaaacaaggatgccttctctcagcacctctattcaacacagtattagaatttctggccagggcaatcaggcaagagcaagaaataaggggcatccaaataggaaaagagaaagtcagactatccctgtttgcagatgacacgatactttatacagaaaccccatagtctcagccc

SEQ ID NO: 3283 - DNA, 564 bp, Homo sapiens
cattatgataggagattagtgtgaaactggcacaaaagctaaattaacataggtagagtatattcgggattatttccttacaatacattcccagagtgtcaaaggagatcagtaagagaaaatgagggctagaaagaaactctctcacatatagtaattcagaaaaccaggggaaaggtaagggttaggaattttaaagttatgtcataaaaacaaattaatgcattgagaaattcaacttaaactctcatcacaaaccatacatcaaaataaattacatggtggggtctggtggctcatgcctgtaatcccagcactttgggaggccaagataggcggatcactggaggtcaggagttcgacaccagcctaaccaacatggtgaaaccccatttctactaaaaatacaaaaattagctgggcgtggtagcacacgtctgtaatcccagctacttgggaggctgaggcagaagaatcgcttgaacctgagaggcggaggttgcagtgagccgagactgagccattgcactccagcctgggcaacaaaaccaaaactgtctcaaa

SEQ ID NO: 3284 - DNA, 169 bp, Homo sapiens
tcaaggccagcagctactcagtttcaggagcttcttctcatcatcagggccaagaaacagaattgacctgggctgagcttctcctttaagattattgcaagccggccaggctggtggctcacgcctgtaatcccagcactctgggaggccgcggtgggtggatcacctg

SEQ ID NO: 3285 - DNA, 562 bp, Homo sapiens
ctcccaaaagcatttaccctggtcgctgaagcgccgctgcttgggattggccgacacgctgcgctgtaccttgtgggatggggatggggcgctgctattggtcagatcagctgaaggccggggtttcagggtgatggtgtcgccttccagctgaaagaaacagaaaacagcttcaagggagggcagaagtcatgtggagatccctatggatggacacatttacacataccgccctctcccaacactcaaacaccccaggatcataccggacatccacttgtaagaccaatacatcccccctggaggagaccctggagacacacatgctctgacacagacactgacaaacacagtctcagaaaggaatacataagcccacacacccagagacacaaacatccgcaagaacacatgtccagactcaagtccactcccctcaacacagagcaatatgggcctataccaagtgtcaccaggtgcctcttaaggatcccaccaccagagggagagcagggcaaggaggctgggagttcatgtggggatactcagatgatgaacaaaa

SEQ ID NO: 3286 - DNA, 577 bp, Homo sapiens
cattgatttctcaatgtctgtcatacacgcctgttacgtgatcctcagctttcagccccctcgccccttagatctcacagtcaccaagccttctagggaaagaatttcaagcgcccctccatcttcttcatttattcgctggctcagttcctctctaccctgcaattgtttccttttttgcctctcctgcctcatttcttcccacttgaaaataataatttacttttctggaaataccattacctgctactcttgctataaactgacaaaggttcccattagccttaagaaaatggttagaatctttatcctgacagaggcggccttgaagaatctgttcctgagaccttcatttacagaatcctcttacagacagccctctgcccaagactgcctcttctaccacctaagtcctgcccacccctgcttcaggttgccccataatgcctcactgtcagtcaggcctttcacagcctcctccacctgcaggcaccactgcttcctccacacccctcagccatcaccacctctcatctatacatgaaacggaatatccccttccattggtggatgctgg

SEQ ID NO: 3287 - DNA, 553 bp, Homo sapiens
taagtaactttcatcctagttggaaataatcaccacatacttgcaagaaagactttatccttatcctcttgttctgtcttctgcttgaggctttggataaaggcaaagcccttttaagcccaagcaggacaaagtccaaatctgaaaattgcactatcctccaaaggtcttaccttccaatgagtcagataattttggatcattcccattaatgagtcatgctgaccaaatgtagtttttgtgtatttcttgctacaacttttaaatattcccttccttccctttctacatttgttgagtgactactgtggaaacaagactcagaaagttaacaggctcttgtataaaagtattttagtaatttaacaaactagtgttgctgggcgcggtggctcatgcctgtaatcccagcactttgggaggccaaggtgggcggatcacctgaggtcaggagttcgagaccagtctggccaacatggagaaaccccatctctactaaaaatacaaaaaattagctgggcatgctggcaggtgcctgtaatcccagctactc

SEQ ID NO: 3288 - DNA, 260 bp, Homo sapiens
aaaaataaatacataaaattaaaaaagatgcatgtcgtgactcagtaagtccagggtggagcctgagattctgtactgctaacaagttcccaggtgatgatgctggctggtgtgtccattctcaagcacttggcagttggacacttcctccctgaaattagaatctaaataagagtgttgaaaaacctggcagagctcagaccagattttcctgctcttcggctgggttcctgtctttgcccctgtgcacctgtggaatc

SEQ ID NO: 3289 - DNA, 562 bp, Homo sapiens
catcctccaggctgaacagcaaggaggaagcagccaagacccatgcccaggctctctttttcagctggcgccattttgctcatggattgtttcactgttgttctagggaaagggagaatggggaaaaaggagggaagagaaggggaaaaagggaagggaaaagggaaaaaggaggaagaaagatcctgagccttcttattctgttccagaccctaggcgttcctcttcaccctcggcatttccctgagtcctctacaaacccttgaaaaacaacccatgattatctccattgatggatgaggaaagtgaggccgggtgaggttgccccaagtttcacagctaacaaataacattaccagtatttgccccagggccatctgattcccaaattgtatatggttcaacctaatacagcagaaagaaattcccacattctttctgctgtattaggttgaactgcataaaattgctgttcccatggccaggcatggtggctcaagcctgtaatcccagcactttgggagaccaaggcaggtggatcacttgaggtcaggagttcaag

SEQ ID NO: 3290 - DNA, 507 bp, Homo sapiens
tactcattactttattcagcaaacatttattaagcatctactatttattaggccctctgctttgtactgaaatgataacaattagtaagacccaatcccagctttcagggttaaagtttagtgggaaagtcagacaaacacataattataatattaggtggtaagtacagatatagagtatctgttcagaatattttgaagacacagaatgagttaactcacgcagttaggatggaggtgagaaaggaatggggcggggaggtgattcaggtggctgtcagagggtttcctgaaggatgtaatagtaagaaaatatcgacgaaaagaaagtggaggctgggcgtcgtggctcacgcctgtaatcccagcactttgggaggccgagacaggtggatcacttgaggtcaagagttcaagaccagcctgatcaacatgataaaaccccgtctctactaaaaatacaaaaattagctaggcgttgtggtgagtgcctgtaatcccagctac

SEQ ID NO: 3291 - DNA, 584 bp, Homo sapiens
gtggtgagaatggacaatcaactaagtatccactaccaactctccattttaatgacacagggaaagtgacctgctacagggaaagaatagaagataataatttaaaatcatatttattgagcacttgccatatgccaatcatctgtctagcaacttcaatcaataaagaaactttataagaaacataccttaggatttttccttacatttgttagaaacatcatgtacaaggcatatttaaaggccatcaaggattatgataggcataggaaatagagagttgaataaaacaatgtttctgactccagaagtccccaaataaaaacagacagaaatgtagaaacgtgatcatacaacaataataggggctgctatttattatgcagatatgcataatatgcccaataggttatgtatgataacctattgggatgtttttgatatttccctgtttcacagaaaaataaactaagattcagagagtacaataaatatgaccactcattcttttaaaatcctattggcatgaataataccattttagatataaagaggtacagatatgtagataccacgctaggcct

SEQ ID NO: 3292 - DNA, 141 bp, Homo sapiens
ctaaaaataacttgttttcttccaggactggggtcagcaagagagaagtgtagctggctgagcttcctaaagtcaggggaagaagttaagatgagaagccagactcttctatgaagttatcagtatatataaaactgcatg

SEQ ID NO: 3293 - DNA, 510 bp, Homo sapiens
gtctcagcctggtcatgaattcaggtcaaccagtgccacttttatgaaaagaactgtagaagggaaatccctggaaacaaatacactgacaaatcagtccattgtgtgacttcttcagaacaaaacctgcacttggaactcagagaaaggagaaaatcacagcctttcatgtaaattatatctgagaaataaaaccttcgaatttgaaaaaaggctcactagataataccacttggaggataccaggaattagtatttttttgaccacttaagtgccaagcttcgagctaggtgctttgtatccaacatctcatctgttggtaacactaccaacaattcagctcaaagaatcacactgtcagagctggaagggtcctcagagatcatcaagtccaaactgttcatttgcatgtgaaaaacctgagaccatggcaggacacagtggctcacacctgtaatcccagcactttgggaggccaggagggcggatcatgaggtcaggagttcaag

SEQ ID NO: 3294 - DNA, 521 bp, Homo sapiens
tcttggagtttgaacccaggtttgttgcactccaaaccttgtgcaacccctcctaggcaatgtttaatacaatcccttaagttggtctaattggtatttcgggtgctttttatacatgatatatatcatcttccattaccactgccctggacagtaagtatggctcattcatgaattctgcaacaaacatttacagttcttaccagtgctacctagtggcatgcctccattcataaaaaaaatacattgtattgaatgcatcctgggccctgtactctaggtactggattggggcttaccaaggtaaattaagacagttctctgcatttaagaagttcactaccagggccaggcacggtggctcacgcctgtaatcccagcactttgggaggccgaggcaggcagatcacgaagtcaggagatcgagaccatcctggctaacacagtgaaaccccatctctactaaaaatacaaaaaattagctgggtgtggtggcgggcacctgtaatcccacctacttg

SEQ ID NO: 3295 - DNA, 554 bp, Homo sapiens
tttcatgtgttgcagcctgttctcttcagagcctaacacactgacagtagacctctgcaggacaactttgacacccagttctctccaagctgccagtgagctccctgtgcagcctcactcctcacctacagcatgagcccttgcagctctcccagcatcacaatcttgtatctcagtcctggcttctttcactgctggcgtccctccgtctctccctttttcacctacttttcttttttcaaagaattcttctctttcatctgcttatatgaaaaataatgacacctctgaaattctttcctgtagtcctgcagcatcaatgccaggaagacagacctcatcctcccagcttctttgctgctcctttcagatcccttaccctgtccccattttcatgacacgggctctccagccaggaagaagacactgtttctcactctctctcttttccatctttgcctgtccctctcgctgtgtaacttcccttataactcagcctgaggccagtgctagaaaggcacatcacctgacttattctgtgcctgattctacct

SEQ ID NO: 3296 - DNA, 309 bp, Homo sapiens
ctctgcctcctgggttcacgccattctcctgcctcagcctccacagtagctgggactacaggcgcttgccaccatgcccagctgatttttttgtatttttagtagagacggggtttcaccgtgttagccaggatggtctcgatctcctgaccttgtgatccgccgacctcggcctcccaaagtgctgggattacaggcatgagccaccgcgtccagcctctgattgctgtaccttttgacaggactcttgagtgttggttatgttgggcataaagtttattttccttagaattttacttttgagcattc

SEQ ID NO: 3297 - DNA, 552 bp, Homo sapiens
gtgacatttaggtctagtttattctctgaacagggaaaaaaaaaaatcctagcaaggagcacagcatgcatcagtagctcaatgatttattctgcctcagtaggatggggtggacttactgggcaaccactgacttcatttaatggtaacctgcaggtgagtgcatcagatctcttccttgatcaaagcgtttagcttgtctcattgccaaccagatttctaagaaacttgttacacaaatcagaaaggcaggctgttacatcatttgcttacagtttgtaagattattcttttaataaatagttgaatgcctgctatgtgccatgtactcttctaggtgttagtgacattgtgctgaacaggacatggagcttatacatgttctcctgagtgtatgctcaagtcacctcattgatttggctgctctatttaatctttatagggagttctctgtttttcttcctaatattccaagataacttttttcttgaatttatgaagtcctgtttatatataaccctaccttatgatcatagcatttaaataattttc

SEQ ID NO: 3298 - DNA, 568 bp, Homo sapiens
aataggaaaagacagagaggattaaaagcattcggctatgattggtgagctgacatttgcagttcatttcactggaagactggggaaaacagcattatagtaggacttggcttctaaaattaaactgctgaggtttatatccaactgcctctagtccctaacatatatcctttgaaagtttcctaacctctctagacctcggcttccttatctgtcaatgggataataaatgatagctattttatacagtcatatcaaagatggtttgcgatgatgcacatgaactatttcgcacacagctttgcagagagctggtgaaagccataaggttttgtcttgtaattttctcagatacatattagcagatatgaaagtgatataaatacacaataaagtatagtttttaaaatagtatgtgttttatttcatgttcatatcactttcaccaggcaaaaattctgaaactttctgtgtgaacataatattatgggtacactctgcattatacctctaggcgtcatcagaaatttgtgcttaatattgtccactcacattccctgaacaacgc

SEQ ID NO: 3299 - DNA, 563 bp, Homo sapiens
ttctccatgaaccttctgaaatcctcttatatttagggagttctccttctctctagggagttattcagtagagccagagggtatatccaatctttaaattggtgaaaaggactcttttcttcaaaccatcatgactgtctttgagatgcttgttagccagggtacacacattcatacacaaacacacacattcacacataaatacatacacacactctaggctctctgaaggcaagtgtttctccctacgtcttgctaagcttgggcatgggacattttgccgtggctgggatgcagtggagagatttttttcaagtatttatgtgaacatgcccacctggagtatctagaaggtagccaaccttgaataggagtgaggaaatccggttctctcctttctgggtcaaaccacatctcctttttctggtgttctgagacctattcccttttaggcaatccattccctcagtgaatttatattttcaaaaacataaaagtggtaatttccccctgagggcacaaaatgcccaacttctggcactctcagcttggtcactctgtga

SEQ ID NO: 3300 - DNA, 547 bp, Homo sapiens
tggctcaagagggactgattgaatagctaccaatagtttgttgttgttgttattttatgcgacttccaaaaagtaaaaacgatatgcagaattagaatcattgaatgcagagaagagccaagatccgtgaagattatactgtattaatagttgatcacagtgttagttaattgtatttgtcaagataataacctctgctgcagaagcaacaagacaaaatcctcaatggtttactacttctcaggcacactatatgacccatgttagctggtgaagagcagagggaaaggctcagctccagtctccctgacacacagaggccctaccttcttgtggctggctatccgtaacaagtagctttctcagtcgccatgttaggggaagagaaagagacaaaattgttcatgggcttttcactacttcactgtgcaactgatgcacatgtattcacattttcctgaccaagactagttccatgaccctttttttattgcgaacacactgggaaatatggggcaattaatatagaacttggtgagcaatactc

SEQ ID NO: 3301 - DNA, 443 bp, Homo sapiens
gaatcaacaaagagtggtttaaggccattactgagaggcacagagctaccactaatgaaggtggtgcgatggcatagagaagccttctgaacaactcagctttcaacatgtgcaagaattactttgacaaaaaaattacaattttctaatttaaaaaaaaattactaagttattgggcttatctaggctctagattgggggatatgaaaatcatttcaagtaattatctcatagtatttcatcccactgactacaaggctacaagagaaacctcccttgggagaaaatgaagaaaaatatttaatagggaaacagactaatacagagagactgccagaagagtggtctcattcaggtatatgatcagaaattttaattcctaaaaggcatcttcatgaagagaatacgtgtatagacatttttaaaaataatataaaagctgg

SEQ ID NO: 3302 - DNA, 452 bp, Homo sapiens
acctgctcgggcaggagatcatcaaattctcagaaatccttctcccacccaggggccccgggcagggggtcttcagacccaaatcaccacaacacctcccccacctccctggtttcagagaacttggcaacctcctgagtgagcttgggactggctcctgagctggctgggtgtctccaccatcagagatacacggcaggaactccttttaacctaaggttggtttatccattttcctgcagcaggagtcggcccgagccagcctcgagcatctgacctcagccttttctctggagttaaaattgatggtttcggctggccggtggctcacgcctgtaatcccagcactttgggaggccgaggtgggtggatcacctgaggtcaggttgaccagcctggccaacatggtgaaaccccgtctctactaaaaatacgaaaattagccgggcatg

SEQ ID NO: 3303 - DNA, 528 bp, Homo sapiens
ctccatttttttaatggctgtattcctggaagagccacttattccttttcttttaccttgtattcaataactattgagtgttattgaatgtgccgtgtttggttgagtgcaaaagatccaatgagaatgagttctagttctttcaaagaatttataggcttgggacttgggtggactaatacacaggaaattatcaaaagggaaagagagagaagtgctatgattggctgatttaaaaacccatagaaaggacactcaacctactcttgatggcatagcagatacaatcttgatggtatagcagattaacaagactaatcttgttcatcctcaccaaatattctatattgccccctatattttccacctttctctgcagttacaatggagtcatgtgactaattctgaccaagagaccgtgagcagaagtaacacatgtcacttcctggtcaaagtcattaggagttgttctgcttcctcttcctctctcccctcttctctcttcagagagcttgaaggccacgtgtt

SEQ ID NO: 3304 - DNA, 520 bp, Homo sapiens
ccagggaagatttgagaaagggtaactttagttgggtttactatttgagggaaacttgttcctgtaaattttcttaaaaatatgagtatatggcatgtgcaattttattgaaaatggaagacaattcaagttttccactatttctagctggatttcaccaccggaagctgagttaagtagagggatgataaactagctattttggtactattctgaaaatatgtgatacaaaagatataataatatggcatacacctttttaaatgttacaccaaataactttaacagtgatgcaaaaagtatgattttaaaaaattttccagctgggtatggtggctcacgcctgtaatcccagcactttgggaggccaaggagggtgcacctggaggccacttgaggccggaagtttgagaacagcctgaccaatgcagcgaaaccccatgcctactaaaaatacaaaaattagccaggcgtggtggtgcacacctgtagtcccagctacttggaaggctgaggcaca

SEQ ID NO: 3305 - DNA, 530 bp, Homo sapiens
tattctcaaagccaatgaaacaaaaggtttataccatgatcaagtgggatttatctcaggaatgaaaggctggttcaacatataaaagtcaatcaatacaccacattgacagaataaaggacaaaaaccatatgaacatctcaagagacacagcaaaagcatttaacaaaaatccaccactaaggatccataaatggaatcctctgaagatgttaaaataatgtggtagatccctatgtattgatacaacaaaactttaaagataaactgcagagtgaaaaatcaagttgcagaacagcatatactacatgattccatttatgttttaaaaaattcataggaaggagggggaagctgggagggggaaaaaattcataggaatgaaatacaggaaaaaataaacacaaaaagctggtaagtaatatactgcctaatagtgagctaaaacattaactataaaaaaggggtaaatcttgttcataaaaatcaccactgtaacacaccctgggcatgtcataattttgatattc

SEQ ID NO: 3306 - DNA, 571 bp, Homo sapiens
agatgacctctatatgcaatggtcacctcaataacgctatttgaatgtcccataacagtcatcttaaacttaacacatttaaaacgaaatccaccatctttcccatccaaaaccactcttgtggtctcttagtgaatggtattatcattcatgccattgaccaaatcagaaacctaggcattagttttgcatcctctttggttctttcatctcttttgactccacccaaaccaccactccatcatccaatcaatcaccaagtgatgctggtagaattgtaaatctgatgtcacttgttaaaaaagaaaaattaaggaaaaacccatcacagccgagtttcatctttttctactttttatctcctttccctattctctccttagacctctaaattctacctataatgtacttctttcagttttgtgactataattccttattgctctgaagtatttgcacatgttattccttcagcctccaagtgtcttcctccactcccaactccatttgacttggttcactcactactctcttccaggccatttacattctctaactacccatcttattt

SEQ ID NO: 3307 - DNA, 581 bp, Homo sapiens
accacatggatatagggatgtttactttgtgataatttatcaagtggtcaccttctgagccatatatatactcatacacataattccatagccagagccttacataacggaagtggatggaggtggtggtggagtggggggcaggtaccagagctggtggtgaacttggcacacattattttaggcatgaagcatgaaatagttattaacttcagaaaacgtttttataaatattataacacagtaaatgactttttgtgcatggctcatatatgtttacatcatgaaaattatatgaatgttatgtcaatatcgactctaaaccaatcctgggattattctatgcatgcagtaaagagtttggttggagggaaagtgtgcatgtcggttttagaatgattgtaagaaaatcaaatccccaacttctctggtaggatggctattaatatctaatggtgacaaattaaaaattgcagtaaaagagcctttcttagatatatgacatctcaaaagaaattgctaaaatagattaagttattgtttctaggaagcaaatgaagaaaatattgatgcaaagggat

SEQ ID NO: 3308 - DNA, 517 bp, Homo sapiens
agcccctgcacctgtgatttgtgggtagcccctgcatctgtgattgtggttttggttctagaactcacttccccagtttccctccttgcagatggagtcatttctccttcctcatttactccctacaggagtggctctgagcagccgtccttgggcaagcgtgcatgagctggagcttagccctgcccaccacccaccactgcctcttggaaatgtgagccgctccaggtcaggcatttaatcaccttgcattcactgagcccacgtgtaggtagggtagaggctggggactcaaacgtgaaggcagggggctgtgcctggtggcctgcatggaggaagagctcagcagactctggggaagtggatgatcacatccatggggacttgtccctccgactggattgcatgcctctgcagtgttggacccctgcctttgctctctggttccctacattcaagaattggcaactgtgattagctatggtgcctcatgcctttaatcccatcactttgggag

SEQ ID NO: 3309 - DNA, 319 bp, Homo sapiens
gagcgcgtggtgggggaactgctggggaaggcgattggcatcgatctctccatcccttccgaggcccgacttcggaattgtcttagaagaaagaaggcaagccaccattttacccacgtaaatatatgaatatatttctgacattgaggtgttccagaagatgataaagaaatgatagcagctccagaaataccaactgattttaatctactacaggagtcagaaacacatttttcttctgacacagattttgaagatatcgaaggaaaaaccaaaagcaaggcaaaggcaaaacttgtaaaaaaggcaaaaagggccc

SEQ ID NO: 3310 - DNA, 533 bp, Homo sapiens
gcttgtctctgctccacagtgtctggggctgaccttgaagtttgagagctaagatctggaatcatctgaagtcccagtcactgatatgcttcaggctgattctcattgttggctgcgggtctcagttgctcgccacaagggcctctccaaatggtctagctcagactcctttatagtatagtggctgagttccaatagaaagcattaaaagacatagggataaccatatatctatatctatctatctatatcgagagagagagagagaagctatatcggccaggcacggtagctcacgcctgtaatcccagcactttgggagactgaggcgggcagatcacaaggtcaggagatcaagaccatcctggctaacatgatgaaaccccgtctctactaaaaatacaaaaagttcgccaagcgtggtggtgggcgcttgtagtcccagctactcaggaggctgaggcaggagaatggcgtgaacccgggaggcggagcttgcagtgagccaagattgagccactgtactccagcct

SEQ ID NO: 3311 - DNA, 259 bp, Homo sapiens
gtcccaggctcatgggtgtcttcttactgcctttagcagaacaaaaatgagtaaagcaaagcttcttgcttcagaaatattcagtctagtacagtgtgtatcctacatctaatcatcgcttcattccagaagctttaattgcacaaaattcactgggaaaggcatgatatttgtctgttttttaaggataaggttggtattggctcaaacttatatttattctccgcaaagagtccctcccaggtttgtaatcctgatg

SEQ ID NO: 3312 - DNA, 565 bp, Homo sapiens
taaaatgaccatttttagagtattgcagtgaatgattcagctcttcatcattttcaggtggattcatcaaggacagatttttaaattccatgatgtgagtctgaggggacttagtatgtagcactttcctggctccgagttagtagcaagttgaaaactaagacaaaggattaacaaatgcagagagtatcatgcaaaatacttccatgtagtgctgtcagttcagtgcagaaacctccattgtgttttgtttactgtattgttgtatggttaataaaattcctacagaagccttcatacctgcctgtgagttcattgcactattccaaatttatgatgaagtagattttttgtagtaacatctttatcatccttaaagactaggatagagaatatagtgtaggatgacagccaaataggcctgttagttgaaagccagaattgagaggatttactacctaataacctacagaaaagaaaggccaactttttcgtaaaggactaatagtaaatattttaggctttccttgccatatggtgtgtattgaaactactcaactctgac

SEQ ID NO: 3313 - DNA, 600 bp, Homo sapiens
tattccattggagctgcctgatctccacctagcgatggtctagtacagtgagaactcccagatgtgccccttctggtgagaggcaagcttcctgacaacgccatgctgagtgtttgattggccggccagacctgttcataaagcatttcacaaaccgtcctttcttacgcaaactagctgggaataaacaggccccctgtgggtcttagaactaaagcaaatatgaacctcaaagaacaaaggaaaatcattactggtggcaggaatatgagagtgcttccacaatactatttcacaagtcttttctacatgggcttcagtcacaaaggtggtttgacattcactgagcagcatgggaacaattctagaacacttattctatccctgagctatttctgggataaaaatattgttaaaatacggctgggcaccgtggctcatgcctgtaatcccagcactttgagaggctgaggcaggcagatcacctgaggtcaggagcttgagaccagcctggccaacatggtgaaaccccatctctactaaaaatacaaaagttagccaggtgtggtggtgtgtgtctataatcccagctacttggga

SEQ ID NO: 3314 - DNA, 358 bp, Homo sapiens
tgtgactttctgaaaatataatacaggaaaacatttctgaagggttttttccatgtttttatgtagtatatgtatttatgagttcggaatatgtgcaatacctaagaaacatttatcaccagacaaattcagtagtatggatcatcaatatttactcatattcatcttcaatttggctcttctccgtggatatcaaaattgaaaccttactctgatctgaagccctgacaaagttgggtttattattttcatctggtagctacctgtgactcactgctcttaattactattccttcaaaatatttatattatgtttcttgtgtctcacaatcaatatttataggcttgaaatacacat

SEQ ID NO: 3315 - DNA, 445 bp, Homo sapiens
ttactataccgcactaagacaaatcctgggtacatttaaaaacaattagcaaccttggggattaaaatgaaagcaaatcttaacaaacccatatttccgatcttcccactagccctctgaagtaaatgtaatcgttcccattttacaaggaagaaactgaggttcataggctgttaagtgtcttgtcctgaggtatatggctggtaaatgattccaacttatatctgttaaactccaagatacagtcacttctatgaagtggactatgacaagtggcatttggcttgctcacaaggcaatagatatcatctccaaagaatagaatgtatgtgctccttaattaatgcttctttaattttctagaatgaatactctttttttcccccttaggtgatgaccatcagcagaacttagttacagagtaactgatgtgggaatatacatg

SEQ ID NO: 3316 - DNA, 416 bp, Homo sapiens
cccagattggtcttgaactcctggccccaagtgatctgtccacctcagcctcccaaagtgctgggattacagacatgagccaccacgcccacctggttattattgtttgaatgcctgcgaacccatataggattgagcctttattatttttcctactttgaactataaagctattaattgggattttccttttggcagataacaatagcaaagtgaagacagcatctaagctgtgttcagccctgactctttctggtcttgtggaagtgaaagaggtaggtttgtagacaactttctttgctgccctgcaggtgaggtaatcagtattgcttagaactaggaaacaagaaatgctgtgcatgtaagatacatgatgcttcaaaggacaaaacttgggagaatcggccgtgtgtggt

SEQ ID NO: 3317 - DNA, 276 bp, Homo sapiens
ggtgacaaggggaagtggtaaattgctgatgattggtgaatttagtttttctctctggcgggatacagagcatgttgaagaagccctgaacctgtcagaaatgctggattttaatcttgtaggacctcaggcaagccaccaaaccacttcaggcccccatctgatgggggacagtactcatctcatagcagtacccagagggctaagtaacagtgtctgcagcaataccaagcacatagtagggacttcatgtacacgagttgactctaaaacatg

SEQ ID NO: 3318 - DNA, 437 bp, Homo sapiens
caagtaactaagctttgtgctaccaagaaacagcaggtgaagtggaaaatgccacccaggcagtttaaataacccacagaggagcttagtactcaccacacatacctcatcctctctcgtgtgccccagtgtacccttatacatttttctgtgagtgtgtatcatgctgtccccctgaggttgcatacttttgttgcaaaaataatttaatacagcgtttgaaatgtgaataagagtcctgcttataaaaacgcaagtaatggctgggcacggtggctcacacctgtaaccccagcactttaagaggccgaagcaggtggatcaccaggtcaggagactgagaccatcctggctaacatggtgaaaccccgtctgtactaaaaaatacaaaaaattagccgggcatggtggtgggcgcctgtagtcccagctactcg

SEQ ID NO: 3319 - DNA, 518 bp, Homo sapiens
catacttcagcactgttgacattttggactggatgattctttgtcttggaaactgttctgtgtgttgcaggatatttagcagcatttatcaagagcgtctactcaccagatgccagcagcactcctctgatatgacaaccaaaaatataccaaaagtgcaaaatcaccccagttgagaacaactagactctagtagtttagttcaaatataaaatgaagcttgatggtgggatcaatttgatgacaatgagaaaaagaagttaatttggttattctagaaagattttccttcaaaaagcaatgttaactaaatagacagaactgttttttctttctaaactatatcagaggtgtattagatcattttcaccctgctgataaatatatacctggaactgggaacaaaaagaggtttaattggccttatagtaccatatggttcaggatgccttagaatcatggctagtcactggcccctttcagtcacggcaggagcagctgggacacagggcaccaag

SEQ ID NO: 3320 - DNA, 478 bp, Homo sapiens
gttgtccccagtagaggaatcggtgggtagttggctggttggttggttttagggcaggaccattaaaatcaagataggacctattggtacactaaatgtggggtattgacaaaatcctgctgctcaggctccagaagttttgcaaaatatgttaacagatccaaagaataatgtgtttaataggaggggaatttgttcctaaaggaatggttatcaggtgctctccaagcactgtctaatgcagtgtttttcacactttggtgagcatcagaatcccctagagtgtttgttaagacagattgcggccgggtgcggcggctcacgcctgtaatctcgtggatcacttgaggtcaggagttcgagaccagcctggcccacctcgtctctactaaaaatacaaaaattagctgggcatggtggcaggcgcctgtaatcccagctacttgggaagctgaggcaggagaattgcttgaatctg

SEQ ID NO: 3321 - DNA, 459 bp, Homo sapiens
gaaggggatgtaatcccagcacattgggagtccaaggtgggaggatcacttgagcccaggagtttgagaccagcctgggcaacgtcgtaggactccatttctacaaaacaaaacaaaaagcctacaacgggaagagctgcctctcggggctgagaacatccaactgcaccaatttagatcctgaaattaccctgccccacaagcaaaaaacatggtcacaaagtggtccaaaggaggcaggcctgtgattgcacactgacgctcacgacgtgtgcagctgggaagggctgtgagaggcagagcagctgccaacacgcagtcctcagccaaaacccagggcccccgccactggaactgactcctctccaggcagcactcccagcactgggcatcccctcaccttgccctggagaagccctcccacccaaggggccaatgcagtcattctcgcagataatc

SEQ ID NO: 3322 - DNA, 537 bp, Homo sapiens
ggacaagtgaataaataagaagcgttgtaatgcaaatgctcacagaaaatgagcaactagaactgagacagaggaaagatcccaaggttctgcgatattgattgcaagagctcccatttgcaaggtacccactgtttcctcaaaaggacggaggcccaggaacacccagagtgggcttgggaaagcccggtggtctaggtttcagcccagaaagggcttagggactatggacaaaaaaaaataaaaataaaaaataaaaaaagagggagagaatattctaaagcaaatgctattccaggccagagagagagagagagacagagaatattctaaagcaaatgctattccaggccaggtgtggtggctcacgcctataatcccagcactttaggagcctgtggcgggcggatcacctgaggtcaggagttctagactagactggccaacatggtaaaaccccgtctctagaaaaatacaaaaattagccaggtgtggtagcgggcaactgtaatcccagctactcgggaggctgaggca

SEQ ID NO: 3323 - DNA, 584 bp, Homo sapiens
tcccccaacaaagggcagttttgcaggaccatttcaaaatatggcaaagaaacttgcttttgggataaaattttttttactttcttctttgtcacataatgttatgccagagtcagattgcaaagtaagccatgatatatagggttaaataaaatccatctgatgagaatttatggttagtaggggatgactccccagaccccttagataggaatttgggcaaaataaaaaaatcagagcttagtcttcacaagttattgaaaaacaatgagttaccaattttatttatttatattctttcagtggtcttcaacaggtggctcatgaattcacatatttgacaattttaatgtgaaataaatttaagatatttcaacaacaatcatataggaaaagatagataaataagaaactataaaaattatactttcaaacctttccctatctaagacacagggtttatctgatctcacatagatattggacatacgatttaatttttaaaattaatttttctcactttagaaaattggcatcttgaggccgggcgcagtggctcacacctgtaatcccagcactatggg

SEQ ID NO: 3324 - DNA, 526 bp, Homo sapiens
tatctgtgatagtgggggaaatgattctgtgttcctttgactaaaagtttattctaggacaggatttggggttggtacacactgtcaattccaggaagtcttgcaggtgataatgttgcaaaacaaagcaaagaacagctgttttctagccttatcaagcagttagggctacttttatttcaagtatgtaacagagattggttttgaagttatttgctttgaagttaaaattacatttactctcatttttctaacagatactagattatttaagttccagattctgttttcacactaataagaaacaaacacaaagtgtctcatactaccaatataattatagtattgtattatttgcaaatttgaaattacatgcttttaggtggtaatttttacaccattatttgatttaccaaaaaatcctaacatcatagcattttgttccacatgtattgactagaaaggagttctgaatctatctgagagtctgtggacattattaaattagatgaaaggttatagcttt

SEQ ID NO: 3325 - DNA, 444 bp, Homo sapiens
tccatgtccaaagaaactagaaaaataagcataaaccaaagaaatgctgaggccagcatatcaaatgagaattaatcacaaatgagaaagaataaatttcatttgaaatagaaaataaaatgtgaccctatcttcctcctttttactgtcaaactctcaaacaatggcattcgttttcagtagttaaaatcctcagaagaaatttggcctaatttcacaggtaacacttgcatatatacacatgtagatttgtagctcgtggatttttctgtgacaaattaatattccacactggtttctccctgctgcctggcattcactgttgccaattccttccagtcttggctgccatgtgttaagaaataacaaataaataatagtatattgtcaagtaaaacacaagcactctgtaaacctctccaaaaaaaaaaaaaaaaaaaaaaa

SEQ ID NO: 3326 - DNA, 591 bp, Homo sapiens
accaacctggccaatatagtgagacccggtctctacaaaaataaaaaataaaaaaattagctggacttgtgacgtgtgcctataatcctagctattcaggaggctgaggtgggaggattgcttgagtccagggggttgaggctacagtgagccataatggtaccactgcactgcagcctgggcaacagagcgagaacctgtctctaaaaataataaaataataaataaataaaaatttaaaggtatttttattttacagagacttcagaattttaacactttgaaaaaaggatcaaggtgaagagtttactgaataattaatgaattgtataatgtgtaaaacttttgtgataatttttttaatgttcaaaaaatgtcagggagtgcagtttgctcagggacaaaccaatgtctcccagcctagaatagttaagaccaggagaggtccactaagaaacaatactgggagattattttcacagatggtaacttttgcaatttttcatcaaataatttatttgataatgtgttgctaagctatagtatgtatattactttaaaaataaatgcattcccggggcgcggtggctc

SEQ ID NO: 3327 - DNA, 612 bp, Homo sapiens
gaggtgctggggacatacttacaaacagaagcacgagggaacttgagattgtgaatagtttgctattgacagaacatagggcacaaggattgtaagtgatggtaatggatcctgaatgctaatctaaagaatttgcattcttagattatcaaaatctaagaatggaggcattggggatccactgaaatattttctaaactaaggggaagaaaccatgttatgaccagctataaggtccaggcaagtgtacatgaagcttcaaaagtgaacagacagcatggcattggttcaaaaacagacacatagaccaatagaacagataacccaggaataaagccacatacctacagccatctggtcttcaacaaagttgacaaaaataagcaatggggaaaagactgtctattcaatagatggtgctgggataactggcagaagaatgaaactggactccgacctatcaccatatacaaaaattaactcaagatggattgaagacttaactgtaagacctcaaactataaaaatcctagaaggaaacctaggaaatacccttctcaatgtcagccttggcaaataatttatggctacatcctcaaaagcacttgcaac

SEQ ID NO: 3328 - DNA, 487 bp, Homo sapiens
caagtaggttgagagggaagagtagatactggatttggtgataagaagcagtggtggataatgctgagagatttgggctctgtggattggggtagagtagaagagaattggggtcgggttgaagaggagtggggtggggtggagaagaatgggagggctggtacaatggattccaggcctgcaggaatgggggaatggtaaagggaaggcaaccagaaagggagactgctctttgccaaaatggagctgattatttaataataccaagtctaaccagtgatttgaggttcccgctccactttggattggagggaattcacaaaatgcactttgaaaagctggttgcctcatcagacttcactacttttcaaatttagtatctatagtcatcatcatgaaattaataatccagtcaagagaatgtcatctgcagtgaccacagccccagacagagcccaaccaaggcgaagacagggctcctggaacc

SEQ ID NO: 3329 - DNA, 472 bp, Homo sapiens
tgacacaacactgtcatttctaagtatatagttaaaaactatatttttaacttgcaatctacactaagagaaatgttcaaaaatgtttatgagaatttcttacaagaacaaaaaataatactctatcatcaggagaatggatacataaattgtgatgatttatacagtggaaccctatataacaacgaaggaactcatggacattggtcttacgcatcatcatggatggatctcgaagatataacgttgagtgaaaaaaagcaaatcagaagaatacgaattgtaagtcatttgattcaatgtacagaaagtttaaatataggtaaaactgtaatgtgttgtttacatatgattgcaaatgtggtcaaattctacagaaataaaaaaagataattcaaaaattcaggaacgtggtgatctgaattttttccctagggaggggaagggaatgggtcagagaaaggcacacaat

SEQ ID NO: 3330 - DNA, 590 bp, Homo sapiens
aggcagatttaagttcaaattctcattctacaattaacacttgcacatgacattcaatgttttagaatctccatttcctcatccagaaattaagagtaatcaaacctacagggaactgaaaaattaaatgagatagcatagcacctaatatatgccaaatactcagttaatgataagcactgcccacaatagttttgaagttaggcatgaatattattttactacttttgtctatttttagaattattcttaagatttttttatttccctggaattttacaaggaattaaatttcactgaatttgagggccaggtacaatggtttacagctgtaatcccagaactttgggaggccaaggcaggtggatcacttgaggccagaagttcgagaccagccaggccaacatggcaaaaccccatctctactaaaaatacaaaaatcagcctggcatggtggcgcatgcctgtaatcccagctacttaggaggctgaggcaggagaatcacttgaatccaggaggtgaaggttgtagtgagccaagaccatgccactgcactccggcctgggcaacggagcaaggctctgtctct

SEQ ID NO: 3331 - DNA, 474 bp, Homo sapiens
gcaggggcaagggtggcacagcatggcatggcagacagaattggattgagtccagacagtgaatggtcttacaggcctggcccagaattgtagacataatcacaaaggcaatgaggtaggaacaaattctagaagcaaaaatatcactgactgacttttttctaattttagatcacctctacgagtatataggaatgctatgttctgaggaatgtatatttgagggaacaaatgtcctctgagaaaataaatttagtagatgccaaatattatatacactttgaccactttggcagtaagaaaatctatttgcttactccaatcttcattaaatttatttaaccattgaatttttttgctccctaccccctacaaaacgcctattaaacgcttcacagttgacttatgctaataggcaataagggtgtgacccaggagaggctatatacatatgggcacatacattacatattc

SEQ ID NO: 3332 - DNA, 533 bp, Homo sapiens
tcacatttctgcccatagggttcttccctcccaccccaacaggtccctaggtatcctgtaattttaagaaacggtttgcaaacctgagtgttcctcagacagagtggcctgtaatgagccagcccaagaggctgacacccaggtgcctccaatctcatcgtgtgtggtgcctaacagcactatctgggtaaatccagaataggttactcatctgtttacatagctaaggtagaagtggacaataagacctcaagtataaggatgacagtgttaggattattagatgcatctactgatagcccgtaaaacgtgtaagacagaagcagaaaacaaacttacttgcacacactagtattaatattgtgacagctaacagccagttgtttctggcttttaagaagttggggctggacgctgtggctcatgcctgcaatcccagcactttgggaggccgaggcaggtagatcactcaaggtcaggaaatcgacaccagcctggccaacatggcgaaaccccacctctactaaaatacc

SEQ ID NO: 3333 - DNA, 458 bp, Homo sapiens
aagagtcaccctttgatcttggagaagacaacattggatgtaattacccaaagggactagaacttggaaaaacaatcacatttttcttgttacttagaacaaatgagacctcacctggctttcctgtgatctccaagtgccagcattttctttcctgcataaatacaaagcctctaagctcaccaccacatgccattcttgctctggcctagaaaaacacccatcccagatataagactaatgttttaaaactccaaacagggccgggcgcggtggctcacggtggatcatgaggtcaggagatcgagaccatcctggctaacaaggtgaaaccccgtctctactaaaaatacgaaaaattagccgggcgcggtggcgggcgcctgtagtcccagctactcgggaggctgaggcaggagaatggcgtgaacccgggaagcggagcttgcagtgagccg

SEQ ID NO: 3334 - DNA, 497 bp, Homo sapiens
caggagcctggagacacaaaagcttgtgcattattggaatcaaggtgactataacataattcagggtgattggagcataaactggaagattaaccagtcatggtataagatgaaaatagaaggctgggcctggtggctcatgcctataatcctacactttgggaggccgaggcctccctcaggtagatccctcaggtgggcctccctcaggtagatcacctgaggtcaagagtttgagaccagcctggccaaaatggtgaaactcagtctctactaaaaatacaaaaattagccgggcatggtggcagccgcctgtaatgccagctactcaggaggctgaggcaagagaatcacttgaacccgggaggcggaggttgtggtgagctgagatggcgccattgccctccagcctggacaaaagagtgaaactccgtctaaaaaaaacaaacaaaaaagagcccgcatgcggtggctcacgcctatattcccagcacctt

SEQ ID NO: 3335 - DNA, 400 bp, Homo sapiens
ggtaatgtatgcctcgagctcctatagtaaatgaccaaagaagtgccaataatattgcattattagttaataataatagtagttcaagctgagttataaggtgcatacttatattaaaagttcttccattccaaaggaagcacccaaatagttgagcaataatattgctttccctaatacatataaagaatatctttggttttcatttctccttcagttacttgatttatatattttttacttatctaggcagatggcaataaacatactgtgttttccctaacagataatttggtttcctacatagagtatactgtgtttatacgaatacatcacaatatttgtctttcacttctcacggctaaatatatttgcaatatttaaagaaatgattgataat

SEQ ID NO: 3336 - DNA, 554 bp, Homo sapiens
cgatttggatgtgtgactatgtgatgtaaaatttctcctacatttatattagtaagtcattgttatttgtaagcatgacaataatcactttattaaatatatagtattattaagcaggattctgcctgtattttatgtaaaatacgaataagttttgaaagacaactatgaaaacatatttatactaatttatgtactgatgtgtatttggtcctttcgtttataaaaaattaaacaatctttaaactgtggacttttcatttggttctggtttgagtttgtgtcctgtcacatagatggtaggttaagtacatggtagaaaagttcatttttagaaatctgaaaatcaggccaggcacagtagcttatgcctgcaatcccagcactttgggaggttgagtagggcagatcacgaggtcaggagatcgagaccagccatgaccaaaatggcacaaccccgtgtctattaaaaatacaaaaattagctgggcgtggtggcacacacctgtaatcccagctactcgggaggctgagacaggagaatcgcttgaacc

SEQ ID NO: 3337 - DNA, 505 bp, Homo sapiens
ctaccggtctaaggaaattcacacagaaccatctgatgtcaacctgattaaatgcaagagcaagggccacgagggagaccaggtctttacctgattgttagtgctttaagtaagccagatatttctgtatttatatacacatttacaaacaaattgcaaactttgtaaggactttctgtctgcgtacttttaagagagtggacactaataagctttacttccattttgctgaccctactaccttgtcattttaaacacctattttcctgttcttcacagcattactgctcactatataaccagaatgcatcacttgagttatttttcctgcctagtcccaccagagctaggactagggtgagccacaaaaggagtcgcttgctgaccttcaggtatcagccctgtgcctgcagtgggtgcctcaccctggctgccagtcacatgacagtagctcctcccaaaaagccagaggcctgaaatgacaaaggcaacctaggccccccca

SEQ ID NO: 3338 - DNA, 582 bp, Homo sapiens
cctaaatcaactctagtataaagtgatatcttcaatacatgtgaaccagttatcacatagaatgagttacttttgtcctaaaaagaattacctttcttgaaaggagatgggcaaggcaaaaatttcaacagaaaatcagcaggatggtaacagaaatcttatttttaaaaaagaaattataacaacttgagataaaaatggttggcaaatctggtgctcaatttcaataccagacttactatagattttcttttgtctgggatttagattcaatggaaaattcctgttttctctccttgctagtaataaagcataaaagtgtgcaatttaacagcagtaccagagtcaggccatttgctagataggaatgtggatggatttctggaagacgaatgcatagaccagaacaaactaagccacacattgctggtgtcttaaacatatgacttaaggaatatcatctaaacaaaaaatctattttgatttcctcctacccctttaggaatcaaatcttccccagcactaagtataaatttgtacatatcctgccgggcacaatggctcacacctgtaatcccagca

SEQ ID NO: 3339 - DNA, 422 bp, Homo sapiens
gttcacgccattctcctgcctcagccggagtagctgggactacaggcgcctgccaccacacctggctaatttctttttctatttttagtagagaccccaaagtgcagggattacaggcgtgagccactgcaaccaaccagaacagttcatcttaattaggcttttgtatttcaaactctagtagtattcttgtagtgaatttctacaagattgttccaacacaaacctaacattaatcaaattttgattgtccctttgtagcattaagattagatatttaatagcagaagctagtgaagccattagaaggataaaaggtatccttagatttgcacagctggcataaaagacagaaataatacatcagtttcttgccgtcaggttagtacacttcctagtatttcacatttgacactatattc

SEQ ID NO: 3340 - DNA, 527 bp, Homo sapiens
ttctcaatatgtttctctgtcataagaaaatgtctctcacacatacactcattactgaagagaaaataagaatcacaggaagtgagaaatcttttgccaaactatttagaaccttgactccacttaggctaaaagaaatgaattggtaaattaatttgtttctaaaagaaaactctggtgaggtgcagtggctcacacctgtaatcccagcactttggttgggaggccgaggctggctgattgagcccaggagttcaagaccaccctgggcaacacggcgaaaccccgtctctacaaataattttaaaaatgagctgggcgtggtgtgcacctacagtcccagcagcactgagatgggagaattgcttgagcgtcataggtggaggctgcagtgagctgtgatcaggttactgcactctagccttggcaacaaagtgagactctgtcccaaaaaaacggaaaaaagagaagacaagagaaaaaaaaattctggctgggtgcggtggctcaagcctgtaattccagca

SEQ ID NO: 3341 - DNA, 553 bp, Homo sapiens
ggtaaaaaaactaaatttttaaaacagttactcaaaaagctaaaactttgaaatgatagttattatactataattcctttccttctctcagctaaattttcactagtaatctttactgtatgtgggcttctaaattcaatgtcaggactaggactagcaattagtcttgtcttttaatccagtctattaactcttgcacttgattccctctaggaacaagagcaactttatcataaagtcataattcctgatatatgtggaaagtgatgctgttgaagtaccatcaataaagcagatgtttcacagtggttgtgattaatttgtgctgatcttgaaactaccttgctcttgtaaccaacatttacatttgcaagctggtagaatttgaaagaaggtttaccagtataatctgtaacaatggcaaagaaggaagctaacagagctatataaagactaaatcaaatgggaaccacacaaactgcgatataaatttgccagaaaatgcattagatgggtaatgcaaaagaacacattatcttgattccaattggaa

SEQ ID NO: 3342 - DNA, 542 bp, Homo sapiens
atgggaaacaacagacatttcacttttcatttcagcctctgagccattagtaacaaaccttggctaaacagtaaaagcatttgttacacagcaaagggaatcttgtccacaaaacttttctgcaaggcactaacatttaaaatgtgctcaaatgaaaccaagcttcataagttataatcatatttcatccttcttaaaaataactaatagcacttcaaggaatgcaatatgaatttcaaatttttatattctcaaaactcagcacttttaaacaaaattatagccacaatgtcccattctctggcttctttaataaaattataatttatctcagagttttgctttcattgtgcagcattacaattatagaacctaatttgaaatgtgttagaatcatcaacacacacttaaagagttcctttaaaaaacatctctctggctgaaaagattcatgccagcagaagctctgaattatggatcgaaccatccaaaatctgagtattttcagtattcacagagcctaacagatcaatagctacttc

SEQ ID NO: 3343 - DNA, 534 bp, Homo sapiens
gctcactgcgacctccacctcccaggttcaagcaattctcctgcctcagcctcccctagtagctgggattacaggcgtgcaccaccacgcccagctaatttttgtaattttagtagcgacggggtttcaccacgttggccaggctggtcttgaactcctgacctcaggtgatccagcctgccttggccccccaaagtgctgggattacaggtgtgagccaccgcacccggcatggtgtcttgttctgggcagaatggagaaggcattattagcaggacgggtgccacagagacaggacagggccggaagaactcagaggctgaggaaaggttaagggctggagcgtatgtcccttaaggacctagggtgcctaccacccaccacagcgagcacaacagaggcaggcctctccctcaagccaggctgctgggggaggagcgccttaagctttaaggacgtgtcctagatgaataaacaacctccagtgcaagttggtaatgactgtggtggaattagcctggcgtggtggtggcg

SEQ ID NO: 3344 - DNA, 565 bp, Homo sapiens
tattacaggctttcttggttcattgtccagaataacttatctatacactttaaaattttggattacctgttttgtttttttaagtcagaaatagcatacctggatatttggaaaactctgcctatttatcttttcctctccagtgtttctcatccaattctgtcttcttattgtagacagatagatactcccaaaacaagtcactcttctccagaggattaggaactcattggcctacttcttgcctggcattcaaggcaagctctacactggcccatgtaaactcagaattctgagacccaatgctgacaacttgcaatttagcttcatctttgttgaactgactaaacttcattcatttttaggcctgttctctctcaggttcttacatctttattcatatggtttctacatgctagcaatccatcaattcatcagtccatcaatccaaatccatccatttttcatgatttatctcaatttctatttaattgaggaatagatcgcaactccaaattattcttcctatgtattctgtaattttcaatgtcaattctactgatct

SEQ ID NO: 3345 - DNA, 477 bp, Homo sapiens
tcatgcctgtgatcagtgagtgcagccttcctcgggagctatcatcaggacctgcaagtgattttaaatgccagtgagcagagacaatgtattcaaaaaagactccagtttcagctcaaacattcccctaggaataattttggcaagagatctattctgaattcgtggtaggctgggggcaaagatgagagaaagaagaaaagggaagtctctctgaaaggagctttgaccccagggcttagaaacggagtctgtcttcaagcttttggatgctctcgtaaaaagggtttgtaaataatttagcacccccaagtagtagattctaagtggcaaacagcctgctgagaggagggctgtagaggccccagggaaaagagaactcaggacaaccagcttcacaagagcagggaccatggctgctggtcaccaccatacccccagcacctgcacagttcttgaaccatggcagatgctgct

SEQ ID NO: 3346 - DNA, 476 bp, Homo sapiens
gtgtgtgtcagccctgataattgaatctcggtgcaaagagacagccggatgcactgcaattgagttaagtggaaaatggcattttcgtattgttaggagccttctcagcccaaggccctgatcatttactccgagcacctggtggtcttgcagctctgaccccagcgcccagctgagccacgggccagctgggatcagctgtgtggggcagggaaagaaattaattttcaatccctggggactgcagttggtagctcagcagccaaggattacacagacccggagagaatagggcaccatccctctgggggagttattgaactcccaagtgctggtggggaggtggcaaaggaaagagggagaggggttggaacagtttttactgggaatcccatcactgagatttaatggacattctgttgctggagattcggtctcttgccgatttctcttcccatatttaatttcaaactcct

SEQ ID NO: 3347 - DNA, 548 bp, Homo sapiens
accttggcctcccaaagtgctgggattacaggtgtgagtcactgtgccctgtccagtaacttccttctctgtgtctcaccccatcatgtggctccaggataaagggaaaggcagatgccactttgggaaggaataggattttattccttggaggatagaaaaaggaaactaattccctgctttttccattcctatggagacagagaaggagttacagaaagtgcagcaacgaggcatgcctgtcattacctctgctcagagcagaaatattggagggagtgggtgttattagatacaattattttgccttgtgttggaaaagatcttgacacataatctatgggatgttcagttcaacgaggagctacttaaaagctgtgactgagacccaggaaggtgagagctaagatggtgtcaaaaatacgggaaggtcgccaaaaacaggaggctttcatgtcctgctctctatttggagcttggcatggtggaaaatggagaagtctgtcatgcacagcaaacttgtggcaacacagagtagcaggataagc

SEQ ID NO: 3348 - DNA, 452 bp, Homo sapiens
gctgtggcgacaggcctggaagttgacctgcagggaggtaggagagaccaaggcccctgggacggaggccggccactggatgtttgaaaggctgagaagccaagggcttcaatctggggaggccgtttggataaaggagccaaggactttctctaaaaattccggctcacagggaggtggggccatgccaatggcctgcccaggtgacaagccctttgtcccactgtcccctggcaccagtctggtaatctcaaaggaatgccagaaatctggccaggaggaagggacactaaagtaaggagtggccctctataatttgaaataactctttctggcatctgctggcttttgttaggaaaagcctcagacatttttatgggatcacagttccctgtgggaggaagaggttgcctcaaggccaggcatggtggcttatggctgtaatcccagca

SEQ ID NO: 3349 - DNA, 458 bp, Homo sapiens
agcactgaggattaccagaagtgttctcatcaccatcttggttttggtggatttgagttggtttctttactgcaacctgttttatcagcatcgtctttatgacctgtatctcatgctgacctcctacctcatcctgtgatgtagaatgcataatcatctgggaatgcagctcagtaggtctcagccttattttacccagcctctattcaagatggggttgctctggttcaaacacctctaacagtaacacatggcatataggctgattaaaatactaagcactgagtatagtatatttgatcttatatttcaatgcaagaataattatatgtgtttcagtggcttgtaccctccaattagtgatgaacataccccatgtgatttggtcatttagttaacaaatatttattgtacatcgtggtgggccagacactgttctaggtgatagagatgcagct

SEQ ID NO: 3350 - DNA, 525 bp, Homo sapiens
agtgccttacatcacatcctaacacaataacgttcaatgtccaaaggtcagaggagaaaatgtgtcttccttgtgtccattgttgacagcaaggaggaaatttccatcaactctcattggtcacaatgggtcacgtgcctattcgaaagcaatcactagacagggggtcactattactatgattagtttaggtcagtcaagattcactccttgaggctcagaagggcaacttctcctaaagcatgtgactgttcaatactttaaaaattggggttctcttagcaacggagaagagaggctctttttttgacaagcaattgtagcatctatcaaagcataagaaaagcttgtgagtgatgaggttggagactgagaaggttccagaacatgacattctggtgaagtaggcaggacccaggaatctcaaaagtgacccaatgtcacagagtctgttggtggcagaggaattgaggcatctagaggcatctaggcagagtgattgaggcatctcactttctacgcaga

SEQ ID NO: 3351 - DNA, 530 bp, Homo sapiens
aggtgccattatttcataactatgagtgtctttctggattgtctctgatagagctggtttatgaggaagaagactgattggtaagcatactattaaaaagtagagtaagacggagtgcaagatggagttcaaagtttataaagttttacttagaatgcttttataataaaatgcattcttaagtgataaaactacatacaacactggcataatttttaaaatctattaaattcagctgcagtttagggaaatgtcatttgcaaggtaactctaagctcagcataaactttaaaactaaggttcccaatcagtaaaagaaaagttgatgagacccagattgagggggaaaaaagattgttaaggcatcagaatagaactgcttaaaagtatataaatgtgtttacagatgtaaatgacagtaacatagccaaaatattttctgttttgcaaataatatttttcaagtaataatgttatttttaaacaaaaattacaattaaccacaatcctgagcctcttcttaccccagt

SEQ ID NO: 3352 - DNA, 484 bp, Homo sapiens
aaatgacaggaattgaagtaaatgagacaagcaaattcaaaatgattttctcatataactttgaaatccgcaataggattgaatcagggctcagtaaatttatcagggtctttatcgctcaaatttgcttctctgtgtgtgttgaactcattaactcttacagcaaatagccttctttaatacattcaaaataaagagtagcatcaatttccaatatacatattagcagtttatcaaacccagaaaaaagggagtaatttttctcttagaatttgtggccagacatggtagctcatgactgtaatcccagaactttgggaggcccaggtggtcagatgacttgaggtcagaagttagagaccagcctgggcaacagggtgaaaccctgtctttattaaaaatacaaaaattagctgggcatggtggcatccacctgtagttccagctctacctgtgaggttgaagcatgagaatcgcttgaacc

SEQ ID NO: 3353 - DNA, 105 bp, Homo sapiens
aagaacattatcaaacataggaatgaagcagggaatatcattaacataccctgcagaaatcaaaaggatgcctttgaaaaacctacacacacaaatttgacaact

SEQ ID NO: 3354 - DNA, 586 bp, Homo sapiens
aggactgaattgactgatgagggacagttacttctggttatttgttggtgtcttagtccatttgtgttgtaataaagagattcctgaggctgggtaatttataaagaaaagaggtttattttacccacagttctgcaggctatacaagaagcatggcgccagcatgtgcttgtggtgaggactccaggaagaatccaatcaaggcaggagacagaggggagctgacatcacatggtgagaggaaggaagcaagagagagagtggaagaggtgccaggctcttttcaacaatcagctcttgagggagctaatagagtgagaactcactcattaccttgaggatggcaccgactcattcatgagagatctacccccaggaccaaaacaccatccttcaggcaccaccttcaacattggcgatcaactttcaatatgagacttgaaggcaacaaatatccaaactatatcatttgtaatattgttactcttttttaatgctctgtatttttatggacacagaaaataagagaagccttctccctttcttcttctctaaccctcaacttagtagcttctacttttaaact

SEQ ID NO: 3355 - DNA, 578 bp, Homo sapiens
ggtgcacgtgcacccatggtgccattgccaccggcatgaatgcacccactcccctgccactgtgccaccttgccaccattgccagcgcatagactcacaccagtggccctgcccccatcccatgccacaaccaccactggtctggatgtgggcacaaaggttggcagccccacaccggccagcacccattcccccacactgaaactgccatgggtgcaaatgggcacatggaccccagttgccacgtccccccactgctagctgccactgctgctgttgccaatgactgcaaggaagctggtaatcccagacttatcagtatcccaccccaaccaatgagcatgcaccccactgcactgccattactgtaagcacattggaatgcacacagatctcactgctaccacccaatgaggtgctttggctggcaccaccctttggagttctgtggccagtggcccaggaacaccttggccccttcaagcacagcagggtcccaatgttgagggaccaatgaataaagctggaggcccagtaccagccctccagagttagagcacacagtccaggagtgctga

SEQ ID NO: 3356 - DNA, 543 bp, Homo sapiens
tcagcatcatcctgataccaaaggctggcagagacacaataaaaaaaaaagagaattttagaccaatatccctgatgaacattgatgcaaaaaccctcaataaaatactggcaaacagaatccagcagcacatcaaaaagcttatccaccacgatcgatttggcttcatccctgggatgcaaggctggttcaacatactcaaatcaataaatgtaatccatcatataaacggaaccaaagacaaaaaccttgatttttaaaatgtggatctatttgactttttatttcatgtaagaatcactgttaggaatatgaaagtatatttcagcttaaatatagtgacattctgctaccctatatttaaattgaacctaaattaaacttgtattaatcagtatctgtcacatgaactctaccagctccctttcacctaaacaaacagtcacacacaacgaaatagaaatcttttctcagccaggcgcggtggctcatgcctgtaatcccagcactttgggaggccgaggtgggcggatcacaaggcca

SEQ ID NO: 3357 - DNA, 565 bp, Homo sapiens
gccagtgggttggcatcaggtggcctgtgggtggtcaggggggaatttccagccatggtctagctcagcactgacaacaggagctggtttggcttgattgtagaaagggaagtcctgtgacacttttacaagatcttcttgaaaacacagagtaggtgactctccctcatccatccatggccttcttgttctaactctgagaacattagccatgaggagtccattttgtctgttggtaggggcatactttaacaggtatgaggatgtactgacagatgatgacactttaagaatgatttggggctgggtgtgttggctcatacctgtaatcacagcactttgggaggccgaggtgggcagataacctgaggtcaggagtatgagaccagcctggccaacatggtgaaaacctgcctctactaaaaatacagaaattagccaggtgtgtaatcccagctaattgggaggctgaggtatgagaatcacttgaatccagaaagtggaggttgcagtaagccacgatggtgccactgcactccaccctgggtgacagagtgaggctctg

SEQ ID NO: 3358 - DNA, 543 bp, Homo sapiens
ctattccctgtacacacaatgttaattcccacctttggttttgctatatgtttacctcttggaaatactttatcccatcctgttgatctactaaaatcctatacatatactggcaggtggcttaaattccagctcatctaaatatttatttactattaagtatgaatgacagcaaccttgcccttaataagttcacagtccagtagagaaaatgaataggtgaatcaacaactacaaaactctgtgaacagagctctcttgtgagagcacagaggagcatttaaaccagacatagatggtggatccgaaatggtcttctagatgaagcgaaccttcatccaggtctttatggaaaagaaatacaaagggaaacaccatagacaaaggcatgaagtatcatagtgaattcagaaaaattgaagtaattcaaggtatataaaaaattgcatgtacacttgggagaggtggcaaggtataaggttagaaatacaggccatggctagagtatgataaagtcctaagtgacaggctgaagagtttgat

SEQ ID NO: 3359 - DNA, 599 bp, Homo sapiens
caattatagcaagtagactttttgtgtgtttcagaaaaaggcacataatttaatgaatggtagatattattatgtgattagatctttttttctttaagaaaagctcattaaatacaaagctgcttagttatatcaacattgacacataaaatttttatcacttacataacactagaatataatgaaccagtgaaatttgttcgttctgtactttcttattaattgtttcctgattagttactttatggttgaggaaaaaaaggaaaattcttgcactgacatatgtaacttgtttaaaaggtgaaagttacttgaattttaaattaattgtagtaactcatatgaactctaaattctttataggaatccaatttgtgaagacagaaattattagaaaagtaatttttttaagaaaagtattgtttaggtccgggcacggtggctcatgcctgtaatcccagcactttgggaggccaaggcgggcggatcatgaggtcaggagatcgagaccatcctggctaacacggtgaaacccggtctctactaaaaatacaaaaaattagccgggtgtggtggtgggcgcctgtagtcccaggtac

SEQ ID NO: 3360 - DNA, 599 bp, Homo sapiens
taacttttccaaagacaaattcattttatgaagttgtgttactttttattgaaaaaaaattaatgtcactgaaattttttttcattctacctcttatttaatatgcaaaaacttgttagtaattgagatagaagacctgtagtttaaatgttgtattattcctgatggatgattatgaatataggacttgactatatttcaagtttatagtttataaagaatgtagtttcagtggatttaaaatagatataaatatagattaaaaaattatttatagatggtttagcatgaaagttttctgctaaacacttacaagtctgttaaatatcacttcagttaacagtgaaatagtgaatctcattcatttttttttaaatctaaaatcagattccatctgtccaatttggtattttggcactaactgttatttgtgatttcgtttgatatggttcatctggaattttagtagtgaccattcattgtgatttgatttgattatacatagctctctgtgatgcttactggaacgcagctttataaatgcaaattgtcctgtatgtctcagttactctaaaattggatttaactatttggaaatt

SEQ ID NO: 3361 - DNA, 398 bp, Homo sapiens
ttgtcttgcaatgacaagagtttttaagtctgctgggactaaaaatcatccccatgacagtctactatctgaaaattttttcctcccaccactcattttttctccctaggagatgacttagaaatctagaatacagtttggtgctggtgttaaccatttttacctaaattatgggggaaggaaacagagtcaggcactctatcaaatgcttgttcagattccactttggcatcgaggggaagaaccttggacaggtttatccctttggctcctagccatggcaggcacacagctatcaagagataaaaggccttgttttcactgctcggctgcctgaataaagtcagttatggtatccacatgtaatgaaagtggcactaatgtttataaactgcttt

SEQ ID NO: 3362 - DNA, 547 bp, Homo sapiens
cagtatacaaacagaaattaaaactttaacaaattccttctttagttactgattccaacaatcttcctactccaaaatttatgggtgctgtcaataacagttaaattgactaaccaaaattttttgctattttttttccctacaacaggggaaaaaaatgaacagtgaaatggcttagaattagcagtagaggaaagagttaaaataagaaaaacctacaatgtgaaaaccaatgctttatcctcaggtagctgaaaaatcttcactaaagctgtgatttcacttttcaggtcctaaaatctaaatgtcacattccaccccctcccccaccaaaaacagtataaattgtagaaaacattttatagcatctaaaaattccaatgatcagtaagcatatactatagtcccaacttaatttgacgttccatttacataagaaataaaggaggaggacagggaaagaagaatggcatagccaaaacaactaaatttttaacatatattttctgtaaagctagttaaaaacaaacactatagctcatgtaat

SEQ ID NO: 3363 - DNA, 538 bp, Homo sapiens
ctagttatcaagaagcagtttgctgtgcaacacaagaacctactatttgcttttctctgctctcaacacccttgattagttgtgctgcaaagctgtaggatatcgtcccaggtgaaataggtatgtttcaagcctgtctcttcccaacttcctaagctttctaagttgcctgatttgaaattgctcaaagtgatacaggtgtctacatccacccactgattttattaaaaaaaattaaaaactttcattccattgaagaacaaaatgtctcccatttttctaatatgtttgcagtgaataattttaaagagcgaatgctttctctagatctttccatgtagcaataaccatactaaatacaattttatattgttttgtttcttgagtgaagagagaatgcttcaacctacctttaggtatttatacctgataagtctagctataaagtagaaatctccctgtaactcccttcactttttcccacatgagctatttattaagctgttactatgtgctcagactgccaagcactaaatga

SEQ ID NO: 3364 - DNA, 439 bp, Homo sapiens
agatcctcaaggaacaggactggtgtcttatctttatattccatgtgcatatagttgatgaataactgaagacagcttctctgagcctgtttcctcaactgtaaaatggagataatgcctatatcaccaatatagtgaagaaagtgcccacccagcataaggtaggtacttgctgagtaaagtttccttcatcaattttccttagagtttcgttgtcaaccacgaacactcctacttttctcctgttcccacctcagcttcaggttcagctctctcttgttgtctactagggctttcgcatcactgatcagaggtcagcattcacctgggtccctttggagtggtgctgacttctctcctccaggccaggctccctttatctttccaaacccactcagaaactgctgcctcctggtggctctgtttctggtcaaaagtc

SEQ ID NO: 3365 - DNA, 551 bp, Homo sapiens
cctcctggagtgctgggattacaggtgtgagtcaccacacctggcctgaaaaggacagttttatgtgtcaccatgacttcccatttaaaatcaatataaaaactgtagcatctctgctggttaatcattaaataaaagaagcattactggtatagcaatattggtatgatgcatttttaaatcacacgctgcagataactgattaagtgctgtcattgctctaacaatgcaatgtacaaaaggatagccaggacacttcgcagtgcctcaagagcctccacctgtatttcttcctcattcctcccaagtttacttgtcgcaggtagaaaaaaacaagaggcggctgagggcggtggctcacgcctgtaatcccagcactttgggaggccgaggcagacagatcacctgaggtcaagagttcaagaccagcctggccaacatggcgaaatcccgtctctgctaaaaatacaaatattagccagttgtggtggctcacgcccgtaatcccagttacttgggaggcagaggcaggagaatcacttgaacccggg

SEQ ID NO: 3366 - DNA, 542 bp, Homo sapiens
cttccacttccaatttaaaatacatcataactttataatgactgtaagtgttccttaatgttgagattgagttataatatagtcttttacttttttcacaaatgaaaagtatttggttgttttcactaaaaatgaagattgcaccaaaatcttccatgtagccagagagttacatagaccatgtggcatgcacaagtgtgatttcaaactctcaatgcccacattttagaaaaacaactagttatggcacactttaggactgaaaactgttctaaatgttttctaagtactagctcatttaattctctaaacaatgcgagacattggtactattatcttccgactttatagatgagaaaattgagtcatggagtcagctgcccaagctcatatagctggccacaacataactcacattcctgattcctacgatgctaggagctaattaaagtgatgctagagagcaatgacaaacaaaaacacacaaaaagtaacacaatgaagttgctgaagaaatgccattactctaaagaaacagtccc

SEQ ID NO: 3367 - DNA, 361 bp, Homo sapiens
tgcgcagatgtgagttaggagctgctcaggccactatgtggaaagaattgcatgagaatgaagtaatcaaagggaagcaagcaccgagacattagagagacttatcttgtataagtgcctgtatccagctatgcctgaagtgaggtaccaccccaggccttttcagtcatgctatcagttttgttccttttttctgttttactcttggtggagttatttttttttttccttgttacttgaataagaaaaataccaaactagaaggctgggtgcagtggctcatgcctgtaatcccagtactttgggaggtcaaggcaggtggatcatgaggtcaggagtttgagatcagcctgaccaacat

SEQ ID NO: 3368 - DNA, 515 bp, Homo sapiens
gtagtcccagctacttgggaagctgaggcggaagaattgcttgaatccaggagggggaggttgcagtgagtggagatgacaccacttcactccagcctgggcgacagaatgagactccgtctaaaaataataataataatgttatatttagatataaagaatttaagggactaaagagtttccacagttttttttcaaacttttgaaatttgatatttcaaaaaataaatcttggccaggcacagtggctcatgcctgtaatcccagcgttttgggaggctgaggttagcagatcacttgaggtcaggagatcgagaccagcctgggtaacatggcgaaaccccatctctacaaaaaatacaaaacactagccgagtattgtggtgcatgcctgtagtcccagcaacttggagagagacaggaggttgaggccacagtgagccatgatcatgccactgcactccagcctgggtgacagggtgagaccctgaatcaattaatccatcttacatcag

SEQ ID NO: 3369 - DNA, 256 bp, Homo sapiens
aaagggcataacaaaaaaaaaaaggaaaacttccggcccgtttccctggtgaaccttaagggcaaaattcttaacaaaattcccgtttaaccaatcccaccggtttccaaaaagattatcccccctggtcaaaggggggggcttcccggggtggcggggtgatttaacctttggcgggcaattaagggggtccccccctttacccggatttaaaagaaaaattccctggttttttaattggcgggaaaaaattttt

SEQ ID NO: 3370 - DNA, 514 bp, Homo sapiens
gagattcaggcatgctgatacatgtaattaatgtccttaattttcactgctatatgatattccactgaatgcatctgccacattttattcatccattttttggtttttaggcatcttagttgtttatttttccttttttggctttcataaaaaaatgtttctatgaatattttagtttataacatcttttcccagtgacttttggattttcctattcacaacctatttaactgagtttactggtttgaatagagaactttgggaggcaaccaatgtgacttattttagcagacgggatggtggttgaggtgaactgatgtgcacatgaggtcaggtcagttgtgcacatgggcatagccttttctcagtgataattctgaacagcccagcacattattgctgggaagtcctttagagaccatgggtccgttttcctcttcttgaatgctgtgccaatgcattttcaaaaattactgtcatggccggacgcggtggctcacgcctgtaatcccag

SEQ ID NO: 3371 - DNA, 527 bp, Homo sapiens
tctctggacagtttgctctcctgtgactcttttctggtccccacccctggccaactaaaccaccccacaggggcttgaggcagagaccaagttctgcaggccagaccctgagacagatcacccacgccccagccagcctaaggctgataggaatgagaccagctgtcggccccctcagagccctggcaggtcatctctggggatccaatgcccctccccaacctgggacacacagtggggagtggggtgggaatgtcgctgatcctgggtgtgggctgctcttgctttgggggtgatcctgaaggtcccttccaacactgagggtggttatgagtctgggcactggttggttcacctccctgcttggacacattcctgctgggagatcatgggtctgtaattccattcatcaaggcctggtttcctcatctgtaaaatgggggatggtagtggcacctgcctcacaggacagagtgcaggttaaatgggctcacagagggcagcattcagcacccgggacgtaagtg

SEQ ID NO: 3372 - DNA, 552 bp, Homo sapiens
gacgtgcaggcagcggcggatcatattccttcatctaccatggctcagccgggaactctgaacctcaataacgaggttgtgaagatgagaaaagaagtgaagagaattcgagttttagttatccgaaaacttgtcaggagtgttggccgactgaagtcaaaaaagggtactgaagatgcactgttaaaaaaccaaagacgggcgcaaagattgcttgaagaaatccatgccatgaaggaattgaaacctgacatagtaactaaatctgctcttggtgatgatatcaactttgaaaaaatcttcaaaaagccagattctactgcaactgaaagagcaattgccagactagcagtacatcctcttctgaagaaaaagatagatgtgctaaaagctgctgtacaagcctttaaagaagcaagacaaaatgttgctgaagttgagtcatcaaagaatgcttcagaggacaatcattctgagaatactttgtattcaaatgataatggaagtaatttacagcgtgaagcaactgtcatcagtgagcaaaaagtcaaa

SEQ ID NO: 3373 - DNA, 641 bp, Homo sapiens
agacaaatatgatcagatagcaaattaagatagcaatttcaaaattggctcattagaaatggagacaagttatcattgtcaaaaatcatagatttaatatattggcaacataaacaatatatcaatgtaccttatgttttaaatacataaagcaagaatgacagaactgtggtgaaataaaggcaaatgaatagctgagctagagagtctttaaaaattgttagtttaaacagataaaaaagaaaaagcaaggacataaaagttgtaaacaagaacatttagaaggaaatctggtgctttaaatacctctaaaagaataataattaaatacattttccactgaagaagctaaggtgaaagctctttacaccaattacacaacactgatgaaagaaatcagagatgacaccaacaaatggaaaaacattccatgctcatttataagaagaatgaatattgttaaaagagctatacttcccaaagcaatttacagattcaatgctatttctatcaaattaccaatgtcattttccgcagaattagaaaaaactattctaaaatttgtgtggaaccaaaaaagagcctgaatagacaaagcaatcctaagcaaaaaggacaaagctggaggtatcaaactaaaa

SEQ ID NO: 3374 - DNA, 507 bp, Homo sapiens
actccatctgctggaaattgtaagatgtctacaatgtgactaccatgcgctgggattataaagagaatcctggtcagagatgctaagaggcacgtggtggcaatagtgaggttcttgttagaagaacctaccagggtggttccctagttcaaagctggtcccctagtcctctcagaaatgcattagcaggctgggcgtggtggctcacatctgtaatgccagcactttgggaggcagaggcaggcagatcacttgaggtcaggagttcgagaccagcctggccaacatggtgaaacccgtttctactaaaaatacaaaaattagccgggtgtggtggcacacacctgtaatcccagctattgaggaggcggatgcagatgaattgcttgaacccaggaggcagaggttgcagtgagtcaagattatgccactgtactccagcctgtgcagtgagtcaagattatgccactgtactccagcctgggcaacagagcgatactccgtctc

SEQ ID NO: 3375 - DNA, 487 bp, Homo sapiens
gagtccacacaggggagctcttggcagagccatccacagcgatgattactgtggacacagatggggaggccctgtgtgtgaggcagtgacagagccattggttgggaacacagccaactcttttggagttttgttaactatcccgaggtagaggctgagggggacacgcctacatgtcatgccacaaacttagcgtactagaacatgctagattttctctcaaagcacgcaggtctgagcctgtcatcattctgccagtataacagacaggtgaatgaagagacgggggaacttggaaatgaggggctgaaaagaagagaaagtggaccctggtactggctgtgtaagaaaagtaaatagtgacccagaagaatttgggtcacggtctgattcatacaataaattcattttgtctcatttgaaatattttaggaaaaaggcatgcttttatccaaaattacgtcaaaaattgcctcaaatgtctctc

SEQ ID NO: 3376 - DNA, 637 bp, Homo sapiens
gggactggaactgattaagttcaccagggacacttgcctggtgaacatgggcaaggctgtagcaatggaccacttttacggctctagggttctgactccaactaagttttccagaatctcctgggctcctgactcatctgctgggtctaaagacactgagtttagggatattttcctccaatacatgatcaatcctctggatccacggctatggaatatggtgacaaatgtcagtgtctctcttattccaaccccaggatcagagaagattctttacctgcagtaactgacacatttccaaggcccccagatgctgtctccaactgtgacaaccagggctcccagaggccactgaagtcccctccccaaaggttgccataggatgttgtagtacctctcagggattctctgtctactccacatatttgcctgtggccttcaccatggccagatgccatggacagcacttgtttctgatgtcccccttaggatacctcccttatagtgctatgggtccagattccatggtaatttgggcccacactggatgatgctgagaatctgactgagcctctcatttttacttctcatctggtcctctatgtctctgactctggattccactggacattgctac

SEQ ID NO: 3377 - DNA, 593 bp, Homo sapiens
ctgcatgtaaccaaaacatttatcaactgagaatgaaggaataaatttggtatgttgaaacaatggaataatactcatcaataaagaagaatgcatataaaaacatgaatgaatctcaagaacaatgtgagggatgtttgcttccatccaaacagttgttttccattattgtagcaaagaactatgatctctgagagacagatttgaaagacgtaatctctccaaattgacttggctttctgcctggaggaagttttcattctgtggtagagggatgaacttggcattttgctgagttgagaagatgagggtcagaatttgtagagaacaaaatttggctaaaatttataagtaaaatactggatagaaggtaaccacagatagtctagaaatctttagaggtgtccccttaaacttttgactgaatctatgcatgcctaagcaaaaaccccatggtgggggaaagcaaacaaaaaaacaacttccagaggaagaatgatttctgagggaaggaggagtataaactaatcagtttaactgagtggataaggatagattaaattccatagatgaaaagatcagtgaataaaacg

SEQ ID NO: 3378 - DNA, 655 bp, Homo sapiens
gacagaagggagggggtatcttgtagattaggtagcaaaattggaagtcaaagtgtccagtggcagtggtgaaaagtgttgaccaacctcggtttgatgaaggtggcgtgaaagtcaacttaaacttttcactgggaagcaggatatttctgagcctaatgcttatggagaattggcctctgtatttccctccagactttcatgaggcacccggcttggcccaaacatgagccagatgctgaatggcctgccaatgcctgccaatgtgaaaattattcagtttggttaagaaacaatttactcatattctggtttgtatttgaagcctgctaatatcaaagtacacagaattttcatttttatgtcagctacttagatgtcattttgaagctgtgccacgatgaaattaaaaacacaggccgggcacaatggcttatgcctgtaatcccaacactttggccaaggtcaggagttggagaacagcctggccaacatggcgaaatcccatctctactaaaaacataaaaattagccaggcacacttgcgggcacctggaatcccagctactcgggaggctgaggcaggacaatagctggaacccaggaggcagagcctgcagtgagctgagatcacccattgcactccagcctggga

SEQ ID NO: 3379 - DNA, 474 bp, Homo sapiens
gaaacacagatgcagacaggcacttaaaagcaccatggtgcctcatttagcacaggacacaaggcctgatgatactgaaacacttgtgtataaacattgaatattttattgtttcttcccagagacaaaaccttaggtttgtagcactatatcagtcctttcaatgtgttatattaaaactatttaggctgggcactgtggctcacgcctgtaatcccagcactttgggaggccgagacagttggatcacgaggtcaggagatcgagaccatcctggctaacatggtgaaaccccgtctctactaaaaaaatacaaaaaatcagccgggcgtggtggcgggcacctgtagtcccagctactcgggaggctgaggcaggagaatggcatgaacctgggaggcggtgcttacagtgagccaagatcacaccactgcactccaatctgggtgacagagcgagactccatttcaaaaa

SEQ ID NO: 3380 - DNA, 561 bp, Homo sapiens
aaattccctcttgcaacattctatagcttagctcaattcctttctctttgtatagatcagtgaagtgccagaagatttactatgagtaaacaactttagatataagatttgcaggactttaatatcagacacctgctggtcatataattgaaattatctacactgaagtagaaactagtttaccaattatgtttctttttatggtcccaaacctcatactcatctatatctatattactagtttgctagctagcaatttctgctactcattatttctatcctgctactttcataaaagtttggattgatttcagagcagttacaccaacaaataatgataaagtagaaatatgtgcattgggcagcttctgagattgaatgtgctcactaaatctttgtagaaatcttcctggattacctatctacccttccaattattctctattactgtgtctccccttcaatgtaagtgccataagtacaaggactctgtgtttaggtatgtgtgagctattcacaattataatggaacagtgagaataagtcactaaagatatcagt

SEQ ID NO: 3381 - DNA, 551 bp, Homo sapiens
tatgttgaccagatcattgctttctttattccaaaaactagagttgccagatttagcaaaaaaagtaaaagacatccagttaaaatcttcatttcagataggcaataaataattattcagtataagtatacctcctatggttttaggaataggcttatactactaacactttattttatctaccaccaactcaactcttcaaacaaatattgagtgccatctcagtactgagcactgtgcttggtgccagagagtcaagcatgaatcagacgcagtttttcatcttagggggttcaaaggctagtgaaggtgagattagtaaacagctgaaatatgtacaccctgatactgacaattcccccccacccacactcacccagatatacatgcacaggcacaaattataggtgaatatcattcacaaatataaacataaacataatgtgaattaataaaatgttagcacattggaaactattcaggattacagaaagaagagtaatttgcttcaaccaactaagatacaaccctagaagacacgagagaactta

SEQ ID NO: 3382 - DNA, 590 bp, Homo sapiens
cgaggcgggtggatcacctgaggtcaggagttcgacatcagcgtggccaacatggtgaaaccccgtctctactaaaaatacaaaaattagccggccgtggtggcgcgcgcctgtagtcccagctactcggggggctgaggcaggagaatcgcttgaaccctggagacggaggttgcagtgagccgacatcgtgtcactgcactccagcctggcgacagagcgagactccatctcaaaaacaaaaaacaaaacaaaaaaacaaaaaactagatgatactgtctgtctcctttgataactatgcaaactgcaaaagctcccagaagcatagggtagaataaaggctgaaccaaaaagaaaccaggccatgattaagtattttaagctttcataaaaagtagaaatggggtcgggcatggtggctcacgcctgtaatcccagcactttgggaggccgaggtgggtggatcgcctgaggtcagcagtttgagaccagcctgaccaatatggtgaaaccctgtctctactaaaaatttaaaaaattagccggccgtggtggcgcgcgcctgtagtcccagctactcggggggctg

SEQ ID NO: 3383 - DNA, 551 bp, Homo sapiens
aatagaataaacctgcttcaaacttcatcaatcattgttccctttatcattttcagatcattaaaccagcttttaatcacaaacactaatattttattgtatattttctgcttaaatctagacagtgttagcttggcattgactttcccaagtagcagaattagtgatattttgaatgatataaagggtatttatctattctttcattagcaaacattatgtaagtagttactatgtgtgtagcatagtgctgtattgtaaggtaactgtcttcaacatccaggtaggattagtttctccacttgtagataggtacatctatgctataacatatgtattatgtccttggctgggtatggtggctcacgtctgtaatcccagcacttcgggaggctgaggtgggtggatcacgaggtcaggagttcaagaccagcctggccaagatggtgaaaccccgtctctactaaaaatacaaaaattggccgagtgcggtggcgggcacctgtaagtccagctactcaggaggctgagccaggagaatcactcgaacc

SEQ ID NO: 3384 - DNA, 563 bp, Homo sapiens
ggtcctggtgggaattgattgggtcatgggggaagagttctcatgaatgagttagcaccatcccctcagtattattctcctgatggttgagtgagtgagttatcatgaaatctggttgtataaaagtgtacagcaccactcttctcactctcttggtcatgctctggccatgtaagatgcctgctcttgctttgccttctgctctgagtaaaatcttcctgaagcctccccagaagcaaaagccagcatcatgctttctttacagcctgtggaactgtgagccaatgaaaaattaaacattaatagattacccagtctcaggtatttctttatagcaatgtgagaatgggctaaactcccactttcttatttcattcgttttccctaaaatcccactccctgggattatactccctaattaatgtcctgcactcaggctcttttcaaggcaactcaggccaagtcttgaggcaaagaaaccttcatttaatggcagtgtaactttatttttatgactatgactatactattggtataatctgtatggaaaatgttggatattc

SEQ ID NO: 3385 - DNA, 584 bp, Homo sapiens
ctccaaccttattgagccataagtttaccacagttctgaagagactttcagccagaaccacccacctcacctgcttctgaattcctgatcttcataaattatggaagaaaataaatattagttaaataactaaaatactgtccaatctcttactgtccaaatcatcattgttttgcctaaggaatttttctgaagctcagtagttagatcatcgcaaaggtgaggcaagtgagatgtttgaggcaatgaatccaacaaacagatctcattcaatgagtgataaaagttgatgtaaaagatgccagtgagggccaggtgtggtggctcatgcctgtaatctcagcactttgggaggccaagaggtgggcagattacgaggtcaggatatcaagaccatcctggttaacacagtgaaaccccgtctctactaaaatacaaaaaattagccgggcttggtggcatgcacctgtaatcccagctactcggaaggctgaggcaggagaatcgcttgaaccctggaggcggatgttgcagtgagccgagattgtgccacctcactccagcctgggcgacagagtgaggct

SEQ ID NO: 3386 - DNA, 592 bp, Homo sapiens
aattcatagttgggccaccaatggttctttgccaatgtcctggctgttgctatgctgaaagcagaaggaagggtgcatgctggtagcaacgcagtgagagtacagtcttcctgcttagacaggttgtctttagagagacccttgcttagctctgctgccatggggtggaaggagggcttatctgtctgacagaggaatggattggctgtactcaggaactccagcctacggtgcttaagccaggctgatgtggggagttggaggcctatgtgcttccaggctcgtgtttccagggagcatagtctagtactttaccacacaaagtgtggatccagtggcatttggtttcacctgggaacttcctaagaatgtagacacaggccaggcacggtggcttatgcctgtaatctcagcactttgggaggtcgaggcgggcggatcacctgaggttgggagttcgagaccagcctgaccaacatggagaaacccatctctactaaaaatacaaaattagctggacgtggtggtggcgcctgtaatcctagctactcgggaggctgaggcagaagaatcgcttgaacccaggcagcag

SEQ ID NO: 3387 - DNA, 531 bp, Homo sapiens
aaatagaaacttgtatctgtgcacatgtagatgtacattagtgtagtcacaacatgagatgagaacttcctggctaaaaaaataatttgaattgctaaataacaacaaaagcattgagaactgactgatacatcccttacactatctttgcattaattcatctgcacaaatgaagatgacatttgtgcttctgcaatcacacaataatgacagcttacactcagtttatagataataaaacatttttaaaatctctttctcatggtgcaatggctcacacctgtaatcccagcagtttgggaggccgaggcaggcggatcacctgaggttgggagttcgagaccagctgggcaacatggcgaaaccctgtctctaataaaaattcaaaaattagccaggtgtggtggtggcgcctgtagtcccagctactcaggacgctgagacaggagaattgcttcaatccaggaggcagatgttgcagtgaacccctgcgccactgtccagcctgggcgaaagagcgagactccacca

SEQ ID NO: 3388 - DNA, 647 bp, Homo sapiens
tgtgctacattataatacctgtcaaggagcacttggaaagtgagaataaatcattgcgagcacattactcagtcttggttagtcagggaaggttgcacagaggagaaatctaaaccttggcacttctgaagtcacctttctgaaaacattctggtaactgttagatcccttgttgtagctattcatatgttctgtgtggttaaacaaggttcacagtgggccacctggcctttggaacttggctgaagaggctgccttcagttcatcctccccacccccgttttcaaaacatgggtttccatgtgttcgttgtaaattaggaaacataaccatgttttgaggcttcatagaaaacaaacgtctggggtcacacaggttaaaggaggaaccaaattcagcactatcactgttctattcggcaggcaattctggggccttcctgtgtcccaggttctgtactagttgtttcaggactttgggataaacacaaactatccctgccctcagggggattaaggtcaggtgtacaaatgactctaatgcgaggcaaggctggattcagtgctggaagaggagggcatacctaacgctacgggaattcaaagaggaaatgatcagaatgaggagggagagatgggtcattccgg

SEQ ID NO: 3389 - DNA, 544 bp, Homo sapiens
gaccgtctcagagggagagagattgaagaggtagatggtcaaatgcagttggtgggctttgggcgctgctaagaaaccaactgcagaaaggcacctctgagacaatcagggaaatttgaacaggggctggtatcagattatatatttataattaaaatgttcatttaggaattaaagttgataattataaatttataattaaaaattgaagtgttacaatggaaaggagtttatggggaaatattatgattagttagagatacctggtgatgtacttacagaacaaatgatagaatgtttggggatttgctttcaaataccgcagaagggatcacgaggtcaggagatcgagaccatcccggctaaaacggtgaaaccccgtctctactaaaaatacaaaaaattagccgggcgtagtggcgggcgcctgtagtcccagctacttgggaggctgaggcaggagaatggcgtgaacccgggaggcggagcttgcagtgagccgagatcccgccactgcattccagcctgggcgacagagcgagac

SEQ ID NO: 3390 - DNA, 623 bp, Homo sapiens
taataatttcacaaggaaacatttcagcaaggttcagtctctcaacctccacattattgaagcaacattcagtaaaagacatcttgtgagaaggctcagtatagaaaattagaatgtcagtctcaaagaagggaagagaaatgaattccatggttgagaaagcactctttaaaaaaaaacccacaaggaacagatgttgccagaaaagggcagaaggggaagaataattgtcatgtggtaaaaaaatttaagccaagaatttaagggaaggaaacctgggtggccatagaggagacagttgcagattttcacagataacttccaggaaagaaacatgttttcggctgggtgtggtggctcacaccttaatcccagcactttgcaagcctgaggcgggtggatcatgaggtcaggagttcaagaccagcctggccaagatggtgaaaccctgtctctactaaaaatacaaaaactagccaggcgtggtggcacatgcctgtaatcccagctactcgggaggctgaggcagaattgcttgaacctggaaggtggaggttggagtgagccgagatcgtgccactgcactccagcctgtgcgacagagtgagactccatcccaaaaa

SEQ ID NO: 3391 - DNA, 603 bp, Homo sapiens
  misc_feature 25: n = A,T,C or G
ggctaaattcagtttctttacatantgcgggatgaaagaacagtttctgaggtgatcaggcccaaaatctgcagtgccttgtgtatgcatgcagacagtcactcatgtcacagcggaggaaacggaggcccagggagccatgagaaagtttattctttgctctgagagcaagcagatgacatatgcattgtgtttaaaaagatcgctctgggtgcaacttagaggttaaagagagggaagatggggtccaggagatgagccggcgaggccgttgcagctcacatgtggcagggagtggcgcacctgagccagtgcagtccgagcatagtggggctggagctggaccctgatgctttaatgatgcggctgcctctaaaataacacacaggccgggcgcggtggctcacgccggtaatcccagcactttgggagatcgcttgaggccaggagttcaagaccagcctggcccacatagagaaaccccatctctccaaaaaaatgcaaaaattagccaggcctgggggtgtgcgcctgtaatcccagctactcaggaggctgaggcatgagaatcgcttgaacctgggaggtggaggctgcaatgag

SEQ ID NO: 3392 - DNA, 513 bp, Homo sapiens
gtaacaggcaacttaataagcagttaatatgtattattatatttaatgtataaagctttaaatacacttatacaaatttgaagaactcagggcaccctattcctctgctcacagatatctattttaaagtcgacatgagtaagtgataaattcatcaatataaaataaatgtaaaaatatttcaaagtgattcatttgtaccagaccatttaaaaagaggggataaaatagtatcaatggggaagggcatggcgggtcaaacctgtaatcccagaactttgggagaccgaggcaggcaggtcacgaggtcaagagattgagaccatcctggccaacatggtgaagccctgtctctactaaaaatacaaatattagccaggcttggtggtgggcacctgtagtcccagctactcaggaggctgagtcaggagaattgcttgaaccagggaggcacaggttgcagtgaaccgagatcgcaccactgtactccagcctggcgacagagcgaggctc

SEQ ID NO: 3393 - DNA, 573 bp, Homo sapiens
tggagaacccttgggggttacatttcaatatggggcaattattggtggctacaagtaggttcgtgcaattattggtggtaggatttgagctggcctgaaccacaatattcagacactaccccttctgtctgcccctctcactatcccaagggagaagggattccaaaatctcaacacttcactttcctgtattaagctgtgaatgcaaacaattgttctagtcattcaatgtcttctgaggaaaaacaattcagtgcagaatctaacatacaccatgtctatcatgtaaaatttatgccacagaaaattagtatgtgctgagaataaaaaacctaacttttattatttctcttttttcctttatgacctgggcaatataatttgatgaatcaaaatttggccaggcacagtggcttatgcctgtaatcccagcactttgggaggccaagtgctgacagatcacttgaggtcaggagttcaagaccagcctggccaacatggtgaaaccctttctctgctaaaaatacaaaaattaaccaggcgtggtggtaggtgcctgtaatcccagctact

SEQ ID NO: 3394 - DNA, 585 bp, Homo sapiens
ggttgagcagaagcttctttaaggtgacaccaccaaagtcagaaaaatcccaagtaataaaggctttaaaagcaggggaaaacccaagggaataggggctgggctcggtggctcacacctctaatcccagcactttgggaggctgaggtgggatgatcacctgaggtcaggagttggagacaagcttggccaacatggtgaaaccccttctctactaaagatacaaaaatcagccaagcgtggtggcatgcacctgtaatcccagctactcaggaggctgaggcaagagaatcgcttgaatccacaaggcagaggttgcagtgagccgagaagatcatgccactgcactccagcctgggtgacagagtgagactctgtctcaaacaaacaaacaaaaccaaaggaatgataaatacaaaattctgggccacgcgtggtggctcatgcctgtaatcccagcactttgggaggccgacgcgggtgtatcacaaggtcaggagatcgagaccatcctggccaacatggtgaaaccccatctctactaaaatacaaaaaattagctgggcatggtggcgcaagcctgta

SEQ ID NO: 3395 - DNA, 648 bp, Homo sapiens
atttttaactaagtttattttactacctacatttagaagtatatatcactttccaaccttaatctttgaagctattttaaattttatgttcttaatgagcttgataaagaatataaaaagtatgcataaacaaggtatacatagtcaagcaatagtatgcgtgatacaagatataagggactatgaaatccaaagaagatgcaatacaacatgaagtagaaggagaagtaatggaaatattagagtttatttctaaataatgtatctcatataggtttaatagaagggaagaaaaatataagaattctgtagttggagtactaacacactgaatgatatagaggagaaaataaatatgttttactgttggtaaaaaaaagttaatttttaaaaaggtccaaatttatcaatttttttagaggtttagtttggggagtgtgtgtatgtgcacgtctgtgtgtgtgttatttaacatagattactgtaaaccatctgagttcttgtataggagcaaaaatgatgaaaaatagtttttaaaaatataatctggtagtggtggatggtagaaagaatccggaggcagtgagctggaaagaaatatttatagttatttaagagtgagttaaaggattagagtgagggcaaaaa

SEQ ID NO: 3396 - DNA, 569 bp, Homo sapiens
tgcacccagcccatagtgttttgaagctaagatgcgttcagccctcccagaatcttagggattatatgaatcctctatttaaattctgttcccagccctgagggttgatcacagaaacagtagcttagagaaacaacatacctgtagtgtcacatgttgaaagattcctattcagagatgataaccattgttcattctttgcctctactgggaaaagtgtgcttttgcttcccataagaactcaaaatttaggcttgttttaaggaaggaggctatcattgaccaaattgtagatagacagccaggtgcggtggcttatgcctataatcccagcactttgggaggcagaggtggacagatcacttgaggccaggagtccaagaccagcctggccaacatggtgaaaccccatctctactaaaaatacaaaaattagccaggcatgatggctcatgcctgtaatctcagctacttgggaagctgagggatgagaaatgcttgaacctgggaggcagaggttgcagtaaactgagattgcactactgcactccagcctgggcaacagaaca

SEQ ID NO: 3397 - DNA, 583 bp, Homo sapiens
  misc_feature 485: n = A,T,C or G
tgcctagcttttagtttcaacatcatagttttgacattctccttaatttataactttatcatgattgtgtgtgtgtgtgtgtgtgtgtgtgtgtgtgtgttctgggaggtaggcaagttcatcataaattttattgaaaagaacaaataagtagaatataaggaaaaccctcaaaagcagatcagcggaggagggttgtagccctgctaattattgaaatatagtattaagcatttctaattaaaactctgggattggtgcttaaaagacagaccagtgcagctgagtagagaataaagaaatagatgcagttgcacatggaatttaagtatataataaaggaagacaatattagatttattctttatgttatgtgaaggataaattacaaatgaattatacacttaatgtataaaaatgaaactatgcaagtcttgaattcctctgaacccggaagtggaatacacaccctatctataactcanaatccagattataatatgggaaataaaatttgatggtaaaagtactaacttttatatggctaaaaataccagttaagtaaaaaaaaaaaaaaaaaaaa

SEQ ID NO: 3398 - DNA, 380 bp, Homo sapiens
cccaaagtgctgggattacaggcgtgagccaccgcgcccggcctgtaccaacttcttaatgcctcaactgcatctctgcttggacttttactgcaaacaaatatattatgtgatgtttaaaataaaagaaatatgatgttcagtaataactggtggaatgagagaatttggctccatcttctctaataacaaaggagttctgctcctacatctgagcaaaattataacctttttacataaaacaactgcgaagagtcccagcatgaacaccgcagtctctgtgggacggatacagtgacaatggctaaaagaatctgacattcaggttgattttatattttaaaatcaatgatgggccaggcacggtgggtcacacctgt

SEQ ID NO: 3399 - DNA, 583 bp, Homo sapiens
gaacacctagttcatcttcaactaagcactttaaagtgtggcttcactaatctttctgcaggactgtatttactgtttcaatgtaaatgtagaatttaatatctattcctttaaattttcactttgttgacactgattctagtcaaaatttactgaattctgattttgtcatatattaattatgccacgcatttttatgatatttgaaatcctgagaaactcacccatgttatctgtgctcatctaaattactgatgagacaaacagataaaggaagaggaccacaagtaaaccccaccaccacaatcctccaccttattgaacacctgataaacaacactacgtacatgtggctacttcggcccccaggcttcagacaccaaataagctgtttccaagttcaagaactgtatgtctagatatcttctagaattttcgtgtagatacccaacaagaactctaaattcagtagtccaaaactccttttttatttctatttgtccctgaaatattttcctgttactatccaacttgcttaaaggcagttttatccaaatagtctcatctagaaatgacagttctt

SEQ ID NO: 3400 - DNA, 598 bp, Homo sapiens
gattttttgaggccacaagtttgaagctgcaatgagctataattgcaccactgcactctagcctgagtgacaggatgagaccctttctctcaaataaaggaaaaagaaaaaagtaataataacaaaataaaaagagtaatttaccaattactgagggagtctagaaaggttaagtataccccctctaaattggaaataacagtttaaaaaatattttattggtaaaaaaataaaggccactttttatcctgagagagtatgtagaacttgaattttggtttaaagcacttattactaagcttaacgtaaatactttggcaaattgattctaacaaagatatccttctcatgacttaaaagagccactaattttacttttgaaatatgtttaatttttatattaaaagctaggatggctgggcgcagtggctcacgccagtaatcccaacactttgggaggcggaggtgggtgaatcacccgaggtcaggagttcgagaccagcctggccaacatggtgaaactccgtctgtactaaaaatacaaaaattagctgggcttgatggaacatgcctgtaatcccagctactcgggtggctg

SEQ ID NO: 3401 - DNA, 641 bp, Homo sapiens
tcatggaacaactgaaggactagacacttggctcccatgtgcccaagagacagaggagctctgaataggggcctaaaatgcactgtttagcaggtatgttcatgtcaaaaatgttcctccctggcctggggtcagaaatgaccctgttttagtgcctcacacatctggagtatgacctcatcttgccatgtgaccctggacaagctgaattctcctctgagcttcagtttctgtatccatatattcccaatacaaatacccacctctcaagactcatagttgaattaaatataatacaacattgacttcatgggcacttaatccatgttggttttctttctctagaatgttccatgaatgtccactccacaccccactgacagtgtgaggcagatcgtcgagacagaaaactaataaagtagttctggacttatactcaatgtttgaccaattgaacccaataggcatttacggaatatgttactcaaccacagaacatacatcttctcgtctgcacttagaacatagtctaagatcgaccacatgtttgaccataaagcaagtcttaataaattcagaaaaagcaaaataattccaagtacactcctggaccaccatgcaataaaaagagaaatcaatac

SEQ ID NO: 3402 - DNA, 641 bp, Homo sapiens
cttggaaggaggtagttgcagggttgcatgattcagtagataaagaaggccaacaaagagtcagggtcttttcatcagttcttccctgacattgtcagtgtcagccatatttgccttcatggtcacaagatggctgccacagctcttacatctgtcatcctcacaatagcattcaaaagtagaaaaaatagatccctttcctcttagccttggtcactgtcatccatctatctatcatctatctatctatctatctatctatctatctatctatctatctatcatctatctatctatcatctttaaggattctatttctgagaatctctgagctgactactgctcaggctccactggctattaggagctcacatgaattgcttagattagtcacgggccattccttggggatagagaagaggtcctctttccctccacacatcaccatcacttaccaaaacaaaagcagggttcttttaacaagggaaatgggagaagatagctgttgtataacaccatctgtgttaggaactatggccattcacgacataagtttgggatttagctattatattgtttaaaccatgggagtgaatgacaccattcagaacatctgcatgaagagaactggtccaaagaca

SEQ ID NO: 3403 - DNA, 646 bp, Homo sapiens
aactaactcatagtctgccttttaaatgtagtatttgtcagcgtcactttaaaaatctgaagacatttgtgaagcaccaacaacttcacaatgaaacctatcagaataatgttaaacaggtcagaagattgctggaggccaagcaagaaaagtcaatgtatggagtgtataatacttttaccacagaggaaagatgggcattacacccgtgctctaagtctgatcccatgtatagcatgaaaagaagaaagaatattcatgcatgtacaatctgtggcaagatgtttccatcacagtcaaaacttgataggcatgtacttattcatactggtcagaggccttttaaatgtgtcttgtgtactaaatcttttcgacagtcaactcacttaaaaatccaccaacttacacattcagaagaaagaccttttcaatgttgtttttgtcaaaaaggatttaagattcaaagcaaacttctgaagcataaacaaatccatactaggaataaggcttttcgggctcttttattaaagaagaggcgtacagaatctcgccccctgcctaataagttaaatgcaaatcagggtggttttgaaaatggtgagattggtgaatctgaggagaataatccacttgatgtccactcaat

SEQ ID NO: 3404 - DNA, 618 bp, Homo sapiens
attaattttaaaataattacatgtatattagtacagagccaaaactccagctcgaaactcccacctgctttcattacccttcctggtgggcttctctgcttccccattggattataagcttcttgtagaccaggattatgtgatacttcattgtgtgagcatgtaaatagttgatactcagtgttcttaatataattgaaatgtaaattattatgattacacagggccagcataattaataggccatacactcaactgagaatacaagagataagttgtttgcactgcagatggtattttctaaaaatgaataaagtggcatgaactgaatgcaagtttatgttatctctagttgaaaagaaaagtttctctcttaagcactattacgccttcttttggcagcagcaataattttcttcttaaattcacaaaagtcctaattcttgaaaaagtatgctaaagcaatgtggtttactcaaacaacagcaagcgctctctgcatgattccttttcgaactttctttaagctgtagtcctgtccctgtaacagctttttctcattaacagcatgtgttgaatttcaaggtctgattctcaatggacttaggtgagcagcat

SEQ ID NO: 3405 - DNA, 582 bp, Homo sapiens
  misc_feature 473: n = A,T,C or G
tgcaaccctatggaagatgatgtggactgcaaaaactgcattaagcagcagaatttggctcacggatatacaaattaggagccttttctattattcctcataaaacataaggaagaattaaaaggtgcctgagatactgaagtaattgaatggggaattcttaattaatcagctaattatttaaaagatcatttattcatttaagaaattaattgagcacctacattataccatgtgtattttattttattttaaaattctatttatttatttgagacagagtcttgctttgtcgcctaggcttgaatgcagtgccatgatctcagcttactgcaacctcctgagttcaagcaattcccctgcctcagccttctgagttcaagcaattctcctgcctcagcctccggagtagctgggattataggcgcctgccaccaggcctggctaatttttgtatttttagtagaggcggngtttcgccatgtgccaggctggtctggaactcctgacctcaggtgatccgcccgccccggcctcccaaagtgctgcgattacaggcatgagacgcttgcccggctgcat

SEQ ID NO: 3406 - DNA, 632 bp, Homo sapiens
tgttacttgattccttttctactgattaggaccttaggttttccagaagtatctgtaaattctaaatatctaccttgtcttttttctccaaacacctgggcaactgaattttcacagtggtattgatagtaaaacttttctgcacctgaacactttgtaatttcttatttatggttctgctcagcaaaagaccattgctaccttgaccagaacataagaaatcctgcacagaagtcagaatcaaatttcatcattaacatagaaatttaaaaagggggaaggccagactaacattaatggagcaccctgaatgtggcagttattaagccaattatctgtatacattatcatcataaaaactttacattagccatcataaaaactcaataatgaatgtattatcaggtggggcgcggtggctcatgcctgtaatcccagccctttgggaggccgaggcgggtggatcacctgaggtcaggagagagaccagcctggccaacctggtgaaaccccgtctctactaaaaatacaaaaattagctgggcatggtggcgggcgcctgtaatcccagcttctcgggaggcagaggcaggagaataaattgaacccaggaagcggaggttgcagtgagc

SEQ ID NO: 3407 - DNA, 497 bp, Homo sapiens
ttatggacaataatcagataatggtcagttccttgcgtaacaatacgcagcttgatctggccacctactgtctctcctgccaaatcttgccttgtgtctgcctttccactctgaacatagagttctttggacaggtcacaccctcatcctcaagcccttcccatatagagtgttttcatgcccttagactagttactcaaacttcaggtctcatctcttccaggagccttctcaatagcacagtccctgtcccttaaatataggttgtgtgacttctatatatgcattcatggtcaggcacagtggctcatgcctgtaatcccagcactttgggaggccgaggcaggcagattacctgaggtcggaagttcgagaccagcgtgaccaacatggagaaatcccgtctccactaaacatacaaaaattaactggggcgtgatggtgcacacctgtaatcccagctactcgggaggctgaggcaggagaatcacttgaac

SEQ ID NO: 3408 - DNA, 569 bp, Homo sapiens
ggcacgcatacatatgtgtagtgtgtgagtactcattagggaaagtaacatttcagagtttaatgtggtattgctctcctttataatacttatcagtgttagctaatctgaaggtgcagctacaaactacagtactcagtcattagtgtttgtgagagctcttcacgtggagggcattgaactagaatttccaacttcatggtatagacgtcctctaggtatattttatgcatttcgaacactattggcttcaatttttgaatgagaaataaattccaaaagtagtaaagtcaaaagaagtggtgtctctgggggtgagttgggtgaggatcctgtgtgagataacaaaaggagatgaaggtgaggaaatggctagcttctcatgcactgttttagccaccttatgtgaagagtacaccttaacagttaggttggcggagggacagcattaggaaaagtagctaatgcatgctgggcttaatacctgggtaatgagttgataggtgtagcaaaccacaatggcacatgtttacctatgtaacaaacctgtacatcctgcacatgtaccc

SEQ ID NO: 3409 - DNA, 486 bp, Homo sapiens
accttataatcaatgattgactcttggatttgctcatgttttctattttcatatgtgagattactatttcagagtagttcacatattttaactcttggccccattatcatatacaatttttaatatgacctaatatggtatttggctttttttccctccaagagtagtgaaatacttgtttactttcagcctgtaggtccaaaacaatctcatgccatgaaacctaaacggtaatctcctagtctatgttgttggtgttatttgtcccaacatacttacgttttctaaattttaacatgttttgaaaaattacttttccccttaagaacataatctggaagctaaagaatgatatccaccaacatgaaaccacatgaaagtttaaaacccactgccagagcaaacacacaaataagaaatagaaaggactcaaatattaccactacatgaaaccaccaaaccgcaaaaaaaaaaaaaaaaaaaaaa

SEQ ID NO: 3410 - DNA, 552 bp, Homo sapiens
ttggctctgtgattccacgctaaatggaagccaagttagactgtgtaattcacaggaaattaggaggctgaagaaagcttggcagccagtatctccctggatgtagtctgtgttctgctttcttgtttctctagtcattcttttgttttcagaaagccaaaaatgacctgcactgcttcccaaggtttggagattcagaggacctgtccctgttcccttcctaccccattgctggggctgagcaaaaatgagcccttcacctcaagcttcagtagctttcattgagtatcatcaggcaggttcactcatacattccacatttacaaagcaccactatgtgccagggtgcaagggactagaaagatgtttctacttgattattcttggaaccagagaatgtcaagatgcagcgggactctagaagcctcggagtctcagcctgactttagaactgaatttttgtccaaccaagggtgtgaataaatgcaaagacatgacttgttatttgttaaggttgtggggtgaggggggtggtcacacagagcattgtct

SEQ ID NO: 3411 - DNA, 595 bp, Homo sapiens
taggttgaagccttttaattagtcgtttgttcaaacgaaactagccaaaaccccttctatctgaagtggggcaataagaggaatagttgctccagagcaggccattcaacccttccccagcacagcagccctggaagaatccctagaaatttccagagtgccaagaaaaccacaggaatgatttacaactctatctatctgagtctacctgatgactgagattattgacctgctagttagcaacttcccacattcctaacctctgtgcttctatctaatacttctacctcaacatgaagtaagtagaaaataagtagactttcctaggaagacactgaggacctctgagctaatgaatatgttttaaatataagattggaaagttatgaggctacctattttcaaccatcagaaaccaataatcttagtttataaacaaaatatttatcttggttccttttgcttcgggttgaggatttaatcataaaaaaatctagttgcaagaaacataaaaagtaaaaaaatcatatgtgaatattaaagacaaacattattcattataattattaatgaagtgatcccatttgcccaaaaa

SEQ ID NO: 3412 - DNA, 559 bp, Homo sapiens
ttggagcttcaaagaagtaaaagaaggaaagatatccaataggtagaaatagtgaaataaaacgtgagtaagaaataaaatcaagaagaaaccttaaatgaataaatcacaaataggataaactctagaacagaagtgcttctatctttcctgcagtggaaggcttaatggcagagtggggagtgtgggcatagtggacagacagcctaggtttgaatgtgagctctgcatttttatctgcattactttttgcaaatggcataacttttctatgtcctagtttcctccactacaaaatggaagtaaaattactttttatctcgaaaagttattacaagaattaaataagttaattattttaaagtacttagaatagtgcctggtacatagtagttgcttagtaaatatgagccataattacttctttcctgtatgtttgaaatagttcatagtaaaatatttataaaaaaggaatgggccgggtgtggtggctcacgcctataatcccagcactttgggaggctgaagtgggtgaatcacctgaggtcaagagtttgag

SEQ ID NO: 3413 - DNA, 539 bp, Homo sapiens
gattactgcaatgctcctgctagcccctgggcctgggtctgagattccaagctgccattgccattccaagctgccagctgttgccagactagtatttctaaaacatcattttcatcatgggtgcaggcagcttggagaagaggaataagcacttgaggtgaggggagatcttgtgcaaacaaatccatccttctagatctgcttcctcatctaaacgcttgggatggccccttcccagctccatcattcccctggcttaagagctcataagactgtttattgtcacaaggccctgtttttctgatggccttttttggacctttacaaatagacagcatatctatctgaccttatttcccactattcctgagaactcactgccagtgtcctaactgccatctgttggaggtccctgtgaagattacccttcacctgcaatctttttcaagatcagtgatttttctgttgttcacgcctaattactgcctttaatcaccttatccctttcttattcctttttaattatactaaggacatgg

SEQ ID NO: 3414 - DNA, 494 bp, Homo sapiens
cactgccttctaatcagatacatttgtttgcaggtgcataatttggcacagactttgtgcagtttaatttaatacaattccttttaagtactgaataaatcccattaaatctgtagaacatttgatccaatatatcagcctttggtattttactaaagaagtagaaacatttttattgcaaaaatatttaatatgagtatgattcatatacaaaatttagatccttcttcaatgtaaaaatataggtgtttgtttaaaaaaattatgtatagccatataattaactaccatgcaaatataaaaacagtttttcagaaattatcttttgaaattgaaatatattaaaggtgtattatgagagaaaaatatcgatattaaaataatatgtaagataaaatataaatcacataatatatttgtttttatataataaatgtatctacaagagtatcaataacttgtcgtctctggctgagtgggattatatttattac

SEQ ID NO: 3415 - DNA, 563 bp, Homo sapiens
tacatagttaatgaaacagataggagtttccagcctatagttttccaaatctgtaagataaagtcatagcttagtctgagaaggaaaaacaccactttggagagtacatttaaaagcattttagttccctatggatctttgagttagatacattttctaaaaatgtatattccttctccatgagaaaacctgaagttaccagaaatcaatcaggcttaaaagggatcagcacacaaatgagggagagctttataagctgccagacttatcctgattcaatgtatctcaaaaataaaacaatgttaaatattgtaggtcagacctttcaaaaaccaaaacaagcatatccatgctgttaatgatatacattttttaaagaaacaaataagaactactactaaaaataacatttaatacttaagacagatccccttgatattcagagaaggctagatagggcacctggggttttcttattacctcaacgtacaaatatttctttgtgtgctgtgatgtgaaaatgcttaggaagtattaaagaccagctaggtggtgatagttca

SEQ ID NO: 3416 - DNA, 587 bp, Homo sapiens
gacagaagggtcacctcatctcaccttgagacctggcagtgagaaaaaccacaaatgataatttccatgttgaaccaagactgataccaacatggagaaaacttcctagtctcccacccgctaggaagaaatcaggcttgaaccatatatgttcttagtggtcctaggactctgatggttttttccaagcaccttaggtgtgcagtacccagatcacatatacctgtacctcttacctgttccaggaacaccgtactgtgcatatatcttgcctgtatctatttcatttgtcctttcttacgtttcctttttcacacctggccctcagataaagacccatgtagtatccatgtccccatatttacaaccaatgagactcagaaatgtagtcattgcctgctttcatgagtcctggctcagatcgaaagtattcagttctctaacatcatcaatgaaacctgatatccttagtctggtatttagcctttcatataatgactcaagccagttttcctgatatatatctcatttctcagaagaacagggtttcgtccttcccatcagcaaattcttcaacatgtagaaaa

SEQ ID NO: 3417 - DNA, 609 bp, Homo sapiens
ctttgatttctaccttttaggcatgcagaaatcttcaattacatgaattaaaacttctcacagacaaaacccatgtcagagagtaataataataataatagatgctaccacacttactgtgtcctctttttcagttcctatctcttatttctaaaataccaaaatgcctctttcatactcagtatgccatccaatttgatgtcccagtttatctctaaggctcctccctcctcttctctcctgcttatgctgggactttggtctttttgcaatcttctttcttactcatactcggtgtctccctctctattggctcctcattctttgtcttcaaacaaacacaagtctctcgcagtggctcacgcctgtaatcccagcactttgggaagctgagacgggcggatcacaaggtcaggagtctgagaccagcctggccaatatggtgaaaccctgtctctactaaagatacaaaaaattagccgggcgtggtggtgcgcgcctgtaatcccagctactcaggtggctgaggcaggagaattgcttgaacccgggaggtggaggttgctgtgaaccaagatcgcgccattgcactgcagcctggacgacagg

SEQ ID NO: 3418 - DNA, 631 bp, Homo sapiens
aacttcattttatcagagtacagtagtagtgcttaattgtctcattcaactataaaattttaacccatgttgggagttaaatatctgggagtgatagaacccatctgataaagcactggagaggtgtggccagtgaaacaggaggggacccatcagggaagaggggcagcttggtcagtggaaagcacagggcgccacggcaaactgcccgccaaatccagacaaaggcttggcaagcaggaggggaaactcagataaagcccaggtgcatttcattcaaagcgtgggcagacgataacaatgacaaatgcagggcaggcggaccacacttgaaaatgtaaagcatgtaggccaggcatggtggctcacacctgtaatcccagcactttgggaggcagacgtgggtggatcacttaaagtcaggagtttgagaccagcctggccaacatggcgaaacctggtctttactaaaaatacaaaaattagccgggcatggtggtacacacctataatcccagctacttgggaggctgaggcaggagaatcacttgaagctgggaggcggaggttacagtgagccgagattgtgccactgaattcgaacctggccagcagagtgagactcgatctc

SEQ ID NO: 3419 - DNA, 514 bp, Homo sapiens
  misc_feature 390, 391: n = A,T,C or G
gcagccctatataaggcatttagcagcatctctgtcttctacccactagatgccagcagcaccctgcctccagttgtgacaaccaaaatgtctccagacattgccaaatgtcccctggggggcaaagtcaccccattggagaatgactggaagtaacttgggaccctttggagatctgaggcccgtgtgaaatggactcactctggggtctggtcttgccagcctactggtgcccagtgcccttactttcctgtacttttcgcccttgcagagtcagagcctctttgtgccgggaggggccttaagggtcgggtctctaagtgaggccaccagccagtcctaggaactatgcagaattcctggggggacagcctgggaatctgcattttnnggatcacttgggctcaagcaatcctcctgcctcagcttcctgaggagctgggaccacaggcccgtgccactgcacccagctaattttttaaaaatttttggccgggcgcggtggctcacgcct

SEQ ID NO: 3420 - DNA, 580 bp, Homo sapiens
atgttatctatattatatgcagagtttacaaatggttatttttgagaagatcagtttgttaggagctcacccctctatacaagtatcagaaatcctctgaagtgttctttaattttggaggttgtgttatactttttctcttatcagttagaacttctttatgatatagcaaattataaaaactattatactatcatattcataaatgaaggagaggactcaaagctaaattttcaaatatctggccatgaagactaactgcttgccacacgggattaacagaacaatgagaaaatgtctagtaataattataaaatataaaaactttgttaaaatctgatttgcaagcttatgtcaaagggccacctcatacacaatcttgaagacattaaataaccccaaatagccactgtaaacttacctggcagtaaattttactatactagacaaatctacagtgagattttctgttattttaaatattttctgtatttctgtattttccaaaatgaacggtttatttagttaataagtgataccctaacttatttactgtttccagaaaataaccaagtgctca

SEQ ID NO: 3421 - DNA, 588 bp, Homo sapiens
ccttcctcctcccaaaagctggtttctctgtatggacatagcctacatatgctgagtccctggagttaggaatttttgcttgttaaaggcatccgatgcaacatgtttagaagaactctccctctgttagcgttgaagacagcataaattgagagaaaatgttcttttttttattcatcatgtaggtaaaagcatatggcctgttctgggacatgcgatctttgcaatccatttttttaaacttggtgtttaccattggcttttagcacggatgtttctgttttccacactgtccagcaaataccatttatatgtggcattgaatgagatatgaaatgttttcagaagcatgctgaaaaagggcattcaaagttatcctttggataatgatgatctaaaactttcttttattatcccatgtgctcagagtaaggggcaaatgaatcagttgtgaaatatgtgttccttgtaggacacaggcactcttgagatctatagcttcaataaaaaggtaatttatttaaattactgcctctttaatttataatgttttggggatttttaataggcatgctctgtaagggcact

SEQ ID NO: 3422 - DNA, 652 bp, Homo sapiens
caggggatcggggtggctgttttgtacctggggcacagcattgggcaccaggaatggcgtgggcattggcacagagaacccaggctccagggcgtgtgagtcgttttgctgggttagaggtgagcttggagtggttggtgggtgtcagatcagacaaggccccaaggccaccacatggagtttggacttttccccgaggctcagagtaaggatttggggagtttagttctaagagctacaggaagccattgaagggcgtaagcttgggacagtagtgacaggatccacttaccttttgcaaagaagtctcaggccaccatggagaggagggtcgtaggggtaagaacagagtcgggagctgggcgctgtggctttacgcctgtaataccaccacttgggaggccgaggcaagtggatcacttgaggtcaggagttcaagactaggctggacaacatggcaaaaccctgtctctactaaaactataaaaattaaccgggtgtggtggtgcctgcctgtaatcccagctacttgggaggctgaggcaggagaatcacttgaacctgggaggtagaggttacagtgagccaaaatcatgccactgcactccagcctgagcgacagagcgagacttcgtcccaaaaaaaaaaaaaa

SEQ ID NO: 3423 - DNA, 627 bp, Homo sapiens
cctaaatcaactctagtataaagtgatatcttcaatacatgtgaaccagttatcacatagaatgagttacttttgtcctaaaaagaattacctttcttgaaaggagatgggcaaggcaaaaatttcaacagaaaatcagcaggatggtaacagaaatcttatttttaaaaaagaaattataacaacttgagataaaaatggttggcaaatctggtgctcaatttcaataccagacttactatagattttcttttgtctgggatttagattcaatggaaaattcctgttttctctccttgctagtaataaagcataaaagtgtgcaatttaacagcagtaccagagtcaggccatttgctagataggaatgtggatggatttctggaagacgaatgcatagaccagaacaaactaagccacacattgctggtgtcttaaacatatgacttaaggaatatcatctaaacaaaaaatctattttgatttcctcctacccctttaggaatcaaatcttccccagcactaagtataaatttgtacatatcctgccgggcacaatggctcacacctgtaatcccagcactttgggagcctgagcagggcagatcatgaggtcaggagtttgag

SEQ ID NO: 3424 - DNA, 549 bp, Homo sapiens
ggagatatacctgatgttaaatgacgagttaatgggtgcagcacaccaacatggcacatgtatacatatgtaacaaatctgcacgttgtgcacatgtaccctaaaacttaaagtataattaaaaaaagaagtgcatgtgaaagaaagtccaagaaagaaaatctgttttttttaaaaagaacagataaaaagatatgtttttaaaaataatactaacatgttaattatgccataaaataccaagaaattaatgaaataaaataggcaaaactttttagactgcaagcaaaaatctattagtgaatcaggaaatcaatttaatagttatcaacagatttgttttttaatggattggagtaaaagagaaattatcagagtataacaagcttattaggtgtaggtgttattcgatgaatattctgtttcatatgtgtgtgaacatgcagttggtgcatcaggttgcaaagtaaaatgtacttcttactttgggaagtactttaataactttgtaaaacaatggtacagtagagaaacagaacagagtttggg

SEQ ID NO: 3425 - DNA, 545 bp, Homo sapiens
cacttcttgaaaagtaggactgaaaatcaaatcaacaaatatttattgctcacccatgaatctaaggtagctttttaatcgaataacatctcacttttctgagaacacttaaatctgttgaaatgtctctttaatatctaatatcttttctcaaggaaataaacaacacagaagggatggttcttacagagagaaggttttcaaagctggcaggactagaacttctgaaggttcttttacataaccttaattgtaatgaaactggatgtgtgcatccttggcctgccctggtttgagctgactttgacctgctcacaagagaaccccacctctcttcccctggggatgcctggcctgccttctgtcctcttgaaatggtccattgtatcaagctggagtggctcattggtcaagaagatgctaagcagccgggtgcggtggctcacgcctgtaatcccatcactttgggaggccgaggtgggtggatcatgaggtcaggagttcgagactagcccgaccaacatggtgaaaccctgactctacta

SEQ ID NO: 3426 - DNA, 594 bp, Homo sapiens
ttcacttggggaaacggtttagctgcctctgctcagctcttcctcaagaaggtgacacaggcatgctagctggaatggagcctttgcttctttcctctgagggaattacacctcagtgactgacccttttcacttctgccttgacattgacacccacaggctgaagtgggggatgtgagagatggtgggctggcagagccagatggaaaaatgtgtcctgtaaggatagctggcatcttcccaaggagtaaccaggcatatagcatgtagccaagacaagtcactagctggcattaagttgggaaaattgcaaggggaaagtggatgctgggaaattgtttcaagcaaatggctagacgtgtcctctctctcctgccgtctggtcggggccccctgggcattttggcatggaggacagcccatgtttccccacaggtgagagggcaggttctagcagggctaaattaaggagtgttagagttgaaagggaccccatggagcatccagctggaacctcatcatttagcagatgaggaaattgaagtcaaggtagtgcccaagctgggaatagtgcccaagactggctcacttctt

SEQ ID NO: 3427 - DNA, 611 bp, Homo sapiens
gagaagttaaaataggacacattaatagacttcaaggacaactgttagctttgattaaaaattgagtaagagtggctactacctagagaagatccaacatggttaggaaaggatttctgtaaagacaactataggcaagtaagagagacacaagttatccaggtaaattttggggttatctttaatgactcactttatctcacactttgtatctaaccaacaaatcctaccatattcccttcaaagtattttggaattcccttttcactacctccaccatcatcattctggtctaaaccactaccatctcgtgactgaatggttattctactaattgattatccatcagttatatcattgctcccttgcaatctgttttctgtgcagtagctatagtgatccttgtagactataattcagaacatgtatgtttctgctcaacatcctccattttgaggaaaattcaaagtctttaccaagtcctataaggcaatacagaattccatgtcctcccatacccattattactctcaccttatcatctgaacctctcttcccacatactctactcctgccacactggcctccttctgggaatttagcaagcacac

SEQ ID NO: 3428 - DNA, 594 bp, Homo sapiens
ccaaaactatgtgaagggaggaatgcttggggtggagagtaatggtgatatatgaagaaaaggtcattgcagaaaaaaatatacacacacacagaagtgcgtgtgtgtatcagtgtctggaactgccacagctatcttgtcaatagggcaattattataaggatcaaagttgatacactatagatggcagcacagagaaatggaaagaatctggaccaagtattatatcattgagtcaacaaattaatgcaccacgagaggtataaacttacttttaaaccattttgagtttgttttttctgagttgaagtttctgaattgaaaagaataatgttattttaaagtatatttgcacacgtaggccaggtgcagtgtctcacacctgtaatcccagcactttgggaagctcaggcaggcggatcacaaggtcaggagatcaagaccatcctggccaacatggtgaaaccctgtctctattaaaaatccaaaaattagctgggcgtggtggcacatgcctttaagcccagctactcgggaggctgaggcaggaaaatctcttgaaccagggagtcacaggttgcagtgagctgagac

SEQ ID NO: 3429 - DNA, 102 bp, Homo sapiens
tcacctgtgctttctccagggtgacctcatctggtggcacgcttgaaagaaccttcatgaatgaaggcaaaataaaaatatttttgggcatatgaagactga

SEQ ID NO: 3430 - DNA, 588 bp, Homo sapiens
ttagtcagcatgatggctgctaaggggaataacggcctggctttgtgtctgggcaggccacgggtagtcttctgtatgggtggaagcctgcaagctgcttcttccagcctccttcattctcacaagacctttgcctcactcacacagttcatcaaagggaggactgattgggctccatccaacccacctcccagactagggaaggatattcgaaactcatccccacgggctgtggctcccgctgccttttccatccatgaataagataatggggtactattcattcaacccatatttattgataactaagtaccaggcagtgtgccaggttctagaaaacagaagaagtttaccgctttagggaaaggtagatggtagataataattgaaaacttacaggttgcaataagtgctataaagggaatggactttctagcaagcaaggtgaaagaaaatgctggtgcagcggggaggggggcctctcttgtcagataagtctagggaaacctctatatggcaatggcttttaaaacgaggcctccagcctgggcaacatggcgaaacctcatctctataaaaaatacaaag

SEQ ID NO: 3431 - DNA, 598 bp, Homo sapiens
tctaggggtgcaagcttcaggagcagcagtgacttggggtgcacatgacttcttacagtgaagccaaagaaaacaagcccaaccaagcaggcccatcagaaacctttgctctgcccacagcctctagcatcctgttagtcaaagcaagtcacatggtcaaagtcaagatagggacattcacccgatagccatgaagccaggggaaggatagggaagtgtagttctataacatgaaaggagtgaagaatggggaacaataaccaacccacatgcccatgaagtagaaaaatgtaaggaatattatttgaggtggaggtacaaaaatacagaacacatggtattatctctgcctgcctaacttctcagtctctgtatttatgcagaaatgtcctctgcaactcacactgagcagaaatacacacacacaccagcaaataattgtacatctctctgaatggttattcactttaaagtcatctacatcagtcattctcaaccaacacccttttgccccctaagggatatttgaccatgtgtggagatattcttagttatcacaacttggaggtggtggcatgctattggtatctagtgggta

SEQ ID NO: 3432 - DNA, 529 bp, Homo sapiens
tctctattctttcacagttttctctctaaacaaaaaagtaatacatgtagatggcagaaaaaattagaaattaagaaaaaaaagaataaaacagtttccataattctatttctcagacagaatgttaatgctttggtctatcctttcaaactgcattctctgtgtattttgccacgagagacaatgcctcacaatctcttataacaacttgtaattttactgtgaccattttcccacaatagtctttaaaatcatcttttatcttcttttctgaaatctcttttaattcataggtaaccctcctcccttatttttcttgcaatttttttgctgaaaaacctggtcatctgctctgcaggtctgtcacacctagaatttccaagctgcaccctcatatctaacatgcttctctgtccactgtatttcctgtaaactggcaatataggcttgaatcaattcagatttgagttggggctagaacatttcttaggtagtattgtgtacttccatcagagagcacatactatct

SEQ ID NO: 3433 - DNA, 342 bp, Homo sapiens
cgcgcgccaccatgcctggctaatttttgctttttttagtagaaacaaggcttcatcatgttggccagcctggtctcgaactcctgaccttaggtgatctgcccgccttggcctcccaaagtgctgggattacaggcatgagccaccacgcccagccaaaaacttttcttatgcataattgatctaacagataacagtttgtttaaaatagagcaacagtgttttcaattatacacatacacacacgcacgcttatttatgcttaaagtgaatgaatgacaacagtcatacataggattattctgttattataaggtacttggccgggcacagtggctcacg

SEQ ID NO: 3434 - DNA, 541 bp, Homo sapiens
gacagaagggaattcaatgatattctgctgagtgaatattgtattgttttatcttttatacatatattgatgtggcatatgtatatgccattactttcaatggcaaaaaccacaattctttttgtaccaacctgataccatttatttcacctcaacctctattgacactaacttcttctctggtcatatgtagcgccccagacaaatctgtctcccaagagagtgtatgaccaccctggctggatggcaccaaattaacgagtaatgcgtgggtcagaagttggtctcttgtaagctgatacaacagttgatggctatactattcttatcaatcctagcttgtaagcctccaaaactgaggatcatatgctggtttctggtgactttatgctgataaataccatttcgtgcaggtttcatggctcgggagcactggagatttcacgatattgaattgttccttctgactgagctctgattgagctaactgatgctacatttaatttcaggatggactgaatcaaacaggcttactaataag

SEQ ID NO: 3435 - DNA, 645 bp, Homo sapiens
attttgcacatgatcctgggagtaaagagtcacaggtaaacaaggctgcaagaaaagtccaggtggtgttcacacagtagctgcaaacttctcagaacttttcagaaattcatccttgcctgtcattacattttttaatgagccactcagcattccaacgaacaacccaatacatcatttcctctattaattggtgcagttaatttgaaaactgttctcagttctatatttatatgggaaatattaagagtccatctccttgctcctttttcattaattccacacacattcatggagcatcacgctaggaactaaggacatgatgtgacccgaggttggcaggtcctaccctcgggctcgggggcaccaagggctaggtggccatgaaagagcccaggccgggcgcggtggctcacgcctgtaatcccagcactttgggaggctgaggcgggcggatcacgaggtcaggagaccgagaccatcccgggtagcacggtgaaactccgtctctactacaaatacaaaaaactagccgggcgtggtggcggacgcctgtagtcccagctactcgtgaggctgaggcaggagaatggcgtgaacccgggaggcggagactgcagtgagttgagatcgtgccactgcact

SEQ ID NO: 3436 - DNA, 617 bp, Homo sapiens
aactcctgggttcaactgatccttccaccttagcctaccaagtagctaggactacaggtgtgtgccaccatgtctggctaagttttgtttgatttgtttgcagacatggaggcctgctgtgttgcccaggctggtttcaaacacctgacctcaggtgatcctcctgcctcagcctcccaaagtgctgggatcagagacttgagccactgtggccagccggaatgtaaattccactgaatttttttgtgtgattagccttcttgccgaagccttgacactcttgcaagcctttgcgcgtacatttcttctatttcagaagactccttgctctccaagacttttttctacaaggtgtaaccagaagccaggaggcctgttgcaaaaccaatcccatttgaaagcagagaatgtgaactcacctattgtcataatgattataaaagaggctttggctcactcctgtaatcccagcactttgcaaggccaaggcaggcagatcacctgaggtcaggagttcaagaccagcctggcctacatggcgaaaccccatctccactaaaaatacaaaaattagccaggcatggtggtgcacgcctgtaatcccagccactctactc

SEQ ID NO: 3437 - DNA, 417 bp, Homo sapiens
  misc_feature 236: n = A,T,C or G
taaaagcctttgcgttcaactgtaaaaacagcaaccctcttctgggccccctctccatgacagagagctttcttctttcacttattaaactttcgctccaacctcaccctttgtgtccacacttcttaattctcttggttgtgagatgaagaactccgggtggtacttcacaatgagacactgctacattgtgatgcattggcgagactgtaacagtaagatctacattaaattanggaaattagtatgggggtctatattctgtagctttgccagtttgttcttaggattttctgttttgcctatgaattggggtgcagggagacggagttgagcaaaaaaagcaaaaagatctttccatacccgtccttccgctgagtggggcttttgtaaaagaatgagatattacaaccttat

SEQ ID NO: 3438 - DNA, 362 bp, Homo sapiens
taatttgcaaaagaacgtaggaaaaaagtaggatgattgcatcgtgccttggacacttgcaccctggagtacaatgcagctggtttaccatttagagaagacaggctctcgatggcttggatgtggatgggaggaggtgggaggcagtgaaggcatgttgagggttgccgctgatgttggacaacactacaagtcattcccttatgcttttatgatacgcctatatcctcagtgtagcctgtccgtgcagcccccagccacatttccctaggcctggagccctgctgggtgctgagcccaggcaccgctgcttcttgggggttgcctccgaagtccatgtgaaccagtgtggtcttgaacct

SEQ ID NO: 3439 - DNA, 331 bp, Homo sapiens
ttgtagaccacagctagacaagtgggtgctacaatcactgtgtcaagtatagaaaggacagctgagatcacatcgaggattccagaaagaattggcacaggatcatttgggacgcatctctcccttgcccctgttcctggctttccttacagctctcgacttcctcaaaggagtcatcaattcggagtttggcttccattcctattgaggaagctggaaagcgtttcaaaaatgctcctctgatgtgcctgtggttaagacctctgagctctgcttaaaactttttgaagctgggcgcggtggctcacgcgtgtaatcccagccctttggg

SEQ ID NO: 3440 - DNA, 514 bp, Homo sapiens
tttttttttctttttatttgagaaaagggggggttgagagtagagtgggaatggcaagaagtagtatgacagagcttcttctcttttttttcccctctttaccaggaagttaactagaagtcctcatgcatgtttttaaaacaaagttggtaattagcataacctagttagttacctttacacagagtgacagaattaaaaagttgacaagcccatcagacctcagccaggaggtactgaaaggagggagaccagtgagtctagaccaataggtgggttaggcctcctgaatgccagcctagaagtttagactgattctataggctctggggtacctacaagtttgtagtcggagccttgggaattgaatgttacataggaactttcactggttccagctagccttggctgttagcaattatttttatctactttaacaggggggacagagtaggggggcaggaaactaagctggcattatggtcacaggaaagaacagactgatttggagcct

SEQ ID NO: 3441 - DNA, 425 bp, Homo sapiens
aaatacatttgtcaattcaatattttcttccactgagtaaagaaaggtctgttttccacgttagaacacatattgaggtatccctaaatcttaaacaacttttcatgataaacagccctaatgaaattcctgggaagcttctaagataggaggatttttcattcagcttcctgtgtcccattcttgggcttgcaggcaaccgtagccaagagctatggtctctcttgagatggtagaaagctgccttgtcacattaggctgcaaaagtcgtcctgtttcctcctttctctaaaagaagaatgaagttcacctctggtggctttatctttccaggaaaaggaaactcaggtctaaagccatccatttacagatgaggacacaattataaactgggacacttgatggctttcagctcacagctcttg

SEQ ID NO: 3442 - DNA, 470 bp, Homo sapiens
agccctcccgaccaccatagctgagagcccaggacaccatctcacaccacacgctgaatgggggtgggagccagacctggtgatccccaggactatggagcagcagggatgaggtggtggaggggaagaattgaggctgaaataagatgggagtctccttcctcacacaggctcacctctgtggcacacagtccaggagagatggtttcttcactggtctataagaacctctggtcaggccgggcacagtggctcacacatgtaatcctagcactttgggaggccaaggcagggggtatcacctgaggtcaggcgttcgagaccagcctggccaacatggtgaaaccccatctctactacaaatataaaaattagctgggcgtggtggcatgcacctataatcctagctactcagggggctgagatgggagaatcacttgaaccgtggaggtggaggctgcagtgagccg

SEQ ID NO: 3443 - DNA, 447 bp, Homo sapiens
aggcccatctgtggtgaagagcaagatcttttctcctagcagtgcacggaagagcccagccaagtgcctcatgtagctgaagtcacaggctctgtagctaccatattcattctccacctgccagaggggagggaaagtggaacccagctatgggatggaggtcaaggaccccttgtaccttcttcccctgctccagtcacttcccccttgtacctgatgctaatgatgttgcccccattgtgataaagccatggatatatcttgggcagcaagaccttgaaccaggagtccactgcggcaaggaagtctaaaggaaggagcagagcttctgtgttaggtgctaccatcacacttgctcaccactaaatatgggaagcaatgactcttgtcaagaaattcccaaccctaagcaccttgtatatttgcacgccaatgaaatttgaacat

SEQ ID NO: 3444 - DNA, 381 bp, Homo sapiens
taagcacatagaataccttgcacaggacgtagcacataatcgaccacgcgtggtagccatcagttttaacgacagcattagcagaagcagtagtggtagcagccgcaggtgcatagtgatggaacacagaagtacaggcatgtaagtgggaagctatggaggggtttgcagccaaggggcagcaaactttgcaccagccatggaggtggagccacagtccagcagagtcctcactgggtgctctctggaatgcctgccaaatttattttcttctctaaattcttttttggaaagcccggctctaagccgtctgtttcttgaggtctccaggatgcatgacagttctttttaactccatttatattttcacaagaataatct

SEQ ID NO: 3445 - DNA, 406 bp, Homo sapiens
tacacagtttcaggtaaaactaaccctccctataaatctgtcttcttaagttcactggctgctaaccaaccatatggccttctttctcactctgaaatcatttagcatttatagagaagacaactgagtatctgtccatcccaatcacctgcaaaagatactcatcagattgtgatttttacctgtgattttcactatggaagattataattaggaaaggttttgcttgtttgtttgttcatttgtttgttttgattggaatgtcatttggtgttagaaaaaaatgaagtgtgagagtatttgatttgcatttaatatttagcatgtagtttgacatgctgccttttacttctaccttaactttgatcacaaccatgcggaatttattttggatacataatacaag

SEQ ID NO: 3446 - DNA, 281 bp, Homo sapiens
aactaagcttcgctcatttggcaaattttgtcataatcactcatcactatcagaaatcatcacaaacaattaggcaaacatgaatcaacaagtcgtgcagttaaaactgcaaaaaaatcttatcaataaaaaagcatgctattatagtctcaatttctatgctgtaaaacaagtgcagtaattgcatgaagaataggtttctttcattactaattttttatacaaaatcaaggattaaagtttaatataatgatatctgagagataaacacagccttaaac

SEQ ID NO: 3447 - DNA, 463 bp, Homo sapiens
gcaattacttggtttacttttgtggggcgttttaacacccttttggcatgctaaaattcttataaagatagcaaccattaattaaatcaacagaccaagagtaaaacattagtataagctctaccagttaatttgctgatttttttttaagagataggatctccctctgtcacccaggctggagtgcaatggtgccatcctagctcactataacctcaaactcctgggctcaggcaatccctctgccccagcctcctgagtagctatgactacagctgcacaccaccatcctcagctatttttttttattttttgtagaagcagattctcactatgttgcccaggctagtcttgaactcctggcctcaagtgatcctcccacctcagcctcccaaagtgctgacattacaggtgtgagccttcacgcccagtctaatttgctgattttaatgaacagcagctg

SEQ ID NO: 3448 - DNA, 426 bp, Homo sapiens
agtctccaagtcatgcttatattcttccaaacataaactcaaaccccaatgtcccccattcttcttggcactgctgttgagctccccgggtttgaaggctctgagctcagcgctcaaagcccctggtctgactccaggcccctttcctctcagaacatttccccttgattctattgatcacatctggacactcagcacagaatgggatgacaggcaactcagcagtaacgggacacggcagtaatgggagagatggcagatgacgtttctttaccatcaccatggaagcctcatgccatgtgcactgggtgtgcttttggaggtgggagggtcagacagcacgtcttgggccctgggttcatcccagctcactgggactcttagacattagggatccctgggaggcagcgatgtcattgagcccat

SEQ ID NO: 3449 - DNA, 534 bp, Homo sapiens
  misc_feature 403, 447: n = A,T,C or G
ccattttaaatagtactggggaataacttcaaggcaagaaagtgaatgaaaagctctatgtattttgaaactatgagagacctataatcccaaacctcaatctaatgtgaaagttaatatcaaattgagatgcaaagctggcagaccattattcgttgaaataagtgcatatgctgatgaatatcaagaggacaaaagctctcatttgatcccagggagataagttatagacttatggtagcagtttcctggacccagataagcatatagaaagaatgaagaggggaaggcagaatgagtcacacagatgagccatgtatgtgcaggaggaaggtattgagtgtagtattgggtgtagtaaaaggtattgggtgtagtaaactctacgggttgtgtacatccncatagcttttgatcttaattggctggggagaagtcaaagctcanagaaattgtttatacctataactctgacgcataaggagacttcttgccagcctagacactgcatacactcaacttttaattgctgat

SEQ ID NO: 3450 - DNA, 340 bp, Homo sapiens
ccacaatgactatagcaagaggaaatatcatgacttcataaatataaatatctaacactggaggtgtagaggtgggaagcggtagagacagaagggtgaccatcatgtgactttattataaggagtattttatttatgtataaaagaaatacagttgggccaggcacggtggctcacgcctgtaatcccagcagtttgggaggccagggcgggcagatcacctgaggtcaggagttcaaaaccagcctgaccaacatcatgaaacccagtttgtactaaaaatacaaaattagctgggcatggtggcgcatgcctgtaatcccagatacttgggaggctg

SEQ ID NO: 3451 - DNA, 436 bp, Homo sapiens
tacataaagtcattaaggccactggtaggagaattagtaataatctaactaataaaagcaaggagctgaaaggaataaggggcagtggagggaatgtatatgaacaaaattcctcatctcatccctggaaattgatcattaatacaacactctacatctatttcttaaagcagaggcctcaattctttggatgctggccctcaggtgtttttatttgttccagacattacttttaaaactttttagttagttgccaacctttgaaattcggaatatttcgcagataacttggtatttctggcttctcttgaaaaagatctggttatgattgtaccactgcattccagcctgggtgacagggcctgcattctgcaatagagccaccagatggcacagagtcacagccactccctttccatgccgcttgaactctcct

SEQ ID NO: 3452 - DNA, 281 bp, Homo sapiens
cacagaagaaaactaagaaataaaaaatggagaaagtgagacatcaaactagaattactagaaacccccaggaagaaggaaaaaaaaatccaagaaaacagaaaaacaatcaaaccagttaattaaaccttggtgtgaccagaagatcagggtttcctaaaggagtggaaatttattgacttgaaggcgatttattgattactgatttgaagaggaagaaaaccatgaatggtctaaagcaaaagcctagtgtctgaagaagtcagtagggtgaaaacaag

SEQ ID NO: 3453 - DNA, 553 bp, Homo sapiens
atgttaataacgcaaataaaggaatcacactttgaatagcaatgtagaaggctacttgtttccacagtattagagggatgatgaaaataaacagccctatgacatagtccagagtcactgtgacatactagacattacaacaagggactggtttgaaatttggataggaggtgtcctattccttcggcttgctattgtatatagaacacaagggcaacttttcataaaggccataaactaagcagtttataaataatagaaatgtatttctcatagatttgggggctatgaattccaagactgaggtgccagcagattcagcatgtgactagggcccactttctggttcacagatggtggcttctagctgtttcttcaaatgatggaagggaggggtaaggggaggtctctctggcacctcttttgtaagacactaatcccattcatgaggcctctgtacctatgacctaatcacctcccaaaggcctcaatttctaatcacatcaccttgagggttaggattgcaacatatgcattttaggggaccacaata

SEQ ID NO: 3454 - DNA, 195 bp, Homo sapiens
atctgatgtgatcaaacatatcatttgccatttagctttttaaaatgtgatagcttgtgcacacacaccagttactttaggtacagtcatgcatcacttaacagagatacattttgagaaatgttcaatgattttgttgtatgaacatcatagagtgtacttacataaatctagatggtgtagcctactacacac

SEQ ID NO: 3455 - DNA, 549 bp, Homo sapiens
ctgtacaatactgtagagaaactttctggccagaaagtttcctataaaagcaaaaaatggggatatcagtccatgcagactgactgttccatattttgactaccctcgcctgcttttattcaatcttcacaatcctcagatagatgttatctatattatgtgcagagtttacaaatggttatttttgagaagatcagtttgttaggagctcacccctctatacaagtatcagaaatcctctgaagtgatctttaattttggaggttgtgttatactttttctcttatcagttagaacttctttatgatatagcaaattataaaaactattatactatcatattcataaatgaaggagagaactcaaagctaaattttcaaatatctggccatgaagactaactgcttgccacacgggattaacagaacaatgagaaaatgtctagtaataattataaaatataaaaactttgttaaaatctgatttgcaagcttatgtcaaagggccacctcatacacaatcttgaagacattaaataaccccaaatag

SEQ ID NO: 3456 - DNA, 486 bp, Homo sapiens
aaatgtttctgatgtgaataaataactgaattttacgtttttctctaattttagtgaatttaaacttagttacatttggctagtacttctatcttagcctgtctcaaaaatagcactaaagatgaggaataccaaattcttctctaaaatcttccacaatttcattggctgatctccaccaaatatctcctttgtattttattttcctgtctttaaaatggtgcttacaattcatagtctctaagtaaaaacattagtgacataatatgatttaaatacaaggttattcaatataaatgtcctattgatagatttctaatctaagaggtaagatatttggaagttaatttcaacttgtattgaattactaagggtagcataattacagaaatgattatgaaaagttctgtctgctcaaaagcttaaacaaacatagaaagatagatggtgggccaggcgcggtggcttatgcctgtaatcccagca

SEQ ID NO: 3457 - DNA, 546 bp, Homo sapiens
gagccaccgtgcctggcctcaccattgttaaaattatggaaatcgtgtttgcaaagcaggttggcctgtttggaaaagggtgtcataatttctcaggtaactccaaaaagagaaagctacgaaaattaccttaatacattcattacagtctcagtataagattatagcttcctctcccaaagcgtaaccacaacctgacgcaggatgagttggtttgaaaataccgcatacaatatcctcttgagtagaatcataatttagaactctaaaaatgaccggaaacaaaactgtccaagtttgtttaacgtaatgtgtttcaacttatttgactagaaaacccttcattcgtgcaacacttataaatatcccatggcaaatctagttttctacgaataatgaacgaaacatttataatttaaaactaaaattgtcttctaagcagagatctacgtatcaataaaatgaagaaataaaatttccatactgttttcttcccaatacaaggattagaaggaaagggaaaagagtaacagcgagaatcaatag

SEQ ID NO: 3458 - DNA, 147 bp, Homo sapiens
tacttattcattattcactaaaccaaaaatatgtattaacagtttactgtgcaccattcccacttttagtgctaaaacatctttgaaaattaaactattgataggctagcaatgaaaaatgagaaattgaaatttaataagtaccac

SEQ ID NO: 3459 - DNA, 413 bp, Homo sapiens
  misc_feature 166: n = A,T,C or G
tgagcaagctcacaggttaattgagtttcccagtttatggctgcttagaggagatgatggctgcttagtggggagagagttcaggtggttagatttggatcctggctgtgttcatttatagtccaaaactttcagaagagggtgattttatctttttctttctcangaatgtattagtggttcagaaaatatcacagacatggtgttaatttactgttttcctgctggggatataggatagtgtaagagaggatggaggaagggaaaaggagcacgttttctagaactcagctgtcgtgagagacaagtgtaagcctgtgggtaggagcagctttccttgttgagcgtaggcatttggctcaggagttcgagcactgatagtggtggctcttggtggttattgtctgtgggca

SEQ ID NO: 3460 - DNA, 321 bp, Homo sapiens
aactaatccctgctcaacttttcatctcagcaggaggcccattctctttggcaatcctctggcctccagcccatttattatatgctcacatgtcaacatgtacttcgtacagcatgtaacacaattgcacttttatattttaacaaattatatttcccatattgaactgtaagtctcctgaaagcaggaattttattcttgctcatcatcaactttttttaatattcctttaaattaggatggcaaagatcgtatatagaaaattggttaagttgcggtccattcatgtttgctcccaattaaggagcacagctatgaaaa

SEQ ID NO: 3461 - DNA, 519 bp, Homo sapiens
accacatagcttttgccattgtggctgctggtagagtggtagtgtccgcttatgccaacccaggaactccctcaggacgaagtgataccattattcccagctccaggcacaaggcttggcaagtaggtgctcaataaatgtccttgaataaatggggagatgggagactacacgtggcaaaactattatctgctccacggtctggccccagtcccagcgaaggtgtcaaaggagaagcaagttcttttcaaaggtatgaaactgaaacaacccttaagaaaaattccttaagttcctagggggaaagagacttggatacggctggtgttctggccctgggggtgcactggggctgactctggccctgcagcccaggagagtttgcggtgcctggaagctcaggcctcagctggggctctgcagacccggtgggctgcactcccattgccctggagaggctgcccagaccagagaggatggcatggaattctgtgaggccaagtcatgatcccccaactc

SEQ ID NO: 3462 - DNA, 437 bp, Homo sapiens
tacaaacataaataatacttgatgctttctctcccaaggtgctttactacatagaaatatagaaagtaccgaagaaatagataatttccatttttagcttttccatttttttccctaaatttctaagttaagggcatcatcttcatatgtagttctccagtttttgagctgattctgttccagatgttctttggtaagtcacattttatcatacaagcattttagtttctgcgataaaccctatcacaggctccttaacactgtgctgaatgagcagcacaggaatcatgctgtttgcagtaaaagttagccatctctctctggactcagcagagtgggtatcccatcccttttctctgaaggcctagtatggatgtggggattcttgtgataaatattggcaatgctaacaccacagaaaagagaatctgggatgt

SEQ ID NO: 3463 - DNA, 352 bp, Homo sapiens
tttagactaatataaaaatattaaacactttgaccactttggcagtaagaaaatctatttgcttactccaatcttcattaaatttatttaaccattgaatttttttgctccctaccccctacaaaacgcctattaaacgcttcacagttgacttatgctaataggcaataagggtgtgacccaggagaggctatatacatatgggcacatacattacatattcagaaaagcattcagaagaaaacgctcatagaattttagaaattataattccttggctgggcacggtagctcatgcctgtaatctcagcactttgggaggccgaggtgggctgaccatttgaggtcagga

SEQ ID NO: 3464 - DNA, 545 bp, Homo sapiens
gactgctgtagtattatggtttacagtgtttaccattttgtttaacaatattctactctagaaactgaaacattttagatgttaataaaacatctaaaatcatactatgatttacttctccaaaatacaaattacatcacaagtaagcctccatgcaatgacatttttatctttatggagtgtcatcaatatcagttaaataaatcagtgcaattgttcctaaggagaagtttagcttccacttcaccactaaaagccaagtgcctatgatgcagatgaatgcattgtacaatatatttcaatcaagtcacagactcacttccccactatccatgaaatataacaaagggctaagaaacattaaaaaatgatgtatcaaacttcccacaaaccaaaagacaggaagctattgaataatctgacacttggattacatttttattatcattaaaatgtagcaaaggggccgggtgtggtggctcatgcctgtaatcctatcactttgggaggccaagacaggcagatcacttgaggtcaggagttcg

SEQ ID NO: 3465 - DNA, 485 bp, Homo sapiens
tctctctctctccctctctctcgctttctctgtctctgcgtgtgtttgtatacacattcatgcatgtgtataggtgtgctgtgggagggcgtagaaaaaagtgagagaaaggagggaggaatccaaaatggttaaggttttgagtctaactgaaacaatggtggaaccattaatagagttagagaattctttattagtctagcacttgctacaaatagttggtactggatttgtgttttgttgattgatgactatttgaatatgtggcttgagacaggatgagaagatgcaaggaatgcaatgaattcagcctttggggttgttgggtgtctgggacttatgggccctccagatagtgaatgctaactataggaggtttgaagttctggaggatattagagctagaaaaagaatgaaaagtcatatatgcacagaggcaatagttgaagttgtgagagtgaatgaagtcactgaagggagagaat

SEQ ID NO: 3466 - DNA, 312 bp, Homo sapiens
agctggtaagtcgtagtccctggagttggaccagacacagtcctcgagtctgtgctctactcactcttttagctgcatttccactgctagatttttaaaacgaagcatgggcttttctatttatttctcttcaattttatctcattagagttcagtttatcgtttaagccagtcaataattttgggatgaccatttatcattatctcttttcaccaaccttccagtttcttaccccattgaaacttcactggccttccactaatattttttgctagtcattaataaaatgattagtcaggcaggcagatatg

SEQ ID NO: 3467 - DNA, 549 bp, Homo sapiens
atgcgaattcacttggtcgagggtgggtccccaagtttctaacgcgtgtccgtgatattctgctgctccccacctgcctgcggatctgcgaggacctttgacttacaaagggtccaacatgcagataatacaaaagtttatttttcctatgtattttggtttaccatcccccgaacttgaatgtgagttccaccaggatagagctctggtctgttttgtttgctgctatattctctgtacctggaacaggcctggcacatagtaggagcactatgttatttccagaaggaagcagtgaatgaaatacaaaccagaaaagacagcagaggtgataaacctaacattatacaaagtgaaagtcaaggtgcaaattatgaacgaaacaaaggttttacactcatttttaaaagggagaaataacagtcacaagcccttaggtcctaaagtaaaaactgtctccccaaaaaaggaaaattgcaaatactacattgattttagaaaggttaactcccatcttggtcacatctcagaagcaaaaagtgacgtaaa

SEQ ID NO: 3468 - DNA, 306 bp, Homo sapiens
gtactcttgtgacctaacatcactgtattacagcagagtagtacacattaataatgatggctataaatcatcaaaagaagtcagtgtcactgtattattgcaaaaggtaaagagtgagagatctatttttgaaagatcaacctccaaaaagagtaaaaataaaacaatgtgagtgcttaaaaggttaatatttcatctgtatgaaaaaagtatgccctaagaattctgcattgcttaaggttcattaatataatgagatttattagctaaaattctatataaagggtaattaatagaaaaaaaaaa

SEQ ID NO: 3469 - DNA, 509 bp, Homo sapiens
gtactcttgtgacctaacatcactgtattacagcagagtagtacacattaataatgatggctataaatcatcaaaagaagtcagtgtcactgtattattgcaaaaggtaaagagtgagagatctatttttgaaagatcaacctccaaaaagagtaaaaataaaacaatgtgagtgcttaaaaggttaatatttcatctgtatgaaaaaagtatgccctaagaattctgcattgcttaagggtcattaatataatgagatttattagctaaaattctatataaagggtaattaatagaaaaaaaaaacactattctcaactgcccactctatgccactcactccttccaccccacctcctatgataagagttcatgtcaaaatcttgaggaagtgtaatttgagaatatttttaaattactattaattgtggctgggtgcggtggcttacacctgtaatcccagcactttgggaggccgaggcaggcggatcacctgaggtcgggagttc

SEQ ID NO: 3470 - DNA, 551 bp, Homo sapiens
ataaaccatgaaatgtccaacgacagaacaaacctattaaattagactcatttctaattaaattcaaaccagagatatgctagaagtgaagccgtccgcacggttgtgtcaggtttatcatcaaccatggaagtaactagtaactagatgagtcacctttcctctctgtgtcaatttcctcatcttgagaatgagaatcagaatgcatttcccaccaatatttggtaaggattaaagcggtgtaaattgttgtgaaatatttaggataacaatgggctagataagtgtaaggcagtgtacactcagcattttaaaaattggttttgtgtaggccaggcatagtggctcatgcctgtaatcccagcactttgggaggccgaggtgggtggatcacttgaggtcaggaatctgagaccagccaggccaaatggcgaaaccccatctctattaaaaatacaaaaattagtctggtgtggtggcgcatgcctgtaatcccagctactcgggaggctgaggcaggagaatcacttgagcccaggatacagaagttg

SEQ ID NO: 3471 - DNA, 532 bp, Homo sapiens
agctgtgggttcggttcttaagagaattatacaaaataagatgaatgttcacaaaggtcattcattaaattcaatgaatattttttgagcatgtaccatatgccaggcagtgcagtgggcactggaggtataacggtgaacaaaacaaaggcccttcctcgtggaacttatgttctagtgagaggagacaggcaatcagtaagtgagccttcggctgatgacaacaatttgcagaataacaaagagggaaaaggagtgagggaagggtcagtgttactgtgttaaatagaatagtcagggatgatcaccctactaaggtgacattgggccatggggatagctggggaagagggtgtcaggcagagggaacaactgtgcaaagtggagaagtagccagaataaacattcaaaaaatatttactgagtccctactaagtaagcgccccgtagagtcatgtgctaaatgatcagtaagattaattaggccgggcacagtggctcacgtctgtaattctagcactttgggaggctg

SEQ ID NO: 3472 - DNA, 540 bp, Homo sapiens
cctagccgacagattcacacatggtgttcacttctgctgttgagtagcacgtgggtcctggtgctagtgtttcttttcctgctcagaggacctcttctctcttactgatttacagtgacgtccagatggtggagtttgctacaaagcagcccactgtatgaaagacatgacattgtattcacctggactctaggttgactctaaagaaggcaagggtcctttggtcacagggagaactgttgtgttccttcacaaggtagcagagactttgtgttctagagacttgagaccacctctataaatataaccagagcacaggcttcctgtgtggacccctcaatacacatttttgaatgttagcctcaagcaccttcatttttgatgtataaaaaaatggcattttatggctgggcgcggtggcgcatgcctgtaatcccagcacttgtggaggccaaggagggtggatcacgaggtcaggagatcaagaccatcctggccaacatggtgaaatcctgtctctactaaaaatacaaaaaatta

SEQ ID NO: 3473 - DNA, 516 bp, Homo sapiens
gagggacaaggaaacaaagctctcttacacatacctagaacaacatccactgccttgccacaggctcctgtgagactgagacttgagtggactacactctccatagcttcttccccatgctgttcacctgaggtgggagggcctacccattctggtcaccagcccacagctggcaccattctgagagtttaacactgagttttgccctactttcgggccaaatttgaggtgatgtggttgcagccaccacccagcagtaggagggacagggaaaccaagctctcctaaggacaatacccactgccctgctacatgcagctgtgagactggggactagtctgctgaacgcattgctgcttccaggaacaccaacacagactgtttaagtcccagtaggttgctccaccactgctactgccatcacccacacaacaccaacagcccagggacctgagaacccacccacactcctggcccactgctgccactaatagcttctaagaaaaccaccggaat

SEQ ID NO: 3474 - DNA, 535 bp, Homo sapiens
gagtgagtgtccaattaaatagtggctcactaggacttgtgtaatagtaacatctgttaccttaattaaacaagttactatataaaggcactttcatagctcactttgttagagtaggttctgacctagaaactctaggaaggtttgttctctttgtgggattttgttggcggtagcgttcccagttggccccattaaactatagacctgacaagctctgtgatctacaaacctacaatacgttcaagcctacagagcctagaggaaggagggaactgaagtttgtgatgcaaagtggaacaaataaaatagtaaaagtgctgggtaggagtgcttcgtactcattttgatgaacttgggtgttgtgactgagaggcaagtggtggtggtaacagagaaaggagagtgaacaagtatttattgaccctccattgcatgttaggctcgcaggaaaatctgtatctgcaggcataggtctacaatcctgtatccatatctttgaaatccaaaaagctctgaaaaaaaaaaaaaaaaa

SEQ ID NO: 3475 - DNA, 487 bp, Homo sapiens
taaccgacacctctcacattaatttaatgatttttcacagtgcttccctctcccactctatagcccctaagtacatgcttagtgtcagtattccacattatactccagaagctggatgccatttctagaaggtcacatttcgaaagccaagccatgccacccactctgggaaagcactttctgttcaggctcttctgtggctattagtaaagcctagttgactttacttggctatcatgaagtaggttatactggaggacaggagatgggttgacagaggcaagagcttgtggtgacagaatcagagctactgctaacagatgttgtgtcctatttgaatgccatggaaaaatacattgctcttttgcgggcatatagggtcttctggtgcgtagctatgaaggcaaacctaaagagcttgtggtcaggaaaatcaggcccagctctaagcctgtgcttaaccaggacttctagtgtaaaacaacta

SEQ ID NO: 3476 - DNA, 270 bp, Homo sapiens
ggagaggtaataagctgggaatcccatcagctcatctttcttcaggcctatatttgtcattgtcacttgtagaagcaggacagccctggcattgggattggtagtaacagagagtatcaaagggaaaactgaacttcactaatttttggaaaacagcagattggaaacagatgggctccaacgttttccatatgtgaggtcattgtcccaggtagccttgctcaggacatttcttgtctgcaaaacagaagtcaaacgatatttctacct

SEQ ID NO: 3477 - DNA, 517 bp, Homo sapiens
gctaagtgtaagggtgattattttttaaatgtctctcctagaaagctaaaaagaacggaaacaaagtcacaaaaataactgtttataaactgtgtacttaaaaggaaatttgattctggcctttggcctggctgggaataaactgggaagctgttactccatcctaacaacaagtgaaaagctgaatgaactgaaaatcaacagccttctttgcctaaaagtggagaaacagacaaacaggtaatgagaatcacagcatagcaaaacagaaatctctgtaggaaacagtaccaggtacttcacgttatactttcaacaaaaaattacaaggcatactaaaaagcaaaacatacagcttgaaaagacagaacaagcatcagaaccagattcagatatggcagggatgtgggaattataagattaggaatatgaaagaataatgttaaaggctttgttggaaaaagtaggcaacacccaagaacagatgggcaacgtaagcagacagctggacattcta

SEQ ID NO: 3478 - DNA, 152 bp, Homo sapiens
agcaagggcttgacattcctaagtttcttatgtaactgagataattgtttaaaagcagaaggttccacagaagtgtactttttaaaaatttatctgaaaacatagcagtatagtagcactattaagttgaaacatcctcttgtcatggtaat

SEQ ID NO: 3479 - DNA, 319 bp, Homo sapiens
tggccaggctggtctcaaactcctgacctcaggtgatccacccgccttggcctcccaaagtgctaggattacaggcatgagccactgggcctggccgaagataatttaaaacagtgtttcccacactcttttggtaagacttatctgaagtacttgctaaaaccataactaccaggcctcatacccagctcggtgcatcaggattaccaacggcctgacagctgtcatttatcaaccacccaggtgctctgctccttctcacagggaggcttgggaaataccgttttcaaagaccagtggattagtagcctgaaaactc

SEQ ID NO: 3480 - DNA, 530 bp, Homo sapiens
tccaatatgaaattaaaaattactacatgtgtggtgaaataaaaatgtgaccattagtcaacatatccgaggatgacaaagatggtggaataagaaaaggattttaaagcagctattataaatattcaaacactttaagaaaaagacagtcaaaatgaatgaacaaatggaggctcttaagacagaaaaccatttaaaaaaagaaaattctagcactgacaagcacaatatctgaaatgaaaatttcactggataagcttaacaatggactggagcagcagaagaaatggtaagtaaaactgaacacacatcaatataaaattattcaatattaaagcacaaaaaataatgaaaaaattaatagtttcagctacctgttagatagcattaaatggtctaaatgcatgtaatgagagtaccaaaagtatttaagagaaaaaaaactggcaaaaattctgtagatccaatgaactcggcagtctctaagtaggagagaactacaaagcaaacctcatcaatgcaccaatagt

SEQ ID NO: 3481 - DNA, 261 bp, Homo sapiens
tgctgcagccacttgggctgacgattctcagtgttcaataggcactttgtcccaggcaaccgtaagtgatgatttaagtgatttaatgtccctgcacaccaaggcatactacaatctcactgtccctggccatgaggttctcactgtgtttacctaatcaagtcaaacagcccacccccaaatcccattattgaaggtttgtttcctggtagcacagctgataccaagtgctatatcattcaaggttcatttaaaaaaaac

SEQ ID NO: 3482 - DNA, 511 bp, Homo sapiens
ctgttcttgtccccaattcctcgtcatcacaatcaaaactaccagctggtcattgtcctggggcaccttccccctggctcagtggggcagggagatgccatgctctctgacgagggcacttttgactattaacccacccggccttcccaccctcctgtcctggcttgagaagaaattgcaatccgtcaccaccgtgaagcacttgctgaagctggggagaagaaggccccaagcttgggggccccaaacctctcctggcgcccctcctaactacgggacatccactgcttggattctgagggcccctggtggccccagactgcccctaactaagaggagagacatggcccacacttggacagagctgggtttctctcataccagctcctgggggcagctcagactctgccaggaaaacgcccatctttggccgtgcacggtggctcatacctgtaatcccagcactttgggaggccgagacaggtggatcacctgaggtcaggagttcgag

SEQ ID NO: 3483 - DNA, 552 bp, Homo sapiens
acttggattaccacgcccagttcctcaaaaggtttttgaatctcaagaacccaaataggctgtaaaattagttgcagaaaatacctctgaagcttcaatgtttatggagctgaaaagtggtgatctgattgacactctgtatgttaattaacactctcaagatttccaccaacaacccccactagagatataattgcttctcatccacagtggtctatgacaaaaatttactatatgcaaaagatgtgcctaagaaaatgtagaatttggaaaatcaaaaacaactgtgttaggcaaaggtgacagtaagcaatatctgcatactgaatggttggacattgcaccagctgatttcatcttcctgattcccatggtgagggaatctaactgggacagtgaggcatctaactgggaaaataaggtcttagaataaatacaaggaaaaaacaataaagtagagaaaattagtgaatcatcagaaaacctaaaagcacactgctctctacaaaaacatcaggaagtctccatgtcccatggtgcagtgtgcaaaac

SEQ ID NO: 3484 - DNA, 549 bp, Homo sapiens
gttgcccaaactggtcttgaactcctgtcctcaagtgatcctctcactttggcctcccaaaatgctgggattacaggcatagccaccacaccaggttcagccatttttggaaagatgccttttaacctgcaagaaacgagacagcagagtccctcaggcaagtggcagggtttcatctcttctcgatcctcctgagcaaccaaccactcctgatttcagctgtcacagacactatcatcttgccactctgcttgtcaaactagaggctgaaaaagggactggcattctcatgcagccagtaggctgtctgtcacttgacactcaggccatgtccacttcctaaacagcatcccaggccaagaatcatgaataagaaggtgagatacctgccttaccaatagcaaaacatacagtcatcaaaatagtaacacactggctcagggtcaggtgtggtggctcacacctgtaatcccagcactttgggaggctgaggcaggtggatcacctgaggtcaggagttcaagaccagcctggccaacatagcgaaac

SEQ ID NO: 3485 - DNA, 542 bp, Homo sapiens
ataaaccatgggcatttttaggcatgtatcattcatttactcatagtttggtttacttaaattatcaggaatacaatgttgcaatgatgcttaaaaaacacttgttagttttccctgtaccaggcaatggttataattaaaatgatatgctgttgagaagccactcttaagagtccagtttgtttaatgttatgggcagctaccaatttgtggtgtctctgtatatttttgtaaagattctcattttttatgcttgaagtatttggtgaaaagatgttggttgaccataatttgcaacattgtctcattaaaaataaactttcatattcatatttggtagaactgttaacctagaaatgtagcttgctaataagatagaatgatacaaaagtgaagtagtagccacagtacaacactgactgctcagacacatttaggttcagggtggacctttatgtcttgtcaagatgtctaggcccggctgggcgtggtggctcacacctgtaatcccagcactttgggaggctgaggcgggcggatca

SEQ ID NO: 3486 - DNA, 485 bp, Homo sapiens
ttgggctgacgattctcagtgttcaataggcactttgtcccaggcaaccgtaagtgatgatttaagtgatttaatgtccctgcacaccaaggcatactacaatctcactgtccctggccatgaggttctcactgtgtttacctaatcaagtcaaacagcccacccccaaatcccattattgaaggtttgtttcctggtagcacagctgataccaagtgctatatcattcagggttcatttagaaaaaacaggaagtacgctagaaattgtaaacagaggggagtgaatgcagggagctgattatgaaagtggtgaacaggctgaaagggcaaaagaaaaagataggaaggcccggcgtggtggcgcacacctgtaatcccagcactttgggaggctgaggcagacagatcacttcaggtcaggagttcgagaccagcctggccaacatggcgaaaccttatctctattataaatacaaaaattag

SEQ ID NO: 3487 - DNA, 124 bp, Homo sapiens
aaaacaaacaaacgaaaaacaaaaaaaccccacaaaaaaaccccaaaaattgggacagtaggacagcagaaataagctaggattgtgctggtgaggccggaatatatgttatatggctgacatg

SEQ ID NO: 3488 - DNA, 380 bp, Homo sapiens
tctagtctatttttgatatgtcacttttgctcttggtgtcatatttaagaaaatgttgcaaaatccaaggtcacacatatttatatctgtgtttcttttaacacattatagttttattactttttacatgtagattccctgctgttccacacaatttgtttaggagactattctttcccaactgatttatacttccatccttacaccagtgccaaactgttttgattattttagatttttaatcattttgaaatcaagaaatgtgaatccccagctttatttttattattaaagaaatagactaataaaccgatggaaaagaatagaagcccacagataaaactgtgcatatataatcaaaaatcttcacaagggcatga

SEQ ID NO: 3489 - DNA, 439 bp, Homo sapiens
ttcatttatcagactaacagattttaacattaaactgttggtaaaggtataggaaataggcatcattaggaagacaagttgcagtgtttgtgaacagttttgcaaatatgttaaagtttgcatatttcttaacccacaaatactacttttacacatttaaactaaaaagaagtcatcacttgtgcaactgtacttgtaaaaaacacattatataaagcaaaaaaatcaaaccagaacaaaaaggacctaccaaaatgctcatcattgtttaaataaggtactatgtgatcccttcgtataagggaatgctccaaaaccactaaaaaggatcctatataagccgggcgcggtggctcacccagatcacttgaggttgggagttcaagaccagcctgaccaacatggagaaaccccgtctctactaaaaaatataaaatta

SEQ ID NO: 3490 - DNA, 382 bp, Homo sapiens
  misc_feature 158: n = A,T,C or G
aaattatacctcaagtgccacccatatcagatttagatgatatttagatgagactttggagtttagactttaaggttgatgctgtaatgagttaacacttttgaggctattgagatggaatgaatgtattttgcatgtgagaaggacataaatgtggngggaccaggagtagaatcctataaactagatgtgtgagtactcaccaaaattcatatgttgaacagactaagatagcactttttaatataagttttttttctgctatgacagccattaagatcaaatgtcaaaccaaatctagtgctgctacatgacaatatattgaaccaaggttaaaaaagaaaaggagctggctgagcatggtggctcatgcctataatcc

SEQ ID NO: 3491 - DNA, 564 bp, Homo sapiens
ctataaaagatggatagcatatgcaaaaaaaactgttttcaagaatcaaaactgatgatggtagtattaatattgttattctgagattattattatatgtttaatgcaaactaaagcaaattagtaaattgggatattctaatttcatcctcccttttgtccttgagaaccagaattctctacatgaaagaaaagaggtcctaatgtaatatatgttaagtaaaaactacagtcctgaaattaaattggaaataatataaactgatgaaaatattatgaagaataatatttctctagaatataaaaaaatgaagtattctttagtagctctgtctattgaaaaggcctagaaacagttaccaacctagtaacaatgaatactcctagtgctcatattgttatcttaaaatttcaacaaaagaaactagagcttctggccaggcggggtggctcatgcctgtaatcccagcactttgggaggccgaggtgggcagatcacgaggtcaagagattgagactatcctggccaacatgatgaaaccccgtctctactaaaaatacaaa

SEQ ID NO: 3492 - DNA, 405 bp, Homo sapiens
aactgcctttgcgcaggggtcacgtataatttcactggcctttatgtagtcacgtgactctactaactgcaggaaaaatgagaacatgaccttcctgtgtgtccaggaaaaggaaacaggttacagaacacaaagcattgcttccgttacattcctcctgttgtggggctggcgtgcatgcgtgcatgcgtgcgtgcgtgtgtatgtgtgtctgtgtctgtatgtgtggtgggagttggaggggcatgtgtgttaagcagagaattaacatctataaagaatcaacagtggtgcatgcctgtaatcccactactctgggaagctgaggcaggaggatcgcttgagctcaggaggttgaggctacactgaaccgagatcatgccattgcactctagcctgggtgac

SEQ ID NO: 3493 - DNA, 513 bp, Homo sapiens
gaaccaatgggtaaccactgttacttggcagaatatgacggattaatcaagagaaagtcatccactgggaagtagagtttgagataaaatttggctctatagaactagtgttggcttcttcagtttcctaggctgacagagaactgtgaacttacctacagggctatcatagtgggctttaattttcctgtatgtctaagtaatattgcaacgaaaaggagacacattgaagtttgacaacaatagaagtgtcttttcagcaatataattttaactatacttctataagcttaaataagttcccctcaagctacagtaacctctcataatctttgttatatggtattaaagaagctagagtgaaaagacatttgccatctgttaagtgacctcaaagctacctgaattatttggaatccatgagatcatggggcgatcactgagactacagacataaaacacgtactaactagataatgttccaaacctaagaggctgggggcacatgaaatc

SEQ ID NO: 3494 - DNA, 319 bp, Homo sapiens
gatttacctcccagctttctgttcatctcatttgtgggtagcccctgcacctgtgatttgtgggtagcccctgcatctgtgattgtggttttggttctagaactcacttccccagtttccctccttgcagatggagtcatttctccttcctcatttactccctacaggagtggctctgagcagccgtccttgggcaagcgtgcatgagctggagcttagccctgcccaccacccaccactgcctcttggaaatgtgagccgctccaggtcaggcatttaatcaccttgcattcactgagcccacgtgtaggtagggtag

SEQ ID NO: 3495 - DNA, 540 bp, Homo sapiens
taaagggacatgaaaatcaatactacgtgtgttgctcgataatagactaaaataagaagtaattttgtcttgttttgatttgtttttgccataaaggacattattaggaaatttggaggatttggtagcgttatatccatgttaatcttgatgctgatggttgtgcttggtcctttaggaaagtatttaagggttatgccgcaccatgtatttaacttaactctcaaatgattcaggaaaaatatgtatatgtgtgtgtatgtgtgtaggtatacatttttatatgtgtacaatctgtatatctatatatgggtatatacatgtatctctatgtgtgtatatatatgtgtatatatttattataaatatgtatatagatgaagatagaaagagagaagagagagagggaaagacagagagagacagaatgataaagcaaatatagtaaaatgttaacatcagggaagctgggtgaagggttacagaaattctttttactattcctgcatcttttccatagcattgaaattacttctagcc

SEQ ID NO: 3496 - DNA, 300 bp, Homo sapiens
tatttttagtagagatgggttttgtcatgttcgccaggctggtcttgaactcctgacctcagatgattcacttgcctcggcttcccaaagtgctgggattacaggcgtgagtcactgtgtttggtctaattttattacactatgatcagagatcatggttcatcatcttgctcttttgatatactgagacttggttagggctagcatgtggttaattttcataaatattccatttgtgattaaacatgttttttctaattttgggaaattagagtttaaaatcttctgctttgtggattt

SEQ ID NO: 3497 - DNA, 305 bp, Homo sapiens
tactgtaacggcagacattaggtcacttcacccagtactctccaaggtagatgttgtatttctactttacaggtaggaaaatggaggctaagaaaagttaatttgtccgagggccctctgatgatagtgaaactgggatggaacctctgcctgcttgcttctgaggtctgggctcctaactactgctctactgcctcgagccaagagatttacgccctattaagcaatttgttgtgcgataaattggaagacacagcagataagcaaacaactcaagcaaccaggtcagttcctggagtttctga

SEQ ID NO: 3498 - DNA, 253 bp, Homo sapiens
aaatgtttctgatgtgaataaataactgaattttacgtttttctctaattttagtgaatttaaacttagttacatttggctagtacttctatcttagcctgtctcaaaaatagcactaaagatgaggaataccaaattcttctctaaaatcttccacaatttcattggctgatctccaccaaatatctcctttgtattttattttcctgtctttaaaatggtgcttacaattcatagtctctaagtaaaaaca

SEQ ID NO: 3499 - DNA, 562 bp, Homo sapiens
gatctcactcccgccacagcttgggatcggtctctgctgttttacgtcctccacctcgggagcccccggtgactgtcacagcctcttgccctgtgatctgcaggttctgggagacgcacagctaagatgccaggacatcctggaagctgggaaaagatggagtttcactcttgttgcccaggctggagtgcattatcccaatctcggcttactacaacctccgcctcccaggttcaagtgattctcctacctcagcctcctgagtagctgggattacaagcacctgccaccacacccggctaattttttgtattttagtagagatggggtttcatcatgttggccaggctggtctcgaactcctgacctcaggcgatccacccacttcccaaagtgcagggattacaggtgtgagccaccacgcccggcctctcaacctatcaacctaatttttattcttagtagacacgttggtggtgagccaatcagatgttgttattgatgagaaaaagcagaaatgatttctgttgattcttgaaataaaattttttccaaaggaaaa

SEQ ID NO: 3500 - DNA, 210 bp, Homo sapiens
ggtattacatattcatagcatgccgcagaaatcattttaagtctatcaaaaacaactatattgtgcattttcaaataagcacatataaaagatgagctataagaagagagaaggatgctaaaataaataagtgaaagagaaaaatggctgggcacggtggctcaagcctgtaatcccagcacttttgggggccgagaggtcaggagttca

SEQ ID NO: 3501 - DNA, 298 bp, Homo sapiens
caagcagaccctcaggaaaagaaatactaaagattattcttcaggtagaagagccatgatccctgatgaaagtttgcagttagaagaactattttttaatgaaagaaataaacatagagataaatttaattggatattgactgtataacagaatgctatctcataaagtttaaaatgcatcttccatacaacagcagaagcatataagttgtgagttggataaattaattttaaaatattgtcaagtattttttttctccaaatagacatatgtaccaattatattagactctgaatt

SEQ ID NO: 3502 - DNA, 462 bp, Homo sapiens
aaatgacacaattctccaacctactctattgtctatgtgtacaagttttttttctattttacatactaactaaatttatacaaatgcccatatttgatatctagttagcaagccagacaagcttacatttcagtccttattaaatgtaaaactttaggcttacttagcctctatgagcctagtttcttcatttgtaaagtggttatagtatctctcaagggtaagaacaatcgaagtatgcaaaacccctatagcaaaagagcaggctaaatacatgacagttctttcctccatgtgggaaaaaggcacatgttttgaaaatgtagcccccatgaaatattacactttacagtacctaatccaatttcctaaaagggaacaagtctaacttttttcttcatgggatgtatttcaggtcaggggttgacaaactttcggtaaagagccaggttataaatattt

SEQ ID NO: 3503 - DNA, 327 bp, Homo sapiens
aatttcctcagtgcacagattccacgtgtctcctcccagtgaagaagatttgagttttaaaacgatctcatgctttctactgctatgccttcttctctcttgccacctctgccttttctgtctcttccactaactagctgtgggactagagctagtgaggtcatctttccaagctttcctttcttcatctactaaatctggtagtcactggttctcaaagtgtgaccctgagatgaggagcatcagcatcacctgcgagcatgtcagaaatgcagattctcaagccctacccagacccactgaatgagaaactccggggtggggctc

SEQ ID NO: 3504 - DNA, 110 bp, Homo sapiens
gctgtgccccacctccaccccaaaagcaaagtttcagataaatcctactaaaaggggggatttaaataaaatgcagagcttcataacacaacacttaaaatgcaaaggat

SEQ ID NO: 3505 - DNA, 434 bp, Homo sapiens
ttcagttgcgcgacctcggctcactgaaacgtccacctcccaggttcaaccgatttccctgcttcagccttccaagtagctgggattacagatgtgtgccaccacacccagctaaattttgtatttttagtagaggtggggtttcaccatgttggccagcctggtctccaactccagacctcaggtgatccgtccacctcagcctcccaaagtgctgggattacaggcgtgagcaccacgcctggcctacagtgtatatttaacatcgtattttggattaacaattccatttatttctttagagacacttacctaagacagtatgtggaagtcaaaggaaaatatattgagcaatattatttcgaaatgttactaatacattgtttgaaaataaattagtcctatgtttctgactttttgaacacctatgaagt

SEQ ID NO: 3506 - DNA, 503 bp, Homo sapiens
cctcccgaagtgttgggattacaggcataagccactgccccggccccagctgcatttcagattgcttacattcactgacctcaaagacctaattgctccccaaaactgtgtctgacccggtaatggacacatactgtcttctcactcagatagctcaggaggatataagactgttcctcagtgtcctcattcttctttgtaaacagctggtggaggatcctcttaatcacagggtaagtagcagtaccttccagagccaagcactgagctgcagcccagctatccacactgttacctgccacagttgggtgaaaaagagttcagaatggtgatgtgttttccccctagagaacagcctttggattgatacccaaggctgctacccacctgatatctcacttccttgtgccccactcagtctagaaatacaatttcttgtttaaaccatattgagaagaatcatattggctgggcgcggtggctaacacctgtagtcctcacat

SEQ ID NO: 3507 - DNA, 549 bp, Homo sapiens
gagtcacttattaaattcccaattctgctcaaggaggaaatttaggtcagtggttatgagccaagacagacctggtgtctaaggtcttccttaaaattagggagaccttggatctgttacttaatctctctaaactcatttcccttcatttcagatgtactgaaactagtatgtaaagcattttaatagtgtctggcacatagtaagcactctaaaaatgttggctatcacttctctattcaagattgatttcttagaacacagaggatataccttgattttaggaccacctatttcaatttgagatctgtattactaaggaaatagttttggttcagtccacaacatggtttttagttaatttgttgaataaaccccaacttgaggaagactaggcaatggaaattgtgtttctagcctgccacacttacttgggtacccctggcttggaagctcattagagcctcagaaagaaaaagaatttattaaatcaattattgcgcacagatgaaagggcacatcacttgctaattacagcagtggctagca

SEQ ID NO: 3508 - DNA, 519 bp, Homo sapiens
  misc_feature 284: n = A,T,C or G
agagactgtctggctgatgagagcaaaatatttactatctgattctttgcagaaaaactttgccgacgaatgtctagtctagtgctttacataatcattatttaacaccaacaataattaacattatttgctatagctaaaggaaggacatcaccttgcatgtgcactggtgggattgtgaggagtgggaaaagacaaccctggggtaattgtatctaccctccaaagcgtggtttttactctctatggaagggaaagttgtgttcaatttacatatatgactntgattcatgaaagatgatagtgatagttaaacctaggattctgttgggaaatcaaaaatgtttattttgtgaacattggtgtggttaattcgaacacattttcatttatgtcttggcagtgatgacttttaatatggcaaaaaggctcactaactttttttttccgacaaatgtcatgctaagtgacccctaattgatgtaataattattctctccaccaggggcaggtttttga

SEQ ID NO: 3509 - DNA, 526 bp, Homo sapiens
catttttgtatgtgtgtgtgtgtgtatgtctgtgtgtctgtgtctgtgtgtttatatgtaccttttggaagcactaacaagtgagaataggcaaaaataagaaaatattatcaaggggtacagttttatcaagcatatttcgatttttttagagtgaataattaagaacttattaaatggatagaagtgtacatccttagaagaaaagggaaagcacttttgtctaaagtgtggggtacttagtgggtgggatagtggcatgtaggctagaaaagtagatcatgaaagaaaatggaacatcttaaaggcaaaactgaatgggttgagctacactccttaggtgatgattgctttccttcttgcttggaatctgcaatcaggccaggaaatgaggaataatcaaagaattggcattgtctagccttgacaaaattcatgcatatcagcatgtggaaataattggctcttcacagtttctcagttggaactgagaaactagaaactggaatgaaaggccaatacagtc

SEQ ID NO: 3510 - DNA, 483 bp, Homo sapiens
accaatcagttaatgagcagatgtcacttctgcctactcattgtcaggttctgtgctcagacaagggtgagggtgacaggtcctgccttacagagttcaggttagtgggccagccaggtccaccaacaatccatcacatgagagctgaagagactggggccaaagtagtggccatggagttggaggagggagggatatgagagggacaagcagtctggaattaatcagacttttcttcattaaatgcatccgctttttccctaagtgtcattttctatcttacttcctacatgataaacaatccattgtctagttttgaactttaggggaaagagtgtgcgttcacccacatttgagtcataatttcttacaaaattagaaatgatataattttaagccttcagaaaacacttttattatgtatcttatgaagattacggcatagatgtggtagctggctccttgctgcatcagaatattttt

SEQ ID NO: 3511 - DNA, 556 bp, Homo sapiens
tcggcggttcagaatcttgaggaggccattgtggcaaaacaatggaataccttcacaagttatttttatttctcaatcacttctaatcatctccagctcaccccacactaaaaccctcatctatgtttgcatagagcatctaactagaacatcttcaagtgcaaagaggaatggatactaaaaatccttaagacatactgttggggaaacaatgcctacgatatagaaagaatcttaagaaacatgtctggcaaatatataggagcagaaaaaaaagggcattttcctccagtgagaaatctgtgaggctttgttgagccgccactgttctaagagttgtagagaatacaaatgtgattaaggtacatgccctgtcctccacgaggttatgggtgaaggaaaataagatagtgcacaataaccaaaattccaagtgaccgtgataagtcctatagaaagatacaaactgctatgtgatcacagaggagcaagggaggacctccggctgaggttggagaaggctcctagaagcagctgatcatcgtcctgtacttct

SEQ ID NO: 3512 - DNA, 477 bp, Homo sapiens
gagcctggggactttccacaccccctctatctagattcaaaacataacagtctattagtcttacatcctcagagaagactggaagactctagttggaagatcatgatcagcccaaaggaatagaccagtggatatgtcatgaggagcttttctgggaaaacttctcgacctgattgccctgtctggaagccacagttgacaattattacctaagaacctgaagcttactggaaacgtttattgtattgctcttgaacacaaacagataaccaacaatcacgagattctaggtacagccaataacaaacacagaaacaaaaaataaacaaaacaactgaaagtaaacagagtctatacagtgtgggaaaaaagtaattattaatttcctcagagagggaagataatacaacaagaacaaggtgtgatataaaatggatattcaaaaaaatagaattcttaaaaattaagaaatttatt

SEQ ID NO: 3513 - DNA, 342 bp, Homo sapiens
tacttaaatctccaacacctctcccaatctcattttcagatgtatatttcagtgataaaattgagccaaataaaagagaaccttcagcaacttatccgcctaagccatttggtgcaaggaggtctgctcttcctggttttcttaaacatttgcatatgttagggctgtgctttcttccactcagcttggactggagaagggataagggagaagcacagtggataatctccggcaaacagggttgataggaagagacatattaaaacacttctgtagttgaaggatgaagaaaaacactgaatgatgtgctgcaatgtcaaatattagatacagagaatctgc

SEQ ID NO: 3514 - DNA, 509 bp, Homo sapiens
tgaatataaattgaagtgaattaaatggattctcgagagaaaggcaaattcagagttcttgaaccatgaacataagattccagtgggaaggtaccaataaacttgtaggcttagttgtttagcaagagcgctggttatcagcttaattagtcagacctagtccaccttatcctaacgagcagtggctgttatagggaaaattgttattgtttttgcaaacagttggcctgaatttcacacttagccctgtccttactgcctgtgtgacatcaggcaagtcacttgaacctcttgaaactcaatactctaccatctataaaatgtacttagtgactcaggctgttgtaatcaaataggacactggttgtaaagctgctttgtaaactctaaatgtcgatcacgaggtcaggagatggagaccatcctggctaacgcggtgaaaccccatctctactaaaaatacaaaaaaattatccgggagtggtggcaggcacctgtagactcagcta

SEQ ID NO: 3515 - DNA, 504 bp, Homo sapiens
agaagctgattattttttatctaagttaaaaaagagagagagagaaagaaaaactcagggcaagaagtggagaataactgggtaggcaagtggtggcatcatccacaccaggtgttctgatgctacatcatttatgttttacatcccaccaaattgctcaccatacacacatggaggtgtctatccttgattggactgccctttatgttaatcactgaggtctctttggatatgtgaattgaacccaggatcaatgtgaagtcaccttcaatttaatggaagccggtagcaaaggaaggataaatttgctgggcattactttttcttttctgactcctgatgggctaagtagagaaacttttcattttaagctgatggaagcagcaaaaaatgaaaataaggatgaggtgtgaggggagggggcgggcattggtaaatgttcggatagctggtatattatatgggccaaatgatttttcaaaacttgtttgaattatttattat

SEQ ID NO: 3516 - DNA, 490 bp, Homo sapiens
catctgtattggtgagtatagttgtaatttcttttcattggggtatactattccattgtgtggatatgcaatgatgtattttatcactgaggcacagtcgagaagtttctagtttttggttattgtagtactgcaaagaatatcctactccatgtctttggggaaagttgcatagttcctgggtcctaaggtagcacatgctaccaaagacagctttccaaagcagtatgaattgatacccgcaacatcagcatttgaaagttccaggtgctccaagttctcagtggcacttggcattttctgtcttttccatcgtaatcattctggtgggaataacgtgtgaggtctgtttactaaggtcagttatttagtatgggggtgttgaggtttcaaaacatgaccctggcctacctgagacatcaaagaaatgcagcatttgaaaaaagaaagcagacgtgaaagaagcaatgcctagaacttaaaacattta

SEQ ID NO: 3517 - DNA, 550 bp, Homo sapiens
gaaaatcgtggagacagtataaacaatacacttgatcttagccaaaaagctgagaagcgataaagagtatgaacaataagcagcaaggaagatcacatactgctgctcctgatattttttactttggagtatttcctaggaaatctgcagaaaaagaataagtaattgtcccacggaaaaacagcaaatgactcagtgatcttgcacgtctgttccagattgtaattcctagctaaaggctttatccgcagattgatgcatcagagaagcctgaggatctaactttcaatcttgcctcttctgctcagatacctattaagaaggaagattacatctcggctgttataatggcactggaaattatggaattagagttttttggcactaaaaaattacttgtatggaagcaattatacatactgcacctacaaatcttccaaacctttaatacctgaaaagttacatagcttccagagagcggtttagaacttagttatggtgtttgatataaacacctcccaacacccactttgcatatcatatggcgagt

SEQ ID NO: 3518 - DNA, 553 bp, Homo sapiens
accctctgcttttgtgacatttcttgcattgagctcattctccccttctttgataatttgcttgttatgtccccttcacccagagtttcttcttttctttgataatatgaacttttcattgttttttaaagcttagcttaacttttcttcctccttaaagctttccctaccctcacccagaactctctttttattcattaaattctaggagcaatgtcagggcaattagcacttggtcagtttctagtgtttcaataacattaataacaacaaacagcagttttcactaagtgcttactgagtaccaatgttataaccaccggacatgcatgtactattattatctttattttatagataagaacattgcaatccagaggactttagtagcttaataaaggccccacagctggcaagtagtggatctgggtaaacccagaccattagatcctagagcctgagctattatccattggcatttctgaatgtgtggtcttctgaccatgtacattagaatcaccaacatggatactgttaaaaatgcagattactg

SEQ ID NO: 3519 - DNA, 558 bp, Homo sapiens
ctgagatgtgtgagcagagaagatgggggagaggcaacatgtgactatgacagagaggagagacaggtggataaactgtcttcaacacagacaatcagcttttgctcacaggtagagccaattagcccagagttaatgaagtcacttaatgaagacctggtctaacattctacttgcatttccttttccttcttttgtttttctgtttttttttaaacagagtttcactctgtcgcccacgctggagtgcagtgtcagcgatctcagctcactgcaacctccacctgccgggttcaagtgattctctctcctcagcctcccaagtagctgggactacaggcatgtgccaccatttttgtacatttttggtagagacgggttttcaccatgttggccaggctggtctcaaattcctgacctcccgaagtgctggaattacgggcgtgagccacggcgcccagcctctacatgcattttctatggcaatatttgttatggacttttaacacgttatggacttaaaaaaattgatcacccacttcgcaggttatcattttt

SEQ ID NO: 3520 - DNA, 450 bp, Homo sapiens
gcagctttggaggactcagaagatcttccccacacccaggccttggccggtatcaggtagacatgtttcccagttaactcacaacccaacagccacatatcactagcagagtgtgatgtgcatctctcgatttctagatgcaattttgttttatccacaaggtatttctttaattctccagcagtgcctttactgagtgagatctactggcaagtcttctgtagctttggggtagcatttgggaaagtaaagcaattggatactgtccttttaaaatatcattcaattaggtcttttgtaatacatacaacataacgagatagccttaccaactctaaagaaatttctagtgcatttcatcaaaggcacaataatggaaacatcgattcactcctcaccacaaacatctccctttgatgctgcagttaccttaatactagcacttttcat

SEQ ID NO: 3521 - DNA, 508 bp, Homo sapiens
atgtgtttaaaaaatatctttctggtttactagggtattcttcaaaaaaagagaaaagattaaagctgcacagacatgatgatgtaaaagctagtagcttctcaagctgtgaaaggtctgtggtgcagagaatagctccctgtgagctgaattttgtttgctgtggtgcagcatgggtttagatcctacctggttagtgaaagagataatgtgaagtcattgcatttgcatttgtcaaaatcctagttttccacttacctaatagttttttggttgtttgtttgtttcattttgtttttaaagacaggatcttacagccggggcctgtaatcctagcactctgggaggctgaggcgagttgattacctggggtcaggagttcgagacacacctggccaacatggtgaaaccctgtctctactaaagatacaaaaattagccaggcgtggtggcacgtgcctgtaatcccagctactggggaggctgaggcaggagaatcacttgaacc

SEQ ID NO: 3522 - DNA, 499 bp, Homo sapiens
gaagttaggtatggccatgtgacttgttttgaccaatggcgtatgagcataagtggcatgtatctcttcctggtagcagctttaagagccagcctgtgattggttccattccctctgtcacagagactccaatgctccatgtgtgtcaatctgagtcccaaggggagggtcatgagtaccaaaacccccagacaatccatgatggaaatggagcatgagtgaaaaatacatcgttttattttcaatcaccgtgagcctgggatcgcttgttattagagcatagcctattctatcctgatacaggaaaggaaatcacagaggctaaattagcttctcaaggtcacattactaagtgaaagaaccaaggtttgggctctgacattctgtctccggagtccacctgtctctcacattagtacatagcatacctagctagtggctccaaattggagcttaaggagaagaatcaaaagctctctctaaaattctgagtgtgttt

SEQ ID NO: 3523 - DNA, 551 bp, Homo sapiens
acctgaggcaggccagggactagggaaggtggcagctggacaaaggtatgaaggaaggacgagatgaggcacaggtcctggtattggaaagaggcagaggtacctcggaagcatgccatagaggttagacgggacctaagagggcatctggtccaaccggattcgtgttaccagcgagtaaactgaggccaggagagagactgctacgagctgctccagcctatcacctataaagactacagtccctttgtaaaataccatacagctctcggagaactcccagttggcgctgcaggataaaatccaaacttgttggcatagcattccagccacttgttcacttacctttcccatttgagctcctaggaataaacagaaaaacatttcattttctaaatatcaccagataacttcacttttggtaacttgaattattaaaaaagtcctaccgtccctcatctcttgccacttccccaacattactggaggctctggctacaaataatttgttttccttgactactcaactttctttggattatttacttttt

SEQ ID NO: 3524 - DNA, 558 bp, Homo sapiens
aacgggcggtgccccgtgtgtttacggtagtgcctggtcagttcatgtgagcgggcgaatttccatccacagccgtcccagtcacagtggtaaggtttctcacctgtaaaggtaaaagaaaaaaaaaattgacgctattgctatatcaaagaatcgccccttttaaaaactgaaggccagatagtaaaccaactctgaccctatcctaaagaaatccaggaatgtctttataccactgaaggggtgtattgaattccatatcataaacagaaatacattccgtgcttaagtatttggtcttggttttagggggtcaagttaagcacccaacccccacctacacctatactaatgtttcaccaaaaacacacaaacaccacctaaacctatactaatgtttcatttgagtcaaggcatctcagtggtggaaatgaaatttggaaattgtgattggtagtgtgcccaaaccatgcaatcttattcctactacgactggggataaaaagccacaggtggctactttttttttctttacctttacgttactggatgctgcac

SEQ ID NO: 3525 - DNA, 489 bp, Homo sapiens
  misc_feature 276: n = A,T,C or G
tttacttgcaaaattatattactcttattttctaattttaggataattgggaaatacaagacaattattataaattccatgtaatatagtttttgcacccaaagtaactctgatgattcctcttttctccaattttttttgccttccttctacagaattaaaatatcagaatttatattttaaattagtaacaacttctgtttaatttagaagtcaaacatctgtctcaaaggttagtcagaatcaccaggtaagttttatttctttaacagagantgtttaaatgttcaagaaaatgtcaagatttgtctgactcagttatcagtaagcaattcgagatctttaatttattcacagaaaatgtgagtttccaaatacaagtaaaaaattagatgcctgaaaataaggaggatgtaaggaaaagaacgcttaaatttaatttaaatttgaaggagatggtttgaagagatttttgaaatggtgggattt

SEQ ID NO: 3526 - DNA, 548 bp, Homo sapiens
ggtgagctattcaatcaacttctttttcactcatgcataatttgatctgatttaaaattgattgtcatctaattaatcagacctagatagtgattcgagttcattcataaaccaacgctgctgagttcacctatttggattccatatatccagggattactcaaatggcttgagtatgataatttaatttgctgatgctaagactagaaaattgttcccagtaagctgaagtcagggtttgttttgttttattttgtttttctcatagctcccttatgaattattttttccaatttcccagtcaaaaggctgaacccacttattacagtgaatgtctaaaccaggcgtgtccaatcttttggcatccctgggccacactggaagaagaattttgttgggccccacataaaatacactaacactaatgatagcagatgagctaaaaaaaatcataagaaaatctcataatgctggctgggcgtggtgactcatacctgtaatcccagcactttggaaggccgaggcaggtggatcacctgaggtcagga

SEQ ID NO: 3527 - DNA, 312 bp, Homo sapiens
tacttaaatctccaacacctctcccaatctcattttcagatgtatatttcagtgataaaattgagccaaataaaagagaaccttcagcaacttatccgcctaagccatttggtgcaaggaggtctgctcttcctggttttcttaaacatttgcatatgttagggctgtgctttcttccactcagcttggactggagaagggataagggagaagcacagtggataatctccggcaaacagggttgataggaagagacatattaaaacacttctgtagttgaaggatgaagaaaaacactgaatgatgtgctgc

SEQ ID NO: 3528 - DNA, 548 bp, Homo sapiens
tgtgtatgtgtgaacagaagagcaaaccgaatataaattttactaagcatccagatgtttttagaaatttgccaccacatacttgattgaaagacattttcactcaacacctgtttttgttgttgttgttgttgttgtaccaactcagggtaagacaaatcaaatttatagaactggaagggaatattttggttcaaacatttgagtcaatccacaattatgtgccacagtcaggcaagggaaagaaataaaagagatccaaataagaaggcaggaagtcaaactatccctgtttgcagacaaaatgattctatatctagaaaaccccatagtattggcccaaaacctccttcagctgataaacaacttcagcaaatttcaggataaaaaatcaatgtacaaaaattactagcattcctagacaacaatagcagccaaattgagaaccaaatcagcaatgcaatctcatgcacaattaccaaagaagcataaaatacctaggaatactttcaaccagggaggtgaacgatctctacaatgagaatgac

SEQ ID NO: 3529 - DNA, 465 bp, Homo sapiens
caggtcctgggtggacataactgtgtacaggtaaggagttgacctgtggggagggtgagcagtcagcagcccactggggtcctgagaaagttttctggaaggaggaggccgaggggatggaaacttaaagaagcgacctcacttccttggcaacagaccctaacagaactaagaattctggtaaccaggccaggcacgttggctcacacctgtaatcccagcactttgggaggctgaggcaggaggatcatgaaatcagaagatcgagaccagcctgaccaacatggtaaaaccacatgtctactaaaaatacaaaaaacaaacaaggtcagcaaatcgagtccatcctggctaacacagtgaaaccccgcctctactaaaaatacaaaaattatctgggcatagtggtgggtgccagtagtcccagctactcaggaggctgaggcaggagaatggcatgaactc

SEQ ID NO: 3530 - DNA, 516 bp, Homo sapiens
atgagccacgagtggaagtgaaatatattccctcttgagccaaggcatctgagagctggtgcctaacgcttctgtgctgttttcctccagtgcagcaaatgttaaaccgtgcattgcagatggtaccgttgtgagatataaaagccccaatctctgaactgttattgcaaggataccattgaatgcagtttagtttcataaggcagtggtcttgtatataaaacatcactttctatttgttagcactgatactctagggattgtttgtactgatgttccacagcataacatacccatccaaccaatcgatgcaggtattacccagattgacacatttcttgaggtgggggggtgggagctctgtaaaatcactaaaagattaaaaaagatttctgtcataatacaaagaaaattcgggccggacatggtggctcactcctgtaagttcagcactttgaaaggctgagttgggaggattgcctgagtctaggagttcaagatcagcctgggcaacat

SEQ ID NO: 3531 - DNA, 551 bp, Homo sapiens
tccaattcttgataaatttgctttgaggtagcaccaatatagtcaatttatgactctgctttctacatattttaaatcacagattaaattgataacttaattaaataggctgacaggcagaaaatgtaataattctccagtcttctgactcagtgaacattctggcgtgtcacttgctttggaaattaatttattctaactggaggaaaagaattagaagcagcaccaaaagcctctcttcgtaagtctacatgaaacttgaagataggttacaaatgctgaaacattagaattgagaaattatctagataacctagtagaaatgctatatactttcaaatttaggccacttaaaaaaaatctaaagttttatgatgacttccaaaaccaaacctacaggtttccttataggcaatactgtatccaacagagcaatcaggctcttttcctctgaaatcagagaactgggcgggatcttttgaaggtcccttccaattgggcaagtaattcatttctctacatttacacacacacacatacacacccccaaa

SEQ ID NO: 3532 - DNA, 555 bp, Homo sapiens
ttactagtatagtcggagaacgcattaaccaatactacattgtataaaaagcactacctaaaacaccaataaatatcacactagggcatgagaaaaaaaatgttaaagaaagattatttatttttgttgcttacttaacctctgaagggttaaaagccactgatatccaaaaaggaaacttctgtattctaatttatgcctatctatgtctcaactgtcagtaggaatgcagaaggtcaactcaggctgcaccaataggtgtttcataagctaaatggtgataaagaattagatcagccaaaaagccaacctagaactgggaatgaatacgcactttcagcaggccattcctcacaggatataaattagaaccactccaagatatagtaggtgttcactcaagtttctctgtgggttttcatagcccttagactgttgcatttgaagtgaaagctaataaaagtccagaaacaaatttgaaaaggtattggtaccaagagattaattcaagagtttttagaggaagtaccctccaccttgaatgcctttggaatg

SEQ ID NO: 3533 - DNA, 235 bp, Homo sapiens
gagctggttccagtatacaactgacactactctagtaagaacttttctgcctcctctctccatctttctgtcctccccatactccaatactagaagggtcagactttgtgattagctaaaaggagaagaaccaggaaagaagaaataatatgtagaataagttttagcagtctcagttctctgagagccctacttgaaggagagtgagttagtccttcattcaacaatatagaca

SEQ ID NO: 3534 - DNA, 561 bp, Homo sapiens
tgctgccatgtctgtgttaagagtagctaaacttcccccaaatgctttgtgtgtatgtgttgtatgtcaaaccatttgagtccccttcaggcaggtagttcagttcagagttggtttatcaagcttatgttgcaaaccgtgtttctggagagactaaatgaaggcagtgaatgaaaacctctgttaatgtttagtgagatacaagaataaaaatcacatttataggaaatggccattgctggttatggaacatttttcactagaaagttaattccataaatgtaagagctgacttgtgttagcacctagagtacttttcgtatatgcaatgtggtcaaactattttttactgtaacctacagtaagatacatatttatttcaaaatcatgcctgtctcccctgacacacatatatgaaatatatgcatatgcctatattgataaaggaaaccagagtttcacaaaacaatgtttactcactctgtgcagtctaatagtttttattctattaagatctgatttctggctgggtgtggtggctcacacctgtaatcccagcac

SEQ ID NO: 3535 - DNA, 513 bp, Homo sapiens
tgaatataaattgaagtgaattaaatggattctcgagagaaaggcaaattcagagttcttgaaccatgaacataagattccagtgggaaggtaccaataaacttgtaggcttagttgtttagcaagagcgctggttatcagcttaattagtcagacctagtccaccttatcctaacgagcagtggctgttatagggaaaattgttattgtttttgcaaacagttggcctgaatttcacacttagccctgtccttactgcctgtgtgacatcaggcaagtcacttgaacctcttgaaactcaatactctaccatctataaaatgtacttagtgactcaggctgttgtaatcaaataggacactggttgtaaagctgctttgtaaactctaaatgtcgatcacgaggtcaggagatggagaccatcctggctaacgcggtgaaaccccatctctactaaaaatacaaaaaaattatccgggagtggtggcaggcacctgtagactcagctactct

SEQ ID NO: 3536 - DNA, 486 bp, Homo sapiens
tttttaattggaagtattaaatttatctatgtaactgcattatttcctaaaaggtcacattttaaaaaaattttaaaaaacattagaagattgagtcattataatttatttcttaaattttaattatatgtatatctatgaataatttatgtataaacatatatatttaatgtcaaaccttaggaaaatgtatacaccttaaggaattatcacaaaacaaatacctccacaactaccactcagaataacatgtttttttttgcaaaatagattactacttcatttgtcttcaaagatacccactatttggagtttacttttcttaatgttttgatatttatatacccactctgttgtaggccaataatgcctctgaaatgcatgtccatgtcttaatccatggagcctgaccttatttgaagtagggcatttgcagatgtatttaagacatttgaggctgggcacagtggctcatgtctgtaatcc

SEQ ID NO: 3537 - DNA, 558 bp, Homo sapiens
ttacttgtataaggaggattttaaatgattgtgtcattctttacttaaaattagagaagatccatttagaaaatatattaattactttatcctgaacacataaaagtatgttcaagacagaaacttttaaaatagaggaaaactagggagccctctttgtgtagccctctttgtgtagccgcagtttgtcggtctcataaaatagaagaaaactcataaaatagaagaaaactagaaaaagacaaaactcattgggaggatagtttaacttcctctgtttctatttgcatgtcctttatctctttctcttgcctgattgccctggccagaactttccaacactatgttgaataggagtggtgagagagggcatccttttcttgtgccagttttcagggggaatgcttccagctttcgcccatacagtatgatgttggctgtgggtttgtcatatatgactcttactactttgagatatgtttcttcaatacctagtttattgagggttttagcaaaaagggatgttgaatttatcagaagacttttctgcatctattg

SEQ ID NO: 3538 - DNA, 544 bp, Homo sapiens
gtttctacgtatgagaacgaaaaagggaatcgccaaagacttgtgcctttttcccatcgaagatgaggcattgtcttcagcagaggctcagatctgggagcaaagggagtggaaacctgtctgtaaggaacctcaacccacaggacacctgagcacgtggggactttaaaactcctactagtcagagttttcaaacgtctaaataaataatcaggaaaatattagtttttatactattaaagaaaactttaaaaaaaataacccaataaattttattcatttcataagctaagtaaattttacttagaaataaaataatcataatctagagaaacctctttatgcctcagcaatgagatgtacagaattctacatatttgattaaactggacaaacttttacctgtaacaaaaactagcgtaactgtatatattgaaagtaatactcgtttaaatggctggcttcaagagatatcagagatataatttcaataagtctctctctctcactcacacacacacacacacacacacacacgtgctga

SEQ ID NO: 3539 - DNA, 562 bp, Homo sapiens
gtatttatatacacacacgtatatatgtatgtatatatatacgtacgtgtatgtgtgtgtgtgtgcgtgtgtgtgtgtgtgatgcctcagcataatgtttaacaccatggctgaaattgattaagttttagcttataattataattattttagtttcttttttcatttttattgctcttacaataaacaaatacttcttgtttaagagattcaagtaataaagtatacagacaaaatgtaaatgctccctcagtcacccccgccccaccattttttttagctgttgaaaaccattgtgggcagggcacagtggctcacgcctgtaatcccagcactttgggaggccaaggcaggtggatcacttgaggtcaggagtttgagaccagcctagccaacatggcaaaacctcacctctactaaaaatacaaaaattagctggacatgttggcatgtgcctgtaaccctagctactcaggaggctgaggcaggagaatcgcttgaacctgggaggtggaggttgcagtgagctgagatcatgccactgcactccatcctgagtgac

SEQ ID NO: 3540 - DNA, 535 bp, Homo sapiens
gaatgtaactgggtgaagagtgttgggaggagggaatgaaggccacaaatgataaatcgactccatcattcttaccttcttaagcctttagatctgctcttccacattttactagggatgttacagcatcttaatctcattaaatgtagattgtcaaagagtccaagtgtcactcaaccaaagtaaactgttggaaccatttccagctaacacattgaatatgaaaacactcataagtgcttcatcaatatattttacccttttctgaattattttgcagcctgcttggtctaacacccttagaatccattcgcagtgttcctcattttcactctgtgagtgttccagtgtacttagagaatcctctccacactgcagtctttgttgtcatctttattcccatagtgctgaagagcagcagctgcttgatctcctcaggacctgcgtcagttggcatttcaccacaatcaactccaaataatacttgattaatcataagccagtgcatgattaatccatttctcattgacaagta

SEQ ID NO: 3541 - DNA, 534 bp, Homo sapiens
ggaagatcttggtttggatcctgacttctcaattttactagttgtgtgtcctccagcaaatatgttaagtttttcatctttaggaatgagtgttctcatctgtaggatgggacaatgattgcgtccacctcattgcgttattttgaggattaatgagaaaatgcatgtgaagtatcaggcagtgtctatgcatattaagccctcagtaagtgcaaactggtgttattctacaagcatcagatcccttagctataaaatttgacaatgttgtactgacttcagagtaattttattaaatgagcttaagtatttacagtactgatcacagcacctggtaaaaatgcgacaggtgatagctgttattaatattagtggtagtgttttgcaataagattatgaagatgaatattatgtgaatcattggtctaaatttgtcttttatctaattgatttgatataatggtttcgctaacttaactgattacctccagtactaggccttttttgaaaaatgaactgatttattaattataa

SEQ ID NO: 3542 - DNA, 538 bp, Homo sapiens
aggattataggcgtgagccacctcgcccagccttaaagcctattttcaaaagaaacaaaaatccttaacaaatagggatgattataaccagaaaatgtgcttccaccagaagacatctgtcaccagcaccagtgctttatgagatcagtgagacaaacccaggtcttaaggcactttcctaagcaccacagaggaagccccaatgacattgctcaaggtaaacagaggcctggactgattccacatgggcaggtgaggctctccctcttcctgaggagccaaacagacacaatcagaaccaggaatatcctctgaatctcccaatttcctatcaaaatcactgtagcattcttccttaaagtgaatgacaaagccacaatcttttggcatgtgttcagaaagcaaaaggctttttcagaaaatctgtattcctaacaaaagacatctgaaaaatctgctaactacaaatgggtacttaaaagtcccttatgaacttaagctactttaaggacaggacattggtgaaaaagtattctgg

SEQ ID NO: 3543 - DNA, 479 bp, Homo sapiens
ctgagtagctgggattaccagcaagtgacaccatgtccagctaatttttgtatttttagttagagaaggagtttcgccatgttggccagactggtcttgaactcctggcctcaagcaatctactggccttggcctccgaaagtgctaggattacaggtgtgagctactgcgcccggccagacttagcattcttaatcacaaaattcttatttccatttcctggcagaattatgttttagttaatgtattattggggataatttcatttgtatgtgatggaaactcagtttaaaccagcttatgcaaaaaagaacattgactcatatactatgaaattcagaagtaggctgggcgcggtggctcatgcctgtaatcccagcactttgggaggctgaggtgggtggatcacctgaggtcgggagtttgagaccagcctgacgaacatggagaaaccctgtccctattaaaaataaaaaatt

SEQ ID NO: 3544 - DNA, 461 bp, Homo sapiens
ggaagtttttcaagtgcactgtgttaatttgcatacttaaattaactgtgaagtttaagtgatgcaatcttaaaaagcaactgcatactacactgggcacactgcccatagggtagccctaaaggcaactatagaatgtcattgtataaagggatatcagtgaactcgctggaagctggggcttctttgtcttggactgtttgcataacaaacacatttttttccttattctatttatttatttatttttgaaatgggggtcttgctatgttgcccaggctggtccctaactcctggcttcaagcaatcctcctgtctcagcctcctagactactgggagccattgcacccagactacttttctttaaattgtaaatttacttgggtcaggtggggtagaccatgccagtaatcccaacactttgagaagtcaaggcaggaagattacttgaaggcaggta

SEQ ID NO: 3545 - DNA, 406 bp, Homo sapiens
caggctactaaagacaaatgaaaattttaaaagcaatcagtgtaaaacctagattatttacaaaagaaacaactagacgaatagaaaaattctcattagctatactagagtccagaaaacaataaaataatgcctttaagcattagaagaaaatagttaccaacctgggaagttttctctagctaaattattattcttgagtaacggtaaaataaagacaatttcaaatgaatcaaacctgagagtttatgactcatggtctttccatcactgaaagaactacaaaaggtgtacattagtaagaagaaaatcaaacccagaagaaacagaatgcaaaaaatatgctgtagttttccattctactccatgtctcataattcttcatattttctatttcttttttcct

SEQ ID NO: 3546 - DNA, 515 bp, Homo sapiens
gctcatcaccctgctctgattaagcctagctttcctcaaacattagcatctagcgcgtcacacacactagtttttccatgtaacttcattttatcagaatacattagtagtgcttaattgtctcattcaactataaaattttaacccatgttgggagttaaatatctgggagtgatagaacccatctgataaagcactggagaggtgtggccagtgaaacaggaggggacccatcagggaagaggggcagcttggtcagtggaaagcacagggcgccacggcaaactgcccgccaaatccagacaaaggcttggcaagcaggaggggaaactcagataaagcccaggtgcatttcattcaaagcgtgggcagacgataacaatgacaaatgcagggcaggcggaccacacttgaaaatgtaaagcatgtaggccaggcatggtggctcacacctgtaatcccagcactttgggaggcagacgtgggtggatcacttaaagtcaggagtttgagac

SEQ ID NO: 3547 - DNA, 540 bp, Homo sapiens
aaagacaatataatgaaaagtagaattccaaaaaaaagaccatagactttcttgtgctgaatatttttattttctgaaactacaaaaagctaattattaaagaaacattaattgtaaatagtaaattagtttacaaaatattaccaagttaaaaatacaaacacacacacacaaaaaaaaacacaaacaagagcagccaaatatactacataactaaaaagctgacccaactctgattactgtattgaatactatcatcacaaaacaactctcattttttccacctggccctaaggaaagatccctgatgaccacacaccatagtttaggaaaaaatgagtgaagtggttcattcaaataagagtagaactaaataaaaaacaagaaaaaagttgtaaatgttgatcatatgcattaatgctacacatgtaagaaaaaagacataaaaataagtttttggctaaatagcacctttattttccctaacaaatcttagttcaattctgaagcctcttatttttatcataaaagctcaaaaat

SEQ ID NO: 3548 - DNA, 492 bp, Homo sapiens
agggaggtaaatcctgctaacagcagagcagaggaagttgaaatgttgtagctgtctacaggaaaatgaagttaaaaaaaagatttttgtcgtccttgtttgtttgtttgagacagagtctctgtcacccaggctggagcgcagtggcgtgatattggcttactgcaacctccgcctaccaggttcaagtgattctcatgcctcagcctcccaagtagctgggattacaggcatgcaccaccacacccggctatatttttagtacagacagggtttcactgtgttggccaggctgctctcgaagtcctgacctcaagtgatccatctgccttggcctcccaaagcacttggattaccacgcccagttcctcaaaaggtttttgaatctcaagaacccaaataggctgtaaaattagttgcagaaaatacctctgaagcttcaatgtttatggagctgaaaagtggtgatctgattgacactctgtatgttaa

SEQ ID NO: 3549 - DNA, 470 bp, Homo sapiens
  misc_feature 370: n = A,T,C or G
tattcctcactacatttcacgacagttacttgaaatatgcactaaacacatatgtgtaaaatgtacttaaatggcaaaccaaagaattaacacctgattctaaatctgacaaattaataaagtaatatttacttatacggttataaaaggttagtgttataataaaaaatgtcctcatttgtcctggtcaagggtgtgaatggatatgaaataagaaaatatgaaaaagtagtattgataggaaaagtattttccaacattgcaattgttatgattttcccacaatattatttacagaagtagatttacaattttgccatttgaaaaatattgtaactgtgaaatagttaacattcagtttaaagtttgngatttaaaatgagcctaaattgacgaaacagactgccttacctttaatttatatgatggaacttgttttcaggacagaatataagatatacagattgagc

SEQ ID NO: 3550 - DNA, 534 bp, Homo sapiens
taagagcttctagcttctctgaggctaataatggactaaatgaccaacatttagttcattatttttcccacccatctatgttttggggtgcattgtttgaaacccctcaaatccaattcccaaggcccctaatcccccactccccatagcattctcagactagtagccacaaagggcatgtgtgaataaatacacaagatcaccttgggtattatacctcttgaacactgccccttgctagatatacatcttgggaaaataacctcagagacttgagctgctccaaacaacctggcacaaacattgaggtttgaaatgagactaagaaacagactctgtaagtattattaaatgttataagcacccccgctagagaacaagtatagaaaggaatatgagcctataaatattccagaggtagacaaaccatgtatgtatatcacgtatattttaaaacaaaaaaatggtacgctggttttaggtcaaaaaggcagatgaactaaaagaaaatacactccttcagcagcaattcct

SEQ ID NO: 3551 - DNA, 563 bp, Homo sapiens
aaggtgagggattggccagttctttcatgtggagggagtgagggagtttctgtaggaaccttaactgtgatgtccctggctgatgcgggcttggaagtaacaacaccttgtgcttatgcagcctcctgcttctcagcagttcaagtgcttcccagacattatctcactatttctcaccatcttcttcggaaagtggctgaaggcagctcttgttatcataccccggcacaccctgcaccagtgggttaaatggttttcccacaaccttccagtgagagtcaggaccaggacccctgtcaccagatttagctttccagcctgctcattgcctcatgcagctttcaggacccattatttgcctcaaggagaagggaagttcaccatcactgttacaacaatttgagacatttgctggggagccctgggaaaggagaatcctctttccttctccaggcatgtgcagttgatgatgtatataaactgattatagagaaaaatgttaagtatgtgtggctcatcctatggaggaatctgccaatacattcgacatttatggatgtcag

SEQ ID NO: 3552 - DNA, 567 bp, Homo sapiens
aagacaaaaattaattttaagatcaacttctaaatattaaaaagacaatataatgaaaagtagaattccaaaaaaaaagaccatagactttcttgtgctgaatatttttattttctgaaactacaaaaagctaattattaaagaaacattaattgtaaatagtaaattagtttacaaaatattaccaagttaaaaatacaaacacacacacacaaaaaaaaacacaaacaagagcagccaaatatactacataactaaaaagctgacccaactctgattactgtattgaatactatcatcacaaaacaactctcattttttccacctggccctaaggaaagatccctgatgaccacacaccatagtttaggaaaaaatgagtgaagtggttcattcaaataagagtagaactaaataaaaaacaagaaaaaagttgtaaatgttgatcatatgcattaatgctacacatgtaagaaaaaagacataaaaataagtttttggctaaatagcacctttattttccctaacaaatcttagttcaattctgaagcctcttatttttatcat

SEQ ID NO: 3553 - DNA, 560 bp, Homo sapiens
gagagatgggagaaagatgctagaagagaagggctgtgggggtagaggcaggagtagggacacagacggaggtctggggagatcggggctcgaatgtgcccttgaatggcaaacactttggcaggagtctagctggtgaagatggaagatagtaactgcctgctctcttagcattttggactaagttcttctactctcttatcttcttaatttcgcagcaaacaatggactattgactaagctttcagagctgtgggtgttctcagagggaggccagccagaacaccagcatctccggcttttcttccaactcccaagttggagctccatctatcagaaatatgaaaccctggaatcttcctcctcctcacttctctgccttaaggtgcgggcagctggggaagagaacattgtgcccagggagagtatattgtgtgagtgtgtgcacttattcatgagtgtgtgcatgtgtatgagtgtgcacaaatgagcgtatacatgcgtgtatgagtacatgtgtgcatgcctgggagtgtgtgtgctggcagtggtggtgtggt

SEQ ID NO: 3554 - DNA, 354 bp, Homo sapiens
ggtcatgagagtttgagatgcactgtcttaaggcctgggtgaaatagtcacaaatcctggcttgtcctggggtaaggctgaggccagtctagctcagcaccttgatttttgtgggacctgataattcttatctatttagtaccctgggcctttaatagcaccttggttacaacccagataaggaacataggctcttcttgacccaccattttgcatgtgatttgagggcacattgaggggaggaatgtcacagaactgcaaaccgataatttaaaatgtaatattcccctttcctgtccctcagtcatttctaacaactgaagcccccggtgatgtttctaggcttcctctctc

SEQ ID NO: 3555 - DNA, 522 bp, Homo sapiens
tggtatatgtagagtgcattattcccccaaactgcaaagtagaagggagtattatttgtgttcttagagaaatttaagaggtcctcactcaagtactaattctgtttcttaactaattttaacttgctttttaaaaagcaaatgtttatataagggttattataagctagtcactgttatgagtactttataaatattaactaacttaacatatatctttataataaccttggaaaagttacttcagcactttcgttctttttcctggtctttaaacagagacagttggaccagatgatctccaaagcccactccagctctgcaatgttaaggctttctaactaacacataacacatagttatgtgttaagaaaagttagataaggtcagcttttcctagtgggaacagagatgagagtggagccccaaagacagtgcacagtagaacaggaagtattaaaagtgcagagtctgtatgtagcacagtgtcagtttgggagggaaggaaggcagcatcaaatc

SEQ ID NO: 3556 - DNA, 354 bp, Homo sapiens
tatctagcagatttgcataaattaattaatgtcaacagctacaacaagctgcagcatagcagcacctgggaaaatctttactcccaatgaaataaggtagtgagcctgcagggcagagagatattctatctccaaatacatgccaaggtcaccgtttacataacacaagtgacaacacccagccaaatcacagtaatgcatgggtgtgtaggaggggtacatccaggaaaatatggtgaatataaagctgtttagtgaaatccttaatggcttttcaggtgtttatattttagcattgcattgagatttctgtttctttgcactacattactgaaaataagtattaaaatttat

SEQ ID NO: 3557 - DNA, 395 bp, Homo sapiens
aaagggaggatataaatatatttaggtaggcaatagcagtctttattacagggtcccatttctggttaacaggaagtctgtgaagagtgactagagaaaatggataggaggaaattactcagaattcatataaggaaaatatatttccagatggatggactgctaaggatcaagcataatgaacaagaaaggatcccaccaaggcccatccttataagatttcagattactggacacaaagagaagatccaggctaagttcacaagcagtggatcagggctaaggatggcaagggactctcagcagcacccctgggaactagaagatagtggaacagcaccgttaaaattctcaggaacggccaggtgctgtggctcacacctgtaatcccagca

SEQ ID NO: 3558 - DNA, 366 bp, Homo sapiens
ctgcaacctccaactccggggttcacgcaattctcctgcctcaactcctgagtagctgggattacaagcgcgtgccaccacaaccggctaatttttgtatttttttttttggggagacggagtttcatcgggttggcaagtatggtcttgatctcctgaccttgggatctgccagcctcggccttccaaagtgctgagattacaggcgtgagccaccgcacccggccacttaaattgattattaatttgcaagtttgtaatgctttcaatggttcaacccgtttgatgttagttctgagttcagacttgtgagtgacagacacacaaaggcagctacgagactatcaaattcactcagcttaattt

SEQ ID NO: 3559 - DNA, 504 bp, Homo sapiens
gatgattactgctatgctggtctccctagctaaactgagtcactcagggtcaggaacagagtcttatttaataatcatagctctgttttctagcacagggcccggcccaagaatatatggattgttgctaaagtatataaaatgagtggttgtcaatttactctttttgattattattgttttgcagtgattttcttttcaccacacaaaaatgtgtatttccagtgcttcgcaatgcttggcatgtactagatccttaatgcacttttgtattaacaaacacatgaacaaacttaggaatgtgatactacttattgtactgtttatagtatgtctatttacctattgatcttactttttttcttatgcaactatttctctcattagtatgctatagtgaaatagtttgcaaatgttttcattggctctaatgaccaaaaggaataaaaagaaacaagattggccgggcgcggtggctcacgcctgtaatcccagcactttggg

SEQ ID NO: 3560 - DNA, 559 bp, Homo sapiens
agaggtatgagccaccatacctggcccaaacccttatttttatgtgtcattagccagaattgtattacatggccactttttccaatgagatagatactttctcacccctagtcaggaagctagggattatagatattagggaggcaaatttttcactttgagacactacaacattggtggtggcttatgtgacttcagttagaagctcctgattgggatgttgtcaggagcacgcacaaggctgttggggttggaagagtagattcctggaatgaaatttcctagtaatttcctttctttatttagtcaacaccaaggagtagtctgcttctcccctttctgttgctaccacttctctctaatcaaactgtttcttctctgactcattgcagaaaagaacattgtctttccttcagcctttttcttactctcctcatttctaaaggaaatgcctgctcagcccatctttctgttttgaaggtttttatagaagattaaaatttcccccactctgttctttgtagtgaaaagagcaacttctgagattttatttttctcc

SEQ ID NO: 3561 - DNA, 450 bp, Homo sapiens
gtagctgggactacaggcacccaccaccatgcccagctaattattgtatttttagtagagaccaggtttcaccacgttgaccaggatggtctccatctcttgaccccgtgatccccctgccttggcctcccaaagtgctgggattacaggcatgagctactgcgcccggcaagactgtgtgtttttaaaacaagaatgactacgcatatttgaccagtgacttgttaagcaggaaagaaagaaacagctggtcagtttgcaaaatcatgagttcaagctctgttttatatcacttatcaactgatttattcaaccaacttttatcaagtttctaaaatgtatcaagtactgtgcaaggcagtgatgaaaagataaataaggcatggtttcagacttcaaggaattccttagctataaaaatggaccagccgggcgtggtggctcacacct

SEQ ID NO: 3562 - DNA, 532 bp, Homo sapiens
tttgttatgacaaccttagaaatctaacatagatagcaagatgttctagtcaagctctagtattggaaccctgcctcaaacccagccatctgtgttgtcctctggatagctggcctagattctgtctgttttttcagggatgctagactgtcttccttctaccttcagctgttaggtagggttctgttgcaacatagacgggatgcatttatcttatctttgggtattgtcctttcaactgtaagctccacaagggaagggatctttgtttattttttttcccacaatattttcagcacctagaagagtacccagcatacactaagttttaaatatttagttgaatgaatgaataaatacataaatgaagattatttctgctaagtccttccttttgacattaccaaactcctcttcctcctgccacatacacttttgatattagtgataatcttggtaataatcaaattcactcttcttcctgggtgaatcatatttagattgctggttactatttacctggaaggggcac

SEQ ID NO: 3563 - DNA, 535 bp, Homo sapiens
tagtattcttgtcttagttagcaatggaaaaagaaaagaagcaacttgggaggaagaaaggaaggaaggaaggaaggaaggacagggcaggccagggagtccaaaatatccagatgatggtgtaagcaggtacttaagttaggagaggtgaaggaacaattgaatatagctcaaggtagtgacactaaaagagagaattctaataaacatttccaaatagaaaatatagttaaacattgcgaaaactctgcacactctgaaaaaaaagaagattcttatagaatctctacctaagagaaacacacacacacacacacacgcacacacacacacacacacagtctcatccaaaggacaagaaaatagaaaagattctcagattttcaaaaacaaacctcactcctgaaaggcaatgaagcttacgtttaaagcttggaacagtggcttccaatctggaattctatacttatccagcgtactgatttattttgagggtacaataaacacttaaaggtctatacaattttacttccta

SEQ ID NO: 3564 - DNA, 489 bp, Homo sapiens
ggcacacgcttcctggggccattccacattcctgatgtcccatgtcagaatgacacatatactgctaattcccctatgcgagctctgatgctccagctctctgccctcccctccccgctcccggcagcatggcagcagctggggcctggcctccctggtctgcctgggttctagcctgtgacaggggcccatagaaaaagcactgaggccgggccaggcacagtggctcacgcctgtaatcccagcactttgggaggctgaggtggatggatcacgaggtcaggagatcgagaccatcccggctaacatggtgaaaccccgtctctactaaaaatacaaaaaattagccgggcatggtgggtgcctgtagtcccagctacttgggaggctgaggcaggagaatggcatgaacccaggaggcggagcttgcagtgagcggagatggcaccactgcactccagcctgggcgacagagcaagactccggctc

SEQ ID NO: 3565 - DNA, 524 bp, Homo sapiens
attacatatattttagctttctagttattctattttacattcacagtaaccttgcaaaggaagtagtgaaacttttagcattcccatttcaaggcaaggtaactaagggacatcaaaattaaatgatttatccagtgtcattcagtttgtcagcactgctgaattataggtagccatgtcccctgcacactctctgtgttaaggattttactgtctagggattctgaatgttcaagatcttctttgctattattaaaggagagattaagctcaattaaaaattaccaaaaaaatcagctgtattgtcattagagggttaatcgaaattttaatgttatagatcatattaaccttttctaaataagagcaccttcatctgagtttatccttgtcagacttgccccttataacattaggcagaccatgactcctcttcaatcctaataggtgaagaagacatcaggacagcatggaagtgtgtccacaattactctgggttgtcacaaagatcttgactgttatct

SEQ ID NO: 3566 - DNA, 81 bp, Homo sapiens
atcagaagttcactatttaatgtttgatcctgtatcccaattttttaagtttgctatattataacccccatttataaaaat

SEQ ID NO: 3567 - DNA, 411 bp, Homo sapiens
gctaccgtgtcaccacttacagctctgtcattatcactagttgtccttcccaatgtcccttaactaccttttcagtcgtatctcctgctactccccttctcattgtctaccctctccctgcccctcaacacacacctgtgttttaaccagatagaactacctggaagcttcttagaaggtaaaacctctagccctatcttcagacctatgaattgcactttatgagtatcccagggtattaaatatgcacattgaagtttaagaagcactggtctggctgggcgcagtggctcatgcctataatcccagcagtttgtgaggctgaggtgggtggattgcttgaggccaggagttcgagaccagcctggccaacatggcaaaacctcgtctctaccaatatataaataaata

SEQ ID NO: 3568 - DNA, 504 bp, Homo sapiens
cttactaaccccttttcctacttatatgctttctctacattattctgtcagttacagtacaaataagatatcagttgctaatgtattaacatacagaagaactgatgtgaaggggcaatacttcgtcttcaccagaagcagaaactctattgatgtaaaggaaaattacatatgcagcttatagacagctaattgttaataaggcagccaataatgatttcctataactctactcaagcgtgccaataaatcgttcaatgccatcatcaaacatttattaaatacccacaatgtggcaaatccagaagatagaaggaagtgccattctcacctcaggaagcttacaatttatttggagaaatataatcacaaaattgtagttccagaaggacacttgaagtcaactctttgacaaaggaggtaatacaggcacagtgaggtcaaatggcttgtcaaaggccgtacagctagctggtagcaaagccggtaccagaaagcatgtct

SEQ ID NO: 3569 - DNA, 427 bp, Homo sapiens
ttatctattgctgggtaagaaattactacaaaacatagtgactttaaacacttgatcttagccaaaggccgagaagtgatatagtggcttaaaaaaatatgtacatatgaacttagtatatttttacccagagcactaaaggtgaccctaattgattttaaatccctgaaacaaggtgtcctgtattccaggccatctattgtctgtagatttgcaaatctttggattcatttctaagtgtaccagtttcttcacactttaaatgttcacacttttaaatgttcatgctttaggctgggcgaggtggctcatgcctgtaatcccagcaatttgggaggccgaggcaggcggatcacctgaggtcaggggttccagaccagcctggccaacagggagaaacccagtctctactaaaaatacaaaaatt

SEQ ID NO: 3570 - DNA, 534 bp, Homo sapiens
agagtggacgaagtgcaagaagggtgcaaggagccttctgcaggtggaactaaaggataggtgggacacttctaatatgagaaattgaacctaacagccctagcatacctctagagaataataggtgagacatttctatatacttctttgtacctggaaatcccaaagtgctgggattacagatgtgaggcaccatgcccagccaaatcttttattatttttaatataacttggaaatgctgttcgagacagaaagccaattttcacctttgcattagtacactattgatgtcaaccaattcttaataaaaccttatagacaaatctatccaattttagtttgatcataagataagattcttataaaccttgcatataaccctttacacctttttttgttgtagttgttaaaaagcagatcagtgctctaagaaaagcctgttgtgcttttattccaatgttcaatttatggaaaaatggaataatacacctttaactttagccgatatgttcacacacagaatttcttttaca

SEQ ID NO: 3571 - DNA, 467 bp, Homo sapiens
gcatcccaacggggcagttggagtgggaagctctcaagtctgttgagactagcactacttgcattaaaagtctgtatggctaacatttccaatgatcactggccatctttggttcaagaggctacaactgaggccttgaagctttgcttttgtccactggctgttcttttacaagctttgttacaattcaaacgcaaaatgggggcaagagagacacggcgtcttttggaaagagtggtatatcagcctgggtatcccaaatctattgcatcaactgcacgttggtacctactgagacacttatatgccaaagatgactatgagcttattgacgtgctggtaaacaatgccaaaactcatggagatacaagagcattggaactgaatcagagattgtcctcacaataacattggattattttatagtaaggaagcaaagaaaaagctgtaagaatgaagcaatgaat

SEQ ID NO: 3572 - DNA, 406 bp, Homo sapiens
ggtcatgagagtttgagatgcactgtcttaaggcctgggtgaaatagtcacaaatcctggcttgtcctggggtaaggctgaggccagtctagctcagcaccttgatttttgtgggacctgataattcttatctatttagtaccctgggcctttaatagcaccttggttacaacccagataaggaacataggctcttcttgacccaccattttgcatgtgatttgagggcacattgaggggaggaatgtcacagaactgcaaaccgataatttaaaatgtaatattcccctttcctgtccctcagtcatttctaacaactgaagcccccggtgatgtttctaggcttcctctctccttcctgccttttcctcttctctacatttccatttccatgcatttattagct

SEQ ID NO: 3573 - DNA, 459 bp, Homo sapiens
ccatggtcagaactcctttttccccagccccaactcatacccacacttcaacttccacagctccacaccctgaagagtgaagcctctgggcttttgcacatactcttctgccacctagaactcttctgccacctagaactctgtccaacacccacttatcctttaaattcaatctcagcatttcctattcaaggatagcttcctagctcctagcccctgtctggtgaggtcctcctttggactctcacattgcccagtgcttggctctaggctgtgcttgccacagggctctggttatgtttctgtgactgttcccttactggactgagcagcggctgtgagaactgtggcttccacgttacatatccctagtagacatccataggatggaatgatgggtggatggaaggatggtggatggatggatggatggatggatggatggatggatggatggat

SEQ ID NO: 3574 - DNA, 507 bp, Homo sapiens
gataaaatataaatgtataaacctaaaactacatagaatactaaagaggagatgacagtgggtgagaagtgtaacaagttttccagagacagaaagaaggatgaggggtaattacctatagcatagagaaagctgagagttaagtgcctgcataggaggatgacatgaagaagcaagatgtctgtgcaacagaaacccactggatgtttcctggaatagaaatgccaagtacctcaagaagatgggattaagatttagttgttaacattttactgaaggaggagttattatccaaataccctttccaaaccatatagatatatgaatatcccttcttggaaaggtgattgaggaatgttgttctcagcaaaaattgagttaaagtaatcctagtttcaagaacactggagatagcagtgttgagtgctgagggcgagagtgagggcaaaaactgtcgtgaccatcagaaaggacataaaactacacattatatattacagctctgac

SEQ ID NO: 3575 - DNA, 506 bp, Homo sapiens
tcttagagcacactgacttccttgtttccactagcaatttatttttttcttccacaatattctacatattagtccttgtatacttcttgacttttccaggtttgtctatttatgtaaactgcattgccttacaaattattattttaaatttattttaactttatatcttcatctaaaccataattcattgcattctaaaaaatatcagaactggtcactaatcattttcatgaaatagtgtccaactacatgccagatagtaattctaatccaaatatttctgcaacacagaaatttttattttcacttgacagattaaaaactgaggctaggccaggcacagtggctcatgcctgtaatcccagcattttgggaggtggaggtgggcggatcacctgaggttgggagtttgagaccaacctgaccaacatggagaaaccctgtctctactaaaaatacaaaaattagccaggcgtggtggcacatgcctgtaatcccagctactc

SEQ ID NO: 3576 - DNA, 518 bp, Homo sapiens
caggccatggaagtggtttctcccctgagaccatcatttcaagacctatttgccctttgaggctacccacgtgtgaccctgggagatgtgtgtggctatatttcacctcaaaccctaacctcagcagctgtgctgtttggttgctcagccgcggagcagcaggtggccttctgctgttacccatgaaggggtcaagctaggccaggcctgctgggagcccagtgaagatttactggcagtgatgcctccaacacttctttctccagagcgagagcaacagcaggtgaggcatccatgaccagcctgtcactttcctcggggaaagagaaaggaagccatatgctgacctttcgtgtgcagaagtagcacagtcagagcatatgtccaggagctgcagagacgccatacgcatagcacagcctttgtccaaacacttttccaagaataaaaagacttcattaatgcaatgcactccctcacaccccccagacgccagctagcctcttgatgatttcacc

SEQ ID NO: 3577 - DNA, 510 bp, Homo sapiens
taactaatataaagttaatttgggacggcagagtggaggggaagttggtgtcatttgcttttaagagtatagaagaaaactacttccttctaattggagaagaggaagttataagtgctacatgttctcagcttatagttaagatgccccatgtagatctttttctgtgccacatggaaagtgagaacaagaactaactctgacaacaggttccaacatagacaaccctaaagatgattccctaaaccagtacccacagccagcaactgtaaaaaactataaagctcctaatgtcaagccagcatgtgatcttgaatcacacactaacatgagaaagaaataagaaaggcacattctattcaaagtctggagattagagtgacctgatttggctgtgattaataaaattaagaataaaaatatgttaatgaccttaaaatgcttgctcagaatccgtaaagcataagatctgctttctacatttatctgttttaacagtttttaagacta

SEQ ID NO: 3578 - DNA, 543 bp, Homo sapiens
tgcttctcttgtcagcatttttgttttgtgattattttctccagtacaatccctttctgaaatgttttccttcttaagtgaattcctcttgggtatatcctggttatttttcactatttgatattctttgaaatgtgtatccttgcattgttgccaaagcacctccctctggaacaactacagaataaataacagcagtatatatagtaaattctttccttgtgctcacataaagttttgcacaacttcagttaacatgaacaagatattagatgttctgttacatattaaaatctaggaagtaataagagaaaaaaaaaagcttttaaggctttgctttcatagctatggtagggcatgtttaagaattactcagattctataatgtttgcttgtgttacttcaccaagccacttgtttagtgttaactgaatgatgcaagcatttgtgtgatgcttcctgtccttgaaaggattcatctgaatgacagctaagccatcatgagaaagacagtcatctttggagatagactcacaaatccca

SEQ ID NO: 3579 - DNA, 519 bp, Homo sapiens
ctcacaatgcttgaaaatctttgtatctcacatgaaagttagacaagatgatgttaatgaatgtcagctggcatctctcttccactccctactacttgcccaggaatggaggctgtgcatggaccaaacatcatgggctcctgctcaccagtgctgatctatctgttatcattgctgaatgcccaatttgtcaacagcacagactgatgttgagtcctcaatatggcaccattccttgagaagaccaacctggtggcaggtggattatattgagccccttccacatgggaaagaacattggtctatccctgctgaagttgatacacattgcggacttgggtattctgcctggcttgcagagcttttgttggaaatcctgagcaaaggcttataaaatgcctgatctactgaaagttaaccgaaaacattgtctcacaccaagcgacccattttattgcaaaggaagtacgacaatgacctggggctaactaatctttgccatccccagagtcaatctga

SEQ ID NO: 3580 - DNA, 487 bp, Homo sapiens
atttgtgtgattatcttagagtctttaaaagtaaccacaaataaaaagcataaaataagatggtttaaatgcatactagtgtacaaataatcataataaatacgagtaaactctgttcatttaaaaaccagatattagattttatcatattggatttttaaagaagctatagcttgtttacaaaagataaaatataagcactcggtgaagttgaaactaaaagaatagaaaatatttaccaagtaaatacaaatcaaaagaaagcagatatagctgtattatgtcagacaaagatgaaaagcattgttagggataaacttgaactctatctaatgctgagataaactcactagaaagatctcactacacttgtgtgtatcatcagattgtttaaaagatcacaaggtcagaagatcgagaccatcctggctaacacaggtgaaaccccgtctctactaaaaatacaaaaaatattagccaggcatgg

SEQ ID NO: 3581 - DNA, 533 bp, Homo sapiens
gaaagatttttcaaggggttattttatcctaagacctaagagaaaaaatagaagctgatataattgggccaactactttatcttctttagagaatcagcaaacaaagttaatacgtgatagcattactctggcagtgttcagtaggctgccacaaaaatcttttttaattcattggcatacctgccaagtcaccattaaaagtactggacctctaagattaggaacaagacaaggatgcccacacacactacttgtatttaacatagtactggaagttcctagccagagcaattagacaaaagaaagagattaaagacatccaaattggaaagaaagatgttaaattgtccctgtttgcagacaacatgatcttctatatagaaaaccacaaatactctatcaaaacacctgtaagaacaaataaaataagtcaacaaagtttcaggatataaaattaatatacaaaaaccagaggcatttctatacactagtaataagcaatccaaaaaataaatcaagaaaacaacctcat

SEQ ID NO: 3582 - DNA, 468 bp, Homo sapiens
agtaagcaaagagaatggtttcaagttagagccacaaactgtctttactgctttttgcctgtcttcgtagcttacttagactttatcaaaatttacttctaaaaatatgcatctgaaactgaataaataatggaagttaagaaactctagaggccaaatatgagccatttcatttatacttgcagaaatcaaaaagcattttggcatttaacaacatttttttagggtacagtgcttttaagacattatataattacccttactgagagtacagtttttagctttgtcagggtctctattggaattataattccatgctgagcaacgagttctatcaaacctctattatcatattaaaacacttgagtaggccaggtgcagtagctcacatctgtgtggatcacctgaggtcaggagtttgagaccagcctggccagcgtggcgaaacctagtcaccactaaaaatac

SEQ ID NO: 3583 - DNA, 525 bp, Homo sapiens
ggtactcacaagttaacaaacttcaaaatgctatttgaaagggaaactaataacattaaaaagaggtcacagtactgtttgaaaatctacaaaggagtcatgatctttgttcaaggaagtaaaatattaaggaaatttgtgttagttgagttcttgactgaacatgtgctatgaatttctgattgtggaagctgcttcctattcgaaaataaaataaaactctcttggtatgcaaatgataagaatatgttttggtatctaacaatatctaaaagcaaactctctgcaaagtatcccagaatggtttacttaagaacatcctggctgaacttcaaagtagagcctactggaaaatatttacccagactatttgaaaagagatttgaaaagagagtttcattgatttccattgtccagctttatttcatggatttctatcatttgactgtattttttattatcagtatcattgccacaagaaagtattacagtcaagagatgataaataataatgatgatagtaat

SEQ ID NO: 3584 - DNA, 498 bp, Homo sapiens
gacacaatcaagttcatgatggaagcccttatgaggtagagagggagtgcatctcagctctttcgattaattaaatgattgtttgaattggagaaggtgtgggtattttgtgttgtttgggtgagtacattggaatggttttctagcattcctttgagattttccacagtataagttaaggtaaaagaacatttttacttgtttcagaaagcatactgaggaagctttaatgttactattaagtaggtagggaaatgaccaatattataaacgcagatttccagcctctccttttaatgctttcagaatgattccacaagaaccttgaaaatgttgagtatttatatttattttatgcccttttattgtgatttttttaataaataacatttttttcaggaaagcaattttgaacactcaactagtgagcccatataaaactacataacagcacagaatatagtaaaataataatataatgaactgggagacaaacta

SEQ ID NO: 3585 - DNA, 531 bp, Homo sapiens
gttctcatgatggttttgcaccatccccgcttggtactgtatagtcagtgacttctcatgagatctggttgtttaaagtgtgtggcacctccccactcccacccctacctcctgttccagccacgtgaagtgctggctcctcctccgccttctgctgtaattgtaggtttcctgaggcctccccaggagctgatgccaccatgcttcctggacagcctgcagaactgtgagccaattaaacctcttttctcctaagttaccaagtctcaggtatttccttatagcaattcaagaatgaacaaatacaatcacacatttaatagaatcagccacccacccaaatctgcgtttcaacttcctatagtttgtatcttcttcaattcatacttaatcacttcgttgttcttatttgttctgtaggcactatgtgataataaactcacttagcgttcacaacaactctattattctcacttcagaggagcaaactgaggcaaagcaaggttaaataacttgtccaaggtcaagagc

SEQ ID NO: 3586 - DNA, 533 bp, Homo sapiens
gaggcggaagttgcaatgagccaagatcacaccactgcactccagaccgggtgacagagcgagattccatcttatatgtatgtatacacacacacacacaatgaaaggttacccttagggcaataatagggtaatgattccagatatggaagttgtagacattaaatatctgtgagaaatatttgtgaaagtatattatggaaaaaatggaatatgcatgtaaacttaggctatgttgagtaaaataaaactaatgttttaaatatgaagaaatgaacagttgctcaatgcttgtttctctacacatgtgcaggaagtatataattcagtgctgtacacatatcacattggagcattaatcacagctgtgtcccactttacccaaacatggccacatagtctcttaatccaagcatttgggaaactactagcaatcatttagagtggaagcataatttgacaccggtttagcattccatttgtttgctacatccctctttatgacaagaaagggaaaaatcatgtaatactat

SEQ ID NO: 3587 - DNA, 535 bp, Homo sapiens
gattacaggcctgagccactgcgccgtcaaaaattggcttctttaaaagaacataaaacaggcagatctctgacaataatgataaagaaaggaaaatagaaggcacacgtaaacactactaaaatgaaaaaaggtcacttaactatagatacagtagaatttttaaaaaatcatagtatggtaactttgtgccaatatattttaaaatatgaaatgaaaaatttcctagaaaaatgtgaactaccaaaaataacttgagaaaaaataacaaacttaaaacaatattattagataatttgaaatggtagtcaaaaatatctctctgtcttttaaacacacacacacagacacacactcacatactctaatatgccagaggggagaaggcctcaggccttttataggcaagttttaccaaccttaacaggtcagttaattctttttatactattccataggggaaaaaaagaggaaaagcttatcaactgattttatggagctattgtaactttgctaccaaaaaaaaaaaaaaaaa

SEQ ID NO: 3588 - DNA, 502 bp, Homo sapiens
gggaagctccccagaccctagcaaatacatttctgttgggcctgccctgcttctgcactgtggactgcagaagaccacagttccagtgaggactcccccacatgctcttacacatagctattttttgtaagctatgtgtaagcttctgtttttcaaacattaacaactgcctatccaatggttccttcaggtatacatgcactatcataaagaattattcaggcggtggctcatgcctgtaatcccagcactttaggaggctgaggtgggcgtatcatgaggtcagaagatcgagaccatcttggctaacatggtgaaatcccatctctactaaaaatacaaaaaattagctgggcatggtggtgggtgcctttagtcccagctactcaggaggccggggcaggagaatggcatgaacctgggaggtggaggttgtagtgagccaagatcgtgccactgcactccagcctgggtgacagagagagactccatctcaaaaaaa

SEQ ID NO: 3589 - DNA, 102 bp, Homo sapiens
aataatataaacacttaactgctaatggcaatgattataaaatcaaagcagtatttcatgagatttagtgcgatgcctacaaaatgggggttatgttttctc

SEQ ID NO: 3590 - DNA, 530 bp, Homo sapiens
ccataacccagagatgagtaaccaagataaaaaagtaaaacacatacatttaaaaagacacaaaagtacattttgatacccactgaccacagtctatcagaagaaaaaaaaagtacacacaaaaagcatcaaggagatcattcaatgtagaaaaagagaagaaaacatctttaatatctgagttgaggagaaaaaggatacaggcagttttagaaaaaaggaaaggggcagagagatgtgtgacgatttaaagactttgaagaagagatctagacatctttgctgacttaatgtcaacaaaatgaaagagatacaaaaccatgtagagaaaagcaatgacagaaaaatgttgattctaatcagaaaaccaaattaagtgctcagtaaataaatagaaaagtagctgtgttcagggcttcaaagacagattccattgttttaaaaaaaatctgtgatcaaaacatgaatgttcattttactttttctttaagttatacatatatttttatatatatgaaatttatttatgt

SEQ ID NO: 3591 - DNA, 372 bp, Homo sapiens
cctgagcgcaggcaatcctcccacctcagcctccagagtagctgggaccacaggtacacaccaccacgcccagctaatttttgtactttttgtagagatggggtttagctatgttgcccagtctgctctcaaactactgggctcaagcaatctgcccacctcaacctcccaaagtgttggtattacaggcatgagccactgcgcccggcccatctggtcttattaaatacttcattctctgcaaatgcagacgttttctcagctctgattattttttctaaagtaatgaccccccacctggctagatgaatgcttctagcaaaggaaaagaccagaatgtgaaaattgtactgcaatagaacataaagcccg

SEQ ID NO: 3592 - DNA, 401 bp, Homo sapiens
gtgctaactggggtttcatttcttttgaaaggaaatttctgttctaaaacctttaaaaatgtgtaaattgccatattttctcaggaagtttcgtgtctattggcatatttaatattgcgctttagtagaaacgcatgtggttttgttagtgtctggctgtatttccaggaatttgtttaaatgtgtgatttaagtggggcatttctggagtagcaaattgaagggaacaagagatactgaaattcatgaagacaagatattgtgtcagttgtgggtttgacaacctagtaattttagcaaaatgatagtttcactctaacatcggcagctgaaattacttgaaactgtgtttaagacagtgtcaacggttgaaaaacctctgtctccttctttctctttct

SEQ ID NO: 3593 - DNA, 491 bp, Homo sapiens
gaggtgagcagaggctggtcgggaagtttcccggaggctcgccccgggaaccccgccccgccgccctggaagcccctgtctgctcgctggcttacccctaggacgggcagctcaccacttctcccggtcagttctgtttaagagaagctcctttctgcctgtaagcaatgaagtggaatgatcaccacaaagtggtgtaagaaaagaaaagtagacccgcagcggggtgtattcgtgctactgtttgtgtaaaacacagaaaaaagaaaggggtggtctgatgtatagtcatacacaccagtggttttggagggagtttttgtggatataccacattctctccatttatcagggattttgccctgacatccctccaccaccacgacatttggcaatctctgaagacatttttggttgtcataactggggaagtggagaggcgatactggcatctagtgagtagaggcctggaatgctgctaaacattctgc

SEQ ID NO: 3594 - DNA, 534 bp, Homo sapiens
catttaacattaatctaaataaaattgaaataaaaaagcagaccaaacttgtgttttccgttattggttgttatgatgaatgtaaatgaattatttctaggagggaaatcactcagtgtcaattgtatttatcaagaaacattcactcctattcaagttattcttttatgtcacatcaaactcctattatcttttatcacagtcattttctgacagttatatgtgataaagctatggtagctggtgaaatagataaaacaaaacaaaaaggtagtaaaatgggccgggcatggtggctcacgcctgtaatcccagcactttgggaggctgaggtgggcggatcacgaggtcaggagatcgagaccatcctggctaacacggtgaaaccccatctctactaaaaatacaaaagaattagctgggtgtggtggcgggcgcctatagtctcagctactcgggaggctgaggcaggagaatggcatgaacccgggaggcggagcttgcagtgagtcgagatcatgccactgcactcca

SEQ ID NO: 3595 - DNA, 535 bp, Homo sapiens
gccactgcgcctggcccttgcttaattatttcaatagcactgtaacaaagatactattactatcccattttatagctaaggaaactggtactcagaggcctcagaactggtaagtcactaaatccagacctggctgactctgatgcccatgccctgaacatagcacttcatataataaggccagcagagataccagagaggagacctcgatctgggagtcatttacacagagggatagagtgtcaaaaatagaggggcagggctgggcatggtgactcatgcctataatcccagcactttgagaggctgaggcaggtggatcacctgaggtcaggagtttgagaccagcctgaccaacatggagaaaccccatctgtactaaaaatataaaattagctgggtgtggtggtgcatgcctgtaatcccagctactcgggaggctgaggaaggagaatcgctcgaacctgggaggcagaggttgcggtgagccaagatcacaccattccactccagcctgggcaacaaaagtgaaact

SEQ ID NO: 3596 - DNA, 559 bp, Homo sapiens
cacccaggctggagtgcacgggcacaatcatggctcactgcagatccaagctcctgggctcaagtgatcctctcacctctgcctttcaagtagctgggactacaagtgccagccatcccacttggctaattttgtttcaagagatggggtctctcaatgctgcccaggctagtctggaactactggccttgagtgatcctcctgcctcgggctcccaaagtgctgagattataagcttgagtcatcatgccaggccagatggtgcacagtttttaaatgaaatatttaaatcatataaaaactcatggggaataatataacgaatataatacgatacaatgcatacaatgaacaacacaatggcctaatatatgacaagtcacctttattatctatggacctctttttacccctccagctctccccaccaatgaaaaccattatcaggccaggcacagaggctcacacctatgatcccagcactttgggaggctgaggcgggcagatcacctgaggtcgggagttggagaccagcctgaccaacacggagaaacctgtc

SEQ ID NO: 3597 - DNA, 510 bp, Homo sapiens
atgtgactcacagacgctgcatgcagcaaatgtgactaacacacatggtaaataacacacggctcacagacgctgcacacagcacacgactcacacagacgccgcacacagcgcacgacactcacacagacgctgcacacagcacacaactcacagacgctacacacagcagagtcacacagacccgcacatagcacacgtcactcagacgccgcacacagcacacaactcagatgccgcacacagcacacgacactcacagaccctccacacagcacacaactcaggtgccgcacacagcacatgacactcacacagacgctccacacggcacacaactcagacgccacacacagcacacaacactcatacacagcacacagcacatgactcacacagatgccgcacacagcacatgacacacagacgctgcacacagcacacaacacacagacactgcacacagcacacgagttatagacactgcacgctgcacacatgtaactggct

SEQ ID NO: 3598 - DNA, 488 bp, Homo sapiens
ggcacacgcttcctggggccattccacattcctgatgtcccatgtcagaatgacacatatactgctaattcccctatgcgagctctgatgctccagctctctgccctcccctccccgctcccggcagcatggcagcagctggggcctggcctccctggtctgcctgggttctagcctgtgacaggggcccatagaaaaagcactgaggccgggccaggcacagtggctcacgcctgtaatcccagcactttgggaggctgaggtggatggatcacgaggtcaggagatcgagaccatcccggctaacatggtgaaaccccgtctctactaaaaatacaaaaaattagccgggcatggtgggtgcctgtagtcccagctacttgggaggctgaggcaggagaatggcatgaacccaggaggcggagcttgcagtgagcggagatggcaccactgcactccagcctgggcgacagagcaagactccggct

SEQ ID NO: 3599 - DNA, 409 bp, Homo sapiens
aagaagaggagagtggatatcgatgggtaggtctgcaggggataccaaagacctcagttgggcttaacccaagatgtggatacaacagtcatagaggaagacatgtgaaccttaatccttactgcctacttgactacttcaccctcttgttatcatgggagccaaggagcctcctgggaatacttcataccagcctgaaactgaacttcagacatacaccacctggcatgtcacatggcctgggcagagttaggaaaacaggtcctcaaaagtctgttagaaaaagtcagggttgggccaggcacggtggctcgtgcctgtaatcctagcactttgggaggtcaaggcgggtggatcatctgaggtcaggagtttgagaccagcctggccaacatggtgaaaccccgtc

SEQ ID NO: 3600 - DNA, 532 bp, Homo sapiens
gggttggataccctaattgccctgaagtaattattatgcattgcatgcctgtatcaaaatacctcatatatcacataaatatatacatccactatatacccacaaaggttaaaaataaaaacattttcaagccaaaatattaaataatagatatcatactaaaagcaatattttagtaataatgaacataatctaattatttctattataaattcaataaaaattggatgggaaattcaatgagaaagaggaggtttaaagcaaatgaaggtagatgttttgcacattataaatataaaaaatcatgtgtgttttttgattatctgttgttaaattctagataaattgaattaggacataaaactttaaatgaaaaataaatgcagttagcatgagacagtaaaggaaatatgaaataaggtaacagaagtgagaacaaatacagttctgataataatgcttaactacaatttaaagaaaaacagcacccagaatgagtcaaaaataaatatacatatcagttggataaatg

SEQ ID NO: 3601 - DNA, 557 bp, Homo sapiens
ttacaggcatgtaccaccacacccagctaattttgtatttgaagtagagacagggtttttccatgtcagtcagactgctctcgaactcccgacctcaggtgatccacccaccgcggtcttccaaagtgttgggattacaagcgtgagccactgcgcctggatgcctccaggtttttaaacaagttagtgctattagatggcttcacacattgcagcttttatatgacaggctgtaaactgcctttgtgtaataagagttgtcagccttcagcaatgttgatgatgacatgctccttttcctgtctccgtcatttcactgtcctgtcagaaacggcgtagactggctggccatggtggctcacacctctaatcccagcactttgggaggctgatgggggtagattgcttgaggtgaggagtttgagaccagtcagtccaacatgctgaatccttgaatctactgaacaaaaaaaaatggccgggtgcggtggctcaagcctgtaatcccagtactttgggcggccgagacgggcagatcacctgaggtcaggacttcg

SEQ ID NO: 3602 - DNA, 497 bp, Homo sapiens
ttatctattgctgggtaagaaattactacaaaacatagtgactttaaacacttgatcttagccaaaggccgagaagtgatatagtggcttaaaaaaatatgtacatatgaacttagtatatttttacccagagcactaaaggtgaccctaattgattttaaatccctgaaacaaggtgtcctgtattccaggccatctattgtctgtagatttgcaaatctttggattcatttctaagtgtaccagtttcttcacactttaaatgttcacacttttaaatgttcatgctttaggctgggcgaggtggctcatgcctgtaatcccagcaatttgggaggccgaggcaggcggatcacctgaggtcaggggttccagaccagcctggccaacagggagaaacccagtctctactaaaaatacaaaaattagccgggtgtgatggcgggtgtctgtaattccagctactcgggaggctaaggcaggagaatcgcttgaac

SEQ ID NO: 3603 - DNA, 478 bp, Homo sapiens
taccaagggtatttccacctgcctcttttaatgtgaaagtatctaatacattactgggaaaagtagtctgtttttttaagactgacagtaataagtactcactgaattaggcacattatctccattgtcataacaataacctattctttgtgactttttatgcagatatgttttatacatttcaatgaattacatttaatatttacaattctgccaggaagatattgttatccaactcaaacagttataagaattcaggacttgaagaattaaagaattatatgacagagtcacagtgtgaactcatgtctctgggtcttcaaaccccaggctctttaacctgtgtctccttatctgaaatgaaaaacacaaaaggcagtaaattccaaacaacaacaaatacacacacagacacacacacacatacacacacacacacaggaatttccagggatattcatcaaaagcatttacttgc

SEQ ID NO: 3604 - DNA, 516 bp, Homo sapiens
gaaactgaagatgtgttagcattttcatgcagctctctttatgcctatccttttccaaatattattttagacagaaatgtcttgattaagagaggtgaagagaggtcaatgaaaagtacatggattgctttttcaatctagtgaaataaaaaaaaaagggagatttatctcttacagttattttcattgtcacattaaaccaaaatgacagctgtaattatttatttcaataatctggaataatggggcatttgagtgatcaaaaatatatatactatactgagggaaataaagactcccctcatctcagattaagagcaatctcggccagacgcggtggctcatgtctgtaatcccagcactttgggaggccaaggcaggcgggtcatgaggtcaggagatcgagaccatcctggccaacgtggtgaaaccccgtctctactaaaaatacaaaaagaagttacccgggcgtggtggcaggcgcctgtagtcccagctacttgggaggctgaggca

SEQ ID NO: 3605 - DNA, 510 bp, Homo sapiens
catatggtttcaagttttgatgcaaatctgaaggtgaggcattcaatttgaataaaagaagaacaaagtttgtttaaattaggccaattcaaacttgttctgtgaaatgaatgtactgtctttattgtttcttttcctttatgttgtccatagctttttgcatattctcttagaatcacagaactttgaacttgagaggatctatacaaattatgcatttgactcttctcacacagggggcttcttaaaactatagacttctgaacctcttttgcaaaaattataattcagctcatgaggaatggtcccaataatctgaattttaaaaaatgactcagggctgggtgcagtggctcatgactgtaaacccagcactttgagagcccgaggcaggtgaatcacgaggtcaggagttcgagaccagcctgaccaacatggtgaaaccccatctctactaaaagtacaaaaattagctgggcgaggtgtcacacctgtaatcccagctactca

SEQ ID NO: 3606 - DNA, 559 bp, Homo sapiens
caagatggtatttggccatcctaagacaaggttgactgaatcctaaaaacactgtggtatttcaaaactactccccatttaaccagagtcaactcttgattattggtactgatggcgaagaaaacagctttgaccatcttaaagaagctaatcagccagataacatttctatggaattttggaacattttttctgaatgtggcagaatcttatgttctgggaatttatttcaaacaacatgatgaagcagaactggaaagacttgactcgggtgaatctgggaatccatccagtttcccaagcctgcccctctgttcaaatctttccgttaacagtctcaatgctgggaatagactcttcatccatcggattaatgtaaagcatcacccagagcagagctgcccttactgaaatctttcttaaagttggaaatatcattaagtatttcatttccacagggcttccctgttgggacacaggatttatataaaatcagagcaatatgcagttgaggtcacaatgaaggaaagagaaaaatagcaaattgaaagcagaaaag

SEQ ID NO: 3607 - DNA, 457 bp, Homo sapiens
ctttccttctttccttctttctttctttcttcctttttgacggagtctcgctctgtcacccaggttggagtccagcggcatgatctcagctcactgcaatctctgcctcccagtttcaagcaactctcctgcctcagcctcccgagcagctgggattacaggcatgtgccaccacgcccagctaagtttattattattattattatttaatagagatgaggtttcactatgttgcccaggctggtcttgaactcctgaccttgtgatctgcctgccttggcttcccaaagtgctgggattacaagcatgagccaccacgcctggcctgccttataatttcactgaggttataaaacaacattgctgaactttaaatcctagcattcatgaccctgagcattttcttcttccttttttgtcattctcttctttgaagaccaagtcacctgttccttca

SEQ ID NO: 3608 - DNA, 505 bp, Homo sapiens
tgaggagcatccctggcagacatgtccccaggccaggtgagcaatcacacatggtacccctgactagaataatagcctcatggttccaaccccagtgagccagacatcaagttggccagtccgctgtgtacatgcatgcacccttaatctgagaaacagaccaataagtccacccccagcaaagccataccaccactgccacactcttttcagcatgggccactgagacacctgtaaatgtcactaacatgggttacagctaaagaaactacacagagaccacactactacatccacctagaaccaaagccaatgcaccttacagaatcaacatcccaagacccacctaaacaaataaatatttctctataaaacctatttcataaaattggaagtggtgactgtttcatcggatgcatagttatcaacataggaataggtaaaatgtgaaaaaaggacacatgacacttccaaagtaacgtacaattctccaataacagacccc

SEQ ID NO: 3609 - DNA, 423 bp, Homo sapiens
gaggctagtggaggtgagaagcctcacaatccatgtttttttaatgcatccgagttattccaaagcaaagggtatttctttccccttttgctctctaattgatgcagctgttgcctagcctcatctgcattaagctaaatattatgtttttgtaacgtttttgatctttattaattatagcgcaggaaagctgacaaaagcaacctgtctctttaatataaacaagattaattgcacagttcctgcagaaaatgaactaccagcagtttaacaaaaaatgtttgtctttaagcagccctttggattaaaaaaaaatcaaaactgttacaggaagtgccaaagctgccaaattaccatgcccgtgagcctcaccctcattatcagactaaacgaacgcacacacccctgcactttcatcctcct

SEQ ID NO: 3610 - DNA, 413 bp, Homo sapiens
agctaagatgtctagtgactgatttaagagcagatgcagaggaagccctttacaaaatgggacacgctcatggctgcctttctagatcagtgatgttgaacttttaaatatgtttattggcttttgtatttcttctttgtaagtttccaaaggaaatattaggagaatttctgaaccagagcccatgctatggctatttgactttgcagtagacagaagctcttgttaaaacaggtgcgcctgaggaactgcgtttatgcgtgaagaacactctccatttgcccctgacgtctgcctcactcttcccagattgaacctttattatcccatgctgggctgggacctcattatggaaggcctcgaaagccagcctgcggaggttgaacaagggagtaggatgatgagagttctgc

SEQ ID NO: 3611 - DNA, 172 bp, Homo sapiens
tgaaatctagagtaaaaccaagctggcccaaggtgtcctgcaggctgtaatgcagtttaatcagagtgccattttttttttgttcaaatgattttaattattggaatgcacaatttttttaatatgcaaataaaaagtttaaaaactcaaaaaaaaaaaaaaaaaaaaaaaa

SEQ ID NO: 3612 - DNA, 531 bp, Homo sapiens
  misc_feature 85: n = A,T,C or G
cttattttcatgatcgatttggaacaagccccatgtattaatgaatatatacttgtgaaaactatctgagcaaaaagataatgtnaacatttaattggcaaaaagacgggtggtccaaagagacagctgtaattcactccgcctccctctgcatgcttcactctgtccaggggcagcttttacctcctgctgggctatcacattccatggatagaagggccattccccctgggcaggagacacagacaccgcaatcagcatttaaagttctggtaaataaacattatcacttctaagagtgactggcttcaggaataccactcggcagaaggctaggtttcagcttcagctcggataatgtatcatagaatgatgcattctaatgcattcttcggtgttaacacgacagttccctaagtaaactgaactctagtaaatatactcttcaaagcaattttttgacttcttttccagcagcaaggtacttcttttaaaaggaaagaaataagcaaaacaacacaaaaaccccat

SEQ ID NO: 3613 - DNA, 76 bp, Homo sapiens
taaagagtgttttagatcaccccctccccaataaagctaaaactcacctgagttgtaaaaaaactccagttgacac

SEQ ID NO: 3614 - DNA, 385 bp, Homo sapiens
gataagcatgggaataaaagaaagttttgaggaagaggggacagtttttgtttacttaatgattattccaaagatgttaagtaaacattctatagaatgcaacatatagtggaatacagcattgaaacaatttaataatgtagtcaatgaatccagtttttagaaatgggatccattttctaaaactgagcatacagatacttcatgagatgctttatcactcatcctaaaccaaaccaactccttcccttgactgtcttgcagtgcatagggcatctctacactctaggaaaggaattatcaatctgtttatatgccacttataaaatcatacttaatgtacgattaggcataaatttacttgcatttttaaattttgtaaaat

SEQ ID NO: 3615 - DNA, 288 bp, Homo sapiens
  misc_feature 158: n = A,T,C or G
cttttgaggggataaggaagttgtgattagtctcagtaaatgttgcaagaagttactggggaagattcgctctcacactaatctttacgtagctcatggacgttcatcattcagtcatgacacactgaccaagcacctaccatgtgctggacttcggngatacaaatgatggatgagtacctgacagtaaaggcagttaatggtggggatcgcaggccaacagatcaccctgacacagtgcagcaactgcaatcctaaagaaatgtacagctgtaatcccagcacttc

SEQ ID NO: 3616 - DNA, 242 bp, Homo sapiens
gtgttggggctattgtgcccggcccttggtctttttatcatcaatgcataggggttcttcatatattaggagaatcagccctttgtttatgagctgcagataatttccccagcatgttgtcctttgaccttgactttgggttgttgctcagtgaacctatttttctatagtcaaatttatcaatctttgcttttgtggttgctaaattttgtctcttgcacagaaaggagcaggaaccaata

SEQ ID NO: 3617 - DNA, 411 bp, Homo sapiens
aaaagccccttataaaaccgtcagctctcttgagaactcactcactatcaggagaacagcatgaggataaccgcccccatgatccatttacctctcactgggtccctcccaagacacatggggataatggaaactacaattcaagatgaaatttgggtgaggacacaccatgttactatgcttgtcccagaaaattgtttactcttaaaatgatttcaaatcataccaagtactgggacttgttcatacacagaaagtcaaggcacagagatctgatgcaaactacttaaaagcaggatggtaggcagctgtatattgactggctttttctagcctatccctggccaactgccctggcaacaattacctggactcaaacaattccatgttcagcctttgccaacttggaga

SEQ ID NO: 3618 - DNA, 489 bp, Homo sapiens
tgcaagacctctagataaaaacatatctttatatctatgtttatatctatacctagatatacctgtctgtgtctatgtctatatacctacatctatatctataaccaataaataatcaaaattcagattgggccaagacttttcttctcagaaacatttgcaagaaaatctagggcaatatttacatagtttgagggtggggaggatataaccaaacattgtctcaggccaaattgattatcatgtataaaggcaataaaaattcacgcttatatttggaaggactcataaagtacatcacccatttatttatcattcttcagcaacttgaagaaacacatccaatgatatagcaataaaaggaaattaagcttatgagcaaagaaataatgtttttgaagtaagggcatagtacacgaaagctaattttaaaaaatgaattattttaatgtggatgcacagctcaatcaaaattgcaaaagtattaat

SEQ ID NO: 3619 - DNA, 371 bp, Homo sapiens
tatggaggacatcaattaaaatgatatagatgtgcctttgatggagtcagaccttggagtctggcaaatttccttggcaagatctgaccattttattcagtaaaggcctggcaatgaataaaagatgtttgtttgtttgttttttttccacagtatttaagtagctaaatttttccttccatgctaaggttctgattaagttacctcctagtaatattagttttgatttccaaaataatgtcgaacattattttccatttccgttaggctagccaaccttttgggttagacaaaagattctctagctgcttttaccaggtgcacgcataaattaactcatcctcacgaaaagtcactctttaaccatatgc

SEQ ID NO: 3620 - DNA, 250 bp, Homo sapiens
cacgatcgatttggcttcatccctgggatgcaaggctggttcaacatactcaaatcaataaatgtaatccatcatataaacggaaccaaagacaaaaaccttgatttttaaaatgtggatctatttgactttttatttcatgtaagaatcactgttaggaatatgaaagtatatttcagcttaaatatagtgacattctgctaccctatatttaaattgaacctaaattaaacttgtattaatcagtatc

SEQ ID NO: 3621 - DNA, 524 bp, Homo sapiens
gcattcttttaaatgtatggataagttcacaaaaaagaaaatccaagtcatcaggtcacaaattaagaaggaactgaaagccatatataaactgcagctgctgcagctgggaggctgacagatgatgttggtctcggtaactaaggggcttggattttaaaacccacagaaagccagaaagcaaggtcttgggccccatgtgaaacaggaaaatgaaatccatgctccatgcccaacctcacctgcacaaacctgggaccctcaaaggtctggtatcttaaacaaaaggtgaatcgggaaaaaagaccaagaaatatctcagtggtgtttttatcttccctgcgagatagcaggaagcttggtcatgtctgcctgggtttggaatagggacagagcactttgtagaaattggtgccccagagaatttttaacaatgggcctgcacctcaaattcctactacccacataaagaacccctatgacaagaaaacaaaaaatttgtccaagtcagtgatacctactct

SEQ ID NO: 3622 - DNA, 515 bp, Homo sapiens
cgatttggatgtgtgactatgtgatgtaaaatttctcctacatttatattagtaagtcattgttatttgtaagcatgacaataatcactttattaaatatatagtattattaagcaggattctgcctgtattttatgtaaaatacgaataagttttgaaagacaactatgaaaacatatttatactaatttatgtactgatgtgtatttggtcctttcgtttataaaaaattaaacaatctttaaactgtggacttttcatttggttctggtttgagtttgtgtcctgtcacatagatggtaggttaagtacatggtagaaaagttcatttttagaaatctgaaaatcaggccaggcacagtagcttatgcctgcaatcccagcactttgggaggttgagtagggcagatcacgaggtcaggagatcgagaccagccatgaccaaaatggcacaaccccgtgtctattaaaaatacaaaaattagctgggcgtggtggcacacacctgtaatccc

SEQ ID NO: 3623 - DNA, 424 bp, Homo sapiens
gggaagtttttgataggtctcctttatcctatgtaatgctgacaaaggaaatttgagtgactgatattagataaaaaataaataaataaaagaagcttaaaaagttacaaacttcacagaaacactacaattcaagactggaagaacttacaaataggcttatttgatacatatggccttgtcaatgattctacaaaatcattaagcttccaaaaattgtaattaacacatgcaagttacactgattctttctacatttattaatgcaaatctctcatgtgacccttagctttttctatattctccaaaggaaaagagtgttaatgtaagttgatttttttaaattctagaatataaaactaagtgcattgaagaaaccatggaaaacacaaagacgtctataaaagaattttttaatcataat

SEQ ID NO: 3624 - DNA, 119 bp, Homo sapiens
agatcacctcaaggaactagacaagcaaaaacaaacaacactcataattcagataaagtatctatctgaacaatacaaaagattgaagtagcaaaaattgcatttttgaaataataaat

SEQ ID NO: 3625 - DNA, 268 bp, Homo sapiens
tttcaccatgttggccaggctggtctcaaactcttgacttcaggcgatacacctgcctcggcctcccaaagtgctgggattacaggcacgagccaccgtgcccggccagcagcaactatttttaaatagcccaagagtttaggcaaagttctacccttccttccatttcctctaagttactgaatcttgtcaatcctaatgaacacagcagacattggataggccataaagcttaaggcagcagaaaaaaattaggagtaaagagttt

SEQ ID NO: 3626 - DNA, 260 bp, Homo sapiens
cctgaaattgcccctgcccttagacactctgggtaggccaatggtcaaggtttttctaggcagggctgtgaggggccctggaactcccgtagtgtggctctggggttctcagcagttgcagttcccaggggctgatttacctcactcccagctggcttgatgggggagctgtaatcggcccttctgtacaaggatctgttcagacacccccagaacctgcccacagcagcaccaggcacttccagggtcatttaccccac

SEQ ID NO: 3627 - DNA, 323 bp, Homo sapiens
atgaaagctcccacgcgccgggtgatagtttactggattgtaacccacagaataaaaagccacgagcccacagtgacgcacacgaacaattcgctgagtgaagagtcggtgtacacggagctgccctttctccttcctggccctggtgggagaatttttatcacaagtgggtgatgggttttgtccagtgcttttccatgtccgccgggatggaataaacgtgacgtttgtctgtggccctgtcagtgtacagcacgtcacggatcatctgcatgtgtgcccaggaccggggcagtcacccagcagatacgcacgtgggaccc

SEQ ID NO: 3628 - DNA, 316 bp, Homo sapiens
gaagagtgtgtccctttaaagccccaccagggaatttctgagagactaaagaaactgaaaggaagcaggaaaaaaaaggttagggggaagtggaggggaactgtgattcaaacaattttctgtttattttatttaagtttttatttttcaataaggagattgtcccttaggcctccttaaatcatttattggttaaaatttaatctgatcattagtgcattcttacattagtagcattttaaaattgttgattctttttcttggaagttattctaccattaactagcattttgtttcacagattttagtcatcatc

SEQ ID NO: 3629 - DNA, 387 bp, Homo sapiens
ccatggcacagtgctgagaggggccaggaggaagattactgtcacatctcctactatatgtatctttccttaagaagcactggttggccgggcgtggtggctcccacctgtaatcccagcactttgggaggccgagacaggtggctgacttgaggtcaggagtttgagaccaacatggcgaaaccctgtttctactaaaaatacaaaaattagccgggtgtggtggctcatgcctgtaatccaagcactttgggaggccaaggcaggcggctcacttgaggtcaggagtttgagaccaacatggcgaaaccccgtttctactaaaaatacagaaattagccgggtatggtggcacatgcctgtaatcccagccacttgggagtctga

SEQ ID NO: 3630 - DNA, 369 bp, Homo sapiens
cataatggcagggctgggctccatcctgtccactgctgaccttagccatttaaaggatgaatgagataataaaataagcttgacataaagatgagatttccagtcatcagagctgcttacagatggaataaactgtcccaaaaaaatgtgatatagaagcagaaacaagctaactgatgtattccaggtcttgactttaatccaggaacttctggatatttaactttatcattgactgagctccagtgagctaaatatttttgcatgcattatctcactaaatccttatatctacaccatgaagtaggtaaaattatctttattttacaaataatgaactaaagctcaaagaggccacaatcaggggaa

SEQ ID NO: 3631 - DNA, 513 bp, Homo sapiens
atggagagtcttgcactgccacctgggctggagtgcaatggtatggtctcgggtgcctgcaacctctgcctcccgggttcaagcgattctcctgcctcagcctcctgaatagctgggattacaggtgcccaccagcatacctggctaatattttgtatttttagtagaatcagggtttccctatgttggccaggctagtctcgaactcctgactcttgatctgcccacctcggtctcccaaagtgctgggattacaggcatgagccaccgcgcctggccaaggatttgtgaatcttaaaaaagcaagattttactaaccttgttcataattagttttaaatgttttattcttacgtttgcattgagatggcctaaatcacaaatcatgttaggaaataacatgaaaattagaggctggtgtgtttgcgtagcaccagcctacacaatggagtagccacacaaccattcagcgtggatggcatctgcttttctgcatcacttgctacctgacaa

SEQ ID NO: 3632 - DNA, 332 bp, Homo sapiens
tgatgtccaccttgggtggatgtccacctggggacagatgttcacttgtggcttgagtgtccatctcgtgtctaatgtctacctggggcctggtgtttgcctgaggccttatatccacctggggcctgggcatccatttgaggcctgatgtctacctaagacctggtgtttaactggggcacagacttcttcctggagcctgacgttcatctggagcctgaagttcacctgtgcctgttgtctacctgaggcctatgtgtcaacctagtgcctgatgaccaccctgagttcagtgttcacctggggcctgacatctgtctggagtctgggtg

SEQ ID NO: 3633 - DNA, 534 bp, Homo sapiens
atcctcattgccctgtgaactctcaacccaggaatttggctcccctccctaactctctaagtacttcccttacccactcagtgtggtgatggcacctccctgaatctcctggcaaatgcgaacaggaactcctattcatcagagccaacttgataactgagaagattcctctctcatttatcagcctttgattatctttttgtgtctcttactatttgcgcttagcaagaaaaataaagaggtttgaacaattaagaagtaacaaagagctcatagttcacaaagagcaagtcaaaggatgtctggaatatttgaacatacaactgcctttggcatgaggtggcctacatacattctcaggggcaggataggctggagagctgatcaagctgccgggaagctgaagcaaaggcagggtggtggaatcaaatgtctcttcaactgaagactttaaaacttgggctttagctgggcgcagtagctcacacctgtaatcccagcactttgggaggtcatgtcgggtagatcacttga

SEQ ID NO: 3634 - DNA, 345 bp, Homo sapiens
tacttaaatcatctttactacctgagacttacaaatgacattctggacttaagtgatgttgctttaacttagacatatgcccaggagtgctgtttatccttccatgatggtgggagtagaatagatgatagtagacagttaatctacatttatatttagctgttaagtctttggcagaaagtggggaagacatgacaaagactagattcaaattcactctctgggtaaacagttctaggaagaactgatttcacagtgcatacttttttttcccccccccgagacggagtcttgctctgtcgcccaggctggaatgcagtggcatgatctcggctcactgcaccc

SEQ ID NO: 3635 - DNA, 456 bp, Homo sapiens
agaagcacagcaatatacattcataatatacgtacaactgactagatttgtttgagacaagagtggtgggatcagagccatgtggagagctcatggcctgtctaaattgttgtcatgtggaaatggggcagagtgttgccaattttctgattttttgtgtggaaaaaaatctccaaattgtagtttttaaatttggggaatgcaaatatatatatatatacacacacacacacacacatacacatacaatccatatacatatggagtatgtaagttggcaataacagtatacatcaaaaaatttacaaacactgcaagacaaataaaatccaagccatccatttgtgaccacagtcataagcattcacttagccaggggcttttagataattgtctgtgaagtctgagaaaagactaagataaccaagatgaacataatgtcaaaggacgaaatca

SEQ ID NO: 3636 - DNA, 380 bp, Homo sapiens
aagctctctgagatcacaagatgaaaggcctgatggcagttcaaagccttccttttgattattattctagtcaacatattttggggggagaaaataggcttaagatcacagtggagtaaatttcataaagagcagagtacaagcacaccacagaaatggacccaaacagagagtcatgttgccctgctaatggaagcactcaggtcttacgggggtagggagtgcgggtgtgttaagaatcaggccacctggagagtgatatttgctgtcttggattagtaaaataaaaatgcccattagtcttccacagctaccaaaagccagtgtgagtccaccttggccagttagttagggccagtgaccaagcacacctgcagcag

SEQ ID NO: 3637 - DNA, 127 bp, Homo sapiens
ggccctgcagtgtacgttctcacctcttatgcttagttggaactaagcagtttgtaaactttcatccttttttttgtaaattcacaaagctttggaaggagaagcaataaatttttgttttcaaatg

SEQ ID NO: 3638 - DNA, 304 bp, Homo sapiens
aaaaattttcagacatggttattatgatggctagatcatttcatcacatggcctgtaccacactttctttaaaggttcgcccggtgtcaaacatttagattctgtcaagtttttgttatcagaaatgactcttgggtgaacattcactatgacaatcttacatttttttcctcaggctggaatccctaggattgggcataaacagtttttaaagttcttagaacattttcttacattcctttttctcaaagttataccaattacactcctgccaagtggacattaagatgcctgctactattat

SEQ ID NO: 3639 - DNA, 327 bp, Homo sapiens
  misc_feature 141: n = A,T,C or G
gcaaacccaggcaactgcaaaagagccacaagaggaagaatggggaggagcaggaaccggcatagcgggaatcggatgcgggctgcactcctcgttaaaagaccacccgactgggctgaaaacacgttgcatgcgatttanagaagcgtgattatgggccggtgataaggcttcgaataaagtgatgccggctgggctcagtggctcacacctgtaatcccagcgctctgggaggccaaggcgggcggatcacgaggtcaggagattgagaccagcctggccaacatggtgaaaccacgtctctattaaaaatacaaaaattagcta

SEQ ID NO: 3640 - DNA, 365 bp, Homo sapiens
atatcaaccttttgaaaaagatttttagggtagaaaatcagttttcttaggtcaatctgacagaagtttaatctaaaaaaaatcaactgggcaatatttttaaacatacaattataataaaagtatactttgtaaatatatatatatatgaaaaagatagattcacttatttttagaagctaggtctttcaagtgctgtaagctgccaacattctcattcgtgttaaatacttacaggcttcaagggacttgttttagcaaacaaacaaacaaaaaagtaggccgagcatggtagctcatgcttgtaatcccaacactttgggaggccgaggtgggcagatggcttgagctcaggagttcgagac

SEQ ID NO: 3641 - DNA, 459 bp, Homo sapiens
acccacctttgactgatggggaaagtgacgtttgaagcggtttatgcaaggtcctatagctcaggattcaaacccaggctctcttgctttaaagcccacctgggcttttaatactacaccaaagcctcctgttatctcgtttgtccttgaaccccccacagagaagctggaaaaataaaaaaaacaaggacgacacacaagcagaaagtgatgacctgctgtttgtagttgatcaaatgccatcgatgctgcttatgtgacgtggtgtccatgcaccatccatttttatttttcaggtcttagttacagtcctatgtaatgttcgcatgtcagcatttgaaggatgtgtgggtgctcactgcctggaatgtgatagtgaggactgggggagcccacccagtgcagtgacatcttggcagggatgaatgactgatgtcatttattataaacttgaacctg

SEQ ID NO: 3642 - DNA, 497 bp, Homo sapiens
tcaaaatctctcagttgaaaaaccttatttttgagactgctacagtgtgaagcatctcaagagcaggtactgagccctcggtaatagcctttgttctgtagggtattgaagttgtatatattggagatactagacatttaagataaatgtgcatttatagagtaaatgtaagtattctgctataacagaatacttgaggctaggcatttataaagaaaagaaatgtatttggctcatatttctggaggctggagagttcaaggagatggcagtagtgtctggcaagggcttttgtgctgcatcataacatgctggaaagtgaaagggaaatttagcatgtgcaaaaaagacaaagcacaagggagggggttctcgctttataacaacgtgctcttatggtaatgaatccaagcctacaagaatgagaactcattccctgaagaattaatgaagaccctctagaaaggcattatacctcttaatgacctaatcatttc

SEQ ID NO: 3643 - DNA, 233 bp, Homo sapiens
gatgcagagtcagaagatgaagaggaggaggatgtgaaactcttaagtatatctggaaagcggtctgcccctggaggtggtagcaaggttccacagaaaaaagtaaaacttgctgctgatgaagatgatgacgatgatgatgaagaggatgatgatgaagatgatgatgatgatgattttgatgatgaggaagctgaagaaaaagcgccagtgaagaaatctatacgagatac

SEQ ID NO: 3644 - DNA, 316 bp, Homo sapiens
cctagattcaaggactggaagaatagatatctcttaagcgttctactgaaaattggaaatgcctgatcactgccttccaaactatgcataaaacatttccatcaacccagaaatttctcctgtgttctctgttgattccttttctcaccacctcctatttcttcaggagaccaccttctgattcctaacactgtaagtgttggtatatttttggatacacaaaatcaaaaattcatttctgtctcttttctttaatatcatgtgtttcagaataatccatactgttgcatgcatacatgttcttttaagtttattg

SEQ ID NO: 3645 - DNA, 379 bp, Homo sapiens
gacccaggctggagtgcaatggcgtgatctcggctcactgcaacctccgcttcccaagttccagcgattctcctgcctcagcctcccaagtagctgcctgaacgctggtgccagttaggccaacagtcatgtggcaatggctatgaattgcaagcattgctgattgttatctgctgctactgcctttgagctggagcggaacagatcaacatgggccaaacaagagcctctttggagatttctctactgcttcaagcacacagattccaagtttagaagctcaagagaaggttgaaaataaaatacatttagtttttgtcatctacctgggattacttcactattgaaaaaaaaaaaaaaaaaaaaaaaatttttgggg

SEQ ID NO: 3646 - DNA, 360 bp, Homo sapiens
tacatagttgctacaatatattatctgaaatatcaagttttccaccaaaaattactagacatgtaaagaagtaggaaagcatggctcttaagaaaagtacagtaagaaattgagagagatatttagcaaagacttaaaaaagcagctgttataaatatgttcaaagaattaaagtaggctgggcgtggtggctcactttgggaggcccaagagggtggatcgctggagctcaggagttcaagaccagtctgtgcaacatggtgaaaccccatctctacaaaaacatacaaaaaaattagccaggcatggtggcatgtgcctgtagtccctggaggctgaggtgggaggattgcttgagcc

SEQ ID NO: 3647 - DNA, 91 bp, Homo sapiens
tttctcacatgccactcttttaaaataggtatctatgtatgtgtcaacaacctttgaataagccagagcaactaggcaagaaaaaaaaaaa

SEQ ID NO: 3648 - DNA, 409 bp, Homo sapiens
ttagctgctagttttacagaaactttgttctgaaacaagattgcattttctggcccttcactgcacttttatttcttcaactttaatattttggtagatggtttttcctgattttggccatgctttttgtatatgctgaaattatgaaaatctctgacttagcagggctgcagcattgacagaacaatggaatagttttcattcaggctttggcattgtggctaagcggagtgggtgtcaacttgtgtactagaactttgaaatatcaggaagattcctttgttctcttatgggtcctcccagctagcaagaatgtgcctaatttctttctttggcttaagcctttgatccctagtaaaatacttatacaccatgagtaatcatctacttcatgtcattgatatgattc

SEQ ID NO: 3649 - DNA, 659 bp, Homo sapiens
  misc_feature 574: n = A,T,C or G
tttaattaccaggatgtgcttcttgctattcctggaactctgagaaggcttcaccattatggtcctattacttggtctttcttctgcctggaatgttcttccgtcttacatttccaaggttcaccctttttctagctccaggtctctgcttaaaggcacctaatcaaaaaggctttgcttaactatcttattcaaataacaagcctcttcacagcattactggatcatagtgggtgctccaaaatatttgaatgaatagtcaatatttcaaggaatagtctccatcttggaaatgagtaccttgtggcttaaattgtaggagctaaagcgttaggaactaaagaagattttcaagataatattgggatttatatccccataagataactaaggttttgaagtaaaaaaagaattggattaaagtttctgctctagaatttaaaaatataaaaacagaacatttatttaaggcacaagtgggagataagtgatgagaacacattgacacatagaaggcaacaacacacgctgaggcctttcagaggttggaaggtgggaggaaggagaggatcangaaaaataactaatggatactaggcttcatacctgggtgatgaaataatctatacaacaaaccctcaacacaagtttacctgtgt

SEQ ID NO: 3650 - DNA, 528 bp, Homo sapiens
gttcacgccattctcctgcctcagcctcctgaatagctgggactacaggcgcctgccaccacgcccggctaatttttgtatttttagtagagacggggtttcaccatgttagccaggatggtctcgatctcctgacctcatgatccgcccgactcagcctcccaaagtgctgtgattacaggcgtgagccaccatgcccggcctatcttcactttattaaaaaaggaaacgagtgaggattacagccccaaatggacattttttcctgggtgctatgaaaaggaacaatggaaaggaaagggaatatttgtcttcttttgttttattgggtcgtgtttgtttgtttgtttgtttgtttgtttgtttgacagggtctcgctctgtcgcccaggctagagtgcagtggtgccatcatagctcactgcagcctccacctcctgggctcaagcgatcctccagcctcagcctcttgagtagctgggactacaggcacatgccacaacacccggctaatttttcctttttttt

SEQ ID NO: 3651 - DNA, 664 bp, Homo sapiens
gtgctcttattcaggtcaagattattcacatttggaatactgcaataatatcctaaaaggtcagcctacctctggtcttgtattcctcaaagcacttaccatgataaccattttaaaccctgctaagcaaacctatcacttccctgcttaaaatcttctagtgactataaaatggatgaaggtcaagcttctccactaaacatagactatctggcctggtccttattctcatcactcacagttttatattctgaattttgcggctccaggagccctgaattgcttgcattctaccctctttcctttacgtaccatcctctcccatgctttctcctctgcctaaaaaggtctccctcacttcttcacttcagctggctaactcctacacatctaaaactctaccactcatagctggtaatcttagtggtctttcccacagagcccagaagcagcatgagaatcttccagacactaactacccatcaattgactggagttggcaacacagataaaacacacttgtctttcctgatctaaattattgctcttcttcatttatatgatgtactagcaaaggcttgcttccaacaagtttgttaaaaagaactaaggatacttaaatgctggattgaataactgagctgatttgatcattaatctttgc

SEQ ID NO: 3652 - DNA, 582 bp, Homo sapiens
ggtgaagcatgtgctcatatcctttgcttctttttaaattgtaggggaatttatatcctcagattttttattctgttgaaaagcaattctactcttcagtattggtaacaaatagtcctgatgtttcagtggctactagcataagtctatttctctctcgtgctgcctgtctatcatgggtcacctgagatctgttcctgatcccttagtacaggcttctcactgtgaaacctagcctggcaccttgccccatctggagtgttgttgattggcatggcaaaagtaagccatgctctaattaacatttctacccatgagaaatacatataactttgtcttatatttaattagccaagcaggccatttggcatgccttaacttcagaggtggggatgtccaatctttccatgtccctaggagaagaatgtagccatagtgacaacagcaacattgtcactaataataaggtatctaggcagttctcatgtatgtcatattctcttaccgtttcttttcaattaaatttctaaaatatacctgtaatctcagcactttgggaggctgaggtagtcagatcacttg

SEQ ID NO: 3653 - DNA, 550 bp, Homo sapiens
catataaacccatcgtaaggaacccacactaaacatatccttagctcaatttctctttacatgatgtcctaaataccatttaacacgaggaaacatttgagggatgatgaatatgttgattatcttgattgcattttatgggtatatacatatgtcaaaacatcaaattgtatactttaaatatgtgcagttttttgtttgttaattacacttcaataatttttttcggaagtaatgtgtcagttggagtctaattaagaggcagaaaatacacagtaatttgaaaagagaaggttttatataaagaataattaaccgtaatttggggtcatgataaagacatacaaaaaactctaatgaaaaacgtaagttttaggaaaaacactcaaaaaggagcaaacttggaaaggggtgccctcctcaaggctgaattacggcttcattggaaagctgtgctcgcagcccactgcatggcagagaagttcactggattgcctgaaccagagttgccccacagatgttggccaaacaggaaaaacagacaaacaga

SEQ ID NO: 3654 - DNA, 582 bp, Homo sapiens
tgtcctggcgatggagatggctcccctggggccggccgcactgctggctgttgtccgcttcctgaagagggtggtggccctcggggctggggacccagagctgttgttgacaggcccctgggagcagctgagccaaggcgttgtatctgtggccagcctggtcctggaggagcaggtggctgacacatggctctccctccgtgaagtgaggctggcagggctgggtggggcaggggcctgggctatggttccagcctagccaccagctggttgtgtagctgtgggggagtcagcatctagctatgggctccatctctgcgtctatcctgaaaagcttctcttttgtctatttgataagttgaacttccacaaacaattgcacttgaggctgggcatggtggctcagcccataatcccagcactttgggaggttgaggcgggtgatcacttgaggtcaggagttcgagactagcctggccaacataatgaaaccctgtctctactaaaaatacaaaattagccaggcctggtagcgggcacctgtaatcccagctactcaagaggctgatgcaggagaatcac

SEQ ID NO: 3655 - DNA, 455 bp, Homo sapiens
cgacagaagggatatccaatatcctcagaacagttaggaaactgcttaactagagcaagaaggaaaattatccaagccccaaacctgggaaacatcaatgcctacgaaatgaactgaagaggaagaaacaatagaggcacaagaggaaggaccaacagaagtaatggacacacaatgttctactgagtctatggatgacctgttgagcagatcatccatacttctctaggggttctgaaagacactctcctcttgttgggaagacaaaaagccccactctgctactaggtgcctgagtctaggtgcttctcctccctgtcctttcactcccagctctgtcttctctacctgtccctagaaggttcctgtctttgtcacctcagatattcaagattcagctccaagatgccatctgtcttcgaagcatcagagctttgctgaccctcccgcattag

SEQ ID NO: 3656 - DNA, 504 bp, Homo sapiens
taggactaaaaaggcattattccccgttcctcttatcaggaacctcattgacagaggcatttactttctatgaatacaaatgactatggctattgtgattagaagcagaagaaaaccagctcatgaaccagaccctgaacacaatatctgggggcatgacagatatcccagtcactcctggagcaggggagagagctgaagaggcatcacgttaagaagacgcaccagtgctgggcacatttggtgaatctaattaacaggggcaacttgtcggctgggcgccgtagctcacgcctgtaatcccagcagatcgcaaggtcaggagatcgagaccatcctggctaacatgatgaaaccccgtctctactaaaaatacaaaaaaattagccaggcatggtggcgggctcctgtagtctcagttactcgggaggctgaggcaggagaatcacttgaactagggaggcggaggttgcagtgagccgagatcacaccgctgcactccag

SEQ ID NO: 3657 - DNA, 587 bp, Homo sapiens
ggaggctccaagcagagaggagaagagggaacgggagggcatggggcatgagtcagctgggggagtgagggccacatccagaggatcgcatggccagggcggtccgaggccatgaatcttaggtggatctcaggggccacagagcattcagaggctaccagtcctggagtcaggaatcaagagggggtcacagctcatgaaccaggaggccaggagccatagaaaaacccaggctactggtcaaagtgagaattcccaggtcaccagcgagtaaaggaagcgggaagaccaaagggattgagatgggaaaatggaaaatcaggggtcagaggtaggtcactgaggatactaagggctctgggaggtcaaggagaaggcagaggctggtgccgtggctgacacctgtaatcccagcactttgggagtctgaagtgggcagatcacttggggtcaggagttcaaaaccagcctggccaacatggtaaaaccccatctctactaaaaatacaaaaattagccgggcgtggtggtgggcacctgtaatcccagttacttgcgaggctgaggcaggagaattgcttgtaccc

SEQ ID NO: 3658 - DNA, 650 bp, Homo sapiens
gacgttcagcggacgcgggagcaagatggcgattccgggcaggcagtatgggcttattttgccaaagaaaacacagcagttgcaccctgttttgcaaaaaccatcagtgtttgggaatgattctgatgatgatgatgagacctctgtgagtgaaagccttcagagggaagctgctaagaagcaggccatgaaacagaccaaactggaaatccagaaggcccttgcagaagatgctgctgtgtatgaatatgacagtatttatgatgaaatgcagaaaaaaaaggaggaaaataatcccaaattgcttttggggaaagacagaaagcccaagtatattcacaacttgctaaaagcagttgagatcagaaaaaaggaacaggaaaaaagaatggaaaagaaaatacagagagaacgagaaatggaaaagggggagtttgatgataaagaagcatttgtgacatctgcatataagaaaaaactgcaagagagagctgaagaagaagaaagagaaaagagggctgctgcactggaagcatgtttggatgtaaccaagcagaaagatctcagtggattttataggcacctattaaatcaagcagttggtgaagaggaagtacctaaatgcagctttcgtgaagccagatctggta

SEQ ID NO: 3659 - DNA, 580 bp, Homo sapiens
cttttctaatttttaagtttatgtgctgtgtgtgtgtatgtgtgtgtgtgtgtgtgtgtgtgtgttatcagaaactcagattgctgctgtcttttttcacaagaaagccctgtttatccttaataagacaactttgcatgcaaaaattttgcaactaaaatgacctagaaggacacgtgctttttagcatactaattgcttttgccatgacgagaaaataatatcttgtagctggctttgcatttcctaagctacatatgtagacatccacatccaggaggaaaattcattttaatgtgctttgtaattttcataaatgattgcctagtggacctgcaggtcccactgggccttgggtacggtacagcacatggatttgcagctgtgatattattatagatgtgtgacagctcaattgaaaaataatggcaaaagggaggagaagtcaagtttaatggccattgcaagctaaaatgttaatctagttattgttttagtgtttaattaataataattggtttcttaaaacatctaggtaaaaattatagatgccaagtcctcattaaaatgatgagcatgc

SEQ ID NO: 3660 - DNA, 610 bp, Homo sapiens
gctgcatgagatgggctcagttcagtgtctcctcgtggtaaaagactcagtgagtgctattattattagctatgatttatttatttattattattttttttaggtggagtcttgctctgtcgcccaggccggagtgcagaggtgcgacctcaactcactgcaacctctgcctcctgggttcaagcgattcttgtgcctcagcctctccagtagctgggattacaacgcctggctaatatatatttttatttttatttttagtagagacaggatttcaccatgttggccgggctggtcttgaactcctgacctcaaatgatccacccgcctcggcctcccaaagtgctgggattacaggcatgagccaccacgcccggcctatttactggtttttaaaattccctatctattccaaaaatatctgaggcagcttataaaactaaaacaacacaggctgggtgtggtagctcacacctctaattccagctatttgggagactgaggtgggaggattgcttgagcccaagggttggaggctgcagtgagctatgattacaccactgcacttccagcctgggtaatagagtgagaccctatctcaacaaacaaa

SEQ ID NO: 3661 - DNA, 621 bp, Homo sapiens
aaagtagttaatacagatgggatgcagccagacccgcctcatgcagtgatttcagcagatgcagatctgcctccaagctctcatgggcagaaagagccgcaagagaacagtgtccttgatgagcaattaactcatttacctaagtatctggtgcactaaatagattcacatcctgttctgtatgaatgaatggaaaacatcaaggatggcctttgtatgagtacaagtgtccaatgtgaaatctgtgtacaaagcacatgccattggaagcttggtcatcaggaaggcagaaaggaaattggctctttatagaatctttatagtacagaaacatatagaggtacatttccttcctctgagagtgccgttccataccacctggagagaatgccaggtggtaacaatgtacagcaggtttaatcaagacccagcatcctaaatcatgcgcagagtgccaggcgcgcaaggtggctcacgcctgtaatcctagcactttgggaggccgagacgggcggatcacctgaggtcagaagttcgagacatagcctggtcaacatggtgaaaccctgtctctactaaaaatacaaaaattagctgggatggtggtgcacgcctgtagtc

SEQ ID NO: 3662 - DNA, 622 bp, Homo sapiens
gagtccccaagtggccatgttacatgtgatctgtgacatatacgatcagatgttacctgcatcctagggtcgcctggcatgcccatgagtgacgcttaggaccgtgcctggtgctggtgtgtggacaatgctgggccagtttgcccagggctatgcctgccacctctacttttatttcaccctctggaggcggacgcattggaaagcatgtggggcaggaggtgaggaaggaaattcagacaagctgagcagagcggccaggactggaatcttgggtgccaacccgcaaggtggggaaactgatttccatttcccagtaattacaggtcaataccacacctgagaaggcaggcaggaatggaacccagactgactccagggctttgttgcttcctgtatcagaaccaaaccccgggtgacctcctgttgcatgccccttgtcccaactttatagattaggacactgcagctccatcttgctacccaagagttaagactttttctggaggacctggctccccgggtttggaaatagtaccattgtttcctaactgggtgaccccgagcaagttgcttaccctctcttggcttcaacgatctcatctataaaatgggatcactt

SEQ ID NO: 3663 - DNA, 623 bp, Homo sapiens
gacccaaggaaattcctaagtgttttagttacatgtccttgaagttgtttctttacacattttgttcactgagggcctctttactggcttgggtgcaggaactcagtctcatgtttgccatcccaaagttctgccttacactgtgttggtcttatcatggccattgtttttccacatggtagcaagatggccaccaggagccaccagctctatcatatcctcccagcaactccattggtaataggtataaaaatgaattccagcattgcctctcatttaactaattcagggcaagggcttttccgtgcatcagtcactgtgacggaacacagtgattggacagacctggtctagagtccagccccggagccctgggaaccacacggcaacacacagaagacagcatgcttggtaaacaggactaacacttgtcagatctcgggggaaaggatgttgcatagttcagtaccacaggtgtcactgtaggtgaagggaaaaaaaaatgacacatagacattctaaaagctgcatttcatattaaatcagccaggctttgatgcatatggagaagaacttttagatgaatgctatttcagaaagcccttgtcccagtgaatattact

SEQ ID NO: 3664 - DNA, 622 bp, Homo sapiens
gggcgcacgggtgcagtggcaccaggcagtggtggcagcaccgggtgggcagccatgattaatagagtgctgagggcacccctttccacaggtgcatggctcctgcccctgcttccatagatcatggacttagcctcaacatatctgactgaaattgaatttggcttctctctcagctgttcagttcctatattatacaaggttagatccctttctctatgagcagaagaaccaaaccatctgcagcttcggaggagaaaatgtgctttcaattatgcacctggcctgaatgttgagccgcagttcgatgggtccctaattgagccatcatggtgcgaacatacagggagacactgtgtgcatcaggcctgtgggttttgccctaagataatgacagtacagcagccacatcaccacggtgaccaccacagctgccaccactgtcacctccaccaccgcagaaggcccaagagcctgcagacatacatgctgggtgagaaggaagttacccagcaagggtccagggcagcaggctgtgttagggtccctggaaagcctccctgtatcctccagccagaatgcatcatcctgtccccagagtgcctggcctgctccacagtca

SEQ ID NO: 3665 - DNA, 641 bp, Homo sapiens
caagtcttacccacttcctccctctcctcagggcattgtacagggtttcttactctggcctagaggtcctagatgttttctcaggctgcctaggccctcatcttcaaggttgtacaatgggggaccggacctaggggccttcttaggttcctcttgcatcagagtttttgggagttgacctgggctgatgcctaggggctccagtcccccacccctaccttagtccactgggggccgtcagcctcccataggaactccggagaccaccagctcagggccttgcctagagccactgctctacacgctacagagtctggccactgcctgtctctggttctttttacatgttgtagagacggggtgtcagtatgttgcccaggctggacttgaactcctgggctcaagagatcctcctgcctcagcctcttgagtaactgggactacaggcatgtgctaccttaccgggtccctttactttttgcctgcatgtggctttgagcctgggaagagttgaggggagggaatgtgctgaagttttccctttcttcttcagccctggggagccacaggcaggtgctgagtggctggagctacagttagtattggcagcccagccaataggtggggcccaccagtcccca

SEQ ID NO: 3666 - DNA, 644 bp, Homo sapiens
gaccaaaaataatcaaataagtcaataaaaagaaaaggtcaagtaataaaaagcattgtgaaaaagttaaaacaaggtgaactgacagaaaatgactaacggtgtggcaaagattgggttgtctgtgtaggtttcatataagttgagacctgaatgtcaagaaggaggtgcacatctgaaggtctaagaaacatgagataaactccacaggatatttgagtaatatcaagatgcaagttgggcatcttgactgtttacttccttaggtttactttcttctctagaactggacactgctttttttattctttctctcattttacttattcattattcactaaaccaaaaatatgtattaacagtttactgtgcaccattcccacttttagtgctaaaacatctttgaaaattaaactattgataggctagcaatgaaaaatgagaaattgaaatttaataagtaccactacaagaatataaaatacatataaatcttacaaaatatattcaggatctacatgctgagaacaataacatactgatgaatgaaatcaaagacctaaataaaagataagccatattcatgtactggaagacccaattttgttcagatcttaattcttcccaaattgatctatagagtc

SEQ ID NO: 3667 - DNA, 626 bp, Homo sapiens
gaaggcccatccccagagaaaaggcttcataagtgcttgcagcattgacttgtctaagccccacccaaagagagacccatctgtacaggccgatgggacacagcctggagcctttgtaaagccctgccttggaggaagctgatgctctttacttgctatcttgactcagcgggtggaggatgaggctctgggccctgtgcctaaatatcataaggagctgggagttagtgcagacactgctgattatctgccccaatctatccctctcttcttcctcttctacaagctctgcttttggccccaatttcaggtgtcccccctcctccttcagccacaaggggagccaggcctgactgatctgatcatcatgcttgtggtaattaggtcaggccaggcacggtggctcacacctgtaatctcagcactctgggaggctgaggcgggcagatcacttgagatcaggagatcgagaccagcctggccaacacggtgaaaccccgtctctaccaaaaaaacacacaaaaattagctgggcatggttgtgcatgcctgtaatcccagctacttgggaggctgaggcgggagaatcacttgaactcaggaggcggaggtcacagtgaggtgag

SEQ ID NO: 3668 - DNA, 590 bp, Homo sapiens
tcttatcaagttccctggtagacctgtctttccttaacccagtggaaatgttatgagtgcatggagggagaaacattcctgaggacaggcagagacaaaaaagagaggcaggactaccaacctcttagacatggaaactcttctccgtaactcagccaaaaattgacctcaaatcagagtagttgcttagcaacagcatgctgtaggacgtaagttctttaggtatactgggaacaagcccttaggcagtgttctcacacttccaggataatccatttggaacccccatcacttgggacaggcagagctctaatcattcacatgagctgaggtaaacctgggcttaacatgtcacctagaactaaagtgaatgcagtgacttttcggtaaagattttctaagcaaatatattccattaaaaaaagacagaaaaaaatggaacaaataatccttcaatgcaaaggcatgcatatattcacaagaaacaacagagaacagggaaccaggacctctccaaaaggacaatgcaaaaatctagtgattgacactaataagataatccaatttctgagctctctgacccagaatac

SEQ ID NO: 3669 - DNA, 603 bp, Homo sapiens
ccagcatgtgcttgtggtgaggactccaggaagaatccaatcaaggcaggagacagaggggagctgacatcacatggtgagaggaaggaagcaagagagagagtggaagaggtgccaggctcttttcaacaatcagctcttgagggagctaatagagtgagaactcactcattaccttgaggatggcaccgactcattcatgagagatctacccccaggaccaaaacaccatccttcaggcaccaccttcaacattggcgatcaactttcaatatgagacttgaaggcaacaaatatccaaactatatcatttgtaatattgttactcttttttaatgctctgtatttttatggacacagaaaataagagaagccttctccctttcttcttctctaaccctcaacttagtagcttctacttttaaactgtagtgaggccaggcacggtggctcatgcctgtaatcccagcactttgggaggccgaggaaggtgaatcatgaggtcaggagtttgagaccagtctggctaagatggtgaaaccacatctctactaaaaatacaaaaattagccaagcacagtgacgggcacctgtaatcccagc

SEQ ID NO: 3670 - DNA, 554 bp, Homo sapiens
aggcagctgctcatgagtggggtggtccgggcttgggccttggaagacagaccaggatgccccagtagctgggccctgccctatccagagcatgcatgcctgctgagggacccaaggagagaggctttctgccaacgcaggaagcttccttcacaaagggcaatggtagtatccagggttctttctcaacctggccccatgtgtcccatgtcctgaccgagaatgctgttctgtcggccccttgacacccagcggcccctcaggcagaggaggccttggtaagggctggaattcctggctgggggcagagtttccgggccacgctgctggctggggtctggggtgccttccatgtgtctactggctctcggggctctcctgggactccaggcgtgtccccactgagcagagagtccacctgctcctgtccgtaaggctgagtcagcaaggcctttactgagcatccaggagttttctcgaacattatctcaaggtgccgggccattttggtgggtaaaggcctggaagtgcatcaagcctgtgcttcctccctc

SEQ ID NO: 3671 - DNA, 655 bp, Homo sapiens
tgctaatatatgtaggtatgttgttactactatttaacatacatctgtttaggaagtattgataggtacttatgtccatctgatatggtttggccgtgtccccacttaaatctcatcttgaattgtagtttccataatccccacgtgttgtgggagggacgtggtgagaggtaatttaatcatggggacagttaccctcatgctagtgagtgagttctcaggacatctgatgcttttataaagatttcccccttttgctcagcacttctccttgttgctgccatgtgaagaaggacatgtttacttccccttctgccatgagtatttgtttcctgaaaccttcagccatgctgaactgtaagtcaattaaacctctttcctttataaattacccagtctcaggtatgtctttattagcagcctgagaacagactaatacaccatccaaacacagggaactataagtacagttctgatgaaagtagcagtcaggaagggaattgagcttggattcagcatcagtgaatacacaaaataaccaaagagaataggggcttgacagtgtgctcaagatgataaattagccaaatgagctaaaagacaggtaatggctgagactcggttgttccagtctctcgggagacaccacctctag

SEQ ID NO: 3672 - DNA, 635 bp, Homo sapiens
tgatacaaatattctgctgttgtaatatgatagcagccatgccacagacaatatgcaatgttgtaggctacattccaatgaagccttatttataaaaacactgtagaccagattcggccttcatgccaacttctgatatagataaacagaatgcaagctagatgacacacatctataaagatgaaaattgaaagcaagagttctaaacctaagttcaatgaatggacttactaatcataaattgtcctttccaagacacacttgtaacaacaatagagatgaaatggctttcatcagaaactcactggacaatgaaatgaagaaaaccaggaagcagggcagtggacaaggagcctcagagtgcactggaggctgcgggctgtatcctgtaaggtgtttgactgctgtctctcaggcccagggtatgtgtttgccttagactgtgggcccaaagaactcctgcaggcaggccgggcacgcctgtaatcccagcactttgggaggctgagatgggcggatcatctgaggtcagtatttcaagaccagcctggccaacatggtaaaacccagtctctactaaaaaatacaaaaattagcctggtatagtggtatgcgcctgtggtcccagctactcg

SEQ ID NO: 3673 - DNA, 547 bp, Homo sapiens
catataaattgttccagcaccatttgttggaaatcctttcttattcctctgttgtatcgctagggatgtctgtttaaaatcaattgactatatatgtatgagtctatttctcaattctattcttctgtgaacaatgcactcttttgactactttactgttattataaaaattgaagtcggattaatttctccaaatttgttcttcttcaagattgtttggctatttcatgtccatcacatttccatatgaattataaagtcatcttgttaatttctatttttaaaaaatttgctaggattcaccttacctggtcattttccatttctattacctttcattttctaacaagaagagaaacaacaaaaagtaaaacaagaattacttttacttatatctaaatttaaggaaattttttttcaatgtgtcctaagacctttgagtaaagtcttctttaagtttttcaaattttatacagtggtaggaacacatattggttggaaaatgtgaaggtatcatagaaagtctaaatatcactggcagtcatct

SEQ ID NO: 3674 - DNA, 461 bp, Homo sapiens
caagcaaatgataatacaaatatatttaatatacatcaactattccctaaacacagaggatactgaaggaagaataataacagctacatttgttgtgcgataattcacagtgcaattatatgagacacgtactattgtcctcattttattgacactgacactctgaaaagataaataaattgcccaaagccacaaagctaataagttctggagctggaactacaagtcctctgattattaaataatgatttgcctgtttcacggcattgcttagaagtagtcctggcaatcttcaaagaaaatccaagtgaaaccattggactagacaaagttctggagattttactcttaaataaaattctttgtcaaagaatgttccactgcactgccttccttcctgcttccctgtagccactgaatatattcccaaatattttaaagtaagcatctctaaatccctc

SEQ ID NO: 3675 - DNA, 633 bp, Homo sapiens
tccttcatctatacctgctgcttcaaactctctctgtctctgaattcactttcttgtggtttcgtctaagccaaagtgcttggtgtgtcccttcctcactcaaaatgcctccctcttaccttgactcccccctcttttggtagaaccacaagcacccttcctccaggaagtctctctggatttacctcccagctttctgttcatctcatttgtgggtagcccctgcacctgtgatttgtgggtagcccctgcatctgtgattgtggttttggttctagaactcacttccccagtttccctccttgcagatggagtcatttctccttcctcatttactccctacaggagtggctctgagcagccgtccttgggcaagcgtgcatgagctggagcttagccctgcccaccacccaccactgcctcttggaaatgtgagccgctccaggtcaggcatttaatcaccttgcattcactgagcccacgtgtaggtagggtagaggctggggactcaaacgtgaaggcagggggctgtgcctggtggcctgcatggaggaagagctcagcagactctggggaagtggatgatcacatccatggggacttgtccctccgactggattgcatgcctctgca

SEQ ID NO: 3676 - DNA, 637 bp, Homo sapiens
atgataaaagtgtttaaatgagggaggattattcaattaattgaattgaagccaaagaaaaaatattcatctggggggaaaagtgagatccatatttcataccttaccctaggataaattccacatggatcaaggatttaaatgcaaaacgaaaccatgaaagtgttagacaaaaccatggaagggattttttttctgttatgtctgaatgtggaaaccgtttctaaacatgatacaaaggcaaagagtcacaaaagactgaaaaattaaccagaaaaaaaaatttgcatggcaaaaacctttatgtgggaagtttaaagataaagaacaggccgggcacggtggctcacgcctataatcccagcactttgggaggccgagacgggaggatcacgaggtcaggagatcgagaccatcctggataacacagtgaaaccccgtctctactaaaaatacaaaaaaattagccgggcacggtggcgggcgcctgtagtcccagctactcgggaggctgaggcaggacaatggcgtgaacctgggcggcagagcttgcggtaagccgagatcacgccacagcactccagcctgggcgacagagcgagactcagtctcaaaaaaaaaaaaaaaaaaaaaaaaa

SEQ ID NO: 3677 - DNA, 543 bp, Homo sapiens
cctcaacaatatcccaaggtctcctccatgtgctcgatgagactcaagaggtaattaaaatatgactcttccttgcaagttgctgagagcctggctaagaagctgggtatttaggcactgctcgggtgagcatatggtgtagtagtggtttagagcccaggttccaagatcaaatcctgcctgcttcaaaccctgccttcagtttactcactggggaggctgggcacatggggcagcctctctgagctgcaaaagtcgcttcacagttacaaaggcaggcataaaagtgtggttagaaaggccaggcgaggtggctcacgcctgtaatcccagcactttgggaggccgaggtgggtggatcacgaggtcagaagttcaagaccagcctggccaagatggtaaaaccctatctgtactaaaaatacaaaaaattagccgggcgctgtggcagccacctgtagtcctagctactcaggaggctgaggaaggagaatcatttgaacccggagggtggaggttgcagtgagctgagatcataccact

SEQ ID NO: 3678 - DNA, 481 bp, Homo sapiens
atcactagagataacacgtaagatgacaacaatcagaaattataactttggtaatatcaaaggagattgggaaaaaaagtcttaaattgacttttaggagataggaagtaaccagattacaaagtaaataactagggatctacttggagttgagaatcttcatggacaaatatgatttaaaaaaaggtcaaactgagctgggtgcggtggcttacgcctgtaatcccagcacttcgggaagccgaggaggtgggtggatcacgaggtcaggagatcgagaccattctggctaacacggtgaaaacccgtctgtattaaaaatacaaaaaaaaactagccgggtggggtggcgggcgcctgtagtcccagctaccggggaggctgaggcaggagaatggcatgaaccccggaggcggagcttgcaatgagcggagacagcgccactgcactcctgcctgggtgacagagtgagactccgtct

SEQ ID NO: 3679 - DNA, 553 bp, Homo sapiens
gctccctctcttgccatgtgatgcgcctgcccctactttgccttccaccatgagtaaaagcttcctgaggctccccctagaagctgagcagatgttggtgccatgcttgtacagcctgcagaaccatgagccaattaaacctcttttctttatgaattacccagtctcaggtattcctttctagtaacatagaaatggactaatgtagttatatattttttaaaggtattgtattttaaaaacagcagcaatagtgataggaagcttggacttccctggacaatctgagattaagtgtaggggatcttgatctcctcatcatctgactatagcttcccaggaagctctgatttccatctgtgcgtccagtgaccccataggtgttggccccaccccagttttaggaagagagcatgcaatccacaccaagccaatcagtgggctgctgccttggccacaggaattggttaaaatggcaggacctaatctaagcaaagtgaagttcagggctcgtgtttagaaatgtgggacaaaggcattctctgtcttcttc

SEQ ID NO: 3680 - DNA, 608 bp, Homo sapiens
ccagcatgtgcttgtggtgaggactccaggaagaatccaatcaaggcaggagacagaggggagctgacatcacatggtgagaggaaggaagcaagagagagagtggaagaggtgccaggctcttttcaacaatcagctcttgagggagctaatagagtgagaactcactcattaccttgaggatggcaccgactcattcatgagagatctacccccaggaccaaaacaccatccttcaggcaccaccttcaacattggcgatcaactttcaatatgagacttgaaggcaacaaatatccaaactatatcatttgtaatattgttactcttttttaatgctctgtatttttatggacacagaaaataagagaagccttctccctttcttcttctctaaccctcaacttagtagcttctacttttaaactgtagtgaggccaggcacggtggctcatgcctgtaatcccagcactttgggaggccgaggaaggtgaatcatgaggtcaggagtttgagaccagtctggctaagatggtgaaaccacatctctactaaaaatacaaaaattagccaagcacagtgacgggcacctgtaatcccagctactc

SEQ ID NO: 3681 - DNA, 528 bp, Homo sapiens
gtgactacatgtaacattcagcccaggatactgtgttctctgagaatattgttgttatcaaaagacgggagaggcatggcccagaagcaccacgtttgataaagaagcagaagagaagtcttcaatgaaagcaaggttagtgtgaaatgatattttttaaaaccaaagtaaccttaggttgtctaaatagaagtagatttgtacaagggagacaatcaccattttaactcaatattaagcctcaacaatatcccaaggtctcctccatgtgctcgatgagactcaagaggtaattaaaatatgactcttccttgcaagttgctgagagcctggctaagaagctgggtatttaggcactgctcgggtgagcatatggtgtagtagtggtttagagcccaggttccaagatcaaatcctgcctgcttcaaaccctgccttcagtttactcactggggaggctgggcacatggggcagcctctctgagctgcaaaagtcgcttcacagttacaaaggcaggcataaaagtg

SEQ ID NO: 3682 - DNA, 627 bp, Homo sapiens
ctcaatcggaattagagaatctactgtagaaaatgtgtttggagtgagtcttatgtgtaatattcagtcctgagtcatcatatttttttgatatgtgtataatgcaagagtgtttaaaaatttttctctattaaaacactgtaacacagttcgcaaaagtgtggtccaaggacattgaggagtacccaaaaccctttcagtggatcggcagagtacaaatcatgcatgtgtgtagaatatacactccatgtgtaagatagaccactgtgctttaatgtaacaaagaatgaaaagtttattgatcggatttaagattccacattgcacaaaaccttaaaaactttaacaaacttttctgggctgggcacagtgcctcacacctgtaatctcagcactttgggaacccaaggtgggcagatcatgcgaggtcaggagtttgagaccagtctggccaacatcgtgaaaccctgtctctactaaaaatacaaatagccgggcatggtggcacgcgcctatagtcccagctactctggaggctgaggcatgagaatcgctttaacctgtgtggtggaggttgcagtgagccaagatcttgccactacactgcagcctcggtgacagagtgag

SEQ ID NO: 3683 - DNA, 638 bp, Homo sapiens
gtggagtacagtggcacgatctcagcttactgcaacctccgccttctaggttcaagagattctcctgcctcagcctcccgagtagctggaattacaggcacccaccaccacacccgtctaatttttgtaatttttagtagagacggggttttcaccgtgttggccaggctggtctcgaactcctgacttcaagtgatctgcctgcctcggcctcccaaagtgctgggattacagacatgagctaccatgcctggcctaaaagtcactgctgaaaaaggtgtttcaggctcatgcttctgtgagatcccccccaagcacctaggactttttatctactcattcatttgctcttactgtcctcctgcctgctagactgtaaccaccatgagggcacagactgggcttgtcttgttcagctctgtgaccccaatacctgatgcaaaaggaacacctgataattacaaaaacctccatatttcaggaatggcaaatacttaaacaggtgagaaaaaacattatttgttcctgatcttaggttgtataaacctatttatcataataagcaattcccagtactcatgaagaccagcgaggaggcataagaaacagggcaggggctgggtgcagtgactcacacc

SEQ ID NO: 3684 - DNA, 584 bp, Homo sapiens
caacctccgccttccgggttcaagtgattctcctgcctcagcctcccgagtagctgggattacaggtgcctgccacttaatttttgtatttttagtagagatggggtttcaacatgttggccaggctggtctcaaactcctgaactgaggccatccacctgcctcggcctcccaaagtgctgagattacaggcgtcagctactgcacccggccccttattcttctgttcataaaatagatactgctctctagtgtatataatcattaaatggcaaaagataaactcatgaatcagagaaatctatatttatgtagttatggaggaaataaaaattgtgcaaaaatgctttaaccgaacatagattgttttgcagagtgaaaaacaaagcaaaacaaaacgaagactctaagcaccctctgcttgcccagtcatacaaagcatcacatcagtactctaattacttgttttctgtctagtctaagtttttctactcaaagtgtggtcctcagaacagcagcatcagcgtcgcttgaaagtttttagaaatacattatcttgggccgggcgcagtgtaattccagca

SEQ ID NO: 3685 - DNA, 633 bp, Homo sapiens
cccacaatggggtcctcattgctagatgagtgccaaatgacccagcctgaaagcccatcttaccaccagtataggtcacccaggaggtaaatgctgagacagagccaggaatgcacgacgttaactgggaggtaacacttgtgaaagatacagggcaagaaagtgggattagacagggaaagctttcagacttttagatgtactctgaaagtgtgtgagaaaatgggaggaagcaaattggagagcctcagactgccatgcagacctaaccaattcttggccaacccaatgggaagtttccaatcaaagattgcccatagaggagcacagcattgggcagaaatatcaggccctagaaccctgccatgctcagtcgtgaggatggggctgtgcaggaagagtgtggtctgagctagggtgctgtgtggatcctgaagtcactgcagatggagattagccaattgcaatctgagtgtcacacttccatagctgccacagttgtttaatgaacaaatgtttatttctcacttcaaaaaacagtaatggggttgggcttggtggctcacgcctataatcccagcactttgggaggctgatgtggtggatcgctaaaggtcaggagttcgagaacag

SEQ ID NO: 3686 - DNA, 576 bp, Homo sapiens
aagggaagggctactttttttataaaagaaaggatgaagatggtttagtgaaaataagattgtgaatttggcaataggagcatgaggaaattgagttgtaatggcttctttttcttcagaatagagaaaaaaaattgtgagaggtttgaagagaaagaaatcattaagtaatcttctcatagaacaaaaaagcatggccactagtggataggcttgcaggacaaaattgattactaaattctgatgtgagattgttaaagtgaaagcagtttactcagttatatgattttctgcagaaaactcatgcgtatggatggtcttggacagcattaaagtgtaaggttgctgtccccagcttataaaaaacacttataccaattcaagcctttattactcattaaattgtgtcaaatattgggaaactattattctgcaagccttcattccacataggaccattagggaggaagtcaggttgcctacttgctttacaagacaataaaggattggtttgtgtgtgtgtgtgtgtgtgtgtgtgtgtgtgtgtatacacacattcttttatagaggagaaat

SEQ ID NO: 3687 - DNA, 451 bp, Homo sapiens
aaatgatctaaaacatgttgagcacttagagtagtatgtggcatctaataagtggtcaataaattaattattgttattacaacaacaacaatttgttttaaattgaaaacttcaatattcaaatattccaaaaatgtataccctacaatgcctagatgaaaaggaatcaagcctagcatggtggttgatgcctgtaatcccagcactttgggaggccgaggcaggcagattacttgaggtcaggagtttgagaccagtctggccaacatgacgaaaccccatctctactaaaaatacaaaaattagccagacgtggtggtgcacaactgtagtaccagctaccagggaggctgaggcgggagaatcgcttcaacttgggaggcagaggttgcagtgagctgagatcatgccactgcactccagcctgggtgacagagcaaaactctgtctc

SEQ ID NO: 3688 - DNA, 566 bp, Homo sapiens
atttgcttcaggtatctgtaggtctttttgtttcaaacagacacagacaatcaaccaagacatattgttccaaagaagaaataagctaaaccatcttcttaccaaggccagagatagactgttctgatctatttccactctgtaactacttaaagcaattcactttcatttcccacaagaggagatttggaagtgcatcaaagacaaacttgaaattgggttaacccctttgttctcagtttttgccacttggcatcaactagctctctaaagaaaggagaaacttggagtgcctcttatgatctgatttcaaaggctataactgaaactctttgggaaataagtggtcatttttgttcaattatttcttgtatttttttctaattaaattagtggaaaccgtttttgcttctaggcactagttaaggtcttgttaaaccagttcattggaatcgtattttaatttatatactttttaacttcaaaaggagcagtcatttttatttcatctccattgccttgccatccactgcttcaatttaatttcaaatttattttaaattatg

SEQ ID NO: 3689 - DNA, 652 bp, Homo sapiens
cctccaccccatgtcattgagagcaaagcccaaagcccttaccgtggccaacaagactccatgtgttttcactctgcctagcccacctctttgccctcatctactactttctccaggctctctcatctccagcctctggtctctctgcagctccccagaccttccaggaatgtccctactctggggcctttgccctggctgcccgctttgctgaaagcatccttctgcagacatccacacacatgccccctcaactcctcccggaacatccacacacatgcccctcacctcctcctggtacatccacatgtgtacccctcactttctccctcacctcctcccagtacatccacacacatgcccctcacctcctcccggtacgtccacacacgtgcccctcacctcctcctggcacatccactttgggaggccaaagtgggtggattacctgaggtcaggagtttgccagccagcctggccaacatggtgaaaacccgtctctattgaaaatacaaaaattagctaggcatggtggcacatgcctatgatcccagctactcaggaggctgaggcaggagaatcacttgaacccgggaggcggaggttgcagtgagctgagattgcgccactgcactccagcctgggctacaga

SEQ ID NO: 3690 - DNA, 582 bp, Homo sapiens
ttgttattatggctttttctcctagacaaagtccaaaatgacattttctggcctgggggcgatagcagggcgacatttggccacagtatctgggagggaagtttccacatccgcggcagctgtctagacttctgatccccagtggggaaacacaggctctgaataggagtgtgaaggcgtcagaccctcccaggaaggtggtcacagagccaaggagatagggaaggtagccactgaagcccctgagattttgtctgacatttgggaaaactggggccctgagagactgggatttcaccctggctctcctgaatcttttatgtagtattgtcaccaaccttgcattttaatagcctccactcccaggtagggcagcaattcttgctatttaccaggcccagctattgacaataagagagatctgtcctctcaaaagcagttcaaaatgtctcctgtctaaactagattagcaaaacccagaaggtcttctggactcaggattagagatgagaatgggccacgtgtgtcagaacaggcaatttggccgggcacagtggctcacacctgtaatcccagcacttt

SEQ ID NO: 3691 - DNA, 559 bp, Homo sapiens
tagtattgcttgtttccctctccccagccctccgagggccaagtcctgagcatatgaaacaaattctgaattgaatcggaattacattctcaggaaatagtctctagtctgcttgcttatttggagggggagctcgttcctaatcttaatgagagtcaaagcagaacagtagcactaatgacctatgtattcacccaaaatgccaatatttattgatcatttactggttgcctggcacgttggaactgtaatgacaaccagagagcttattgccaattggtaaagacttcgccaggcacagtgactgatgtctgtaatcctagcactttgggaggccaaggtgggacgatcacttaagcaggagtttgagaccagcctgggcaacatagtgagaccccatctctactaaaaatacaaaatttaatgatttttaactaatgatttttgtataattaataattcaaaaaataattttaggcagggcatggtttctcatccctgtaatcccagcactttgggaggctgaggcaggtggatcacttgaggtcaggagttcgag

SEQ ID NO: 3692 - DNA, 647 bp, Homo sapiens
cctctcttcagactgcctccttagctctcttctggatcactataacagcctaacaattgtatcaccttcagttttgctcttccttccatatgactaaataaatgaaaaatttgatcagacattaacgagtagggagagtgaattggtaataaaaggtccacttattttgtcttacagtgagagtggcttgctattatctcccattattgatgcatttctatctttgtcttcctgcatcccctgcagtttttgcttcataagaatgtttgcagtgttatttggtaccatacatattcatgttaggtctttattgtgaattacagattttagaattaaaaaggagatttgggccgggcacagtggctcacgcctgtaatcccaacactttgggaggccgaggtgggcagatcacctgaagtcaggagtttgagaccagcctgcccagcatggtgaaaccctgtctctactaaaaaaaaaataccaaaaattagccaagtgtggtgtcaggcgccataaccccagctactcaggaggttaaggcaggagaatcacttgaacctgagagacggaggttgtggtaagccaagatcgccccattgtactttagcctggacaacaagaacgactctgtcccccaaaaaaaaaaa

SEQ ID NO: 3693 - DNA, 568 bp, Homo sapiens
gacttttaacctttttctttacctcagccaatgtttatcaatattacaggtgaaacagaaatttgtaattacctgtgaattttatttttacacttatgccagtataatacaaaaatgagggctgggcgcagtggttcacacatgtaatcccagcactttgggaggctgaggtgggtggatcacctgaggtcaggagttcgagaccagtctggaaaccccatctctactaaaaaatacaaaaattagctgggcatggtggtgggcacctgtaatcccatctactcagggggctgaggctgggagaattgcctgaactcgggaggtggaagttgcagtcagccgagatcacaccactgcactccagcctaggcaacacagtgagactctgtctcggcatgggggaagaaaaaatgagggttgactctactgctgtgtcctttttcttctccctactccttttagagaaaaggaatttttcactttccatttcttattagtttgaaagtgccttgactgaagtcatcaaaatatatttgtaccctcccctctgaaactgtggagtaaagga

SEQ ID NO: 3694 - DNA, 586 bp, Homo sapiens
ctcctaacagttttcttgataagcgggtcactttatcaactcttatcatcacacaagaatttggataattaattctaccaacatgacccctggccatagtaggattcatttcaatgctagcagaaactaactgagccccatttgacttaacacaaaacaaatcagaactagtcttggccttcaatgtctactatccctatttttcatagcagaatacactattataataaatgccctaactgctactattgtcctaggaacattacctatcttcacgctagaaatatacacatggtcaggcatggtggctctcacctgtaatcccagcactttgggagaccgaggtgggcagatcacttgaggccaggagttcaagaccagcctggccaaaatggagaaacctcatcactactaaaaatataaaaattagccaggcgtagtggcatgcacttgtagttccagctatccgagaggctgaggcaggaaaatcgcttgaacccaggaggctccgaggttgcagtgagctgagattgcaccactgtactccagcctgggcaacagagcgagactccattttcaaacaaaa

SEQ ID NO: 3695 - DNA, 630 bp, Homo sapiens
cattcactcgctcattaattcgttcattgagggcatggtggttgacagtctggagtctgggattgcgctgcctgattctgccacttccagttacacatttctatcgcttcatccctttgttctcagttttctgctccataaagtaggggtagtaacactaactcctggagaatttgggtggatttaacaaggtgcgtaagtatcagaacaccgtcaggcacggagtatgcacctatacatcctagctactatcacttagtttttcataagcagcggccctgtgctacatgctgagaatgtagaaataatgccctcaaggggctttcaggcaggtacagtagataggcaggtgagccaatgagtgtggtccagtgtggcaaggcccagaaaaatgacaggtgagccaatgagtgtggtccagtgtggcagggcccggaacaatgacaggaaataaagacagaggggatgcagaagctggcactggagccagatggctctagggagttatttgttggggaaaatgggagtatctcagaaactcccctggatgttaaagaggctgagaggccgagcacggtggctcacgcctgcaatcccagcatttttggaggccgaggcaggtggatcatg

SEQ ID NO: 3696 - DNA, 425 bp, Homo sapiens
atttgtgtgtatatatatatttgtgtgtatatatatatttgtgtgtatatatatacatacacacaaacacacacatatatatacacacacatgcatatatatatttacacacacacacacacacacagatatatatgtatatattctctattttcttgataaaccacctttaagccagtacttgatgttttagacattgactttttctgaaaagttaaacaaaacaatttagacagttttgcaaaaacttttgtttgactactgttcttgtcttagttataaggcttagttttggtggacccagagtcttaattctaatttaaaattaaaaataaaaagtaaaaagaaaagctctcaagataatctctttaatccagcagcgtaatctgatgaaatcaccaataaatattagttagccacaaggc

SEQ ID NO: 3697 - DNA, 651 bp, Homo sapiens
aaataacattcttgcctaaaagataccatttgcaaaaataaatttcaggtgaattgaagaagtaaatgaaaaatgtggataagatttttatctagaatataataataaacaccttcaaatcaataagacaaagatgatcaacacaatagcaagataggcaaagaataaaagccaacagttcacggaataagaaacccaaatggccaataagtctaaaaatctattcaattttaccactaattaaccatgagctctcaccttcatctatcgattttcaaaatgtaattttttttaaaaaaatcaagtattggcaataaaaatgttaaatttgactctgctcaagacattatatgtaactttcaggttatagtaaatacaaagcaaagaacatgttaaatgacagcttgatgaaacaatcagacaaatccagaatgcaagacggtctacaaggcaacctgatgtctttaaaagtcaatgtcctggggtggaaaatgtgggagtattgttgtggcataagattctaaagagacataacaaaatgcaatgaattacacagaagatcaagttgacataagaagaaattataaatctgaacacacttatataaaaatatcgaattaacaattaaaaaaaagcccaggacaagaagtc

SEQ ID NO: 3698 - DNA, 647 bp, Homo sapiens
atcctttttaccttcttcctcccagtcaacctctctctttttcacgtactctaccaacatccccacccaatctccccttatgcctccaaaattagtcctatcctgattgtggagtttggggttttctttgattcaatggatgataccagtcacaccatttgaaaaaagcatatgacagtgttgttcagtgttggtgaacaggaattcttgatatttatttttaaggattccatttaattgctaattacagatctttgttaaattaagccgaccttcactcacatttaaaaaatttaactttgttttggttttcatgagacaaatatctctctttaagtgaacaagcttttaaaagaattagcttcttcagtatggaaagcaagatgcaattcgcagctggtgcaatggcttacaccagtatgtaatcccagcactatgggaggccgagggggaagaatcccttgaacccaggagttcaagcccgggctgagcgacacagtgagacatctttacaacaacaacaacaaaaacaaaataacaataacaacaaataattacctcagcctctcgagtatactgtaggtacaaagccaccacgtgtacctgtagtcccagctactcgagaggctgaatagagggattgcttg

SEQ ID NO: 3699 - DNA, 629 bp, Homo sapiens
agcttcaggttcagctctctcttgttgtctactagggctttcgcatcactgatcagaggtcagcattcacctgggtccctttggagtggtgctgacttctctcctccaggccaggctccctttatctttccaaacccactcagaaactgctgcctcctggtggctctgtttctggtcaaaagtcagattccctagactgccttgtagttcatctgtagcaatgcagatattctcaggccaatagtctatactggctcatagtacaaatgtgtttacatttacattcattcatataccagtcttgctaattgtaggcatccacctgttcctataaaaataccaatccgggacaggcgcagtggctcatgcctgtaacaccagcactttgggaggctgaggtgggcggatcacctgaggccgggagctcaagaccagcctgaccaacatggagaaaccccatctgtactaaaaatacaaaattagctgggcatggtggtgcatgcctgtaatcccagctactcaggaggctgaggcaggagaatcacttgaacaggggaggcggagattgcggtgagaagagaccgtgccattgcactccagcctaggcaacaggagcaaaactccatctc

SEQ ID NO: 3700 - DNA, 573 bp, Homo sapiens
gcttcccctagccactctccactcactccatgcaatcattatccaaatcctttgggtttcacctctgcccattccagcatttcactttcacccctccactctagttgaggccttctttacccttctccctctttctttcttttaattcaaacaccaagtctgatgttgatgccagtgggaatgcatttgacctctgtctacagcgtggccaggatcagctgcactggctgtttcaagaactgccacatcgcacctctgctccactctggatcctcagccaaccccgactggaccctctgaacaggcgggatctctgtacccagtatctttacatctcaaggtaagctggaaatccccgaaacttcatggactctcacaaaagataaggttccttaaaggtaaacatcgtgaacctgcctctcaccttacctgttaacctcattgggacacaaggaggcagaattgggaggagactggacaggaaaccatactatgaggaactacaaaacatttatgatgttaaaatgcttaggatcggcccggtgtgctggctcatgcctgtaatcccaggac

SEQ ID NO: 3701 - DNA, 412 bp, Homo sapiens
tacagtaacatgagggccccagagcccagtaagagggacatggaaaggaaggcaaggaaacctacccatttcattttacctagggctagaagaggacctggaaataactggtataaaaaccaaagggtggggctaggcgtcacggcccatgcctgtaatcccagcactttgggaggccgagacaggtggatcacttaaggtcaggagttcaagaccagcctggccaacatggtgaaaacccgtctctactaaaaatacaaaaattagcctggcatggtggtgcatgcctgtaatcccatctactcggaaggctgaggcaggagaatggcctgaacccgtgaggcagaggtcacagtgagccaagattgtgccactgcactctagcctgggcgatagagtgacactttgtctc

SEQ ID NO: 3702 - DNA, 604 bp, Homo sapiens
aatactcccatcagttaactgtctcaggtatcaaaatatcccttcctgtatgtatcaaaactcatgctgaacaatgagttctgggttgcaaaagaggatttatttgttgcacctatccataagtctttgtccacaagttaaacaaaaacatacataagtgcagcgtgtgctctttttaagtacattagtagacatactactgagaggccacactgcacggggttaggtaagtggactctggagccagattgctagttcaaagatgtgcccttccatttactaagtgactttaggcaaactccttctcttggtgtctcagtatcctcagctgtgaaatggggatgacattaagaccgatttcggccgggcatggtggctcaagcctgtagtcccagcactttgggaggccgaggcgggtggatcacgaggtcgggagattgagaccatcctgccgaacacggtgaaaccctgtctctactaaaaaacaagaacttagccgggcgtggtggcgggcacctgtagtcccaactacttgggaggctgaggcaggagaatgacgtgaacccgggaggcggagcttgcagtgagccgagatcacgccact

SEQ ID NO: 3703 - DNA, 495 bp, Homo sapiens
tatccaattacacaatgagtaccccagcctcactcaacatgtcttagagaaagctcagcattttctcctgcagacctgagttccttatcttagttaacggtattacaatattctcaattgcataaattataatattttacatagtaaacaagtcctttccagtgggaacagtagacaccaggtactactggagagaagagggaggaaaaggggcaaggactgaaagaccacctattgggtactatgctcactacctgagtgacaagatcagtcataccctaggcaatatacacacacaacatacctgcacatgtacccccgaacctaaaataaaagtggaaataaaaataaatgaataaaaataagtcatttcctttgtataactgcaattcctagtaccttaagtttttatgcttctggtaacctacgtcttatgattgatggcttacatcccatccctgagtaagaatcgtatcttgagtccctcatatctta

SEQ ID NO: 3704 - DNA, 601 bp, Homo sapiens
aaatcccaaaacaattcctgccagccgactaatacatacgttccttatagaggctatggcgttattaagcttaccacctgtaggggcacacaataaagaaaaattcacaaagaaatattttcacatacactacacatcagaaaagcaaatctaggtggctcatgaagaaaagtaagcattttatagaacaaatatatgcaaatggtctttttatagtgacatgtatgaaaacacgtagatctatttagtacattaaatatatactctcaaataatttaatatatacacacaactcagaaatgtccattatataaataggccagaaaacaaagacttaacaagcacaagatgctccccttacatagccaatttaaaagacagagtggggtagtccaggcgcagtggctcatgtctgtaatcccagcactttgggaggttgaggagggtggattacttgaggtcaggagttcaagaccagcatggccaacataatgaagccccatccctaataaaaatacaaaaattttgtgggcatggtggcacacaactgtagtcccaggtactcaggaggctgagggaggagaatcacttgtacctggga

SEQ ID NO: 3705 - DNA, 416 bp, Homo sapiens
attagtcagtacttatccatgttcaagtttgtcatggcttagaaaaaaagattaagcaaggtcaaaaggcaacataaagaacttaagaaagtagtgctcttcccaccttcccaagggctgagtaggacttactgggccaggtgttaaattagttagcaggtaacaattaaaggagctggaaaataattatcataaaataatataaaattggaagtaattcttctcaagagctaggtattgaaaggcagtggccttaagaactcaacaagtagggtagcttttactgtctaaaaactttaggctgggtgtggtggctcatgcctgtagtcccagcactttgggaggctgaggcaggcggatcccttgaggtcaggagtttgagaccagcctagccaacatggcaaaattccatctct

SEQ ID NO: 3706 - DNA, 549 bp, Homo sapiens
actgaaaactcacaactaaggggagggcagaagtgatcatagagtgacagagtttgccaggggtgtttagagtcagtcctaggaggcaacctttaaacatctgtgagagtgcctagaaaacagggctcaattaaaggagactcaacaaagaaataaattacataatgaaatcccagggatttgcataaatttctatactaaatgatatacagaggtcccttacttaacctgtgatttaatgacctgaagtgtacctctctaacaaattaatctcgcataaggactgtttattattgtttgctacaaaataacttctaggcctgtagatcacctgaggtcgggagtccaagaccagcctgaccaacatggagaaaccccatctctactaaaaaaacaaaattagccgggcgtggtggtgcatgcctgtaatcccagctgctagagaggctgaggcaggagaattgcttgaacccaggaggtggaggttgtggtgagccgagatggcgccattgcactacagcctgggcaacaagagcaaaattccgtctc

SEQ ID NO: 3707 - DNA, 635 bp, Homo sapiens
gactgccgggtggaggggcaaggcgagtgtgtgtccttatcctagcaattggggcgcgggcctgtgagccagttggagttgcggcggcgggaacgattgggctgagcagaggacgacatgttgcttttcgtggagcatttatggggttaagtggcatgggatttctgtttctgatagtaaatagcaggtagcatctaaaggaactggtttaaatcctaatgccaaagtatggcaagaaattgctcctggaaatactgatgccaccccagtaactcatggaactgaaagctcttggcatgaaatagcagctacatcaggtgctcatcctgagggtaatgcagagctctcagaagatatatgtaaagaatatgaagtaatgtattcttcatcttgtgaaaccacaagaaatactacaggcattgaagaatcaactgatgggatgattttaggaccagaagatctgagttaccaaatatatgatgtttccggagaaagcaattcagcagtttctacagaagacctaaaagaatgtctgaagaaacaattagaattctgtttttcacgagaaaatttgtcaaaggatctttacttgatatctcaaatggatagtgatcagttcatcccaatttggacag

SEQ ID NO: 3708 - DNA, 523 bp, Homo sapiens
gggatagagataacaggaagaatttatactgtaaacttccttaaacttgttagcgtgacccatgtgagtgtactaattatcccccaaaataagttcaaaattcaataacttatcattacctttaggataaaatcctaacatcttttcatgagcttcaaggccatgcttgatcctacctctgcctttgctacctcatctttcccccactgtctccctatgcagcatgatgctatcacataagtcaggtttttaatttttttaatttttaaattttatttatttatttttgtagttgtttttttcccagttcctagaattttgcaaattcttttttcctcaaggattttatacctaatccttactctgcaggcatgtatattgctctgaaattcacatgggtggctttttcttgtccttcagctcttagagaaatattttgctaaagctctttgatagggccgggcacagtggctcacacctgtaatcccagtactttgggaggctgagttgggtggatcacttc

SEQ ID NO: 3709 - DNA, 603 bp, Homo sapiens
gagttacttttgtccgaaaaaagaattacctttcttgaaaggagatgggcaaggcaaaaatttcaacagaaaatcagcaggatggtaacagaaatcttatttttaaaaaagaaattataacaacttgagataaaaatggttggcaaatctggtgctcaatttcaataccagacttactatagattttcttttgtctgggatttagattcaatggaaaattcctgttttctctccttgctagtaataaagcataaaagtgtgcaatttaacagcagtaccagagtcaggccatttgctagataggaatgtggatggatttctggaagacgaatgcatagaccagaacaaactaagccacacattactggtgtcttaaacatatgacttaaggaatatcatctaaacaaaaaatctattttgatttcctcctacccctttaggaatcaaatcttccccagcactaagtataaatttgtacatatactgccgggcacaatggctcacacctgtaatcccagcactttgggagtctgagcagggcagatcatgaggtcaggagtttgagaccagcctgagccaacatggtgaaaccctgtctctact

SEQ ID NO: 3710 - DNA, 584 bp, Homo sapiens
ggtatcccaatttttaatctatcctactgcaataaaaatatagtagataaggagaaacacacaaatgcacacatgcacgcatattcagtgcttcattaattttagtggaaaacaaatgacattagtatagtccttaggaccataaataggggaatgttatatattacaatacatccatatgaatgttatatattacaatatatccatgtatgattgggtacatccaatacatctaattctatgctttgattaagagaatgtgtggggcccatctgtatttacagagaaagatgtctctcatctcttgttaaataacaaagataaatgaccaagtatgatataaatacatttttgtaagaattgtgtgtggatatacacacacaaatgtgcaagcagttatatgagaagaggggcagggaacctatctgagcatctcttctgcacctaaagcaactggctttgcactgggccttgtcccctgggagcatcagaagggcccagctcacagcaacactcacccgcatgccgacctcacccggcagccccggctctcccagctctcctggctccccctgaaaaaaaaa

SEQ ID NO: 3711 - DNA, 655 bp, Homo sapiens
aaagtagttaatacagatgggatgcagccagacccgcctcatgcagtgatttcagcagatgcagatctgcctccaagctctcatgggcagaaagagccgcaagagaacagtgtccttgatgagcaattaactcatttacctaagtatctggtgcactaaatagattcacatcctgttctgtatgaatgaatggaaaacatcaaggatggcctttgtatgagtacaagtgtccaatgtgaaatctgtgtacaaagcacatgccattggaagcttggtcatcaggaaggcagaaaggaaattggctctttatagaatctttatagtacagaaacatatagaggtacatttccttcctctgagagtgccgttccataccacctggagagaatgccaggtggtaacaatgtacagcaggtttaatcaagacccagcatcctaaatcatgcgcagagtgccaggcgcgcaaggtggctcacgcctgtaatcctagcactttgggaggccgagacgggcggatcacctgaggtcagaagttcgagacatagcctggtcaacatggtgaaaccctgtctctactaaaaatacaaaaattagctgggatggtggtgcacgcctgtagtcccagctacccaggatgctgaggcaggagaatctc

SEQ ID NO: 3712 - DNA, 577 bp, Homo sapiens
ctaccctacagattgatatttgatgatgcaaaacaattaaacaaaagactctctttgctgacctgtgaaatctgaagtttttacggtgaaaagtgctaatacattttcaaagttgacatagtatatttatcactttacacctaacggtctttctatgacgaattgacttaagcgctttgtactggagaatcagcacaaattaccttttttaaataaggggaaggctgaagtgacaagcttgtctcccctggagttaacaaatacagttctcttttagaatagggcgctttaaagttggagaagttctgagagcttgagggtcattcaaactgcaaggtaccctgttcaccgagtaattcaggttcagaaaagtcaagcagagatatatgcagtgatgtgtgcaaggcttcacagctgggaggttgtactacatccccacaatgataagcctttgctgccttcttgatcacttttgctacatctgaattttgttcagtatcatggcaggaccttggagtatctttgtaatcactgaagggtgcaccaaatatgtagagagaagccgtgcttagaaaag

SEQ ID NO: 3713 - DNA, 604 bp, Homo sapiens
tatacttctttgggagctgccccatagatttctataatctgcattaaccatcctgcttactttccagtttcttcgtggttttgaaaagagctttgtctctattctgcaaatgttttccctgctgaatcaccacctcatgctccccttgaccttcagattactgtgctttgtactgcttgcttagacaaatttttagcaggtacttctctccaggcaccaatctgatcagtatcagcatgatcattaaatgctccctccattatctgataatttgttaccggaagagactgcccagtgcaacaattttgatgatgatacttaccatacatttaacacctatttggccaggggtgtgacatttattctcccaattaatccctataaaccctctgaggtaggtactggtattatctcaattttatagccagaaactaacacttattcagcatttgcatgataccaggtactgtgtatattctgtctgggctgctataaaaaataccataggctgagtggcttataaacaacagaaggctgggtgcagtggctcacacttgtaatcccatcaatttgggaggcagaggtgggaggattgcttgaacct

SEQ ID NO: 3714 - DNA, 592 bp, Homo sapiens
cactttgctgcccaggctggactgcagtggcccaataataactcactgcagcctcgaactcctgggttcaagtgatcctcctgcctcagactcccaagcagctcagactacaggtatgcactaccatgcctgtttgttttttgtttttgtttttgtagagacaggggtcttgctgtattgcccagcctgatcttgaactcctgggctcacgtgatcctcctgcctcagtctcccaaagcactggaattacaggcatgagcctgtgttctcccctctcttccaataatgtgtattcaacaaggccttcaggtgatgctgatgctgtctgaaagccactgctctccagcatgtggtctctgaaactttacttaggggtatgcatattaaaatatatatataacttaacactatgctactacaaagggcaaaataattcactttattgtactttattttagaataattaagacaaggataggcttcaatgaaattttgctttgatgttacatggtctgactgacactggatttcttcataagaaaaataaatgtgaaagctattccaagtaagcaaatggtggcaaaaacaatct

SEQ ID NO: 3715 - DNA, 647 bp, Homo sapiens
atctatttcttcccaaagaaaattcagacacagtacaatcactcagaagacttgtgaaccagtgcccacaaaatggctctgatataactgcatgcaaagtataccatatatataacagactcattaaatttaagcagtattttatatggtcctaaatgtggtcctgatataattatttcaggttgtgatttaatcagcatataatctagattcaagagacactaattattgcaaattaagatgttaatagcttcctaaaatgctccttaagattaacataacctaaaatccctaagtttcttttatacatgatattgttatgatccattttcctccatgctattcttataaatatggctttttagacccaactgcaatactttacttctgcccttattttagcctgtcagcttctttggagattgagaatgtcaactaccctattctccattcctcccattatcataacatctataaatctgatgttttcttaagttcacgaatagatgtctagaatagacaggagtgaaaacagagccatacgatatatcactaaaaatcacctatgagataggcatcaatgaactaattggcattcttggtctgctaacttttttaactgtactatcatctgatccacatttcta

SEQ ID NO: 3716 - DNA, 580 bp, Homo sapiens
gagagagtcaaattatataaagcaaaaatatcagaaagtaagtagaaatggataagcccccaaatattatagacatttcaaacacacatctttgagtaatagataaaagaaaaaattaaaagagtaagttttaaaagaagctagtggattttaaaaagggcaaatattatataaggaacatgaatattataattcatgttattttcatgttcatacagaatacttacaaaaattaacattttctagaccatgccacaaattcaaacaattttcacggaaataacgtgacacagaatatatttcctaaacaaacagcaatgaaggcagatatcaatacaaaaatgaaagctagaaacataagtctaataatattggttggaagctattttaatgaatattgaaatattttaaaggtgaatagtcaatacaaataaaccaaacacttttgtaagaccactaagatgcatgtgtaatgtgtaatgcctccttttataaggagtaaatctgtaacatcacctgggctatttgacaactgcaaagtgaatgtgagaaggagagaaacagtgagagagagagagat

SEQ ID NO: 3717 - DNA, 452 bp, Homo sapiens
ggtcagaaacactataaaagaaaataagaatgtcttgggcttcttaatagattagacttggctgagggaagatctctgagttcaaggatatgacaaacagaacaaaaatccaagatctatcagaggtgtaacaaatgcataataagaattctagaaggagagaaaggaacagaaacatttgaaacaataatgactgagaatttctccaaattaatgtcacacactaaatcattgatctaggaagctcagagaacaccaagcaagataaatgcccccccccccaccaaaatatatctaggcatatcacattcaaactttagaaaatcaaagatgaacaaaagtcttgaaagagaccagaagcaaaaaaccaccttatccatagaagaacaaaggtaagaatctttgttctgacttctcagagaagcatctgacttttcagaaatcatgcagca

SEQ ID NO: 3718 - DNA, 584 bp, Homo sapiens
tcacctaggtatcctacccagttactccctcacctccctgaagtggtcctgcctgacctccccattgaaaaaatatgacttctgtcattcacaattctatttgtgtacttgctaatttttttgattcctgctttaatatgtatgcttcataaggacagggagtttgtatattttgtttactgttctatccatagagccaaggtccatgcctggcatttaataggtgttctatgaatagttgttgggttcatattaatgaatatgttgctatgaatatttcacctgatcttaagtagagaagaacaatcataatcagccacaaatttcttatgctaacctctacctttccttgagctacttccctttccatatttagctggaatatcaaggcttagtttccatatcatcttgtctgatgttaaaattcactattgatgtttgggtgaagacagttatggcacagatggccacatgccccttaaacacatttcccaagccctcacctaggtatcctacccagttactccctcacctccctgaagtggtcctgcctgacctccccaaaaaaaaaaaaaaaaaaaaaa

SEQ ID NO: 3719 - DNA, 573 bp, Homo sapiens
cagattgctgggtcctacccaagagtttcatctgcatttttaccaagttcccaggtgacactgatgctacaggctgaggagccacactttgagaactactggtccaaagaaggctgctcagagctgcttctagtcagattcagtggcctgcaggtgaaggggtaggtgtatctggagccccacctgaagtctggcctggttttcagtgctctaaaagggatgatcaagactaaggattttaaagttaagaggaggctggactcagtggctcacaccagtaaacccagtgctttgggaggcccaggcaggaagatccttagaggccaggagttagaggttacagtgagttatgattgcaccacggcactccagcctgggcaaacagaacaagccccatctggccggatatggtggctcacgcctgtaaccccagaactttgggaggccaaggtgggcggacaacttgaggtcaggagtttgagaccagcatgccaacatggtgaaaccccgtctctactaaagatataaaaattgatcaggcatggtagcacatgcctgtaatactaagtactt

SEQ ID NO: 3720 - DNA, 562 bp, Homo sapiens
ttgtggagacagccacgtcgcaggcaaaggcaggcatccttcaggagctgaggcctcagtcctacaaacatgaagcgctacgttctgctaacaaccagcaagcctgggagagaatgagcctccgatgagatcacagccctggctggcaccctaatttcagcctgagcagaggacccagctaatgcccagactcatgacccacggaaaccgcaagataataaatgtgtgttgttttagattgctgagtttatggtaatttgttatacagcaatagaaaatggatacaccacatggggtgaggggtgccaccaaccaggaaaatggaaaagacagaggtgggacctcatgcccttttaaggcagcatggcagtgggagatgccaaagccttctagttctggcagccaagctgttcatatttattcacaagtcaggctgggcgtggtgactcacatctgtagtcccactgctttgagaagtgaggcaggaggattgcttaagaccaggagttcaagaccagcctgggcaacgtagcaagacaccatctctacaaacataaaacta

SEQ ID NO: 3721 - DNA, 593 bp, Homo sapiens
  misc_feature 210, 211: n = A,T,C or G
atgctattcaggagagtcaagggaaaccggtgcaaagaagcgtttgacaattatgagcacactttgttccttgggaaaacatacttggttagttagaaaaaacaaattaaaagaagaatgagctacatgttgtactaatacatttcattcttcttaacactaatgcataccttgaggtccttagctgtagcccctaccttccaggttttnnaaacaatatcattgcatttatttggggcttcagttaagattaaattaattgtttaaaccatgcactttttgaaaaataattactaaacagacaactctgggtatttttccattttctcatattagcataataactgggttttactatattatttcatcacaaagtcaatgacaagccaatctcaaagtaaaatattttgggattatgattatgttcactaccaccaatgccatgatacaaactaaacaatggaaaataaataaaaagctagttgaatttgaattaaatgatttttagctaaaacacagcaacgtgaacacatgtgtttatcttatctcctttgggaaacaccattaaatatattctaataaatgaaaataat

SEQ ID NO: 3722 - DNA, 506 bp, Homo sapiens
acccatctataatgagcaggaacatatatttttttaaagtttataattcctcactttattttcttattgtaagtacataaagtattaaaatttttcaaagtaaaaaaaaaaatttaagaaaattgaaattatatcaagcagtctctcagaccacagtggaataaaactgaaaatcgactccaccccaccccccaaaaaaattcacaaccaggcaaatgcatggaaattaaataacctgctcctgaatgagcatttggtcaaaaacgaaatcaagatggaaattttaaaactcttcaaactgaatgatgataatgatacaacctatcaaaacctctgggatacagcaaaggcagtgctaagaggaaagttcatagccctaaatgcctacatcaaaaagtctgaaagagcaccaacacacaatctaaggtcacacctcaaggaactagagaaacaagaacaaaccaaacccaaacccagcagaagaaaggaaataaccaagattatag

SEQ ID NO: 3723 - DNA, 408 bp, Homo sapiens
cgtgcttgactttcaagactggctcttctgcccttagcaaatgtccagtctatttcactgaaacagaaaaagcaaagtagaattgatttacaaaagtgaaagatggatttttgttagaagagtgatgactgaatttaattttatttttaaaggtctgtgtacagttacacaactcacatacgtatatgcacatatacacgcacacatacattgtcttgatacaactgcctgagggaaaaacacacgtttcctttgataaatctcttggtctgtaaaatttctaaatcagagatgaaaggcactactaaataaaagctcaccacaagacaggcatggaagtttataaccaatctgatgttgtctagataaccaattctgtgtttggagctgggtagcattgcacttctg

SEQ ID NO: 3724 - DNA, 584 bp, Homo sapiens
tcagtgagaacaaggagctggggcactcataacagtgactgacacatagaaagcattccataaaagattttgttaagttgatgagcaaatggatttttaaaagtagttaaagttttgatgaagatgtccataattgaacaatcaacattctgagcacgtttatgaaaagggaggcaaaataccttcattccagaatgttggaggaagaaaaggtttatctgggattacgtaagtagccatcagtgaactctgagggaagattctgggattaagaggaaagagtaggaccataaaaagggtatgtgcacaggagagtcagaagaaatgaggaggagctgagggaaggacagactgatttgggggaggttggtggtaaagaaatgagacagaaaagtgatgctcagaaggccagtagttgaggccaggcacagtggctcatgcctgtaatcacagtacttcaggaggctgaggcaggcagatcacctgaggtcaggagtttgagaccagccttgtcaacatggtcaaaccccatctctactaaaaatacaaaaattagccaggtgtgatggcacacgcctgagtcc

SEQ ID NO: 3725 - DNA, 648 bp, Homo sapiens
tacaatcttgtgcaagttatttaactcctcaatagtagccaccacaaccatcaggcaagattttgatagcgatcaaatgaaattgctgaaataagatgctcagcaaaacgactctctcatgaaagtactcattccatgtgaggttccctttgcttctgacagtggccactactgagactgtttcccgtatctaaataagactagttcgtaaagaagcacactggtgttttggcagaagagaaatgtgggagcataatgacaatactgctgacacagattttagacaagggaacacaatctgggtttaacacaatctgagtttagcatgaagcttaaaatcagaaagtttggagttcaaatttggttctaacatcttctagtaatatcatcttcaagtcacatatcctcataggtaaagatattaatgagtattaattgagataatacttgtaagtcatttgtcccagtctctagaacataatgtgctcaataatgacagtagtcattactatgcataatacagcattctaatacaacaaaaatataaaaattgttgcccttgaacataacttccttaaacaatggtttatagtactgtatagccagaggctagatattccgtaactgggaagaatgacatctgctatg

SEQ ID NO: 3726 - DNA, 525 bp, Homo sapiens
cccagcaatgccccctttgcacagccctgcaggatagggagggggcttggggtgtgaaatccacggggtaaaaatctgatatctggaacatgataaatcaccatttgctttcctatttcagaatatttcccccatctttttatttaatactgccgacaaaggacctgcagtgaccagaggggctctgacaactcccatctgggctctgcatttaaatccccatcagaagttacagaaaggggccagctacggtggctcatgcctataatcccagtaatttgggaggctaaggcaggtggatcacttgaggtcaggagttcaagaccggcctggccaacatagcgaaaccccgcctctactaaaaacgcaaaaattagccagacgtggtggcatgcgcctgtagtcccagttacttgggaggctgaggcacaagaatcacttgaacctggaatcctggaatgtggagcctgcagtgagcccagattgcaccactgcagcctgggtgacagagcaagactccatctc

SEQ ID NO: 3727 - DNA, 357 bp, Homo sapiens
tcaacgaactattaaaatattaatttaggaattaattgtaaagacttccatttttctttaatgtaactctttcattttcagggaattacttttaaacgtgtaggtgttccttctacaatggatttagttaaatctaaaagcatggattccatcaggtatgctttctgaacttgctgaataattgtttcttttgtattaggctattcatctgtaagctctcccagttcaaatagcagaaaattttaccaccagttttaccagcagacatttagttatattaaaatataagctcatgaggtcaggagattgagaccatcctggctaacacggtgaaaccctatctctactaaaaaaata

SEQ ID NO: 3728 - DNA, 491 bp, Homo sapiens
gtggctcatcctggctcaaaaagcacccccactgagcatcttgggacccccactcctgcccaccagagaacaaaccctctttgactgtaattttcctttacctacccaaaccctacaaaacggccccacccttatctcccttcgctgactctcttttcggactcagcccacctgcacccaagtgattaaaagctatattgctcacacaaagcctgtttggtggtctcttcacacggatgcgcatgaaagctacaatcgtggtttttggctatgtattcatttttctcctaccatttagctattaaagtttcattgctataatttcaaaggcattgagtttggaaatattaatatgaatataaaattacagcaaagctaatgtaaaataattttacttaatgtgaactaaaagagtaatgtttctttggtaatttaaaggataagagttccgtattttttttttaggatttaagtctttatatatttatata

SEQ ID NO: 3729 - DNA, 544 bp, Homo sapiens
cattactagttctgaactattagagcatgggaatcaggggtgagatcttgcctcactaaactgcccaagatttctgcaatgttgttatacttcttttagatataaggaaatacaaagggcaccagaaaaaaaatcatagacttattacctcataaccttaagaaattcattcatcaatctaagcatttgagaacttcatctcttttaatgtttatgagaatgttgtgttggaagtggggataagatagaattcatttaatgcttataaatcataaataataaacatcattaataagtgttttaagagtctaggaaaaaagactgcctcatatcactatgttatactaattatgctgtgaactggttgggcttttcctgtcaattttttctgtgaattttccaatgcatttgttgcctacaattctagcagctgccattaggtggtgccttctcatgggagctaaggcctaaataaaggaagaggtaaggtacacaacacaattctataaacagtagaacatgttatcaataatcataataaaat

SEQ ID NO: 3730 - DNA, 482 bp, Homo sapiens
ctttcttcctgtttacagtgaagtgtacccggaagatcatacttcgccatttttgactcttaatgtgcatgcccaggaagtttcttctccctggggtctgcctttaattaatactttaatgttgacaggtgtggaccctcaggaaatagccaatttatcactattagagaggcaatgtgataattgccgaaccatccgacatttctaatgggtgcagggaagaggtctctcctgccccactcagacctaactacctgtaacactctcatcccatcatgaccaggagttcagtttttcaggcttctctgggtccccttggccaagaggtggcccactcagtcatttggggaggtttaggattttagtttagtttatgctagactattcctgtctgcagggcctctgaataaccatcttgaaatatgtcaaagaagtatattttggggtaaaatgtttttggtttcctttacacacaaaaaata

SEQ ID NO: 3731 - DNA, 437 bp, Homo sapiens
attatatttttaatttactgtggatgactaacacttattagtattcttttctgctgccacgaacactgaaagcttctttctgtctgggtcttggcaaagtatgaaagtaaataattctttaaaatatacatagtcagtccaagaaaatcgggagacctcaattgagtttggagtcactgatgtacttcacatttaccttagaaaactgatctagagtatcaaagaaattaaaaataattaatttttagaatcacaatgcagtataaatcattcaaccaaactccacactctagatggccattaatttgcaagtgaagtaggtcactgggactcttaatatataccagggattttgttttgttttgttttttgttttttgcttttttgcttttttttagtttttttaattttattttcaatacagtgggtacatgtgc

SEQ ID NO: 3732 - DNA, 409 bp, Homo sapiens
actgtatctgtgtccgtgtgtgtgtgtgtgcctgtcttggtgtatctgtgtgtccatgtgtgtacctgtcagtgtatctgtgtcctgcatgtgtccgtgtgtgcatgtcttgtggcgtgtgcttgcatgtgtgcctttgtgtctgcatttctgtgcatctggatgggtatatgtgtgtgtgcctgtgtctgtgtctgtgcgtccgtgggtctgcctgtgcgtgtctctctgcgggtccacacagacacgagggcatctccaaacaggtggacaaggctgggcacagtagctcacgcctgtaatcccagcactctgggaggctgaggcgggtggatcccctgtggtcaggagttcgagaccagcctggccaacatggcgaaaccccatctctactaaaaatacaaaaatt

SEQ ID NO: 3733 - DNA, 625 bp, Homo sapiens
agattcctaagtacccattggatcaaggtccttaatcttacaaaaacttatgcaaatcaataataaagagatgataacccgataatcaaaaatagacaaggcatataagaagaaaatgaattaaaaatattcaaagcattcaacatatacaaatgcgctcaatctgatatataatgaaagaaaagtaaattaaaacaacaatgggcatgactaaataacagtatgagggagcctgaggagaaggagcatttgaaatttcagtacagaagaggaaaggggtgacttatagaaaaaggagacagaaaccatagaacatgtttggaggataagactcaaacaggtagtggggacccttttctagagtaggatgaaaacaggtaatgtgtgtggatgcaaatatgaggcaggatgtaatgggaagttgagcgaattcatatttagtcattcattcaaaaatacttaattgagttactgctgtgtggcaagcatcattctacaaacagagggcacagtgataagcaagccagtttgtactctcgtgtaacttacattctactttgagaagacagattataaataggttaaaaagtcaataatatgatgtttcagcatcaacaataaaaaa

SEQ ID NO: 3734 - DNA, 544 bp, Homo sapiens
gtttttttttaataataaaattgcttcagccattaaaatgaatcccagctgaagatagaaatgactgatgttaatcaaagacttgcttattaccagtgtgctataaatggtagtcaaaaatacacagggaaaagtttgcagcaattttttcttactgccaaggttagaccaacgggtactgagttttggaagcatctcccacaaggagtatttttgttttagttttagaagcaggtaacaacagaaaaataaaacaaaatacagcaaaaacccctttcactttggctactgtagatcagaacatccacctgcctcctggataaattaggaataagactttttagactttcattacatgcagtgttatttgaggaacaccgtttatcctaatgagcatgattataacctgggtctactataccaacagcaggctgctaattcttgccttttgtatgcttatttcccttctgatttgaacttaagaattctaaaattatgccaggcacagtggctcatgcctgtaatcccaacactttgggaagtc

SEQ ID NO: 3735 - DNA, 467 bp, Homo sapiens
gggaaattttaccacgttatttttagcagagtgcatgttaccctgacacaggccataaaacttactcacttctttggggtctgaggaatgtcatcttgtgactggttttacagggagaacttatcggggtgcagttgcagtttccagagtgagtcagtgccatcattgcctccgctgttattcagtgggtggggcacctggagcacaggaatgtgctctctgattccacgacaaaactaaggactgaggctcccctaggctcagttgtagattttgaggctcttgagtttcagttctccaatgagttccaggtaaaatgcagaaaccaggccaggcgccaatggctcatgcctgtaatcccagcactttgggaggccaagatgagtggatctcttgcccccaagagttcgagaccagcctgggcaacatggtgagaccccatctctacaaaaaatacaaaaattagt

SEQ ID NO: 3736 - DNA, 462 bp, Homo sapiens
tgtcggcctagtgtggattgactcctttccaccacattccccaaccaaggacagtctataccaagctcacagcactgaggcgctgggggagggccagcccacacctagccccgtcaatcttggtggcatggactcccccctaaagctttctcaggaggccccatttcctactgcagcggggcaagaattcgggaggagcccactcaaaggggagacagaggcagtgctccctgtgagcagctcttcctcctcagagctgtcatggacaattggagagaaaaaccgggacattctccccaaccaggatattttgtatgctttgcacttactgctgcgttcccttcatctaaaagctctaaaatttcaaataaaaaggtacaatgaaagcagcagcaggataaatagccacagtgatctgagctgaaaccctggaagctttattcacatctttagaaaaactct

SEQ ID NO: 3737 - DNA, 300 bp, Homo sapiens
taacttttgtatttttagcaaagatggggtttcaccatgttggccacctggtctcgaactcctgacctcatgatccacctgcctcagcctcagcctcccaaagtgctgggattacaggcgtgagccactgcacccagcctgtggtctttctttatgcagcgaagaacacctcaggtagctacaaatttttctctttatacttttcagtgttttcaaattccttgcaattaacatatattaatttatatttttaaatatatttaaaaagtaaagttttgctaggtgcagtggctcacactt

SEQ ID NO: 3738 - DNA, 354 bp, Homo sapiens
aaatcaaacctgggtaggttccagcatccataactcttagtgaaaaattctatacagccatatctgtaaaataacaaaatacattatcattaaaggaatattaaatatggataaataatgagtattctactatatgtgatgtttacatgattaaccccatgtattagttctcacactactataaagaaatacctgagactggccgggtgcggtgtctcatgcctgtaatcccagcacattgggaggccgaggtgggcagatcacgaggtcaggagatcaagaccatcctggctaacacggtgaaaccccgtctctactaaaaatacaaaaaattagctgggtgtggtggtgggt

SEQ ID NO: 3739 - DNA, 523 bp, Homo sapiens
tttgtgatctgtcatggtcatggtatttcagagttggaggatggtctgagttctgacctggtgtaggaatcccttctcccaaaactctaacagtacattctcaggcttcgtgagctcaggcttaagacacattattttctgatgctggacagcttctttaaaaaaatgtagtttcttacattaagctaaaatttattttatgaaagttcaagaattctggtccaaattgggatgaggcctatggtgcaggacttccgtgaaattttatgagattacaaatgcaaaacacttagaacagtttctggcctattgccagaattcaataattgaataaaggcaggcagaaatataacagagataaatgtcatgtgctgtacttaggttaaagtatagaatatattagttctgttccatcttctagggtttttattttattttattttttcattataaatcctccactggaattctagggtttttaaaatcaatttttaatagctaaaataatgctttttcaatctag

SEQ ID NO: 3740 - DNA, 463 bp, Homo sapiens
caaatactgtataattcctataattccacttatatgaggtacctagagtaatcaaattcatacagacagaatctagattgatggttgccagggatggggagaaatgggatttgggagttattatttaatggatatggagtttcattttgagaagatgaaaaacttttggatatggatgttggtgatatccttgaaatgtccccctgaaaatggttaattgtatgttacgtatatattttaccacagtttttaaaaaataggtttacttaaagtggttgaatatatgagcaatacaaaattggttatatttgaaacaagtattatttaaaaggacatcgtttacaatatcaacaaaagaaacaaaatatcaaacaataagtggaataaaatgtgtaagacctatatgcagaaagttataaaactttacaggaagtcattaacaaagaactaaatagagggagca

SEQ ID NO: 3741 - DNA, 335 bp, Homo sapiens
aggctagggactttctggattttttttcttgtcctcgtcctgagtgcagatcctgccaaaagacagaacctgcttcctctcctaaagctgtcacaactggaacaccttgtttaaatcttggaaacttttattttgaagtgtgggaaaagaaactgaggaagaagatcaaagcaaggagtaacattatgctcttctgaagtgtaatacagtctgtgtcagggaaaaggcataaaatagagagacaggaaacttcaccctgaaaataacaccatagaaagagtactctgcttaacattaacagctgattagagctaatgattaagtgtatcatctct

SEQ ID NO: 3742 - DNA, 345 bp, Homo sapiens
aaaagaatttttttatgttaaggatttctgtttcaggaattgagatctctgatctcctggcagacctcagaacagaactttctccagggccattatgaagctggaaaattcaccctaaaattcaagatacttttcagggtcagaggtgtcctcattcactagcaaaaaaagagcactagttagatttttgaagccttgggttggccagtttccccgctatgagatttaacttcatagaacatcaatttccttatctctgaaagagaagtgtcattgatgggctgggttctgggtctacctagtagaagaagagaatgggaggcagtggtgtcctggtaagcacat

SEQ ID NO: 3743 - DNA, 424 bp, Homo sapiens
caaaataataatagttatgacatttatgaagtgttagctctatgcagaacacttgactatttgcttcaaatggattatctcattgatgttcttaactaccttgtgagatacagatcatgaatatctctgtttttccagggaaagaacagatacttagagaagctcactaatttgttcaagggcaagaagctaataactggtgaaacaaatatttaaatcaaagcagaatggctccaactttacatctccatgccataatataactgcaaaacatatatatttaattatatataggaaatacgttaagatgttaaacatatatgacttttgtaacatagatgagatccattatatgtatttttctccgagttgtaaggattaaacgagatgtgctatgaaagtacaaagcatggcacatgacatg

SEQ ID NO: 3744 - DNA, 95 bp, Homo sapiens
gcaaagaaagaagaatccgaggagtctgatgatgacatgggctttggtctttttgactaaacctcttttataacatgttcaataaaaagctgaac

SEQ ID NO: 3745 - DNA, 447 bp, Homo sapiens
taggattaaaataatttaagttattaaatcatttcctctcacaccaagcctggcacaaaatgcacaaagtgagaagcaaagtggcaaagtgtcccaagaatgctgccaacagtgatgcatagctccatgatgagatgttgagagcttcactggggatgcaaactccaattagagaatttgacactggaagagaattcacgacttgttctaactcacctttcctctctgacctgggttccctcttatagaataaaactagtgtgatccaagtaacttttgatgacagtatttagacaacatgtcctcacactaaaacttaaaaaaaaacaaaatactgaacaaatactgaactctagttaataaggtattttttcccccacaaagccatgggttagcaattctgaaactaggactgaataaataaataatataccgaggaacatggga

SEQ ID NO: 3746 - DNA, 402 bp, Homo sapiens
aagtctccaaacaataatctcagcttctaccttcagaaatgaaaattaagtaataaattaaacagtaagtagcagaagaaaggaaatagcaagatcagattgaaagtcaatgacatataaatttggaaaaaagtacagaagatttgaaaggaacaagtaaaactatactcaaatataatatgcttgtctatgtagaaaatatatttgaatatattgtgtgaagcaatttgaatgatatgtgagcatatattttcataattttcatagatttttaggacatagggccttctaaaaatcaattgtatttgtatatactagcaacaaaaaaatcatcaattaaaacaaaaacaatttcttactttatcacataatatgtatgaactatctcgggataaatctcac

SEQ ID NO: 3747 - DNA, 471 bp, Homo sapiens
cctcccgagttcaagtgattctcctgcctcagcctcccgagtagctgggattacaggcacccactgccatgcccggataatttttgcatttttaatagggatggggtttcactatattggccaggctggtctcgaactcctgaccttgtgatccgcctgcctcagcctcctaaagtgctgggattacaggtgtgagccaccacgcccagccaagattttttttttctctctagtcaactgccaactactacatgggttcagatttgggttttggaaaggtgactagtgtgtgtgatcctttcatccacagcagctgtccccatcattcctcacgtcaatcaatggctggccttaaggcacgctttgctgggacatgagtgctcacacctctgtacacttcatgtggcggggggcactggtttatctccacaactgcataaagattaatgacagctttttttgggtcgggca

SEQ ID NO: 3748 - DNA, 492 bp, Homo sapiens
gattagggcattgcttctctagctttaacgtgctgtccgatcacctgggcaccttgctcaaaatggatgatgctgagtccagagattggggcaggggctgaggttctcctttccttaccagctcctgggtgatgccggtgctgctggtgcagaccacacttgatagcaaggctgtacggatgaggcttctagtgcgatttacacgtgcgtcctgtgtcactttgatgttgtgagttactgtgtaccgaggaaatgttagcattcaaaatcagacgtggggtcgggcatggtggctcacgcctattacaatcccagcactttgggaggctgaggtgggtggatctcctgaagtcaggagttcgagatcagcctggtgaacgtggtgaaaccctgtctctactaaaaatacaaaaattagctgggcttggtggtgggtgcctgtaatcctagctactcaggaggctgaggcaggagaatcgcttgaacctggga

SEQ ID NO: 3749 - DNA, 473 bp, Homo sapiens
aaagctggacattttcctttctctatggatatatgcagacataagaaatgtaaaggagatgtaggggaacctggcaaggcaagagaagatgtgaaattgattttagttttatttcctccctcctcagtatccacatttctttctctcatgttttcctgcctccctcctctccccattttttcctctattgaaactgaggggccgggtgtggtggctcatgcttataaccccagcgaaggcccaggtaggaggattacctgaggtcaggagttcaagaccagcctggccatcatggcgaaaccccatctctatcaaaaaatacaaaaattagccgggcccagtagcacccacctgtagtcccagctactcgggaggctgaggcaggagagtcgcttgaacccaggaggtggaggttgcagtgagccgagatcgggccactgcactgcagcctgggtgacagagcaagactctgt

SEQ ID NO: 3750 - DNA, 450 bp, Homo sapiens
agtagctgggattatagacgagtgccatcacgcccagctaatttttgcatttttagtggagacggggtttcaccatgttggccaggctggtcttgaactcctgacctcaggcgatccgtctgcctcagcctctcaaagtgctgggattacaggggtgagccaccttgcccaggctatattttatttttactagtttgtatttaaagtaaccttgagacttagatggataccttgttttgttttctaggccaaacaccagagcaccctagaaggtttaactaaaagaatgctcatgtttgacccagttcctgtcaagcaagaggccatggaccctgtctcagtggtaagttttccaagattgaacacctcgccttattttttccaagtgatgataacattattgtgtgttgaattattccttgaaatcatggccgggcgtggtggctcacg

SEQ ID NO: 3751 - DNA, 597 bp, Homo sapiens
ttgcccaggcaggtctcaaactcctgggctcaagcaatccacccatcttggcctcccaaagtgttgggattacaggcgtgagtgaccaagcccagccctctcaatcaccttgattaggagagtcctctaaagtcctaaacacaaccacttccttgctgggtgatattgggaagttacataatctctgagagtctataaatctgaaaattctgagattctggtattgtttcctcatgccaaaagtgaagataatatctgtcttggtttcctcattggattagtatgacaacaaaacatctcaacagcaagaaaaaaaaatccaatcaaaaaatgggcaaatgatctgaacagatatttatcaaaagaagatatacaaatgtccaacaaatatatgaaaaaacagtcaatatcactaatcatcagagaaatgtaaatcaaaaccacagtgagatatttagagactcattccaatttcaaccacaatgagatatcatcttaccaaattagatagctactatcaaaaagacaaaaaaagtaaaaaaacaacaacaacaaaacaatgctggcaaggatgtagagaaaaggaaactcttatac

SEQ ID NO: 3752 - DNA, 488 bp, Homo sapiens
gggcagtgactttctgagcattttgtagcaattagagttgttgtttctcgttcttggcattgtttttgttgccttgtgagagaagatgtgtggcaggatgctgctcttaaaacttttcctttaaattgactcaagctgttacttccttctgaatgtctgatcttataagacatagtagatgctattaagaaagatttgttttactgttgtttagcacttaaaacatatattttgtagttatatgggttagctagggtcaaacatataaaaactcaaatgctggctgggcgcagtggctcacgccggtattcccagcactttgggaggctgaggcgggcagatcacttgaggtcaggagttgaagaccagcccggccaatatggtgaaaccccgtctctactacagatacaaaaaaacaattagccaggagtggtggcaggtacctgtaatcccagctactcgggaggctgaggcaggagaattgcttc

SEQ ID NO: 3753 - DNA, 572 bp, Homo sapiens
gtgtgctcacaggagtctcacagaggagccctttgggatggaggtgcattgctctttaacctcttaacaagtcacctttcttctgttctcatctcaatttccaaaccctcacactactttctgaaagcacctcccaaagaaataacttgtagccaaatcctagtcttcagatttgtttaaaagcaaacctaaagggtttccctaagctagaacagatgtgtattgtacatggtgtaaaacctggtgcacattctagtacacatgtgtacacgacacatctgcatcaaagtctgagttaggccgggcgcggtggctcacgcctgtaatcccagcactttgggaggccaaggtgggtggatcacgaggtcaggagattgagaccatcctggcgaacactgtgaaaccctgtctctactaaaaatacaaaaaaattagctaggcatggtggtgggcgcctgtagtcccagctacttgggaggctgaggcaggagaatggcatgaatctggggggcagagcttgcagtgagcagagatagtgccactgcactccagcctgggcaacagagcgagac

SEQ ID NO: 3754 - DNA, 617 bp, Homo sapiens
tgtttcaccttctagaaacagtcttttcacttcaaatttaaaatgccatgttaagttagcatagaattttggcttcaattgttcctagatgttaggtccacttctcctcaatgccaattaaaatgacatagtctgatgtatgtgtatctgatgtttccatagcagctaacactaagcagctttacttcctaattagcttgacggtacactgtgaaattccttcgatccaaagatgagatgttataagatatggcctttgtgtaaatataaccttctatgacaggaagccaaaaaagcaaaatttatccagatgaaacagaaaggggaaatgtgctcagccaaagtgttaaattcaagctgagatttggcagaacactgggaagaaaatatcctctactgttttgttatcacacacacactcagtggaatacttaataatcagaaggaatttaaggcttggttctgtaatgcagtttggcaactggcatctccagtacccgaggtctgtacatatcatcacaacacattatttaatactgatttagaggatacatcagcctgctgattcagctccactacttcctgtcaacaatagtgataatattataaaaactctc

SEQ ID NO: 3755 - DNA, 535 bp, Homo sapiens
gaaatatgtttaggcatgagtaggtatgccaagcatatgaaattgcatgaataataagtagaacagcaggatgaggatgtaattgcatttacatcacaaagaaaaccatacctgatttacttgatcaagtttgctaattatattgagtcgaacatctggaaactcatcttttaggagggaaagaaaaattggaagaagttgttctatagttgcatcctacgggaaaaaaaggaaactctggtaagcttgccaataagccataataagggtgaaaaagaacctaaagctgcaccatttgacaagttacagaacataaaatatcagacatatttattccttcaaatatactgacttgcaattatcttgatgcaagcagttcatttcatgtggacattggataactcgagcataataagatgcttgaagccttgaactataatgtaggaaaagtaactagaaagaagctactaaaagattgttttgtggatattttagctgttaacttcaataaaagtgaaaggtctgaaaacatatc

SEQ ID NO: 3756 - DNA, 504 bp, Homo sapiens
agtttgcctccaagacaagtgaacatgttaacagaatatttacaaatttatttaaaatggcaatcattggtcctgagagatagggaagaaagcgttcttacttaactaagaaaatgatcagtaggtgaaatatccaagaggtgtttcttaatacatctctattctgctcctattttatcctgttatactgcagttccctgaattctcaaactcagaatttgacaaagtagaaaaaaattaagtgaatttacttgatgttttgaaaacaaaacacaaacagctttgcctagtacatgtataaagttattacatagtcgctatagattgactttccacctttcaaaataatagacaacaaaaatgaatctgaatttgtaaagcacatttaacctcctcaagctcttgaaataaagttattcattagcaatatctcaatgattaaattcaggataacatgggatttttttgaaaaagtgtgaaagcaaatagaagcatttattagct

SEQ ID NO: 3757 - DNA, 124 bp, Homo sapiens
tagtagccatagtcatccaaattatggagactccttatcagcccaccgagtcaggcaaaacagataccagtcccttcattatccctctgaatacccagaataccagatgcacaatccacttctc

SEQ ID NO: 3758 - DNA, 561 bp, Homo sapiens
ctcatctttctcttatgagagaatgttaaatgggttttttgctcctgtcctggaattcaagctaagacctgaaatgctaaatgtaatcagacaaccatcctttctagcctcttggttcatataagaagagggaaaaagatcagtcctgatgacaggctagttcctcctttcctgtttgaagtcagagaatgaggagaaaggaatggagatagaaaagcagagagaaagactgacatttcatgattagccagggcaatttcttttttgttttattttataatggctgctcagtaaggatagcctcagcttactgatgttgttagaaagtgacaattcttgccttgcagaaggattactctgcattgatctggcactttggcctcagtttgaaatagaatttgcctgcagctacattagcataataaaacacagcaaattcacagtctctttctggcacttttcctgcagtatttgtagaatactagaaactattttttacacattagttatacttgcctaaaaatcttcagaccatcatcaatctacagagatctgagagaa

SEQ ID NO: 3759 - DNA, 602 bp, Homo sapiens
ggaagcctcactgaggtgccatttaaagtcagcaatcttgagagagtacagtgtcacactgcagtagagaaacagctcagaatccatcagtgacagcaagctgtactggtagtttattatattctttgtgattactttctcatttgttgtcctttagcataaagactttcagaagttctacactgctttaactgcagagagcgtcaaagaaaagagtgtccacaatggaagagaaagaagaagaggtgaagttagggtatgtctgaggtcaagcacagtattgtggaaaggatgtgagaatccccccaggaggggaaccctcagaattcaagttccagcctcacagtctagtcatctacacctgcaagattctccttcctaaaaccagaggtttgaagttcttctcttaagggcaacagtattctcttttagttgttcccactaactcttaagaatggggcaacaaaattacctacttattaaaaagagaatgagtagagtccctatactaatatacttacagataagaattctaagaattctaaaactggtctcagttgagtctcaatcagttttttctaattgtaaatggagataacgat

SEQ ID NO: 3760 - DNA, 660 bp, Homo sapiens
ctacttatgacgtcgagatgagaggatctcttgagcctaacagttcaaggcgcagtgagccatgattgtacccctacgctccagcctaggtgtcagagtgacatttcatctctgaaaaaaaaaaactttttttcctaccttggcacaaggccagtgctacaagcagcagtcacacagtcccatgcctgacatgtgccctatgcacgccgaccccacccacttaggcaggctgcaggccctgtgctaattgaagaagcaggtggagagctggtaacatcaagcacagggacagatttcattgtgacatcaccaacagacagcaccccgctgaggtggtacccacagccgatagccatccagctgtacattactcacaacaggtaacccacccacccaccaaaccaggccctacccttaaggagggttggcccaggaggcacaaacacaagccttttgtgtctccattttggagtctgaaagccttcttgaagagaattctcccgatcagtctctccctcaaagaaatgtaatgtcacatatatattcacaaacaaaacggcattttaaaaactcttttcaaatcttacatttcagttttaacaaacagtactggagcaattggatgtccacaggcaaaaaaaaaaaaaaaaaaaaaaaaaa

SEQ ID NO: 3761 - DNA, 599 bp, Homo sapiens
ggaaggtctaagaaaggcaactaccaatgacgcctttataaataactgcagggggtggacgggggtgatgattctacaatttcatataaaacaacatttataaggatgctgtatcctcatgtgcaagcatccctggatgcccacaatacctcacaaataccatgagaaaattggactgcagactcttgatacatttcctttaagaaacaaccttttctgactctgcgcatttaaattccaaataaaatgttaattgcctgacaagcccgttttccttgtcatttataaaaatgtatacatcctgaataaaaagtgggagaatacttaaaagagtaggagaagaatcttgattttaacaacaaataattgtcacgctacggagttcttggctttaattgctgcttttgtgatttgttttggaatttgggctgatgacaatcacagagcccagtgttaaaaactaataatgatatagtatttcattcgaaacatttttggatcttgatagtattgatttgaaagaacaagtttaggccactcattgttagtattagttccaagagcaccctctagtgcccacagctttgaagaaccctgtg

SEQ ID NO: 3762 - DNA, 527 bp, Homo sapiens
atgctagatgactccatcagccaatatgttagcattatctagaggccttatgtgaagtcctagtggtcctttccagttctatgactttaaacatacaggtgaatcaaagcttcaggaaggcctagaccaacagctattactgaagctcccatttgtgcttaggactatgcatagagaaactctcctttgggacttggttagggtccaaagccctaaggtcaaaacactaattgggggcttcttacttcagatatgaagatgaagggattcaaaataaacacaaatcggctggtgcagtagctcacacctgtaatcccagcattttgggaggccaaggcaggtggatcacttgaggccaggagttcgagaacagcctggccaacatggtgaaaccccgtctctactaaaaatacaaaaattagccaggcatggtggcaggtgcctgtaaccccagctactcgggaggctgaggcaggagaatcacttgaatcctggaggcagaggttgcagtgagccgagatcacacc

SEQ ID NO: 3763 - DNA, 479 bp, Homo sapiens
tataataattacaccacatataatcataccattttctctatcacaattctgtaagcttcctgaaggaggaaccaacttttatccaaggggctttgaactattctcgcactcacaggacctggataatttgtcatatactaagaacactgctaaagagagaatggaaataatgactgtagttgaaaaacggttgtgtataaggaagggtatgcatacaaaggaaaacttggttagggtggcagtgttacaaacgattaaaacaacagcagcaacaaaaaattactacaggctgagtatcactatccaaaatgcttgggatcaggagtgttttggatatcaatcagactttttttggattttggagtatttgtgtatacgtcatgagataccttggagatgggacccaagtctaaacacaaagttcatttagattttgtatacaccttataaacatagcctgaacataattttacacactc

SEQ ID NO: 3764 - DNA, 508 bp, Homo sapiens
tcctacagacattgttgctggatcagccagcatgaagaatttagcatgaaaatgtaaaatctaatagctagcaagactcctagtctccctgggagataaactcagtcacattactgaagtctgctggaaatgtgacactaatgacaagcaggaactttatagctcccattttcctttgctgacattacaaatgtaaaacctctcatttccccagaagttcatctacttgatctatgctgctgagcctacatattctgtatctctttgacagcaggaaagattctggcgagaccagtgggcctgttcaccttgcacaggaataacttattccaggacatagaagccaccctaatctccccaccccttttccatccaacaccccattcagcatgcactcacttgcaaagtccaaagacactgtcagctgtaagtgagtcacttattatatcatcaagaatgtaagaggataaacaagcatcctctgaaaaaaaaaaaaaaaaaaaaaaaa

SEQ ID NO: 3765 - DNA, 543 bp, Homo sapiens
acagatttcttcgtttcttctccactcccactgcttcttcacttgactagccttaaaagaaaaaatatacgtatacatatatacacacacatatttctttaaagttatggagatttataactcattatatccaattaaaatataaaagtcaataagactttttgaaaaaaaaaagtattaaagtaaaaagctatacctttctttagcctcttgggaaatctaaagatccaggtggtacagcagaggaataatatcgctaccaaaaagaaatattatgttaagatattatctaaagtaacagctggcaaataagagatgtaacaggatttcatcaaaagttgtaacacagctgtgcgcagtggcacacgcctgtaatcccagcactttgggatgctgaggcggacggatcacctgaggtcaagagttcaagaccagcctggccaacatggcaaaaccccatctctactaaaaaatacaaaaattaactggggccgtggtggtggggcgcctgtaatcccagctactcatgaggctgaggcaggg

SEQ ID NO: 3766 - DNA, 340 bp, Homo sapiens
gactctgagctccagggaggcatggaatgcattgggtactacacctctaagccacataaaaccacactaagaccaagtggctctatgaagacggagttttgtggcagtaacagcaggagccacatatacaaggaatgatgttctggggttaccaagtcctctgacttcaaaagcgtgggggggctgaattctggctgcattcatgaatgacaaaaacaaccagaaatgaccaatgagacaccagtaagcccaaggattatgaggcaaatcaatagagagactgtaaggcaagactgactgcatgctctgctaacttatgggtctgcgggaattcagaatt

SEQ ID NO: 3767 - DNA, 579 bp, Homo sapiens
ataggatgttaaaagaaccaacccagaaagagagttttaaaaagctttgtcttccccactttcatttagatgtattctaatcagagactctctgaggccttttacattaagcacagcagcctttgtggagaaataaaaatatgtattaattgtacagccctcatagcaattaaatatctgggagtagatgctaccatgtgaggtcctggaatataagcgggagagcaaagatgcaagaataacattctgggaaactccccctcgcaaatggaggtggtttgatatggagaaagtgatgagctagagaaattgaaagtaaacaaggaaaggcttccgtttaggaagcaaggaagaataaagactgtcattatttttcatgtctactatgcatactaagtagtgttttagtcaatgttggatttgttgcataatatagcaaaggacctagactctaaaaagagttaaataaatgtttgctatagataataggaaggaagggggaatgaaagaagggaggaaggtaggtaggagggtaggcaggcaggtagcaagtagggaagcagatgaacaagagtgagt

SEQ ID NO: 3768 - DNA, 601 bp, Homo sapiens
tttccattgcaccagccccacgaatgcgacttgtgtgggggcaggctgcatggggacaggcctgcagggagcagggctttggcagggcacaccctccagggctcatctcaagcttcctggttgtagggtaaccgaggtcactaggcagctggggaggggtgggaaccaaatgtttgccgagcatccactgtgttcccagaactctactgggctaagtcggataccaggaatcatgactgtcataatcattgcgggcagagattcttaggttgttagtgcaacaagcaaccccagaggccagtttgcttggggttttcaaactcatggccatcagggtcaggcaggcgacattcatgagtacagcaggaggggcatgaaggctggtatgaatggagtatcgctgggaatgggagagcacagtcccctctctaaaggggacggccacgactcagcatctgccatgtggagccgtgggacttgggctgccacatctcctgatttttccaagagaacctagaaatctcaggtgaacgcctccagtcttgaaaatcagatttgggggccaggcacggtggctcatgcctgtaatcccaacacttcg

SEQ ID NO: 3769 - DNA, 574 bp, Homo sapiens
ccccaacatgcaaatgactcccatggttttctaccattattacagacaaaacatatgattatcatccatattctcaagctgtaatttgaaaccatttatttctattgaatcaaacttcatacccttccttgagctttacttcaacataatcatggaaccttcgtttttgggtcagctagtaatacttttagttttaatctcctaatctctctgtaaaacccacagtaagcattcctatgaactgatgaataggaccagaagctccaggtccaacagaacaatcatcaaatccacttctttttagcagtcaaccatacctaagtattttgctaggctacataaggacctataaataacatgtggaatgtatttcaattcacatttatttcatcaatcttgttcacacatattttaagtgtaattaaagacaaaataatagactaaatttttactgagtttatgcagtacctgtgagaagaatcttgaattcagaaccaaccatatatatatgcaaatgcttccacttaatttaatcatctacaaaaataaggtaagatcaggaactcatgaatat

SEQ ID NO: 3770 - DNA, 653 bp, Homo sapiens
catcagtgaacagaatacatctagtgctgcatgagggagcttcttttttagtgaaggaggacattagacacagatgtataaatgagtcattgaacaagataattgcaggcagagatggattctatgaaagaaataaatcagggtgatgagagggaaagtgacagagagacagctttaggttggaggctaaagtgaggcctttgaagaaatgataattcatgtgtgacttgaatgacaagataaaatgtagagagttagaggctgaggattacaggccaaggaaatagccctgtgcatatgttgtgagacatagctccaagacatagacatgcatagtttaattcaacttgactcttccagaaatgaattgaaggtcgctaggcctggagtgtcaggaagcaggggagaagttgtgagagaagagtttgaagtgagatgcctgtgtcatttaatgaagcaaatcacatgaaaaatatcactggcattttttattatacgacttatttaaaaatagcaataaaatttacttcctactttatcctaaggttctgaagacctttcaatggtgttcttggaggagagtttacaattttggtgtgtatcatgattgtaaagataccctgatatctttataaaatagaagtaaatttaga

SEQ ID NO: 3771 - DNA, 621 bp, Homo sapiens
tccaatcatcttaatatctctggtacataattgtttagacacagttttcctgaatgtttgctgaagaaatgttagcaccaatggcacttccagaaatgctagataaaaccaccaaggtgcgttatttcaggccctcaccttttacattatggttttagggaaagtgtaggaataaggacagagcagaatgtctgttcctacatctgcatgtgtgctgaagctgactgagcacttcttactgttaaactcgttccgcagtgttgcggcttagcagcattacgaataatatcatttccactatctctgtgtggtagctgttggtctgtcattcacccttgatttttgcattgtaattgcacatataacaaatgtataaaataaagagctagaactggtagcaaaaagatatattattgcatttactgtgctgcttgcaagtatgtttttatcttctcaacacctcaactgaggattgtatgtattctataaagcactttttagtactgtggttgggtcctcacagtgcaggaagtcctgagactattaagatatccctcaatattcacacagatttttgtaccaacgaccacagaattataggaataaaaattaaactggctc

SEQ ID NO: 3772 - DNA, 91 bp, Homo sapiens
aagtgagaaaaactcagaaaattaatttggagtctgaataatgtttatatacttaaaaaagatttgtaggtacataggtgtatatatttat

SEQ ID NO: 3773 - DNA, 575 bp, Homo sapiens
ggttttgttttaagccactaagtttgtggtaatgggttatgcaccaatagaaaactgatgaatagggtttgcacatactcgttttagtagatgccacaacagtttttcaaagtaccaatttgtattcttaccagcagtgtacgagtgttccacttgctctatatccttgttatcccttgttttgtcagtttttcacattttactgttttagtgggttcatgctgcattgcattatagttctttgttctgtcctttactgtttgtatgtccttagagccatcttttcagcagcctaagtcactcatttcccatcagcgatgtgggcataagaaaaatgtgaaagcgcctcgcacagttcccagaagagtaaatttcatttaaaatttgagacacaggattttcagtctaaacactttctttaactaacatttatgtatttagagacaaagaacacagtatattctgaaggcccaaagtaactcagcaggaccattaaaattaaattcactgaagagacaaaagaaatgttgcattggttacttttagagaatgaaaggaagtgaatccatttaatc

SEQ ID NO: 3774 - DNA, 630 bp, Homo sapiens
catctgatcaagtgatattgaaaacccttcaggtacggcttttagaagactttgacctatttttgcttgtgttgactctccctccagctttgtggaaagagggatcatgtaggttcatttctcaggcagatcagtcaccttttgccatcaaagttttagcatccatttcgaaaatttggtgtacaagttgatattttggtgtttttagctaatctggggtcaaaacagaatgccatagatgaggaagcttataaacaaatttgtttctctcagttctggagatggcaaaattcaaggtcaagtggttagcagattctgtgtctggtgtgggcttgctttgtggttcatagccatgtttctaccatgtcctcacatgacagaagagatgagggagctctctatggtgccttcaataggggctactaatcccactcatgtggtccctgccttcatgatctaatcattccccaaggccctacctccaaatatcatcacatagggaattagatttcaacacttgaatttgagagggacaataacatttggtctatagcatcaggttacccagagccttatgcattcggaggaaatccaaaatcttctataagtatttgctggtcccctctgggc

SEQ ID NO: 3775 - DNA, 614 bp, Homo sapiens
catgacaacttcttggaggtgctcatacaatgtttccaggtagcccctgtagtaactgtgaaaggccccatctcctaatggtgcatggcccattcgcagtgtcaagggcactgaagagagatcttaatggcatcatctaaaaattatccttaaccatgaacataagtttcttcttctggggtcacgggaagaggattccaagcagatgtgcaccagtcacttctgattgttagaacagtagtgttgctgctgctagtggcagccaaggctgatgtctaccaggcactgtaccaagcactttgtatacatccttatgtttatttcttggacaggtggcgagacttacccagccgtacaacacagccagtcatgagtgaagctgggagttgaaaccatcaaaagcctgagcatttctattaacagggagctcattagcacgtaaggcgctccacagctacctttaaagagttgcagagagattttggctcattatgagaaataaatttctgagtactctcatgctatgatagttggaagtgagctctgttctgaaaaaagacaattacagtgctgtctttggaatcacagatgtcaaaaaaaaaaaaaaaaaaaaa

SEQ ID NO: 3776 - DNA, 540 bp, Homo sapiens
gggtattagataatttcatatgacagatgaagtttatcagccttgtcatgtggtatgatttaatggctgtgtaaaaatactgtctaattcttggaaaatggctcgctttagtttttaacttttgatggtaaaatcttcacttaggtcttttaggctttaagggaagttagataaagtagacacgtgcatcatgaaatgacatttttaaagagtataattagacagaatataatattttgaattaaagaaaataatggaaagtcaaattatactttcattaataatttgctgtctattctacgtgttagtaatttaaaaaaataactattctgcatgagtaaatatttttatttaaaacctctaagaaactgcaaatgatttaacaaacatcaatatgttttgtgagtttgcagttcatgaaatgaggaaaaaacccatttgccatttgacatttctagtttaaaattaagattaaattttcagaagtagtaactaaattttgataaccctttcttcattaaaaaattaaaatgaaatgta

SEQ ID NO: 3777 - DNA, 609 bp, Homo sapiens
gagactcttgccttaagccctgattctttcaagggagcttaaatgtatccagtgtggtaacagcctctggctcttgagaaaagcaaacacaaattctctccggaataaagcatcaccaataaatgctcccaggatccctacagattatgttcaacaacattaccaaacttgccaggaaacaagcttcgctgagtgagatcaacagaattaactaaatacagatttagagtcatataaatttctgatgctggaactgtcagatacaaaatataaagtatgaagtgtttacagaaaaaaatatgtaactaaaaactgaacaaagaccaagagaccataaaaattgatcaggcagattggaaagaaaccacatagaaattttagaatcgaaaactataatcattgaaactcaatatatttgttaagcatcaaataagagaaagatgagtaaactaagagatagatctgaagaaattatccagaaggcaaaacagagacaagcagatggaaaatatgaaagataaggaaattccaatgagaaagcattatacacaccacattaaattagttaatatatgtaaacactcagaatagtgcctggcaattagtatc

SEQ ID NO: 3778 - DNA, 143 bp, Homo sapiens
tagcagtcaaccatacctaagtattttgctaggctacataaggacctataaataacatgtggaatgtatttcaattcacatttatttcatcaatcttgttcacacatattttaagtgtaattaaagacaaaataatagactaa

SEQ ID NO: 3779 - DNA, 442 bp, Homo sapiens
atggaatattacattgtgttccatagagagggagcgaatcttttctatgtgtgggacaaaggtctgcatggatatttggatggccagacttctagttttcccaaaagactgactctccttcttccgaagtatataatctatttccccctccttccttggtactggcaagagactacatttcccagtctgacttgcagcaaggtattgtcatgtactaatttctctctattggacagaagttctttgtgcaacttctgcctcattggcttttaagaaaattatttgtactgattttctctctttcttcttcctttggaatatagacaaggcagcagtctagttttgaccatggagatgaggacaacatcctggcatatgtcaatgcaatgagatgggctagggccctgagtaatctaatggagcagaactgtcatatttgcct

SEQ ID NO: 3780 - DNA, 501 bp, Homo sapiens
gattccgctcactctttatgctatttaattgacaaatggaactgatcttttatgtggccatagtaatgagatcataactccaaaaactctcagcaaagaaggaagttctggatgtaagcatcaactttaactagtcactaataacttcagctctgaaactcaattatattgcacatgttcaacagagaacacaaccatatcctccataataaaacatgaaattacttataaaaggtaaaattcttgatgtgtatgatctttcacatgcagagattactgaagtattaaagcaatgtgatgtattaccataaacgtcaaaatttttcaatggatatttctttcgtcttcttattctttttggctgtgtttctgtaggatgatggtgttataataattgaaaagattaattattgtatttgcacctgaacctattttatttaacattactgtgacaattgagagcaaattgtattgacaggcccttcttaaacataattatgc

SEQ ID NO: 3781 - DNA, 314 bp, Homo sapiens
cagaagggaaatagcctttactgaagttgtccagacatgtccatatacaaataaacaagcaaacaacaataagcttcaatgggcatcagtaactagagttacagctacatattatttaaaacctctagtttggagcaaaatactatgagacatgtaaataaacaggaacatataacccatacacaagaaaagaagcaaacacaatcaactgccttgttggagccaagataatgaacttattaggaaaaaaatttaaagcaattattataaatatgttccaataacaaaataaaaccacgtagattgtaaaaaga

SEQ ID NO: 3782 - DNA, 474 bp, Homo sapiens
cttcttttttcatttcaactgaaaatgctttaggtaaaaacctttccagtatgttcacctctagaatagccacccaaagaccttcctgaggctgcctcagaagcaccacttgctgttttgaatgactctactagtatgagaaggatgtgaaggtggttggctggttgggctttaacttcctgggattcataatttttaagcttggaagatagctgctgttcccatgatgggcacatttcctgagaagcttgaatgactgatgagcatagagcacccctgccttcctcaggaaacctgaccggcaggggctctctggcttcctgaaagcttcacctcttccctcgtttatatctcaactgtaagggcattttcaagcttctgttcatggaatgagcaactcagactgtctggagcttgctgagtacaaacacaccaccactaagtttcagaactttccttagaacttgggcaaaa

SEQ ID NO: 3783 - DNA, 616 bp, Homo sapiens
tggttcgccgctgccctctcctagggtcatgggactatcccgtggatcccacagagaagacagactagagtccatcgctgacgcacctccacagaggactccttttctgccaagccacagggactagtcgccaggcaaaggtggtgttcactgtgatgcgagccgtggctcactggtgccctgagactggcgcatgcccattcgggaggcaggctcaggcatctgatgatggcttcttcctggattaggcccccacagaaattgaggaagttgttatcagtcatttataccctgaaaatattagttcaccagagccctggagggggatgggtagaagctcattaaagtaggtctggatggtgcacagagtgtgaagaaaacagagaaacccagaaagtctaagcctgaagacatctccaatcctaggagatactattattatgtccatcttacagaggaggaaactgaaacaaaggaagagaacttgatcaagaccatgttgccccacagtagaagagccaagatccaaacccaggtaacctgcctcatcatcagagcctggactcataacctcatgctgcagttaagcaggtttgcactgtggctagatacacag

SEQ ID NO: 3784 - DNA, 582 bp, Homo sapiens
ggttgttggagtaatctcatagatcccccagtgtcaaagaacttttaaaattgccgattaataatagatatgtatttcacctttttgcattaattgcctagagacttctgtaatctatttagggtaataactatctttaaaaacaaaatcaaacacaacaacttgttcttatgtttgcctttgtattccagaaggataaaagttttaaattctttttatggacagaggtgttcaggttaagttctcagagaattgaaagaagaaatctgtttcttagagaagctaaaatagtactttcaaaaaaagaaaagaggccgggcgtggtggctcacgcctgtaatcccagcactttgggaggccgaggcaggcagatcactatgtcaggagttcaagaccagcctggcgaacatggtgaaaccccgtctctactaaaaatacaaaaattagctgggcatggtggcacgtgcctgtaatcccagctactctggaggctgaggcaggagaatcctttaaaccgggacctgggaggcaaaggttgcagtgagccgagatctcgccattgcactccagcctgggctacag

SEQ ID NO: 3785 - DNA, 547 bp, Homo sapiens
ctgcacagtccttagtgacgtccttgcctctggcaggatcccctggctgggccctgctgcccccctcactttcctcagtccctgctttccagtgtgaaagctgtcagaatcaaaatggagacacttgtcttaaacaaaacaaaacaaaaccccaaccaatagagctgggaacagccctgacggtattccccacaaaaccatcacagaagacagcaaacaccacaatcgtgagcaaagtccatcacaacctcacacaaaaaacacttctgtgaggacacctgcccaacctcagactgttaccacccgtgttctcgattcctgtggcaaggataaatatcccaaaacaattctgtgattctcttcactttgccattaaagcctctgtgcttttacctccctgaaaacgcacagcggactccagcatacgtatttgcacgcaatgcccgactcctgaacgaacctcgttttcatttggagagcctctctggcggtggttcgggtggacgctagtgtggacatggcattgggaaaacgctgcctgtgcacc

SEQ ID NO: 3786 - DNA, 586 bp, Homo sapiens
caaagccagcctgaccagcacccagaggagttctggcccatggactcgatcaaggaaatttgttcatcattatcagggcaaatgcttcctcctgtgctggcagcaggacaaacaggctactccttggtgatacaaaccagtgaaatattcatgattatatgacaataatgaacctggccccttcttcccttcatcttcctgattctcactgtgtggcagggctgtgtgtgctcacaaacagtcctgtgtcctcgtcattatcataattaatcaatatttaataagtgccccccacactatgaaaagccctgtggtgactcaggatacaagaaagtggtagcctctgcccctgagaaggttcacaaatctaaatgaggaaagtagaaacatgcaccaaaaggtaaaccataaccaatacatggctgcagtgacatgggtttgggatttaaaaggccatcaaaaggccaggtgcagtggcccacacctataatcccagcactttgggagaccaaggcaggaggatcacttgagcccaggagttggagaccagcctgggtgacagacagagtgagtccctgtctctaca

SEQ ID NO: 3787 - DNA, 588 bp, Homo sapiens
atgttaaatgttcttactacaataaaaataaaattagaaaacacatttaggatgatgatgaggaagatttttgaacattgtctgtcatcaaattatgggataatttcccaagggaaatgtgaaaaaatgccatcattgaagacatttgaaaccagactgaagaaaaacacatgaacacataaagttggccttgttcttctgcctacatggatgacaagacccaaacatgacctaagacaccattagattttacagccgatgagcaccttctgaccacccactactgtgagggatgaaaggggaaaattgggctggaactgatgactcacatcaggaagacttgctcagtgtgttcctggctctgttacaacttcccgagggtgctaggaaaggagcagtttgcaccaagtcatcatactcccagttcatagaagtttccagggaatacaggaggctcttctctactgcaccccacttttttaattggtctgtgttttgttttcttttttttaagtcataaataacccctgtagaagaccagaacatacaatctatacagaacaaacaatctatacagaacaaacataa

SEQ ID NO: 3788 - DNA, 544 bp, Homo sapiens
ctgttctggtagaggcaagggcaacacattacactagaaacaatcactcattatgaaacgaaaccacagaactgaaatgagctggctcactaaggctgcaccaaagctgtgccatcaagtaagtgcagaggttacttgtgggaagggacagatgcaaacaaggacacaggagacagagagcagcacaagccaaaggcaggggcttacacggcgggaattaggaaggcccaatgccatcgtagccgcatcactctgtctcgtcatttcatctttctgcgcattagctagctcctctccttctatagttttgaataacttacgaaagtatggccgggcatggtggttcacacccataatccagccctttgggaggctgaggcaggcagattgctttgaggtcaggagtatgagaccagcctggacaacatggagataccccgtctctacaaaaaatacaaaaattagccacatgtggtggcacacacctgtgttttcagctactcaggagactgaggctggagaatcacttgaccccgggaggcaa

SEQ ID NO: 3789 - DNA, 611 bp, Homo sapiens
gtttcagttacctgcagcacagttcaataagatactttgaaatcagagagaccacattcacataattttattacagtatatgactaccattgtcctattttattattaaagtataataaaatattattaatctcttcatgtacctaacttataaattaaactttatcataggtatgtatgtacaggaacaaacgtagtatatatagagtttggttctatctgtggtttcaggcacccagggtgtcttggcaccagctctgtggataaggagaaactcctgtattttatttgtggaatttaaaaatctaaatacaacatttgtatgttaaacttcttcagtctgaaatgctttcagccatctactggggagcttggcactacctctgtggataagggggaactcctgtattttatttgcagaattttttatctaaatacatattttttgtgttaaacttcttcagtctgaaatttaagaataaaaaccagagagagtatgtgaagatttagaacgttactcggcatatgagagtagctagcaccaggccaggtgcggtggctcatgcttgtagtcccagcgctttgggaggctgaggcaggtggatcacttg

SEQ ID NO: 3790 - DNA, 665 bp, Homo sapiens
tggctcacgcctgtaatcccagcactttgggaggccgaaacgggtggatcacttgaggtcaggagttccagaccagcctggccaacatggtgaaacccatctctactaaaaatacaaaaattagccgggtgtggtggcacatgcctgtaatcccagctacatgggaggctgaggcaggagaatcgcttgaacccaggaggtggaggttgcagtgagccgagattgcaccattgcactccagcctgggcgacaaagtgagactctgtctcaaaaaacaaacaaacaaacaaaaacccacatatatcccacttttctttcccttccaaaagagagtatatggatataatttaatcatttttcctgtgttatgtataattgtacaattagaaacaaccaaacattaaaaggtagggaattgattaaataaattatgcttgatttaccttttaatgataatgctttagaagaatatgcaatgttggctggacgtggtggctcacacctataatcccagtactttgggaggctgaggtgggcagatcacgtgaggtcaggagtttgagaccagcctggctgacacggcaaaaccacgtctctacaaaaaatacaaaagttagcttgggtgtgattgctcacacctgtagtcccagctacttgggaggctg

SEQ ID NO: 3791 - DNA, 518 bp, Homo sapiens
aaaattgttaattaaatttattcatttgtcaatgaaatttatcaattaacttaaaatgtaaaaaatatacacatattaaaaaatgtaaacaatacagaaaaacaatccagaagtaagccttccaccccttattgctagccacatagttctgtcctccagaggtaaccactaattgccagtttctaatgtgtttttcccgagatactctatgcctataaaacttctctcttggctggggatggtggtggctcacgcctgtaatcccagcactttgggaggccgaggtgggctgatcacgaggtctaaagatcgagaccatcctggccaacatggtgaaaccccatctctactaaaaatacaaaaattagctgggcgtggtggcgggcgcctgtagtcccagctactcgcgaggctgaggcaggacaatcacctgaacctgggaggtggaggttgcagtgagccgagatcacgccactgcactccagcctgggcgacagagtgagagtggatctcaaaaa

SEQ ID NO: 3792 - DNA, 483 bp, Homo sapiens
aagtttgtgaatttaaatctcaactgacagtgatgaatttatttgctttgtgctgacaagacagtatgttgaagttttgttttccaactcagttctaaatctgcagtgtatcaaaatctcctcattatgctttggatgttatggtacataaatggtatcttcacaaagatatattcattctggtactgaaagtgcatacttaaaattcttcacgaacagttttattgaaaaaatatgtagacaagccattaattatacacagtgatctggaacaaattcttacaagaagcctagcatgtcttccattaactgtatacaatttataaaaagttattgaaagtcttcctgaggttaaacaataaatcttttaaatttaatcactgtgctccctcaaaggtagttttttctttatgacactcaggggatacagtcagatctcagcctactttaaacaactaggcagtatttttagtgcacttttct

SEQ ID NO: 3793 - DNA, 411 bp, Homo sapiens
ctatgaagtgactgactttccatgtccctgattatctcatgttgtaaactgtaatcctctcctatctcaagcctcttctgattaaaccatggcttctcctggaatttagaaacacattaaagatacaggagttataggttggcccagagacctgctatgtcacaattttttcttcaggaggttttagaggacaaggtagaggaagcatatttttcattttaaaatattttattgatagcatcattaaattaagaaattataaattttattttatttatttgatttttggcaccatttaagctacttaaatgaagtagcttgtggttggcagagcagtaattatcagaaacagctagaagggaaagacaaaatacaaaaactatccatgtgaagctatgagtaacctgctag

SEQ ID NO: 3794 - DNA, 92 bp, Homo sapiens
ttgtatcgtatctaatagcacagtggtaaatgaatataatttgcaagcgattattcagactgcatggacaaaatgcttttaccacacggatg

SEQ ID NO: 3795 - DNA, 480 bp, Homo sapiens
  misc_feature 179, 180: n = A,T,C or G
tacaagagcaacaatgcccagaaacacaccagtgtaacaaatgctaacaaaatgattactgaaatcctattttttataataattaaacataaattctagttaattatggcttagaatcaagaagtttccttaaactgtagtaccactactgcacaaactattatgtgggcttgctggtnngctattatgagaggagcactctattaaagtcaggatattttctccattcatctttttaaaaaattgtacaatgtattagtctgtacaagaattcatttttaagcctaacagaagctgttaagatatcacttacagtaccatttaagtgctcactgctgaatctgtagcctttgaacatatactgaattatggctctgtcaaactgcacacatcccagccaaagggtagtcaggggagggagccaggggaaaagcagtgaagtacccccatctatattcatttgtttgtctctgcttaagt

SEQ ID NO: 3796 - DNA, 559 bp, Homo sapiens
catgatgtagaacaaaaccaaacccttagacctgcctcaagtgacatccatattcttgtagtgtctcactaagaattgcaccaggcccacctcaggccaaattctagaaagagaccagtaggtatacagtagtggttcatgtggcgtttacctttgatcttcccctcagtcccatttttacctctatcccatggcttttccagaatagcaagagctatatgtggccaccagtcagctgacgtgtcaaatgccatgagttcagtataactttaaagactgaatgtcggccgggcgcggtggctcacgcctgtaatcccagcactttggtaggccaaggcgggtggatcacgaggtcaggagatcaagaccatcctggctaacacggtgaaaccctgtctctactaaaaatacaaaaaattagctgggcgtggtggcgggcatctgtagtcccagctacttgggaggctgagacaggagaatggcatgaacctgggaggcagagcttgcagtgagccgagatcaagccactgcactctggcctgggcgacagagcgagact

SEQ ID NO: 3797 - DNA, 346 bp, Homo sapiens
aggttggccaggatggtctcggtctcctgacctcgtggtctgcccgcctcagcctcccaaagtgctgggattacaggtgtgagccactgcacccggccttaactttctaattagtgatacatttataagacataaatagctatccacagagttaacaaaataaactttggtccacaatctggatgagttcatattattttgataagatttggtatataacatatttggatgaatgttgttctttattataccttgttaagtagttaaaatgacatttattcaaatggttctgaaactctcttccctggttgtttgaaaaatactccagggttggccaggtgcagtg

SEQ ID NO: 3798 - DNA, 440 bp, Homo sapiens
cattcaacctatcctggtgtagagagatcacaaagaatatttaattagcatttctcattaaaataaatgtgtgactttttttcttaccttcaaaaatgacatggcctttgaaaatacatactggaaatgagctgggaagagaagggttggattttgaaggcagccacttgatactggggagtttgcaagttgagccttcctgagtccttcccattctttcatcggggggagaagaagactttgctgtgcacctgtatataatagtgaaattaatttcaaatccaggacctgctttattcttacctcagattccatgaaacctgctttaaactttttctaatattctagaaatctactctatccttacccaagggatagaggatatttctgtggcacccaagctgttcagtgaacagatgaactgtcccagggtcttcact

SEQ ID NO: 3799 - DNA, 524 bp, Homo sapiens
aaccaccactatttatttctttttggttcacaaaatgatgcgataaacacaagtgatgaaatcacacggcagtctgtcctcaattaatgaggggaatcatccagattaatcagactacttttacattaattaatttaagttagaattgaaaggaacatgcttaaattaatatacagttttcttgacaccttacgaacaggtctgtaggtcacaatttgagaaataatgttatcatgaaatgattagttggaatgtctctatagtctaggatttaaatcacatttcaggtagaaagctggccaagactcttaggattgtaagtggcagaaatccaattgaaactgtcataacaataagataaaatattggctcacagatttgtggagattactgagaagaaagaaaagaaggaaggaagggaggaagggaggaaggaagggaggaaggaaggaaggaaggaaggaaggaaggagaaatagacaaatccacaaaatcagagttggagacttcattacgtctctctc

SEQ ID NO: 3800 - DNA, 427 bp, Homo sapiens
gggcaggtgagggaatgctttgtccttcttttgctgtattgtggtatttcaaggccacctccatgtatgggtacagatggaaggataagttagcactggggacagtgccagaggcctttggctttgccagaggcctttggctttgggctttttgtattcttgtgaacccttctgcctccaaccatctgacattcatcatatgacattatttaaattcacatataaaaattattgttggccgggcatggtggctcacgcctgtaatctcagcacttgtggatcacaaggtcaggagatcaagaccatcctggataacatggtgaaaccccatctctactaaaaatacaaaaaattagccgggcatggtggtgggcgcctgtagtcccagctactcaggaagctgaggcaggagaatggcgtgaacccg

SEQ ID NO: 3801 - DNA, 510 bp, Homo sapiens
taattagcaagttttacaatgctctctgatgcccaagatgaactaactacattcgcatttaccgttaaccaattttagttctgtcaagcaaggtcagacttaagaattatcacagatatttcccaaggtccaaatgtaactcaaaagaatctttggaggcaaatatcctggtgtgtcttagcataattttctttcacaaagaaagagatactcaaccagttttcatggcaaacaatacttaatatatttgactagctttatgcaaatcatcctctcttaaaagtaagaacaggctggcagcaatggctcacacctgtaatcccggcattttaggaggccaataggagaggactgcttgagcccaggaattcaagaccagcatgagcaacatgctgaaaccgtatctctataaaaaatacaaaacattggccaggtgcggtggctcacgtctgtaatcccagcaccttgggaagctgaggtgggtggatcacctcaggtcaggagttcaag

SEQ ID NO: 3802 - DNA, 379 bp, Homo sapiens
agttgttatatttcatgccttgtagagaataaaaaccctgatttaggaatgagttagccatatttgcaaggttgttgtgctctgccgttaactacaggtgtatccacttaatcaatctgagcctcaattcctccatctttaaaatgttcacagtaagatcacgaggtcaggagatggagaccatcccggctaacactgtgaaaccccatctctactaaaaatacaaaaaattagccaggcgtggtggcgggcacctgtagtcccagctacccgggaggctgaggcaggagaatggcgtgaacccggtaggcagagtttgcagtgagctgagatcacaccactgcactccagcctaggcgatagagcgagactccgtctc

SEQ ID NO: 3803 - DNA, 607 bp, Homo sapiens
atcattgacttccttgaacaaaaccattcccaacacctaaaagctttatcatgcaatcaattctgttgaaaaaataaacacattgggtctgtttttctggttttcatttgcaaaagtaattagaataagttagaaacctgaaactcaatttttctactcatagattgtgctgcaacaattgcacaaacaaatgtattgtcattctcatgggtgacttcctactgtggagaaagctctccagtggtaaatgtttgtgctaaagatggtgtatccagttatgtgtgtgacaagagcccccactgaaccatgaaaataattactgaacttaaagagaatgaattaaaattatcttgtctgagaaacagaaagcaatagagagtaaagaagaaagaagagattttcagagaccatcgcacttgcaaacatgctcatgagcagagtctcagaaaaagaggacagagagaaagcagaaagaatacttgaagtaatgaccaaaaaacaaacacaaaaactaaaactttccaaacttgatgaaaaatgttaaactactattcaagaaattcaataaattccctatgagataaactcagagaaccacacataaata

SEQ ID NO: 3804 - DNA, 601 bp, Homo sapiens
tagacaaaaagttaaaacgtactgtgacttttaaaggagacctgtttgaaataggccatcctgagttaactcccaaagcttgaaaggttagagaataatactccagataccatctgggcaaattaacaacgctggatgatgcgaaaccaaaactttaatgaagaattccatgaataagtagaatagatgatctcgccctatctaaaattaatttgctttcatttccaaactctgacgctagcagagttcttcctcaaaatgacgaacctgtagagcattctgggcaatagcatgcaaatgagtaagatcgctgtgttccctgcttggattctggcagaccacttcatatggcaagaaatatgctagggtagagcttattccaatcttaatctggttgttttcagattttctgtttgaggacattttgtcattatcctagttttctagtgttcctctttttaatgtctggtagctcaattgtcttttctttcatgcctcttttccagcatttcaggccagtttgatacctttattctctccattttagattctaaagcatccattgagtgtctaaatgtatctggcgttatacaggtgcttt

SEQ ID NO: 3805 - DNA, 422 bp, Homo sapiens
ggaatgtgttaaatattagcaaaagcaggtattgcagaatgtctatacatttctgggcaggtggagattattgaaagatttttagaaataatcttcgttcaccacattccagtgccaggccctggacttctgtctctatttgtgataaaatgtttttaagaaatgctggctgggcacggaggctcatgtctgtaatcccagcacttccagaggctgaggcaggtagatcccttgagcccaggacttcgagaccagcctgagcaacatggcgaagcctcatctctacaaaaaatacaaaagctagccaggcgtggtggcctctgtctgtagtcccagcttcttgagaggctgaggtgggaggatctcttgaacccgggaggcggaggttgcagtgagctgagatcgtgccactgcactccagc

SEQ ID NO: 3806 - DNA, 607 bp, Homo sapiens
ggcacacagtagcatgcagtacatgttgtataagcatatgaaacttgactagtgtccagtggtgatatgacgtcaactcagatgtgtttcaggtgttctgatgcccagctgactagatctagccctttgtccttatggagacactgcagtatctgtctaagggtttttctttgtttaggaatgtgcagtataccttttactgagatatttggtgtagggccagttcctgcactgcttaaatgtcattaattcaaaggtttatcatcaatttaataatcacttttgaggagcaagagggaaacatctcattaaagataaagaaggattataaaatgcattctgggctgggttcagtggctcacgcctgtaatcccaacagtttgggaggctgaggcaggaggatcacttgagcccagcagttcaacatagtgagacctgtctacacacacacacacacacacacacgcacgcacacacaccccatctctgcacacacacacatacaagtttggtgtgttggcatgtgccttactctcagctactccagaggctgaggtgggaggattgcttgagttcgagaggttgaggctgcagggggccatgatca

SEQ ID NO: 3807 - DNA, 631 bp, Homo sapiens
gcacctctcccaagaccagaatggcagtgggtggtggtgctgtgatcccacactctgacccctgacaccctaaggcaaacctcgcacctgccaggctgacccacagccctgtctgcctctctcactcctcccaccactccacccctcttgacagggaggtctcctcaacacagagaggcccgttctgcctccataaatttgtgccagaaaaaactgctgtccaaagacccaaccctccagccttacctggagaagcctcagtgccttccccaccagatcttactcttaccgtctgaggccccggcactgtgcttttgctctgttaaaatagaaaccagggcatactatgtcctgctcagagctccccagaggcttaaaatagaatcccagggtggtgtgaaacccatgagcttaacttcccacctcaaaatctagaaaaagaataaatgaaacccaaagtaacagaaaaacagagtatataaatctatgaaatagaaagtaaacaataaagaaaattaaaaaggcaagcaatgttttgaaaggctaaaaaaaggttaaatttctagctagacagaagaaggagagaaattaaaaattacaaatattaaaaataaaaggagtgccttcactg

SEQ ID NO: 3808 - DNA, 456 bp, Homo sapiens
gggggcacacaggattctcccagaaagcaaaatggaaacttatcttctatttgttaagcctccctctgtgccctaaagactctatttgataatttatggacttttaatttaattatgacagtaatccggtgaggtggattttattatcccactttatagataaggaatcaaacattcagagaataaataatctgcccctagtcatgcagctagtaaattgagccaggatttcagaacaagcctttctgctttgaaagcccatcccttctccattagaacatgctgcctcctgataaaatgcttggcgaattgatacaggagatagcatatgccaccgagggcaggataagcattttctggtagaggagccgtttgctcaaggaccgagaagtgggtggaattggcacgtgtgactggggagaggatttcctggaggcaacaactgtgaaggagtcg

SEQ ID NO: 3809 - DNA, 615 bp, Homo sapiens
ttttccaattcttaatggccagtcctagaacactacaatccattcaaggatatgttaatttactgactgaattatgctgtgccacctccccacatcacttggcctgtatagtccaaactccagtgagtttaacaagcatttagctgcttgttaagatcaagcttctggaactttaattaacgattgacttgttactagttttattttatttgagactctgacttttcatttgagggcaaattatgctcatcatttggcaaaaggtctactctggttatctgatggcagccttttatgtagcacatttttatgacatgtcacattgacatcatgatcacttctctacagctttgcacacttagaccttaggatttatacttttcactgagttctttccactttatataaagtgtatggtaattcagaaaaatatgagatgataagaaaagaaaaaaagtcatgcagtgttctggctaaataaacaaatgaaatgttagcaatgaagtgagcacaagataggaagggaaaaaatgatctcatatggcctgactatgatgaaaactatgtcacctaagagtctgtacagaagacatcattcaaagtcatgtgcaccac

SEQ ID NO: 3810 - DNA, 506 bp, Homo sapiens
agtaattacattagcaggtttagttgtcatgaatgagtttgggaacaatcactgatgactcttggtaagcccctctgtgggaaagtagtatctccctgggtatccaacttgcagggagtgttcaggatctcatgttctgtagaggtcataaggagtgccagctaatctgggctgtcatgtagacacagctcagtggagagttttctggcaaaaggaggagcaaaggccctggggcagagaaaatcttggagagtacggaaaggccatgagactgaagtgtaataaatgaggcaggaggagtgtgtgcgaggacaggacgcaaagagagatggggagaccagaccttatagagtccatgactatgttaaggagtttggattttatactacaaacactgggaagccaatggccagttttaagccaggaagacagataagagaggggcacccctgtatgtaataactacccatcttctttcctggtaaagttgtgtgagactctcaccc

SEQ ID NO: 3811 - DNA, 450 bp, Homo sapiens
aaagacattcatatgaaatacccaattgatacctttctagggtatgaattaaagctattagatgcattcagaaaagacacacacaaacagagatatatttatatttgagaaatacaagtagaagtaactgcagaatactggattattatgtttatgtcaaaatggaatgaggaaattctgtttagggtgatgaaacattttggaaatagtggtggtggttggacaatactgtgaatataatcaatgccactgaattgtatacttaagaatggcaagttactgtatatatattttgccacaataaaagaaaagttttaaaaaatggaaagaacttcaaatatcaggtttattggcagaaggagaccacagtcctagttctggctttgccactaactcgctatgggatttggccaaatcttagtggttgatttctggacctacagatggacc

SEQ ID NO: 3812 - DNA, 486 bp, Homo sapiens
aaagacattcatatgaaatacccaattgatacctttctagggtatgaattaaagctattagatgcattcagaaaagacacacacaaacagagatatatttatatttgagaaatacaagtagaagtaactgcagaatactggattattatgtttatgtcaaaatggaatgaggaaattctgtttagggtgatgaaacattttggaaatagtggtggtggttggacaatactgtgaatataatcaatgccactgaattgtatacttaagaatggcaagttactgtatatatattttgccacaataaaagaaaagttttaaaaaatggaaagaacttcaaatatcaggtttattggcagaaggagaccacagtcctagttctggctttgccactaactcgctatgggatttggccaaatcttagtggttgatttctggacctacagatggaccaaacccttcatttgacttaagcaggtgaagcaaact

SEQ ID NO: 3813 - DNA, 411 bp, Homo sapiens
tagatgaaggcttaaagggaccaattagtgcaccacaaccttcttggaagtccactgtcatgataacttgagattagtgttctgtttcaaatcccaggaactccaaacctggaattttgaaaattaccccaaaaagaaattgaggccagtcctgggagaagtgtcttttactgtctccgtggcagattgcattagagtaatttggcacttattggattctgccagaatggtggggtgtggtcagcataagaagtttctgagttataaggacctgatatgataatgaacccagacacaaccctctgagccacagacccatccaggccctcaattaaggtccttgagatggaactgcaaatgggctttaggtggcttagtctgatgagtaagccatgactgaccccatgcaga

SEQ ID NO: 3814 - DNA, 77 bp, Homo sapiens
ttaagtatttgagtttgaacaaattagctctgaagggaagagaatttccacaacatgaaggggaaacaagaaaattt

SEQ ID NO: 3815 - DNA, 461 bp, Homo sapiens
aggtggagagattgaacttgaactagaggcaaaaagaccttagcttctgagacttagtggaaggtggtgagtatggtggttgaggtatcagcttccgaagttagggaggatgggaaatagaggcctttcagatctgatagcttttgttttcatggagtaattgggggaaagttgtttggtggggattgggagtaaatgagaggttaaagaaagtaatgaagatttagttaggtcactgaagggagcgagaaagggaaatgaaaagattgtttggcattgaggacccagtgaaatgggaggtcatgaatttaaagggctcagtttcagaaaagagaatgtagatcatggaccctaggttggggctttactagcaatgtgtgacaaagagacagggatgcctgtgagggagtgatctaagcggtcagccatgcatctggcagggtaggggcgtcagtgagccg

SEQ ID NO: 3816 - DNA, 447 bp, Homo sapiens
aactaaaattgaatattagaaataaaacatttggctatttcatgacttccctaaaagctcatatattcaagctgtctacgaaatattttgaatcttctcatgggcaaaatggagaactgtttatatacacagtatatgtaatttaagttttctctttgaaagaaactaagttatttgtgactaacacacctcttgaactgctactaacagcgttcctttctttcctatttgtctgtatgattggttcaaaacaatcactgtactagtttcttccagtaaagagttccaaaaataattttcatagagtaaattttaagaaactgtttaacacatatgcagctgctactttcaaattatgttaattacttgaaacagttactttcaactgtcatatgcaggtgttaaaaatagtttcagttaagttctgagttatgcaaattattccat

SEQ ID NO: 3817 - DNA, 571 bp, Homo sapiens
cctggccaacatggtgaaaaacagtctctgctaaaaatacaaaaaattagccgggtgtggtggcgggcacctgtaatcccaggtactcacttgggaggctgaggcaggagaatcacttgaacctggaaggcggaggttgcagtgagccaagatcgtgccactgcactccagcctgggagacagagtgagactctgtctcaaaaataaaagaaaaaagatcaacctgagccagcacaggcttcttgtaccctgagctgtggcttcttccctgcgtggaaacaacaggtgtctgtcgttggcttcaaggtcggcggcgtctgaaccgcctctaaggggcagggttggggacagtggggaatccaggtccggtcgggaacgcccgtgtggatttgcagacgctgtagttttggggatgtggaagaaaaataagtcttaggctgggtgcggtggctcatgcctgtaatctcagcactttgggaggctgaggcaggagaatcgcttgaacccaggaggtgaaggttgcagtgagccgagatcgcgccattgcactccagcctgggtgacagaccga

SEQ ID NO: 3818 - DNA, 522 bp, Homo sapiens
gccaatccctggactttgcaaagggctattttcgaaggaccaccctgtggctggctgtgacaaagccacagtcctgtatgctgtgctcatacaactgagagtcccaccctgggccctgtgggtgatgcaggaagagccctgaccacagaggacatggagaagcaaaggcagctccaagggggactctgaagggaacctccctgtatgatcccctagggctgccatagcaaactaccataatctggggagcttaacacaacagaaatttattttctcacagttccagaggccagaagtacaaaatcaaggtgttggcagggttggcggcttctggaggctctgagggagaatctcttgtgtgcccctctcctggcttctggcaattgccagcaatccttggcattccctggcctgcagctgcattactcgcatctctgtctccatcatcacatggtcttcttccttggatgtgtctctgtgtgtcttttcctgctcttataaggaccctagatactggattca

SEQ ID NO: 3819 - DNA, 538 bp, Homo sapiens
tgcgtattgtttttgtattggaaagatcaaagcagggaataacagaaaacaggccacaaaagaactcacgtgtcatgctacagacgtaccaatctacctgccacttaccgagtgacagccagcatcttctgttggtcaagggtaaaatataatggtttgtggaaccaaaatgcctggctttcagaacttgttctcacacttctcttatatgtgacctcctgttctactcctcaattttctatctgtaaagggaagtgatgtgaaagagcctacctcatgaagctgttgtgaaggctaaatatgtcaatgtttgcaaagctaagaaggctgtggccacattgtaaggacttagtacaagtcagctatcatttttatattactacattggtcagttaattcttcctacaattttattaggtgagtgttattgcctactttacagaagaggaattcatattcagagactttacctgataaagctaatattacatgggaagtaaacggtaccacctaacaaagagctagtagagactgtctt

SEQ ID NO: 3820 - DNA, 529 bp, Homo sapiens
acttaactctgggaggataggtggagttttgtttgtttgttctgagacagggtctggctctgtaacccaggctgcagtgcagtggcataatctcagctcactgcaagctatgcctcctgggctcaggtgatcctcccacgtcagcctcttgcgtagctgggaatacaggcacacgccaccacgcccggctaatttttgtattttttgtaaagagggcattttgccatgttgcccaggctggcctcgaactcctgggctcaagtgatctgcctgccttgagctccaaagtgctgggattacaggcacgagccactgtgcccagccttatagttttgaaagtactaacacacactgttcctcaatgaacctgcagctgagatggggcaagtcctccttatcagctgaatctgtggaagcagatggctgcaggaggctggcgctcttccaggagctgaggatgctccttcatgtcctgcaggaggacatgaagcctctggtgggggaaaaaaaaaaaaaaaaaaaaaaattt

SEQ ID NO: 3821 - DNA, 593 bp, Homo sapiens
gcaagtatgaatgacttcagggtttaaaaaaaatgtcttccagtttcagccactaccatgataagcacagttgagactgcagcagtaaattccaaatatgtgtttctaatttgacgtgaaagatactaaaaatttatatttgtatatttaaatcctggctcatcctgtgacatagatttactgaataggaacaaaggcccaattttaaacaaaaacctaggccgggtgtggtggctcacacctgtaatcccaacactttgggaggccaaggcaggcaaatcacctgaggttgggagtttgagaccagcctgaccaacatggagaaaccccatctctactaaaaatagaaaattagccaggtgtggtggtagatacgtgtaatcctcagcctcccaagtagctaggattacaggcgcgcaccaccacgctcagcctgatttctaggctgaaaaggctgggactcaggtactttccccagttgggactgaactttctcatcagagaatgggcctcagaagcaatgttcccaaacttgtggttgggtcatcgtggaaaaaaaaaaaaaaaaaaaaaaaaaaaagggggcccttttt

SEQ ID NO: 3822 - DNA, 605 bp, Homo sapiens
ctgagattacaggcatgagcaactgtgcccggccgctatatggaatttaacaagaatgtggttcttcttgtggccctaggaatttagaaatctgtcatgcagcagggccctgaatcttccacccataggtacctttcatttccttaactttagagttcatcttagtcagtaaaggggcatctatttttgtctctcagatcacagttgaaaatactttcttctggggaatgagatggaattgggcaagggattacaggagtactataattttaaaattgttattacagtacttcactaagagttctctttctctcagacacacatccctacatccttctgaattaagactttgactatacaagtgtgtctatacaagagagaaaaccaagaatgcaaactaatttctatttttactgtaattgagtttatggacttcattgacttgtctgatgagagagttaattccaacacgttgtaagctctctgaaacagagcttgttgggttaaggttggaataggattggggttagggatgttggggtgcttccagtggaagatcacaagccagagtgcctgaagtgggaagcagaagcatataaccagac

SEQ ID NO: 3823 - DNA, 529 bp, Homo sapiens
gctcaatggggaagaatttattgtcataaggatgtaggagtttcaatattttggcgagaccacatggaggtagaaaatctgagctaacataatgtgctaacagtgtttgaagattgtgtgataatggcacatcctgagaactatttcagcttctgatagtagttgatgtagtttggatgagtgtccctgagcaaatctcatgttgaaatgtaatcctcagtgttggaggtggggcctggtgagaggggattggatcatgggggtggatttctcatgaatggtttaccaccatcccttgtggtactgtcctcataactgtgagtgagatctggtcattttaaagtgtgtagcagacatgcacagtggctcacacctgtaatcccagcactttggggggcagaggcgggcaggtcacttgagaccagcagttcgagaccagtcagggcaatatagtgaaacccaggctctacaaaaaatatgaaaattagccagcgtggtggtgcccacttgtagtcccagctacttggga

SEQ ID NO: 3824 - DNA, 596 bp, Homo sapiens
atttcctaccataagtcactcaactgtatctttatacctactggtggtcacatacattgttattagaattactctatacttttgtttcttatattgcatgcctagcacacataggatactgtttataatcttatttctaaaggatggtcaacataccacccttaaaataaagattgatgaattctatgtccaaattcttaaggcagaaggtatttatttaaaatatatcaaacaggagctcaaagtcttgcaatcagcctgccaacatggcaatcaaaaaatatgttttggcactgacaataattcaaaacacaatttacagtttggagacacagggaacacacggcaccctcaggaaacttatactcaataggataagaagtagatttttcggccaggtgcagtgggtcaggcctgtaatcccagcactttgggaggccaaggtgggcagatcatgaggtcaggagtttgagaccatcctgactaatatggtgaaaccctgtctctactaacaatataaaaattagctgggtgtggtggcggctgcctgtaatcctggctacttgggaggctgaggcaggagaatggcttgaacc

SEQ ID NO: 3825 - DNA, 509 bp, Homo sapiens
ggaaagcaggcagagcctgggagcagatcaatccaaaattaaagccatgcagatggcctgggcctataaattccgaaaataatcatctcacatctggtcacaagttactctgtatgctataattctctcctgttaccctatacctttaataaagctatgttaaatgctataacttaccctgggcaacatagggaaacccagtctttgcaaaaaaatgaaagaaaaaaaaatagcctggcatgatggagtgcacctgtagttgcagctactagggaggctgaggcaggagggtggcttgagcccaggaggaagaggctacagtgagctatgatcactccactgcccctcagcctgggtgacagagctagactgcgtctcaaaaaacaccaaaattatagctttatcttagaaatcgttgaggaactatgagaagggtctgtgtccaaacttggactacagtgataaacgggacagtagcccctttgtttgtgtgtgtgtgtgtgtgtgtg

SEQ ID NO: 3826 - DNA, 611 bp, Homo sapiens
aacgtgtcatactctaggacccagctagtaccaaggccagcagaaatttgggtgtagtcctggctaaccccaaagcccatgatacttctcttattcttgcctcccactgcctctggaaggcagaatgcagtgtgtgaatgactcctgaaacccactcttctcactcaatattgggaacctaatttgttattctatcaggactatgcaaggaggtaaggcttcaaagaatcagtccaaaaacaaatttccaacatctcctatacatatgcagataattgaagactagaaggtaggcagtttgttgcacatctataaataacgttgaccctggtcaaccattttccacagacaactcttttggtgctgacttcaagtagtggttttgtgtagtcccatgttggtttctggatagttcaagatgagatggacaattttacagttaaggaggtaggggcagcggggggtggatatcactgtcttcctccttcctcagggcttgtcagaccagttggaaggggatgaacttgtcagttgctggaagcaattttcaggccctgtggactgtggaaagggttttaatcaatctggtatttcctagtcctgactctcct

SEQ ID NO: 3827 - DNA, 429 bp, Homo sapiens
tggttgcaatagtcaacctgagctcaaagcaaagaaccattctgcacatatgcacaatcagctcagtatcccacttgctcctgacttgcatgtaggcaaccagggccttttgagatgggccttcgctctgttggccaggctggagtgcagtggtgtgattaaagctcactgcagcctcgaactcctgagctcaagctaggactgtaggtgcacaccactgcacctgggtagccagggcccccttggttcttatatactttccacctcacttacctcctcttggggagcctgaccttaaaaaaagaaagataactgattcccccagttttgagtacagcagtggtggtggtagacagtaaaatacaaacaagtattacttgttatgctgacctaattattattttttcaagaccttgggattatattctt

SEQ ID NO: 3828 - DNA, 534 bp, Homo sapiens
taatagataatttgtgagttatttgagtctataatagctctaagattggagattacgtatgctactcagagaaagaaaagaagatggggaaacaagaaacctgaaagatgttcaattcaattaaatgtcaagtattaaaattttagcctgaaggaatgaaaatttcaggttatagacaatgatggagacctccaggtagcccaggaaaatgactgttattgaatttggatctctccacacatcctccagaaacctatacagaccaataagaaacataaatgcaacccacataacccccaatgttaaccaaaccagaagaagaataattccccaacttcaaattacttgttagtagaaaaatataggctgaatttcagcagaacattcaacttaagctctagccacaagtctttgagtagagggagcaatatcccaattgccccaccccatcttgtcaaagtacgtaaaagaggaagaactgaagggccaatattaaacctgcacataatgaaacgatctgttaaactcttgagt

SEQ ID NO: 3829 - DNA, 587 bp, Homo sapiens
aatataaaactacagaaccaaacagaatcccaaaaaatgaggtaagcaggtgagattagataataaaaattagttaacagtagattatatactactttaaatatcaagtaactccagaaacactatacattttacattacctcacatgtgatacacacaagcctatatgttcccattttacaaatgataaatttgagatgaggatgtcagatgatttttctaaaatcttgtagctaataaatggcggagccaaaaattagaagccacatcctaactcaggtttctaatctcacattctttccatcatactatattgattgccatcatccctcccaactccaaaacatccattatgtccatggtataattaaatgttactctgtgagagttttcatggggcaggggaaagaggaggggttggagatattaatacatcctatagtgttcaaataattttaaaagatgtggaacttgaagaatgggtagaatatggacaggcaaaaagatgacaaatattctaacaggccaaaatagcatcaataaaggtattaagtgggcaggtgcaatatatatgccaacttttaagg

SEQ ID NO: 3830 - DNA, 603 bp, Homo sapiens
caaaatggcaaggttatgaattcccctaacaattgcctacaaattctcatgttcagcaaccccaaatctcagatttttctagactctcaatgctttcagttattctgggaaaacaaaatccacccaaatgcaaactataatatccaagccttacagcctcttacaactgctactctagctacctcatacttgttcttcaggtcagaaggccaaaacacacttcgtttcttcactctaagtttaatatcttgccttaaatctgaggaagcattcttcctccataaacaaatgcatgtatttgtcttccagccaactgaactagaacttgtacactagtttacttagccctagacatccaaattgctccttccaatcaattccttccaatcccactttatagttctagcagagaaaactgagcaatccatctgattgccctgttcattggcctagggattgccattgggttaagcatgggaataataggtatgagcctcacagcccatacttattataccctctcaatggaacaccccaccaagctcaaacatatctcggacacccaggaagtcctccaaaatcaggccaacttcatagcacaaa

SEQ ID NO: 3831 - DNA, 528 bp, Homo sapiens
gaccagcctggccaacatggtgaaaccccttctctactaaaaatacaaaaactagccaggcatggtgatggtcacctgtaatcccagctactcgggagcctgaggcaggagaatggcttaaacccaggaggcggaggttgcagtgagccgagatcacgccattgcactccagcctgggcaagaagagagaaacttcatctcaaaaaataaaaaattaacaaaattaaagtttctgaatatttgctgctaataactaaaatttaaatcttccaaagttcaatttaaagccttttagtgagaaaatggcttacttatcatgagcctggagaatgtaattatttacaacacagactttaaaggcaaacctaggttcaaatcccaactgtgctactgttcactgtgtgatccagggcaagagaaaaattttctgtcttcaccgtagctcagtctgtttcctcagctgtgagatagaaataacttggagaggtttctttaaggattacacgaataggccagtggatcgcttga

SEQ ID NO: 3832 - DNA, 469 bp, Homo sapiens
aaaaacagtttttcagaaattatcttttgaaattgaaatatattaaaggtgtattatgagagaaaaatatcgatattaaaataatatgtaagataaaatataaatcacataatatatttgtttttatataataaatgtatctacaagagtatcaataacttgtcgtctctggctgagtgggattatatttattacttaaattcattgtttcttttgtttcaaaatatttagtgattattttctctaatgatatatacaattagcataatcataacaaacattatagcttatgcaacttaaaatgtaatctcaaaacaattctatgatatatttttattaaatggtttactcatggtccaaaattggaccaggtacaattactttgttaggcgtatggtccatgactctccatctttttcctccaccagggttgattcataactgtcatgcataccacatgtttctactt

SEQ ID NO: 3833 - DNA, 584 bp, Homo sapiens
cagagagtgtttttcctaggcaagcgtttctatactgtcgtgatgagcaaactttctcatctttgttacactctaaaacagtggaaattagccttggggtgctttgtgaggaaggctgagtccccaaggaagtgatagtaaatctaaatggggtttttaaaaccacaggcagtgtgatattctgcaaaagcgtaatttgtcactaaaaaggcagtctgaaggtatcatttttcattcacgcagcagcaaaatccttgcatcctgcatatgtaataaaggacaccttctgagacactgaggaaaaatagaagccgagctggcctctttgttctagacaatgtaaagaaactcgctcttgcgttttgacaaggagcgtatgtctatttatatatatgtattctatatgtgtacaaaaatctcaatctgaatgtaattaaacatggaaatgtgaaagtgtttaacagacttgcagggaaattttaattatacttgggaacagccaattgtaagagacaactgggaaaggaaaaaaaatgtttcagctgagttctggggcataggtaaaacttttgcaaagaaagtca

SEQ ID NO: 3834 - DNA, 494 bp, Homo sapiens
ggtactaaatcctagggggagggggacaggccctgaaaccagtttacactggatgtgtatgcaaatcattacaacaagcagtcagggggttggcttcagctcacagagcagaagacatttaggactggcaaacaatctcactgccaggcagtttgaggccaggaagatgacaaactctaccatacgctgtgtattccagggcaggtcacttaatctctttgaaccccaacctccatacgtgcaaaacagagcaaatcatctgccctgacaaccacacagtagggagagatgtctgatgaaacaacagatgtggaagcaatttgtagactttaaagctctattgttagcatttcttgttacttttataactatctcccagccttagtctttcaccagcaaacgtgtgtcaaagtacagcatttaagaggaaacccagaagcagagatgtcccaacaaactcacaccaaacaccttctgagaaagtccaggaagct

SEQ ID NO: 3835 - DNA, 440 bp, Homo sapiens
tctctcaaacagaaagcgtgtgggatttgacctttgataaaagaaaaactttaggagatctccggcagtcaatatttcagctgttagaattttgggaaggagacatggttcttagtgttgcaaagcttgtaccagcaggacttcacatttaccagtcacttggcggggatgaactgacactgtgtgaaactgaaattgctgatggggaagacatctttgtgtggaatggggtggaggttggtggagtccacattcaaactggtattgactgcgaacctctacttttaaatgttcttcatctagacacaagcagtgatggagaaaagtgttgtcaggtgatagaatctccacatgcctttccagctaatgcagaagtgggcactgtcctcacagccttagcaatcccagcaggtgtcatcttcatcaacagtgctggatgt

SEQ ID NO: 3836 - DNA, 607 bp, Homo sapiens
acggacgtcaattagattaccatggcacaatacggccggaggtagggcacaggaagttaaaggtatttatcctggcaccagctgcgataatggttatgactaactcagtcagtaactttgaaagtctgtgataaccagcattgaagccaactgtgtttataacatgatggaaagtgtgtttgtgctaaaagcatatctgtgaggtgtgctaagaggtcatcctcaacagttttgggcttcttcctttaaaatatgtgattaacttgcttctggaattgaaaaagtaattctgcagtaagttattttgaagtgaggggtagttttgaagtgaggggtagtttaacactcattaggtgtttattactaataaagtataagctttgtttcaattcttggactaggccaggcgcggtggctcatgcctgtaatcccagcactttgagaggccgaggcaggtggatcacctgaggtcaggagtttgagaccagcccggccaatgtggtgaaaccttatctctgttaaaaatataaaaattagctgggcatggtggcaggtacctgtaatcacagctacttgggaggctgaggtaggagaattatttgaaccc

SEQ ID NO: 3837 - DNA, 547 bp, Homo sapiens
ggagctggagacccagggagtagctggtgctgctgttctagttcgaggtttgtggagctggagccttggttgggagccagtgccacctcccaagtctgagagtcattgagctggagatccacgggggagctggtgctgctgttgtagtttgaggatcatggagctggagacccaggtggagctggtgctgcagttggagtttgagggtcagggagctggagatctggggaggagccagtgctgctgtttaagtctgagggtcggggagctaaacatggagccaaagttggggaagtagagagagttacaggatgaccctggaaacggtgatgtagctgtagtccaagcaagctaagcttgggaacttctcaatgctagtgatgagtgcattctttttcctcttatacagtttggatttcttttctgtctcataagacagaaagttcctgattaatacccttaggaattgaaaaccttaaaaaaactaaaggatgttggtaataataataataggaattaaaccatgattatcctggctgacagagac

SEQ ID NO: 3838 - DNA, 476 bp, Homo sapiens
cacctaaactctgaggtttctccagggcaaggactatacatgatttatctttgtgttctcagtgcttagattcaagaatgccccacacaccaaaagcattttgtaaattctctttgcagttactattattattaaaagcttttgtcaaatcccttttctattgaacttccaacaataaaagcaataattttctttttcttaagaacatcgatgaatgctagaattgaaggtagtagctactgtagacaactcagttacccacattcataaggatagtttgttaatacaaaaagctggaaatttttttttttagatggagtctcgttctgtcgcctaggctggagtgcagtggcacaatctggactcactgcaacctctgcctcccaggttcaatcgattcttgtgcctcagccttccaagtagctgggactacaggtgtgcaccaccacgcctggctaatttttgtatttttagta

SEQ ID NO: 3839 - DNA, 502 bp, Homo sapiens
atgttaatattttgaaaccacacagattggataacaataaaggtaaaaaaaaactctttttttcagattgctaattgtagcagacacaaaagaaataactctgagatatagtatataatacgtgaatgacttttatattagaatctatagcatcaaagtgctataaaagtaaatactgaatagagatacaacatttgcgactggcactgttgcagggctatctgaatgccatttctaaccctcttcttctttgcttccctcacaccatagaatttgctcttagcggccgggtgcggtggctcacacctgtaatcccagcacttagggaggccgaggcgggtggatcacgaggtcaggagatcgagaccatctggctaacacggtgaaaccccatctctactaaaaattacaaaaaattagccgcgcgtggtggtgggcgcccgtagtctcagctactcaggaggctgaggcaggagaatggcgtgaacccgggaggcggagc

SEQ ID NO: 3840 - DNA, 506 bp, Homo sapiens
tgtccttgaatgacgtcctctttcctgttttatccccaagcccctgtatgtgagatctgccatccttcccctcaagagaatattctcccctaccctttgggtaggagtcctttcatgaggaaggtgggattttctgactaagctctacctaaggcattatcctttggcctaagggaactgaagtttccagcagaagccacagagctttaagataggaccttgggctgggcgcggtggctcacgcctgtaatcccagcactttgggaggccgagaggcaggtggatcacaaggtcaggagatagagaccatcctggctaacatggtgaaaccccatctctattaaaaaataaaaaaaattagccaggtgtggtggcaggtgcctgtagtcccagctactcgggaggctaaggcaggagaatggcgtgaacctgggaggcagagcttgcagtgagctgagatcgcaccactgcactctggtctgggcgacagagtgagactccgtctc

SEQ ID NO: 3841 - DNA, 561 bp, Homo sapiens
aaccgaggcagtgagtagtgagtgcccaagcacgagaggaggggacaaaggctgggtccccggccatcaacaaacggagagctagctcataaaacagtgacctggagcttcagtcagcagccctcactcccaaaaggggtgaggagtcttcagaaactcccctgtcttatggcagaaagctgagctctgcacagaccctggaaaaaccactgttgtcaaaggagagatggaagtgggcagaaagcccaggaaggagggttccagactagtggaggtactagcctcaaacaagacagctgagtacttagagaagaagagatacatgccaggcatggtagctcatgcctataatcccagcactttgggaggccaaggtggaaggatcacgtgaggtcaagagtttgagaccagcctggccaacatggtgaaaccctgtctccactaaaaatacaaaaattaaccgggcgtggtggcgggagcctgtaatcccagctactcgggaggctgaggcatgagaatcacttgaacccagtgggtgaaggctgcagtgagctgagatcg

SEQ ID NO: 3842 - DNA, 533 bp, Homo sapiens
tattctttttagcaatgagcattagttctgtttttcttaacagtgaggcaaactatgtatatttacattttgtagaatatttcctccaaaattggtttctgcatactttttgttttttgctatcactgtttgggcttagagtagtatccttgaggctcgtctcatcttttttatttgttttgtttttttgtttgtttggttttgttctttgagactgctgcagtacaatggagcgatcccggctcactgcaacctctgcctcgtaggttccagggattctcctgcctcagcctctggagcagctgggattacaggcacatgccaccatgcctggctaatttttgtgtttttagtaaagaccatgttggtcaggctggtctcaaactcctgacctcaggtgttccacctgcctcggcctcccaaagtgctgggattacaggcatgagccactgcgcccggccaaggcttcccttatctaagaatagaatctttaaaccattctgtggttatatcatttttagttaaagttttta

SEQ ID NO: 3843 - DNA, 440 bp, Homo sapiens
taaagcacaaaagcaggcaataataatctatggtgatatcaatcaaggataatggttaaccaaacatggtatgttttcacatgtgcatatgtacaaaaacatattccttcacatgcttgtgaaggaatgactgaaagggggttttggggtgatgtcagtgatgtattttctgatacgggtggtggttacacaagtgtgttaagtttgtaaaaattcattgagtggtaggtttataatttgtgcacttttctgtatgaatgttatacttcaaaaattagctgggcgtggtggcgggcacctgtaatcccagctacttgggaggctgaagcaggacaatcgcttgaacctggaaggtggaggttgcagttagccaagatcgtgccattgcactccaggctgggcgacagagtgagactctgtctcaaaaaaaaaaaaaaaaa

SEQ ID NO: 3844 - DNA, 543 bp, Homo sapiens
aaaagtttaaaaggtgtaataatcactggtcttttgcccttgtttacttaagaatctgtctgctgaaaattttcctgttgcccttattatatttgctttgcagcagtgacgaataatctatcttattctgtggataaaatctccacacttcacggagattttttttattgttggaatttagttggatctcatattaaataatgcataaacattgcgttatccaatcttatctctttttctttggtcctgcttgctaactaaattctccccctttaaaaaacattctttatatgcttgatatctctcctcctctttgctactttttccttcagtaccataaacataattgttgcaccatggtgctcttgctagaaataggctggaattcctgtaagctccacttgatcaagacagctcccctgttgattttgtggtatggcaggtgtgacttttccctgcccaagtgacaccaccaaatactgttaacttaagtggacctgttttggccatgaggagatgggttatctttctgaattagctaag

SEQ ID NO: 3845 - DNA, 493 bp, Homo sapiens
cttttttctctctaagcaatactttttgagaaaggtttaaacatttattgttattcttaattagggttaaacaaagagatttgttaaaaaacaattttctatcccatttaacaaaggaccattaaaaatggtattgttacactactttaagatctggatactatgacatgtattagtaatcatgaaatgcctttaggctgagtttagaaagtattttctccaactgcaccccaatctgttaatcttttcttcatcaaatgccagcttttgttatcaggtaagcctacattagtattgcctttcaatagccaccattgagacttgggtaaatgtgttgattttcttatcttctccattgatgcttctgcctactgcctaaagcctaggaggagtagaagagaagggagtgtggatatttacagcatagctttcgttcaagttttttaaaactgaaatctttattgttactcaaggatggaaagaaatctgactc

SEQ ID NO: 3846 - DNA, 603 bp, Homo sapiens
gatttatcatggcttttctgcaggaatgacacatcatgggatcagtagttgataagggaaaaatcttctttaggagaagaattctacccaataaataagtaaaatgatagaattagaatatcaccatttagcaacctgtaatgaaagtatagatctgagcagttaccatcaatacctgctaaaaaccagcaggtgaaaagttgatgaggaactgcctgataaatcttaatgtcatgaaaaatagaatcacaagttctgtgccttctctgggataccatagaatgtctacaccaccacctatgaagcagtcttgcaaaataaataaataaatgtcatatctcaccaagtctcctctagatctatgaccattttacaggtaatggagagggtggcggaacatattaaaccacatcaaggaggaaaaccaaaactgtacaaccgttttcttaacaaataaaacaaggggagaaattcaaaaacattctatatatttgataattctgagaagtagtctccatttctttaaatgtgatcactgtattgtgcttatgcttaaaaaagatttctactgaagtttttactgataaaatcatacaatatcta

SEQ ID NO: 3847 - DNA, 576 bp, Homo sapiens
gtatgtctttattaacagtgtgacaatggactaatatagataccctccagtttctacctattacatatatggcaatcaagtagcttattctgctctcctctgtctccctctgttcttctatatttttattactttagttctgttatttctacttttggacatagaacatttacatattatcctcacgcctttgtctctgccttcattttagtctcttcaattaaataaaggacatgttcaccacagttacctgctgtattttctccagttatctcttggtttaatgaggcttgttatctagtgttaacagattcctaataagggccaggcacagtggctcatgcctgtaatcccagcactttgggaagccgaggtgggcggatcacttgaggtcagaagctcaagaccagcctggctaacatggtgaaaccccatctctactaaaaagaaatacaaaattagctgggtgtggtgccgtgcacctgtagtcccagctactcaggagactgaggcaggagaatctcttgaacccacgaggtggaggttgcagtgaactgagatcatgccattgcactc

SEQ ID NO: 3848 - DNA, 407 bp, Homo sapiens
tgggggcagcaacaagggccaacagccctggtgctggtcagagatccagaagactgtcaccttcactaactggtatgtggtgatgttggaacctcaaagcactcaatgtctccttttcttccagaaagggccaaaatgacctccaaatgacagatttcctatcaagggcatattcctggtccctaatataagaaatcaagagttatttcaattattcaccccccaccttccctgaagattcgagatgtcactaaggaaagtctaagatgtgtagtttttgctgcaacttagtggaaacattgttctgttactcacttaaattattcaagcaaattagtgtaaagcctggcacatagtgtgtgttcaaccaatcctacctcaattcccctttttctgctctgatacac

SEQ ID NO: 3849 - DNA, 473 bp, Homo sapiens
tgctgactctgatgggcttctcatgccaggatgctggtgtagggacccccagcccccatctggtggggggctgtctttgggtcacagcaaatagtttgtttgttccttccttccctcccccaggacggtggttctcaaacttttctacaatttggtctcacctggaggtgcttttaaaaattctgatgccggctgggcgcagtggctcacacctgtaatcccagcattttgggaggccgaggtgggtggatcacctgaggtcagaagttcgagaccagcctgaccaatataatgaaaccctgtctctactaaaaatacaaaaactagccaggcgtggtggtggctccctgtaatcctagctactcaggaggctgaggcaggagaatcgcttgaacccgggagatggaagttgcagtgagccgagatcgcaccattgcactctagcctgggtaacaagagtgaaactccgtctc

SEQ ID NO: 3850 - DNA, 589 bp, Homo sapiens
cgtgcctccctgttccttgtcctctcctcacatgacactctgcagtgaatagatgtccctcacttttccatcccctacggttcgctccaagtggttcaaggacatgtcctcttcccacatgacactctgctgtgaacagatatccctcgcttttccatcccctccagttctctccaagtggttcaaggatatgcactgggttttttacttgataccacttgcacataatagactctcaacaaatgtatcagataaataagcaaatttcaagaattgtctaagttgttttgttgacgtcagtatcatttgacattataagagttgtcaggtggagctcactcatgctctgaacattaacaaaattattattattttgttattatcatagagaaaactataggtacagaaaacagatccagggtcttgctatgttgcccaggctggattcaaattcctgggctcaagcgatcctcctgtctccacctcccaagttgttgggactacagacacatgtcaccatgcccagctaacgaaattattaaaataaaactgtttgcctttggaattcggtagagcaacacaagcatgc

SEQ ID NO: 3851 - DNA, 506 bp, Homo sapiens
gtgcttgatgaatatgtagttctgaagttggggccttgtattttcaggatttctggaacatatttgacctgacattctcatctgacatcagaacatctgaagtcttgcttcttcatctgatatcagaaccaaatccacttgctttccatctcactcaaaatggcataatattgaaactccacctaagatagagctaatgactagggagcatctagtttatttgggaggtgatagcatgaggagagtgaggtagggaggaggagaagccaataagggcgatgttaagaagtgaggtgccactgtgtgcaagtggggctcaattccattgggacctcctaagtgtcatcaaaaataacttctacaagatagagtgcagaaggatggttaccagaggctgggaaggtagtgggtggggtgggggcaagtgggatgactaatgggtacaaaaaatagaaagaatgaataaaagctagtgtttgatagcacaatagggtgactatcataat

SEQ ID NO: 3852 - DNA, 457 bp, Homo sapiens
catgttgttctttgaagtaggggaaattgacttgattttaattatagaatagcatttagctttatatgatttttctcatacacaaacacataaagaataagtgatcagtttcctttgtaagaacatacaaagtcagtcattcaggaagtttgtgatcttcccctggatgcaagccactggcagtcccaggatcccagtatatccaacacgaaggtcctgtcagagttccagtgttctcccgcacgacctcccacctcctacctcccagtacctcaacaggaaaggacacatctgtgaatcctctggcatgacttcaattccttacagctgtaaaatccactgcatggaaggaaaagaacatttcctagactgggaatccccagacactttcccaaactgaacaagtgaacagggttttcgctctggtgaatgataccccgtcaaggagagtgcagag

SEQ ID NO: 3853 - DNA, 628 bp, Homo sapiens
ggaacacagtggaaaagtttgagcaggggaatcacaagattagatttgagtatcagggcattctggtcatggtataaagcagagattggcaaacttttcctgtaaagtgccagatagcgaatatgatgggccatgtggtctctattacagctattcaactctgccattgtagggtgacaggagtcatagataatggatgggcaaagaggcatgattgttccaataaaagtttgtataaaaaaccatttagaaagctgaatttggcctgtggcctatagtttctggcccttcatatagaagatagatggaggataatcacataaaaagatttaaagatgaagtttttgtagtagttcatgcgatggtctttttttttgtaacaaatctgtggcctagtatcaatctattatgaaagtttgatccatcaagggtaaaatgaatcaagttcagtagctcaatttacacatttaaacatgtaggtccttctttggcattattttattttgattaatttttttaacttaaaaaataagaacagtaatttgtagggtttcttttttccctgtgaaagccatcagttaaggggccacgtttaactagtaaaaaaaaaaaaaaaaaaaaaaaaaaa

SEQ ID NO: 3854 - DNA, 504 bp, Homo sapiens
aggctacctctatttctgtcacttaacttcttgtctcaagcaatatggctactgatttttttctcctttagtccagactatcgtttaaaaaaatctcagtattctatgttgtggagatacgtttttactgactgtattagtgctgggtaatttctattttttagtagcaacaataacaacaacaaagaacaaaaaaaaacctgaaaaaaaaagcctttctactttttaggccacattaatctccagttgcctctggtaaatatttaactggttaaattgtcatagaaaagtgttattattttaatattagaatgagagaacatttagtattctcaaccttcagtatagagaggcagaatgctgccttaaacaagctttatttcggattgtccatgttacaaatgataccagtatatatgtaaaggctcaattaatttttgctaaataaatgcatgaatgaatatattttgaaaaccatctgtgattaatatttaaagaaactga

SEQ ID NO: 3855 - DNA, 577 bp, Homo sapiens
tagtattccatggtctactaaaattttaatgaatcattataaaagatgagtggtcctgatgtttcaccaactcttcaacctgtaaaaggaccgcaagagattcgctcaatttatactagctttgatatttttttaaaactgattattttttttagggtggttcacatctgtaatcccagaacagggaggccaagataggaggattgcttgagtccaggagctcaagatcatcctgggcaacataatgagactctgtctctacaaagaaaatcaaaaaagtggccaggcacgatggctcatgcctgtaatcccagcacttttggaggctgaggccggcagatcacgaggtcaggagttcgagaccagcctggccaatatggcataaccccgtctccactaaaaatacaaaaattagctgggcatggtggtgcatgcctgtagtcccacctactcaaggggctgaggcagaagaatcgcttgaatcgggaggtggaggttgaaatgagccgagatcacaccactgcattccagcctgggctacagaacaagacctgtctcaaaaaaaaaaaaaaaaaaa

SEQ ID NO: 3856 - DNA, 480 bp, Homo sapiens
gtaccagctgaacgtcttacttctccttgtccaggatgagctgtggccgggaagactgattgggaaagtcacgtgggtgttcttcaaccttagggttgccacttgaaatgacatagagtaccttgcctcaaaatgccactcaagtgagtcagatatatggcagtgattatagatttttatcccactttatgtgagtgtgtgtgtgtgtatagcatcaagtatagccacaaggtagtagccttagtcactaaattgtttgctattgctggctgtattcatcacgggagtccatgttgactcagatatgtaggacagcaagaattcccacgtcttcttcagctcaccttacagagctaagagatatggcagccttaatgaaaggggggagcctttactcacataaaccctgtgaattctactgtaaattttcctacattcaaatgggatgtattttggatgttgaggattgttgagggggcg

SEQ ID NO: 3857 - DNA, 364 bp, Homo sapiens
aaatgtgatacagtttaacaaaacccattgttctgtaactatacatagattttcaaaatgtcataaaaagtgcagttatgaattgttaacatgtcaatacacagttcctttattccagcactttgggaggccgaggcaggcagatcacctgaggtcaggagttcgagaccagcctggccaacatggtaaaaccccgtctctactaaaaatacaaaaattagccaagcacggtggtacacacctgtaagctcagccacttggggggctgagacaggagaattgcttgaacccaggagacaggttgcagtaagccgagatggtgccactgcactctagcctgggcaacagagtgagactccgtctc

SEQ ID NO: 3858 - DNA, 459 bp, Homo sapiens
tgataatttacttaatagccctaaagaaaaaaatctcaagggaaagttggggtcacatgaatggttattcgatgaccagtaaattcaattgtgctggatggtcaagccttggtcagcaccctttgggtagaaatggaaaaatctcttgcacacaactgcctgaaaaatctcaattttggtgtcattcgtttatatattcagttatccaaaaatacttcctaagcactttctaaattctagcattgtgctactagggaatgaccatcgcagacatgaaagaaatggccctgccctctctgaaggaaggtagctgagctgtgcctattatttgaaagaagcgaacaaatggcctagaaaacctgaggagactggatccaataggtaaacaatattgatacgaattctaagggcaattacaaaaatttaatgacattatatttctatattaaatataacgtg

SEQ ID NO: 3859 - DNA, 495 bp, Homo sapiens
gatgggaaaactaaatcggatgtagaagctagacaatctagtaaagctcacaggcttcagttgtgcattcagcagctgtattgcagaggcttcccaccattcctgtgtcatgagcctggaaataactaactaacttagaaacaaaagcctactcagagaacatggctgcctctgaaagtcattgctattgtactgcacatttcttaggtgcaatatccagagcattgtaaattttccattgtgctttagatattagtctacctgtggatgaagaaaagctcaggtaaatatcatggaagattacaactttgcacattgatattgaggatgctttgccagatataaaaatgttacggatacagcttagcaaataacaaaaaatatataaggactttaagtttgaatatatttatacttaaaatatatttccaagagggaatgaactcccaagagggacaaattagtattagaaaataagtaaactctttgaaaaat

SEQ ID NO: 3860 - DNA, 502 bp, Homo sapiens
ttttccattttgtaagaagatgttaatcaaatgggaaaatttatttaacattaaggggggagcaggttgtaaaacagcgtgtacatggttatcctaattttgtttaaacattagtagggaataaaggctcaaaggataaacaaaatgttaacattgtttatcaccttcaaagtaaagggactgtgggtgacatttttctatcaggtgttttatcttcctgctttcctttctccattccccatcagaacaaactggcaatgtattttaaactatattcacaaaatctcattcctatttgacatttcgaatacagacagtccctgacttaggatgggtcaacttgattttctgactttacgatggtacccatacaaccattgtttttcatttccactacagtattcaagaaattatatgagatattcaacactttattgtgaagtaagcttttgtgttagataattttgcccaactatatactaatgtaagtgttctgagcatg

SEQ ID NO: 3861 - DNA, 600 bp, Homo sapiens
agtatcagcctcgtgtggcatttcagaagtcagttagattcagaagcttgtcttcatggggacggtgggtggcacaaccccatgtgggaagtcagagcttgagcagggagtagagtgtccacatgtggaggtgaactgttggggttttggagcccaactagggtgagtagaacatcaacacagtaggcaatccaccttgggaaatcagagcccaagtgtggtgaaaaggggacttgtcagggacgcatagcatggtgtgaggtatcagaatccaaacaagatgaagagcttgggggtggggagtcagactctgagggaggttaagagggtgtccacgcaagagggtggcccatacagcatgtcagagccttatcagtctaggtgtgtgaacttccaggcagaggttgatcatgtgccggttgcctgagtctgcatggagtgaggagcacagccgcacagggaaggaggtgacagcagagatggcagagattacgtgtgtggcagggtgtgggggtgcagggagaaagttaaaaaacacaggtgaaactgtgtgtataggggtgtgtgtgtgtgtgtgtgtgtgtgtgtgttccatacaca

SEQ ID NO: 3862 - DNA, 465 bp, Homo sapiens
agttggctttttttgctcgcagcttttggatcccctttctctttgtggagtctctgtgggcggactctatagtacctctgcagtgaaattctgcctccctcccgtccatgcagaaggtgcatgtgcagtatggtccccagcaggtaggaatagcgggaagtagtgcattaaagccaatggatacaggtagatgtgggcatggtggtttaaaaacatgtcgataaattctttaattattctttcttcaagaggtggagcttagcttcaatcttccctcctctgccccaagtgtgggctagacttggtgacttgtttataaagactagaataagggaggagtgataatactgatgtaaaacttcagggcctaggtcatgaaaggcattgtggtggatcacctgaggtcagaagttcgagaccagcctggacaacatggtgaaaccctgtctttactaaaaatacaaa

SEQ ID NO: 3863 - DNA, 483 bp, Homo sapiens
caggcgtggtggctcacacctataatcccagcactgtggcacacggcctatagtctcagctactcaggaggctgaggtgggaggatcgcttgaacctggaagctggaggttaccgtgagccgagatcgcaccatggcacttcagcctgggggacagagagactccatctcaaaaaagatttttgtaaaaagtatatgtacactaaagaaaaaaaatgaaggccattctctaaatgtccaaatctaaaaaaggaagttactcaatatccaaagatcttttcagaccaattcctggagcaatgtgaaggaattgcagctgagaatttctgtcaggcttatatttaacaatcccttacctttatttacatggcacttaaaaatggacatgatcggccaggcgcggtgcctcatgcctgtaatcacagcactttgggaggccttgggaggccgaggcaggcagatcacttgaggtcaggagttcgag

SEQ ID NO: 3864 - DNA, 587 bp, Homo sapiens
ttgggagtcaacagagtgatggagcctgtcctgtccttgcacttgatctccacattcatagtgtagccctcggccttgacatttaatgtcacagggtggactttcttttccacattgcagatcaaattaaagttcgcatctccttgctgctttggagtgaagaaaatatcaattgggaacctggttggggaacaaaacagcagattacctgactaggccaacttgtcaaaaccttaaaaaatatgagcctactgaattagcagattcattacgaggaaaaggaaactccaaattatgatgacattttaagatttgtggctatagtaaccaaaacagcgtggtactggcataaaaacagacacacagactaatggaaaaagatagagatcccagaaataaagtcacacacctacaatcatctgatctttgaaaaagtcaacaaaaataagcaatgaggaaaggattccctattcaataaatgatgctgggatagctggctagccataagccagaagaataaaataagacccttacttttcaccatatacaaatattaactcaagatggatcaaagatttaaatgtaag

SEQ ID NO: 3865 - DNA, 500 bp, Homo sapiens
ggtcagaaacactataaaagaaaataagaatgtcttgggcttcttaatagattagacttggctgagggaagatctctgagttcaaggatatgacaaacagaacaaaaatccaagatctatcaaaggtgtaacaaatgcataataagaattctagaaggagagaaaggaacagaaacatttgaaacaataatgactgagaatttctccaaattaatgtcacacactaaatcattgatctaggaagctcagagaacaccaagcaagataaatgcccccccccccaccaaaatatatctaggcatatcacattcaaactttagaaaatcaaagatgaacaaaagtcttgaaagagaccagaagcaaaaaaccaccttatccatagaagaacaaaggtaagaatctttgttctgacttctcagagaagcatctgacttttcagaaatcatgcagcaagaagagactagagggttgaaaggaaaaaacccaccagctaaagttct

SEQ ID NO: 3866 - DNA, 557 bp, Homo sapiens
cccctgcaggacaactttgtcacccagttctctccaagctgccagtgagctccctgtgcagcctcactcctcacctacagcatgagcccttgcagctctcccagcatcacaatcttgtatctcagtcctggcttctttcactgctggcatccctctgtctctccctttttcacctacttttcttttttcaaagaattcttctctttcatctgcttatatgaaaaataatgacacctctgaaattctttcctgtagttctgcagcatcaatgccaggaagacaggcctcatcctcccagcttctatgctgctcctttcagatcccttaccctgtccccattttcatgacacaggctctccagccaggaagaagacactgtttctcactctctcttttccatctttgcctgtccctctcgctgtgtaacttcccttataactcagcctgaggccagtgctagaaaggcacatcacctgacttattctgtgcctgattctacctagatcagtgcaaccactgggcactgatgaactgctgccaacacagtcatcatttct

SEQ ID NO: 3867 - DNA, 479 bp, Homo sapiens
gtttccccttataaaaccatcagatctcatgagacttactaccatgagaacagtataggggaaactgcccccatgattcaattatctcccaccaggtccctcccacaacatgtgggaattatgggagctacaattcaagatgagatttgggtagggacacagccatatcagacagaaagagaaaaaaatgagccatgatcagtagaacgtggggacggagcaaacctctagcatttttacttatgagagtctgtaaattccacatttcctagtactccaggttaagttcattttccatggtttgcaaagggagtcccaactaatcaggaaacttccactggctgtcagtgatatgcccagaataaagaactggtccatctggtggtacggtttaggtagtgagcacactgcccttaactggaaaggtaggtattcactatctgttaacaaagtggctgttaaacacctctctatgtatc

SEQ ID NO: 3868 - DNA, 511 bp, Homo sapiens
atcaacattagaagtaactaaatctgtggtgatgatactatacattttgtgatgtaccttaacagtacataaatgtcttttacacccattattgcatctgacctggcagaccccgggaggtatgaggaaatgaagcccactctccaggtcacatggctggtaccaattatagtagtagctaataagtatttagctgcttattatgtgctaggagctgttctatgtgtgtgttaactcattgaatcctagcaacaattctagaagttgttttctacaataaaggcacagagaagtaatttgttcaaggtcagctgggtgcagtggctcacacctgtaatcccagcactttgggaggctgaggcgggtggatcatgaggtcaggagttcaagaccagcctggccaagatggtgaaaccccatctttactaaaaatacaaaaattatccaggcgtggtggcagatgcctgtaatcacagctacttgggaggctgaggcagggaattgcttgaat

SEQ ID NO: 3869 - DNA, 404 bp, Homo sapiens
aatgtttctgaatcaaagagactcatgcgagagtcagaccacatctctgaaatccagttttcagtgcaacaaactatgatttaattgctttgacctggcaggaaggaatatttcctttaaacctcaaacacagaagacctcaaaattaaagctcttcaaacgcataaaatgcctcagcaatataacaaactcagggtgatgagagttttatgaagagtcagaagaatcatcagaaacagagggagtagattctaacatgtgaggaaggctgtgttatgtaacgtatggaacattggcggactttcagctccttggctgttcatctttgcctgtgctgggtctccacattctccttttaattggaatgtgtatttgaacagaaagtcattagaatagcaacttgt

SEQ ID NO: 3870 - DNA, 482 bp, Homo sapiens
tcatatccggataaaagaaaatcttcaatgaattgcaaaatctttagaggcagaaggcacccaagagacaggtcaccatgcagaacaattctaggtggctccattcacatttagcctatgtacgtggtggcccctgggattgtgcagtgcgcaacttacacaactgtatgcagggattctgctgaatccagtcattaccacccttgcccttcctcacacacagatttaggatccttttacagaggaggcaagtgaggcccagaggaggaaagcaagttgttcaaagccacccagctaaccacagagccagactaaaatccagattattgaattttagagcaatattctttcctctctacaatgatgactggaaaggatattgtcacccaaaacagccacctccaccacagcaataagttcattcttaaaagtatttgtttcaggccaggcatggtggctcacgcctgtaatcccagtacctt

SEQ ID NO: 3871 - DNA, 507 bp, Homo sapiens
catggccacatgctgcagtggagccagaaggtatctcccatcataggcatagaacaaactccaattacatggagtaagcctgactcaggacattaacaaaaacatcaagaggcagtaagacctaggtctttcaacaaaggatacatgaaatatatttttaaaaacaactagaaagatggtcgattttaatattactagatccattatcacattaaatataaatggtcggccgggcgcagtggttcatgcctgtaatcccagcactttgggaggccaaggtgggtggatcacaaggtcatgggttcaagaccagcctgaccaacatggtgaaaccccgtctctactaaaaatacaaaaatgagctgggagtggtggcaggctcctgtaatcccagctactaaggaggctgaggcaggagaattgcttaaacccaggaggtgcaggttgcagtgaactgagatcacgccacagcactccagcctgggcgacagagcgagactctgtctc

SEQ ID NO: 3872 - DNA, 551 bp, Homo sapiens
agtgttttgaagctaagatgcgttcagccctcccagaatcttagggattatatgaatcctctatttaaattctgttcccagccctgagggttgatcacagaaacagtagcttagagaaacaacatacctgtagtgtcacatgttgaaagattcctattcagagatgataaccattgttcattctttgcctctactgggaaaagtgtgcttttgcttcccataagaactcaaaatttaggcttgttttaaggaaggaggctatcattgaccaaattgtagatagacagccaggtgcggtggcttatgcctataatcccagcactttgggaggcagaggtggacagatctcttgaggccaggagtccaagaccagcctggccaacatggtgaaaccccatctctactaaaaatacaaaaattagccaggcatgatggctcatgcctgtaatctcagctacttgggaagctgagggatgagaaatgcttgaacctgggaggcagaggttgcagtaaactgagattgcactactgcactccagcctgggcaacag

SEQ ID NO: 3873 - DNA, 345 bp, Homo sapiens
tgatgggagctgtggcctcttcacccacacacagaaggatgccagtccctctgtcagtctgaggtcagcttcctggggctgccccaccctgagggctccttacagggtgctcctcacagccatcccatctgtacccccgggctctgtccaccctgctgctgccctgggcacagaccctgaggtctcagtcctgcctccagccaagtttctgcctggtgcccagtgattcctgctgggcaccccttcgctcactgcccctccaccatgcagcagccagacacacccacagcacccgcagacctctaggccgggtcccagacatggccttcccccaaaaaaaaaaaa

SEQ ID NO: 3874 - DNA, 97 bp, Homo sapiens
aacactcaatgccctttgccccccaacacacacacataactgataacaacaataattcatgtatctgcagtggctcatgtatctgcaagctttttct

SEQ ID NO: 3875 - DNA, 552 bp, Homo sapiens
acccaggctggagtgcagcagcacaatcacagttcactgcaatcttgaactcccaggctcaagcaatcctcccacctcaaaatcccaagtagctgggattagagatacatgccaccacaccctactaattttttttgtactttttgtagagatggggttttgccatgttgcccaggctggtcttgaacttctgagctcaagcaatctgctcgctttggcatctcaaagtattaggattgcaggcgtgagccaccgcacccagctgcatttgagttttgagccttgtttctaattggcaaagttgttttcttcaagaaaccaacgagcaggcatccctgagatcccatcataaggtaagcagttgcctcctccactaagatgaaatcagccctgatttcagtttcagagtcaaccaatatttatcgagcaccttctaagagccaggaactgtgctaggagtgttagcttgttattttctgttaacctcctaaattctgtaaaccagtctgggtttggctacaagtaacagaagccattatagacagtttaagc

SEQ ID NO: 3876 - DNA, 525 bp, Homo sapiens
taggactaaaaaggcattattccccgttcctcttatcaggaacctcattgacagaggcatttactttctatgaatacaaatgactatggctattgtgattagaagcagaagaaaaccagctcatgaaccagaccctgaacacaatatctgggggcatgacagatatcccagtcactcctggagcaggggagagagctgaagaggcatcacgttaagaagacgcaccagtgctgggcacatttggtgaatctaattaacaggggcaacttgtcggctgggcgccgtagctcacgcctgtaatcccagcagatcgcaaggtcaggagatcgagaccatcctggctaacatgatgaaaccccgtctctactaaaaatacaaaaaaattagccaggcatggtggcgggctcctgtagtctcagttactcgggaggctgaggcaggagaatcacttgaactagggaggcggaggttgcagtgagccgagatcacaccgctgcactccagcctgggcaacagagggagtct

SEQ ID NO: 3877 - DNA, 432 bp, Homo sapiens
cctccctgaaatactctcctcccttgcttccaggacacagtctgatggttcttccccctattccaatgaatgaatgctcccttctcagttgttattgattccttctgatcttcccaatctctacacactaaagaactccaaggttcaaggtttggtcctttgactttaaaatatcatgttcataaatccagccaggacagttgctctaaatcctaggtataaatccaacaacctgcttgactacactgctagcacctagaacagtggctaacacagaaccaggtgcagtggctcacacctgtaatcccagcaccttgggaggctgaggtgggtggatcatctgaggtcaggagttcaagaccagcctggccaatacggtaaaacctcatctctgtgacagaccatatgttaggccatagtaaagggctctac

SEQ ID NO: 3878 - DNA, 608 bp, Homo sapiens
cgacagaagggaaatactgaggcgtttgcaatttataaagtgtcttctatgttataaaatgtggtgcaacagaaacttctctgatatttaacactttgctttctttgatactgctgttaatagctcttgtagctacaaggaaggtgccatgcctgatacaaataaagaggtaaagggcataggtggtttccactatatagcctggaaaagttcttttcttttccatgttttctcttcttttttcctgttgctagaggttggcctttttggtatgtcctagtagatcttggtccttgttttcctctctgcaaaactatggtacaatactctcaagtgttccactcacctaatggcagcacagccttcaatttttaaatgtatcctcactggcttctcactgtctttggacctcttctacttaatcagagtttttcacgcaaaacaattgcttgatgcaattttaactaaattaaatttaattaaatgaattctttgtttcattatatttatttagaaactgcacaaggtctatttcacagcagcacagggaaaggcaagtaaaacagctctgggttgggtgcagtggctcacacctataatcccagcac

SEQ ID NO: 3879 - DNA, 547 bp, Homo sapiens
tatcttatttcagttacaatttgcattttaattatgattaatgagactaagctttttttgtgtagttgactgtacctttggattcttttcccaaatcccttttcatttcttattttctttatggtttcagaaaatgtagtttacataattgcagcttgattttttaatcagttaatggcatgcttaatggagagaaaaaatattaactatatttccctttttaattactgtgcttttttcttttttaagaaaatatttcattatgttaaatttcagtgttattctacttagctattccttaaatattatagtattttggatttcacatataattttgtaacatatcttgagttttttgtatatacagtaaggctattttctcttttttgttttttaaggcaaaaatcacataatataaaattaataacttaaccattttaaaacatacaatgcaattgcttttagtatgttcacaatgttccaggacaatttcatcatatcccttctaacaacccattatgcataaagttggtacaccctattctgc

SEQ ID NO: 3880 - DNA, 407 bp, Homo sapiens
aaatcacaaaagcctagtccacaaaagcaaaaacaactgacagaatgagaaaaaatatttaccaactattcactggacaggagattgataccctgaatatacaaggaaatcaaataactcaatagcaaattaaaaagaaaaaaaacccaaacaacccaattaaaaaacgggcaaatgatctgaacagacaattaacatatgccaatttacaaaataaaattgaagtggaaaaagactattctgtatacgtaacatattgaaaattgtaagctctttttggattccataattacacaaatacggtggaattatagctgctaagacataacatgccaaataatgcataaggtaatatgatacaaaatgggggctaggcatagtgctgcgtgcctctaatcctggcattg

SEQ ID NO: 3881 - DNA, 480 bp, Homo sapiens
aactagatggagtcctggcactcactgtgattgagaacacatgacaaactaataggtttactgggcaggcggctaagctgatctacttgctggttcaattagctccactttccggaggctagcattttcccaaccttgccccatgctcttgtgggtacatttaccctatttggggccttagcgctttacaaatgaacgtttcagtttaagagacattgccacataacttatattaagtggtatgaattcaaaagcaagctctgccactacacatcagaatccagcactgaaggaggtgtggaagtcagaaagatggacaggaagatcccttcaggcttaaaaaggaccccagggccgggcgctgtggctaacccttgtaatcctagcactctggggatcacttgaggtcggcagatcgagaccagcctgaccaacatggagaaacgctgtctctactaaaaatacaaaattagccgggtg

SEQ ID NO: 3882 - DNA, 499 bp, Homo sapiens
agtgagttcaaaaaggatgatgttccatagtttactgctgttattattgttgttcagatcattattgatcatctctcctattgtcatttttgttttaatgtaaaaataaccagacatgacttaattttacagtaacagcatcacttcccatctgatttgagttcaatagggatcaccgtagatctgcacttggctgtgcatttgtcatactgtgccaggaataagcttctttccttgtctgtccacatttggctgcagaatctttgctccattatcagtctgtgtctacctttgtctggatagctatctataataatatacgaactgttttaacctcataagttagtaaagagagacagaatattagctgagaatgatagggtcacactatgaaataaaaaatataatttgttaaacagtcaatgaagacaaccttacttatgcaactatctaaaatataaaataatggacacttggtgttaatttttgcttttcctga

SEQ ID NO: 3883 - DNA, 532 bp, Homo sapiens
caaaatagtaacaaacaatttataaaccactttttttttcctttgcgcttgctgttgtcctatgcctagaagacctttgctcttcttggtacagctaattctgacttctgttctaagactgcctctttccaagtgaaatgagggtatgaggaatgtcttaaccatctttgtatgcctagtatttagtgcaattcttggcatatagtagttattccataactttttgctgagtgaatacatttgttctgcatttctgaaaggaaagtgttctttcaaaaattcaaaatcaccattttgctatgggcaagtagtaacctataggcagacagtaattatgctatgttatttccatttcatagagttgtctttgttcttgtgctattatagttttcaactagattgcaagccccttgagggcagcaatgtgtatccctcacatcttctcagaataagtaattaatagttgttaacagtaactgagccaggcccaggtgtttttccttatatttaacttccattaaaacttcggcat

SEQ ID NO: 3884 - DNA, 537 bp, Homo sapiens
tgccacatgatggtcgtgtgacattagggaagtcacttaacttctttgtgtctctgtatatccttatctgtaaaatggagatgataattgtctctagttctctctagagattaaatgagttcatatatgaaaatgcttagaataaacctgcatataataaatgctatacaaatgttagccactattattgttgctgttgctgttaacttgttttagcaaatgaagcatctctcttacaatgcaaagccggcctctttcccagttcatcctcctacttacctacaaaatgagggatggagatgaacatgaacatgaactctaaggatttttttgttaggcttgcctttctgggttctactctaagccacattcagctcaccccaactctaaggctgcaaagctgattcggcatttagtagaccattttcctgctcatggtccatggagattagccttttctctttagctctaagttccttcagggcagggatgaaggttccacctctgctatgtctcctggatcatctaggatgatcc

SEQ ID NO: 3885 - DNA, 600 bp, Homo sapiens
gtatttattaagtatttaccctgaaataagtactgcacgaagcatattcattcagtattgtccagttgctcttagcatgaagtcactggtgtcaccttgatggcagtgatgagacaaattacttgtttcacctctttaaacatcagatagattgctggggacaaagagacagcatggcttccaaccattacacaagtcccccttctgcagccaggatcatgtctaggatgatgcagttatggaagacagcatgctgagtttctattaatttgatgaatcaccaaattgagaccagtggtggtggtgtccagggacaaagtgaattgcttcagcagtgggtagataacccactgtttttcagttaactttttcagcaaggtaataatttccttgggatggtatccaaagggtggcaaacctctccctaaaagtagtgtagatgaaatctaggctcagttctgtagctattttctttaactagcactctaggaaccactctaggaaccagtattacacttacatgaggacttgtgatgacctggacacctcttttgttttctacgatgagagtgagatgaaatggagggggagtgggtgatc

SEQ ID NO: 3886 - DNA, 436 bp, Homo sapiens
cccagctcacctccgtgcacatctaaagagccacacacagcaccaccaaaggcagcacaatgagaacagcattctcctcaacagacaagctgggagtatctagacacctgacctcaatagctccagaacagtcctaaaacagttcctccctaaccaccactcaagtcaccagcttggaaagtattaagaaaacccaaatcctgacacaccactatgaaacaacttaaaacagcaaagaacaacccatttaaacagcaatgccagctgttgggaaaaaaaggaacaatgagtagaggagaaacagacctctcggggtccaccaagacccagtctctcagcttcagcacttttaaatgcagaatccatacccctctggggcctgtggagctccacaaggcatatcgtcctcaaagataaatgagcaggcaagctggct

SEQ ID NO: 3887 - DNA, 434 bp, Homo sapiens
  misc_feature 316: n = A,T,C or G
cttaatttcattagatgcttacctggttttctacttgaagtaaagacactgatgtatacactctagaggtacccaaaggtgatgcgaggactcaattagaatgtataaaaaggcaagtgaaattcaatgaagacaattttaaaaatttgatagggatgatattttccccatcttgttctcttttgtccttctcggaagagcagtaacaacctattagtctttgttgtctcttttattttgagatatataaaggatacttcttttgcataacttttttccctgaaataaaatttctcaagccaattttcataagttntactttgaaggaaaaataccttagtaggttatatgtcattcatatacatattctaaatggcaaaaattactataaataaattgtttaaaatgtagtctagactatattatttctccct

SEQ ID NO: 3888 - DNA, 544 bp, Homo sapiens
aaaattagaaattgcacagagtttgtgcaagtaccatgggttggtaacccttgatttgagaggctgctttcaaagtaaattagtgaaaataaaattttcgtaaggacttctaaaatcagagaggaaggatagaaatcataaacatatgtcatccctctttctcttttctgtaataatttagagaattcccttctgttagaagtctattagtattttttaatatcttggcaacctgtcagattttgcaatgtatagtggttgagatggtgggagaaaagaggcccaaataagtaaaataacatacaagaaggagtgctgaattatagatatggagaaagaaatgtggagatacggccgggcgcggtggctcacgcctgtaatcccagcactttggggatcatgaggtcaggagatcgagaccatcctggctaacaaggtgaaaccccgtctctactaaaaatacaaaaaattagccgggcgcggtggcgggcgcctgtagtcccagctactcgggaggctgaggcaggagaatggcgtgaacccg

SEQ ID NO: 3889 - DNA, 457 bp, Homo sapiens
tagctaatgatgatgaaatcaaagctagaaaacagattttccatcacttagttcagaactgcatgttctatagacatgtagaagttaaagaaacagatgttaaatgtcttacacctctcaacagatattaaccgctacaaatgtcatgatagtgctaatgcctgttttatgactaacataaactgcttatgtgaaaaagatcattttgcactttcagacatgaaacctatttacctgtaaaattgttttagagctagaaagttgctaaccaaacaccattttgaatgttacaataagttgctagagcatagtcttcattttaaaatagttaattaaaagctcctgtgttcctctcactatttttacttcttggtttatgtaatagaaatagatgtttattctatttctgaggagggctaagatccaggtcctaaaaatggagctcactcttactaag

SEQ ID NO: 3890 - DNA, 453 bp, Homo sapiens
cagtataagaattatgggactccctttacgctgtaaattattgtttttccattcttttattctaacagcactcagtagaggcagatggaaacaaattattttttccttttaattatcatctaaccttcattaagtgatactatgtacatgaaacagtgcaaagtgtttgggcaagcaatacagaaataaacaaaagtgcaaaattatagtaactgttaaaatttgatggctttatctataactctactttcttatgataatagaaagtgaggaaaagctagtcaggtagactctgcagttagccagagttcaaaatctagctgtctcttacaatctctgtcaccctgaacaagtttttaaagctctctatgtctcaattccttaaatataaaaagtaagaataataatagtgctttgagcagtacctcagtaaatgctagccattattattgc

SEQ ID NO: 3891 - DNA, 544 bp, Homo sapiens
ttatgatggacagattctgactatgtttgaaccacttttgaattattttcctcacctctacaaagacagaagaattatttttagtatctccaatggcagattgaacctatacaggtcacagcttctgagggatttttaatagctggttaaatgcaaaaggagcacacaggccccaaggctgtttgcagacagatatatttcataaagtcaaacctcttctaaggggatggcaaagcttaaattataaaactcaaagtatttgtctgctttttagtagtgctattatagcagacagacctcgggggtatatgaatttattccaaaggttggcttagttgcttactcagatttaactgattgtaactgcagtatgttttatcatgactaccatccggtagtgagatctctgaggcccggcagcagggcctcctcatcacattacctctctgcatacccacttggctagacggaacagggaatcctaggagtctgatgaaaaagtaatgacatggcctgcaggcacaagatataaacaagcaattca

SEQ ID NO: 3892 - DNA, 436 bp, Homo sapiens
gggggctgggggtcagatgtggaaggcagatgtttcattgtatattcttttagatcttttgaattttacactgcatttaaagaaaaccagactattccttctgtggttactgcaaaaaccacccccaggaggcaggatggcgactggaagtagcagattctcctctggggcctcagcatgcatcagtccaggcctggcatcgaggaggaacacagtcaaatgctctgaactggggtcgggcgcagtggttcacgcctctactcccagcactttgggaggttgaggcaggcagatcacctgaggtcaggagttcgagaccagcctggccaacatggtgaaaccccatctctaaaaaaaatcaaccaggtatggtggcaggtgcctgtaatcccagctactcaggagactgagaaaggagaatcacttgaacccggga

SEQ ID NO: 3893 - DNA, 416 bp, Homo sapiens
  misc_feature 282: n = A,T,C or G
gttatgtctcagaaagtcaaaaacataagaaagcatagctcaaaatacacagatgtgaaaatgaaaatcattgcagacagagatagaaatggttggaaaacctccaaagccagagtcagttgatgcaggacatcacatttgctctggggaaagcatcaggtgaatctttggagaactgcaaaagtcagtgacatttatacccaggtgaaagccaggattatgagcactgaggcaaaaatagtgagaacattgctccagatagctgtgactataagacgtccncattcctggcagataactagtggcaaaaccagcagcatgttctacaccttccccataaactggtagcaacctaaacagaaatgtcatccatagacagatgaacagggaatctcaagcataatgatgattgcaca

SEQ ID NO: 3894 - DNA, 122 bp, Homo sapiens
agagagctgggtccatcccttccaaacaacccagctctgccctgggccgactgagaaaggccctttgaaatgtgagatcctctaagctttatctggagcgggtttgatggaagggatggacc

SEQ ID NO: 3895 - DNA, 469 bp, Homo sapiens
gtggtttcatgtagtggtaatatttgagtcctttctatttcttatttgtgtgtttgctctggcagtgggttttaaactttcatgtggtttcatgttggtggatatcattctttagcttccagattatgttcttaaggggaaaagtaatttttcaaaacatgttaaaatttagaaaacgtaagtatgttgggacaaataacaccaacaacatagactaggagattaccgtttaggtttcatggcatgagattgttttggacctacaggctcaaataccatattaggtcatattaaaaattgtatatgataatggggccaagagttaaaatatgtgaactactctgaaatagtaatctcacatatgaaaatagaaaacatgagcaaacccaagagtcaatcattgattataaggttgcaataacagcatacgagaaagggttaaaagagtttgatatgtttagtgcaaaag

SEQ ID NO: 3896 - DNA, 594 bp, Homo sapiens
tctcatgtagttatttgtgtgtgtggtgtgaacattccagatctactgtcttagcaaatttcaagtatacaatacagtattgttaactacagtcatgctgtgtattagatccccagaatatattcatcatttacctgcattttgcaccctttgaccaacatctctttatttccctgcctatacagttttcattctagggaattagttattttagcattacctttttaactaatggtcaggcttaataattttgttcttcttctaaaatatctggggcagaataaccatcaggaaggggtaaaggagggtgtctgctgaagctgaaacaactgggtatcctcaacagtcaagggcctgcaggagaaggcactcaaggggcgtcgtcagttctttctcttcttctgcatgaaggaggtggctggggaagctactgtggtttgtttcagatgcaggcaacaagagcacagaaaatggtatctgttgatgaagtgtggctatattgggcctatgagtcaggagtgttccagaaactttgaaccacagaaccagtgtgacagtgactcaactcgattaactaggaagagtctttaaact

SEQ ID NO: 3897 - DNA, 116 bp, Homo sapiens
agttaaccataatccttactttgaaagctaaaatctagttttattcttttttaatattttatatcaataacagcccaatatgtagcatgttacaactggcttcttttctcaatatt

SEQ ID NO: 3898 - DNA, 568 bp, Homo sapiens
cacaggccacgcctttaattccagcactttgggaggccaaggtagaaaatcacttgaggccaggagcttgaggacagtttgagaacagcttgggcaacatagcaagaccccatctctacaaaaaattttttaaagtctgggtatagtggctcatacctataatgccaacactttgggaggctgaggtggaaaattgatcacttgagcccacaagttcaagaccagcctgagcaacatagtgagaccctgtgtctataaaattttttttaaattaggcatggtggcctacatctgtagtcccagctacttaggaaactgaggcaggaggatcccttgaacccaggttgatgctgcagtgagctgtgttcatgccactgcactccagcctgggtgacaaagcgagaccctctctctcaagaaaaaaatgtttttttaattagctgggcatggtggcatgccatgagcagaaatttgtcagggtattaagttgaaacaataacagtcctttaaaacttttatatgctttaaaaaaatgaccttatgcccccacccactcctttccctcctg

SEQ ID NO: 3899 - DNA, 530 bp, Homo sapiens
gacagaagggggaaggtctaagaaaggcaactaccaatgacgcctttataaataactgcagggggtggacgggggtgatgattctacaatttcatataaaacaacatttataaggatgctgtatcctcatgtgcaagcatccctggatgcccacaatacctcacaaataccatgagaaaattggactgcagactcttgatacatttcctttaagaaacaaccttttctgactctgcgcatttaaattccaaataaaatgttaattgcctgacaagcccgttttccttgtcatttataaaaatgtatacatcctgaataaaaagtgggagaatacttaaaagagtaggagaagaatcttgattttaacaacaaataattgtcacgctacggagttcttggctttaattgctgcttttgtgatttgttttggaatttgggctgatgacaatcacagagcccagtgttaaaaactaataatgatatagtatttcattcgaaacatttttggatcttgatagtattgatttgaa

SEQ ID NO: 3900 - DNA, 634 bp, Homo sapiens
cagagtgagactcgatctcaaaaaaagaaaacaaaaattctagagagaactagtgtacgttcctgttccataaagcaggattcatttgctgatctgtgctgtagaatcaggcgtttacagtccttaaactagattctaaagaaaaggccgggcctcagcttactcccatgccacttaggaaattcctttttctccttcttctcccttctgatattcggtatctttgaatagtcatgacagcaatgaaaatcagggtgatgacagtagttgtccctcactggcacatgctgagcaatttacttatatttgcttatttaatcttcacagcaaccctaagaggaacattcacatcatccccattttacaagtaagaaggctgagatttagaaagattaacttgcttgatccaagtcacacacatttagacccaggtttatctctccccaaagcccatgatctttactcctgaataacacatgggactggaaaatccttgccaaataaataatcagtataccagcattatcgttccaaatttaaaacccagaaaaggtaaggagtggccaagcttccagtgcaaactagtaaatgacaactttattttcacgagcttgactctgcagttaaacatata

SEQ ID NO: 3901 - DNA, 628 bp, Homo sapiens
agttactttggttcaaatcatccttagtagtgacaccaattctcttgaattggatgtttcataaagctacttctgggaccaggtgcagtggctcacgcttgtaatcccagcactttgggaggccaaggcgggtggatcacttgaggtcaggagttcaagaccagcctggccaacatggagaaaccccatctctactgacaatacaaaaaattagccaagcgtggtggcatgtgcctgtagtcccagctgctcgggaggctgaggcatgagaatcgctaagataagtaaagaaagctacttctgtaaaacaagcatattatctttttaaatgaagcaagaaaataaggctgggcgaggtggcttaagcctgtaatcccagcactttgggaggatgaggcaggcagatcacgaggtcaggagatccagaccatcctggccaacatggtgaaaccccatctctactaaaaatacaaacattagctggacatggtggtgcatgcctataatcccacctactcgggaggctgaggcaggagaatcgcttgaaccagggagttggagggtacagtgagccgagattgcaccactacactccagtctggcgacagagtgagactcgatcccaaaa

SEQ ID NO: 3902 - DNA, 558 bp, Homo sapiens
gagccatggtcagaggaacaagctgcactgcagtgtggtcttgcagttgtggggagagattgcactcgattctgactacagcatgggcaagtggggacttgcagccatgaagcagggtggaggtcagtgaatggaaaataactgagagaaaacatcggggagaggggaatcctgttggaccaacccaataggactcttgctgaaggcagatcaggctgataagatgtagacagtggtcagataccaaggctgggggcgtttccctgccctgactcggcaggattcttgctcaaactgaattctgcaaggacataggctgggcctggtcaggaaggtctcagacgagcctcattaaagttttggtcaaaggagagtatctgtccccacttcctcttggttcgggtagagttgccctggcggtctctgcctctggtccaggtgtcagaatccttctgggatctaaggtggcccctgaagacagaggcctcctttccctctgagaaaatactgtaagggccaggcgcagtggctcatgcctgtaatcccagcactttgaaa

SEQ ID NO: 3903 - DNA, 512 bp, Homo sapiens
gatgttcttccactgggtgtatttacaggccaaaatgcaatcaagcctaggggaccttggctccagctccagctgcaaatgaggtaagtacagatttccaaatcacatcttcaatctgccactgcattctctaccactcaacccccttccccaaatttgaaattctaataatgactccatattatttgaagtattataatctaaggaattcaccttattttctaagcctttgaaggacaaaaaaaggtatgcagaggtcaaaatacataaggtgttcaatgccatgccaagagacagttttcctttagtaggagctaaacaggttttaaagcagaatataaatgaacctggtttattttagaaagatagttctgggctgggtgcagtggctcacaactgtaatcccagcactttgggaggccgaggtgggtggatcacctgaggtcaggagtttgaaaccagcctggccaacatggtgaaaccccgtctctactaaaaaatacaaaaaatta

SEQ ID NO: 3904 - DNA, 635 bp, Homo sapiens
tctgagaattttctataacacaaactccttaacttcctggtgggtaatgttttctgggtgttttttctgttttctgttttttttgttgtcatttcttctttagtaaaatgaaaattgcaagtagaaaagaaactaaaaatggatttagtgtgaggacaggttccttttcctggcaggattgtagaacactggtattcagttgactgtttacaatgaatatatcttctggttggtcatggccagaagagaaaatgtcattggtttgtgcccaagcaaattgattattaaaatacgttgaatatgaccccatggttgcaaacatcccttttcttagtaattcttagagatgaagaaagtcttttatctgttttctatttcaactttctgggtaatctctatcctttctttttgataagtctctgtcttccctctatcagtgtgaataatgttactattgaaaaactggttccctagctacctcagtcctggggtcttaaggtttcttcaaaacgtgacagtcatgttaaaatgaaattctctgaatttatttagagcactgtttgtaaaagtgtaagtgttattatgcagccttgctttcctacctacctgaattctctcccctactctccccaact

SEQ ID NO: 3905 - DNA, 634 bp, Homo sapiens
catggaacaactgaaggactagacacttggctcccatgtgcccaagagacagaggagctctgaataggggcctaaaatgcactgtttagcaggtatgttcatgtcaaaaatgttcctccctggcctggggtcagaaatgaccctgttttagtgcctcacacatctggagtatgacctcatcttgccatgtgaccctggacaagctgaattctcctctgagcttcagtttctgtatccatatattcccaatacaaatacccacctctcaagactcatagttgaattaaatataatacaacattgacttcatgggcacttaatccatgttggttttctttctctagaatgttccatgaatgtccactccacaccccactgacagtgtgaggcagatcgtcgagacagaaaactaataaagtagttctggacttatactcaatgtttgaccaattgaacccaataggcatttacggaatatgttactcaaccacagaacatacatcttctcgtctgcacttagaacatagtctaagatcgaccacatgtttgaccataaagcaagtcttaataaattcagaaaaagcaaaataattccaagtacactcctggaccaccatgcaataaaaagagaaat

SEQ ID NO: 3906 - DNA, 587 bp, Homo sapiens
tggtcaggctggtcttgaactcctgacctcaggtgatctgcttgcctcagcctcccaaactgctgagattacatgagtgagccaccacgcccagcctcttctggtcactttgaccttatatttttaaagaattttttctacgttattaagataacgtgagttcaccacaaaaaaagagaaattagtacaaaaatatgtaaggaaaaatgcaaaaataattctattatccagagtaaatcactgttaatatttcagtaactgtgcatttatacatctttctatatatatatgcaaatgtgtaaataaaactatactaatagaacattatacacatgcttttattataaacacatttgttttcttctagtctttactttttattctgtgttcactccctcagcctctccccagccccacctgccccaaatggggaaatcaattttaaactaaacttataaatatatattaacatttatagaaattttgtcatttgtttttaaaaagtagattcctggccgggtatggtggctgacgcctgtaatctcagattttgggaggtcgaggcgggcagatcacgatgtcaggag

SEQ ID NO: 3907 - DNA, 116 bp, Homo sapiens
aattaggcccattcaaagcacactgtcatgaactctggggatattgagggcacagagaagactctacaagcttccaatcctacatatagatagatgtaataggaaggctgaaggat

SEQ ID NO: 3908 - DNA, 438 bp, Homo sapiens
atatgctaatagtggaagatatcccagcttaaaaaatttaagtagacaaaatggtctgtgacttatatgccttatttcttagaaaattaaatataactcatcattgcatttctctttgtttagctggattttatatgagaaaccacatttccgaggtcagaaatgtgtgctagaagaaggggaaaaggtgttaaatcgtgactggattcttcagaacagaaggcatccacaaagaaactttatattgggttctctcaaacgtgtcttaaaggtaacaactgtagatttttctattttttatttgattttatttatcatatagtaaacctgtgctgtggcctggcgatgtttacaaatcattgctaatttttgtgctgttattaatcttcattaccatattgataatcttttgaatttatgcaaatagagtgaatggca

SEQ ID NO: 3909 - DNA, 435 bp, Homo sapiens
aactaaaattgaatattagaaataaaacatttggctatttcatgacttccctaaaagctcatatattcaagctgtctacgaaatattttgaatcttctcatgggcaaaatggagaactgtttatatacacagtatatgtaatttaagttttctctttgaaagaaactaagttatttgtgactaacacacctcttgaactgctactaacagcgttcctttctttcctatttgtctgtatgattggttcaaaacaatcactgtactagtttcttccagtaaagagttccaaaaataattttcatagagtaaattttaagaaactgtttaacacatatgcagctgctactttcaaattatgttaattacttgaaacagttactttcaactgtcatatgcaggtgttaaaaatagtttcagttaagttctgagttatgc

SEQ ID NO: 3910 - DNA, 435 bp, Homo sapiens
aaagtttgcagtttttatttccccaaatacccttcctgtttcatttttcttagctttctgcaattcaggttatacatatgttagattttcttacagtatcctttctttctatcacttgcctttacttacttttcattattcctttctatttgtctcatcttggataagttttttaaaatatgaactattttccatttcatgaatttcagctgttcagcccattcattgcattcctgaatttggttaatgaactaatcatttctaggttttccatttggttctggcatgctatttttatagtgtcaagtttcttgctaacattttcaagctcagtcaagctcagcttttatctacatgaaaatattaaggatatttgtgttatagacattgcttttagtcttactttctatgatttttggatctcctcttttatct

SEQ ID NO: 3911 - DNA, 495 bp, Homo sapiens
tctcagatccttggccctaccttcacacaaacgatcctctttgaatcattacgggatacccatgagaataacctactaatgcaaactagcagaagatttcaaactaactcagttcaacaacctcagatattgtcagggattaattaaatacacacagccccactatactccacaattgaggcttcttgtatctttaaactccctgatcagtccttacttgcttcataagtaagtgatctggcattttgaaaaaacaccaacatcagaaaactaaccttgaacccagagggaggggaccttttattgtttcactcattgctaacactgctaacaaattacagagtgtttgaacttgggtgcatgtcttttagttgaaaaaatacaaaatctatttcaattggaaggcactctaaccagagactcacgctgagactctatgaacaacctccaggccaggcgcggtggatcacgaggtcagcagatagagaccatcag

SEQ ID NO: 3912 - DNA, 454 bp, Homo sapiens
  misc_feature 276, 277: n = A,T,C or G
atacactgctagatagagtgtacattggtacaaccagattggaaaattctttagcagaatctactaaagctaaacatattaaaccttatgatagaacaattctattccttacatatattcaaaataaataagtggttatgtccactgaaagtcatgtacaataatattcaaggcagttttattcataatagcaaaaactggaaacaaatgttcatcagccacaaaatgaatgcataaattgtgggatatttatacaatataatatacaacaatatnncacgctttgcttggactcaagctttttgcactgcagtcaggaaactgtcctatgcagacagctgagtaatcatggagcctaccctgttagtttcctttctctcaaagatctcaatcttgtacttatcttgtacttcctgttattcattgcctgaaaacagctatctcatgtattttt

SEQ ID NO: 3913 - DNA, 511 bp, Homo sapiens
ggaacgccccagccattcagctgatccgaggcaaagagccggcacttgccccagcccagcctgcttgaaggacctacaggtttgtctcttccagatcagaactggggaacaaaaacccccatcctgggaaaaatggggaagctggtgagtcttaccactctctctctgcttgcttctgctaagtggcacgcctgtctgctctcacccaggaagcaaagtaagaggcgttgctcagcctctaaccccacagctccttcctgaacaaatacaatgctttgcgaatacctccagacaactttttctgcctgttttgcacaccgaaaatccacagaggcaatgatttttagcactttagacattccagagagtgtttttcctaggcaagcgtttctatactgtcgtgatgagcaaactttctcatctttgttacactctaaaacagtggaaattagccttggggtgctttgtgaggaaggctgagtccccaaggaagtgatagtaaatctaaatg

SEQ ID NO: 3914 - DNA, 441 bp, Homo sapiens
tcattttgagattaaaagtattgtaacaggcctggcgtggtggctcacgcctgtaatcccagcactttgggaggtagagatgggcggatcacctgaggtcaggagttggagaccaggctggccaacatggtgaaaccctgtctctactaaaaatacaaaaattagctggacatggcagcaggcgactgtaatcccagctactcgggaggctgagtcaggagaatcacttgaacccgggaggcggaggttgcagtgagccaagattgcaccactgcactctagcctgggtgacagagtgagattctgtctcaaaaaaagaagtactgtataattttttaatgttaaatctgataagttataataatatcgacttctttgactcatagctgaatagttcatattgtagagaaagtcactatatcattaatacagtatttttag

SEQ ID NO: 3915 - DNA, 549 bp, Homo sapiens
ttgctggatgctgggaacacagcaatgaagtttttaccacatcacttccacagtactagatgaaaccccctggtgatcacactgctgacaggcttccttgaccattttccagtgtgttggagtagggggagagcactgataatgtacatagcctcacaacatgtggggttgttaggataggccaaactttgctttaagatgaaaccagggtggctagacttccctgaattataaacgaccacactgaatcaaggcaaacttgaataaccaagtaaataacatttgttgcttccctcccccaacaaaatctatcagagtaacagtgctcccttgactaaaagaaagaagattggttgtgtagtttcctcagcaagaatgtggacttgataactccaccttttagaataaaaggagatccggtgcggtggctgatgcctttgatcccagcacttcaggaggctgaggtgggaggatcgcatgagcccaggagttggagaccagcctgggcaacatagtgataccctgtttttacaaaaaaataaaaattag

SEQ ID NO: 3916 - DNA, 499 bp, Homo sapiens
tgtccgacgccctgcccgtaaagtcatcctcacttagcaatcatagggaactttccacacacaccaaagggaggtctacctatgaaacgggacctacccactaccctaaatccactaccacagagtccatacaaaggataggtatttggggtgaacatacccgcattggttccctattgtaatcagcaaatctttccttcacaaaaataaatgtaaaactaagaataaacagtcatttgaagaattttaacctgggaaagatacaaccaactgaacaaaactactgaagaggccagacacagtgtggctcatgcctgtaatcccaacactttgggaggctgaggcgggaggatcacttgatgtcaggagttcaagaccagcctggccaacatggtgaaacttcacctctactgaaaatacaaaaattagccaggcatggtggcacatgcttgtaatcccgtctactcaggaggctgaggcagaagaattgctagaactc

SEQ ID NO: 3917 - DNA, 531 bp, Homo sapiens
gacagaaggggaatacaaactttggctaggcagctggtccagatgtcttttcaattcttgatatagatgtgggcaaaaaggcatgggcattgaagccagaaccaagtggtaagaatcttggaacctccactgacaagctgtatagttttaagacagattattcaatttcagtttcagccatgtgtttaagatagattctgttagcctgccagtccctgaatgactgggaagagtagaattgtccccatacccaccccaatccctgccattccctgacctggtactgctcaggattatagtccaatgaaaaaataaatatgtttatgccattatacatttgggcaacaatttgttagtacagctagcattatcccaatagaaatcattgccttgaagtggcactaatgctgctgtaataaaaatcaagctatagggcactggcttagcagtctggtagcaaagataaagatggaaacaaaaggcagtggcaaactatttagcaaaatatctcctataacttggaagctgact

SEQ ID NO: 3918 - DNA, 518 bp, Homo sapiens
cgacagaagggttttactgaaaagtaccagtcctgagggttgacaacaacatttaagaaatcatttccatcttttcagtacaaaacagttttctagagctgtttgtaaactggactgacaacagtaactcttttattaatccacagagcagcaatcattgaaaagattattttaaaactataaaagaccttgtagataaatcaaccttggcctagaaattcaatgctactgcactgacatgtatgagaagggtaggactgcaaatatagcagttctgcaaatcaacatgttaactttcagagatatacacaaaggaattgaggttttggtgtgtaagtgcactacagtccccactattcatttaccaacacaggtttttgtaaaaggaaggataaactgatgaataattcatgtctggagccattccaagtttactatgttgaaggtacaaaatagtgcctcctttcatcttttacattagactatgtatctacctgggctactgagcactcctacag

SEQ ID NO: 3919 - DNA, 559 bp, Homo sapiens
aatgggaggctttccctgttgaaactcctcaaggacatcggttgccaaggtttattaagagtgaatcttccccacatgggttatcccctctactgcctctagtgacagaggatcacatttcactggcaaaattattcaggaaataggaaaggttacacacaccagccaaatattccactggacttaccatcctcagtgataaagttctatacaaagagccaacagcatcctcaagctgaactggctaaactgtctgaagaaagaacttgccatggtctcagatccttggcccttccttcacacaaacgatcctctttgaatcattacgggatacccatgagaataccctactaatgcaaactagcagaagattccaaactaactcagttcaacaacctcagatattgtcagggattaattaaatacacacagcctcactatactccacaattgaggcttcttgtatctttaaactccctgatcagtccttacttgcttcataagtaagtgatctggcattttgaaaaaacaccaacatcagaaaactaaccttgaaccc

SEQ ID NO: 3920 - DNA, 561 bp, Homo sapiens
atgaaacttatacataagactctaggagtactgactagaaaaatagttcccgcaactttacaaatgatacagctctctgggagcaagaaggggctcagaggagtggttggtgatacatcttctgctatgagcttactcttcatagtggtgctgtataaacctggtagaatgcaaacaggttttcatcacaacaaagatggcctccctaccagccaatactcaaacaagctttgatgagcatctgcaaagtaccagatcctgtggaaaataagaaaccattcgcccggcatggtggttcacacctgtaatcccagcactttcggaggctgaggtgggcagatcacgaggtcaggagatcgagaccatcctggctaacatggtgaaaccccgtctctactaaaaaatacaaaaaattagccgggcgtggtggtgggtgcctgtagtcccagctacttgggaggctgaggcaagataacagcgtgaacccgggaggcggagcttgtagtgagcggagattgtgccattgcactgcagcctgcgcaacagagcaagactctgtct

SEQ ID NO: 3921 - DNA, 145 bp, Homo sapiens
agaaccttcagctgaaccacaaacaccattaaaaacaaaaaccattctgatcaagtcactcccttgccaggaaagctccccaagctcccccattctaaaaagagtctcaactcctttgaatggataacaggtctcctgtataatt

SEQ ID NO: 3922 - DNA, 513 bp, Homo sapiens
atacaagaagaaataactgttatcagaatctggagagaaagttgtatggggagggctacctgacaggagctgtgacttttagtagaggggatgcagttagccatggattaccctgaggtgaatgaaccaggctaataaatataccagcaacctccctccaccatcaactagggtgattctataatttattgtccaaagtgggacaaccactatgggcaatttagtcatatctattaaagttgaaattgtgcatacatagaattacacttacttattctggagacactctctcatacaggttgcaaggagacatgcaaaagaatgttcaacagctacaagaactgagcaatttattaacctctctgcttcagtttcctaatatgtaaaatgtacataatagctcttatctcacaggatactctaatgattaaacatgttaagtgctttcatgtatatgaagtcttagaaaatacacatgctaagtgtaagctgctattataattgacacactgc

SEQ ID NO: 3923 - DNA, 556 bp, Homo sapiens
cggtgcgagaagacacagaagggtagaatctttggttatatgttcttttgctgaatatcttcatctaataactcaataacgtattcttgattaaacaaaagttgtgcttaaaagggaatgtattagtcttcttgggctgctgtaacaaaacagactgagtggctgaaacagtagacatttatttctcacaagtcttgggactggaaatctaacatcaaggtgccaacacatttggttcctggtgagtgcatcctggcttgccaccttcttgctgtgtcttcacatggctcagagaaagtgatctcttgagccttgttttgtaaatatttagatacagaaaggcaatgggatcatagcatcagtttgttatttcctggccatacgcattttccctgtggaacatattgatatcagatttcagtaaagttgcgggatacaaaattaacatacaaaaatcagtagtatttctatatactagcagttaaatagcagaaaaaggaatcaagaaagcaacataattacaatagctacaaagaaaaaccctatatattaattt

SEQ ID NO: 3924 - DNA, 583 bp, Homo sapiens
atgcaaaataaagttaaatgggattattatttactttatttaattcacacaatgatatggctacatggtctcctttaatcctcacaagaaccatttgagaaaggaaatactattctaaagttgagcacaagataataaaaatatgtctgatgccacagaactgataagagtgatggctctaagctatgttatctactttacattcaaattttgagaatttagcttgtagtgaataactatttctaagaaaagaagaatagtgtattcctttaaaaacaatagctaagcttgacttctttgtcactgggatttagggcatgataaacatgtgatccaagaacaaagtttataccctcagactacatatttggaaacatgacatgccaattcaagtgatttaagtcctggttttccttattaatcatagaaaaaaaatttctacaagtcagaggatttacctgctttgtttgctgctctaagcctggcaccaacaacgatgtcaaacatacaataggagctcaataaatattagttgaatgaatgagtcaagaatgaatctactcataaagcatataatccagtg

SEQ ID NO: 3925 - DNA, 610 bp, Homo sapiens
tttatccaattcactccaactccagagccacaatctttgcaggcccaagcaatctgatgtgtacagtagctacatctttctcaactataattctgatgtcacacacaaggctgttctttgttgttagcaaaacatcacattcaaatccctcaaggaggtttaaaacgcccctgctactagaacatcttaagtgcaaggaatgcataatgtttcttcacaactccaagcttttgtacatgtaggtctcttttgaaacattcttctctaggtctttcattgggctacttcctgctcaccactcaaccaatagttcttgattgtcttctatatacctctgtacataatgcttattcacattaacaatgtacattagttgagaatatgctgtgtggaaagtgctgtgttgagctaattctacctattatctcatttaattctcacacaacacttatgaggtgagtatcaagctattccacactgctacttccacaggaaaaagcagcaaagtgaattcaagaaattgtccaaggccaagagtcaggaaatggcagattcaaatccaggaagtctagctccagaggtcattctcttatccatgacaccctcacac

SEQ ID NO: 3926 - DNA, 541 bp, Homo sapiens
aagaatacaagaatcccaagtaaaagcaacaggtggaacgctaaaataactgatcacagatttcagatgctgggcaccacagcagagactaactagaaaggcttggtaaataatttgggctttctacagacctgccttaacaaagcataaaaccatgcctcaagataatcaaccaataatttaactacctaccagagcaaaaacaaaactctgcaaaaattaacaaaagccaaaacttctacaacatatcacctacattttccaatatgaaattaaaaattactacatgtgtggtgaaataaaaatgtgaccattagtcaacatatccgaggatgacaaagatggtggaataagaaaaggattttaaagcagctattataaatattcaaacactttaagaaaaagacagtcaaaatgaatgaacaaatggaggctcttaagacagaaaaccatttaaaaaaagaaaattctagcactgacaagcacaatatctgaaatgaaaatttcactggataagcttaacaatggactggagcagcag

SEQ ID NO: 3927 - DNA, 582 bp, Homo sapiens
ggaggccgcacccgcctccggcgggtctctcagtgaaaaatgtactctgacctgaatcctgaattttccttgatggtcaaaagattaagtctcgtcctgatggccagactggagtacagtggtgtgatctcggctcactgcatcctccgcctcctaggttcaagcgattcttccacctcagcctcccaagtagctgggatcacagaaatcatgagtggaggatctcaagcccacattttttggggtgctccaattgctccactgaaaatcacagtatcagaagacacagcttctttaatgtctgttgctgacccctggaaaaaaattcagcttttatacagtcaacattctttatatctgaaggatgaaaaacagcacaaaaatcttgaaaactataaagtcccagaatctattggttctccagatcttagtggtcatttcttagcaaactgtatgaatagacatgttcatgtgaaagatgactttgtacgttctgtttctgaaacacagaatatagaatcccagaagattcactcctctagactgagtgatataactagctctaatatgcaaatatgtgga

SEQ ID NO: 3928 - DNA, 622 bp, Homo sapiens
cgctgcctttaagaactgtaacactcgccgcgagggtccatggcttcattcttgaagtcagttagaccaagaacccaccaattccggacacactatcatcaaacggtgggaaacaagttaaatggtttattaggtttaaagtgccattttccatttaccttgaatccccatatttcttttaatcttaaaaatgttatgttgtcttacttgttctcccattgactctggatttgtaattttttgtaaataatagacatgtatctccaactcattaaattatttctactccttgtatttattgtctactcttaagaggtatgtatcaaaaccatcctttgtggaacctcactgtgcttacatttgtgaatgctcactttagaagttcgatcttggccagatacagtggctcacacctgtaatcccagcattttgggaggcccaggcaggcagatcacttgaagtcaggagttcgagaccagcctggccaacatggtgaaaacccatatctactaaaaatacaaaaattagctgggcatggtggcagatgcctgtaatcccagctactcaggaggctgaggcgggagagtcacttgaacccaggaggcaaaagttgcactgagct

SEQ ID NO: 3929 - DNA, 607 bp, Homo sapiens
cgcccagtgaagatctaagagaatcctggctattaaaagatgccagcattttgaactgggaggagataagaagagaaagggccaagtgatccagttctaagtatcatcttttgttttattatgaagacaataaaatcgagtttatgttcacttcaaaaataaataaataaaagtaatgtcttactgttggcctgatccttattattagaccaaagctcagaaaggcagaatcattgacatgaccagtcctgtaaccaggaaggacacttaaaaaagagaaagcgattgtttatgattccagtcttctctttttatttcattcctagtaacaagttcactattttagaagatgaaaatgtaccgcatttttattgagaataatatttatagcataaagggattcaaatgcacttacaagacagtaggaaccaggcacctactttattagtagattgccaaatggacttggatgtgtgactatgtgatgtaaaatttctcctacatttatattagtaagtcattgttatttgtaagcatgacaataatcactttattaaatatatagtattattaagcaggattctgcctgtattttatgtaaaatacg

SEQ ID NO: 3930 - DNA, 445 bp, Homo sapiens
cacatgatttcaaatggttaatttaaataaaggaactgctttaagttgattatgtgatctacttctacaccaccaacccacaccattgcgtaagagactgtttatggaaaattatgtcatcccgcagtcgggaatggctaattgacttaatgaacagcaggacagtaacatggcttctttctgtgtatcctaaggaaagaatgcagcaaaataaagatttaatcttctttatttatttttatctagctatagcctcataataaaaaagaagtacaagatataggtgccatggagatgtccattggcctgcaaaaataagaaaaagatttctgtagttgtacttttagaaaacagtgaattctttaaaaaaataaaagactgagaaaagagagaagcttcaggataggcttattaatgaaaaacaaaagtggaacaagagtatccg

SEQ ID NO: 3931 - DNA, 491 bp, Homo sapiens
tggacaattaaagtctatgatacagacaataatctgagagcctgaagactgagatagagaaactctactttagcggtggaagcctttgagcaccagagggggcattgggatagagcatcctttgcccatatcaagaagctatgtaaagcatcgtcccttctgtgacctcaccagcctcatctcacattgctaccgagcaaagataaggttaggctgggcacagtggttcacgcgtgtaatcccagcactttgggaggccgaggtgggtggatcacgaggtcaagagattgagaccatcctggccaacatgatgaaaccccgtctctagtaaataaaaaaaaattagcctggcgtggtggcgggtgcctgtagtcccagctactcaggaggctgattcaggagaatggcatgaacccgggagacggagcttgcggtgagccgagatcacaccaatgcactccagcctgggcgacagagtgagactccgtctc

SEQ ID NO: 3932 - DNA, 582 bp, Homo sapiens
catattttttaattactttatttaatacagagaagatgagaagacaatgtaaatgctgctttgtgagtgatgggaagaagtacttttagtgatagcagtgaatcaaagcataaggtcatcaatagtcgacttcattgcccagtgttttcaaagtccccacgtgtgttggttattctttagtaaagtagacgtgacaatgctcgttggctgttattgtgaagcttgactgataatactgggattttgagatcaagaggctagaagccaagatgtttgaaatatgtaaggtcagctgcctgctctttcctcctcccctacgagtgaatcaacacttgctttataagcttttcttctctatctcctttctctattgttagtttcacttcctactcttaaaaattctgagctttcaaaatcatgtttatcaggagaaaaaagagactgaaagagcttaaaatgggatacctctggccgggtgcggtagttcacgcctgtaatcccagctcttagggaggcagaggcgggaggatagcttgagcccaggagttcgagacctgcctgggcaatatagcaagaccccat

SEQ ID NO: 3933 - DNA, 316 bp, Homo sapiens
tttgggaggtaaaagccacagggctttatatacaatggattggctatgatggcacgggcgagggagatggaggtgttaaatactttttattgggcttaagggtttatatctcatacactggggacagcaaaaacatggctgatgttatggcagaagtttcgtgagcacctgcactgtctcctatgaacaggaaaaagggaaagatcgttctattcccctatagtggtgtacagtattaccaggtgcctaatatggcctttaatatagaggaaaagaaccatcagctctgcaacaggaggggaattctggggcatct

SEQ ID NO: 3934 - DNA, 453 bp, Homo sapiens
caatctcaaagctattcctgagaatccaaaccaatatagtccccttgtttttcaattttttgaagtatgagaaaaaaaataagaaaaagttaacatacatttccaatactaattttctgctctcagagctttaaccgctcagtaatgcataaaacaaatatttataccaaggatatgaaccaaactgctacaggtaatctcttcaatcatgatcaacaagtcttgtttttttctaatcctagatagctttacagggtaacaactgtattaaattgtgacaaatttgctgttgtagaccaaaagtcactggcggctaatatgcattctaaacttgcaacaaattaaaagttttcaaaagtactctacctcctctggccaaagtgtgaaattatatagtttttaaaaaatgcaggctggcgtgatggctcacacctgtaatcccagcactttggg

SEQ ID NO: 3935 - DNA, 496 bp, Homo sapiens
gctcagacctggggattgtaactttagcctcataccttctaatgaaggccatcttaaagctctaccagtttcagctgagggccgatccagcagatcccagttgttcctaaagacctggttgctagctcctctgagactggggtggggtgggtgtcccaaggtgatgaccaggagaaaagagagcgtcttcctcccagtcacatcccaagattcgtgaccgagcgcggtggctcacgcctgtaattccagcactttgggagaccgaggcaggtggatcacgaggtcaggagttcgagaccagcctggtcaacacggtgaaaccctatctattctaaaaatacaaaaaattagccaggcacggtggcaggcacctgtaatcccagctacttgggaggctgaggaaggagaatcgcttgaacccgggagatggaggttgcagtgagccgagattgcaccactgcactccagcctgggcaacagagcaagactctgtctc

SEQ ID NO: 3936 - DNA, 473 bp, Homo sapiens
caacagatatgcaagagcaactacccaggtgacggagatctcatttacatatgtcaaattaagtccccacgttttaaaaagatgccagaaatataagtggattttaagtaggtcaggaaaatctactcaggtttagaaaggcctctcagctaccagacaagtgattatatcccaggcagctcttgaaagccagaaactgccatgctgtgctgaataaattcttctcaatgacctttccatgacaactttctcatttcctataatgtggagacaattaggtgttaaattacgtgtttgtggagcaaagcagcaacctttgaagcagaggttttattgaagaatatattgggtgaatgtgtaaaaatagctcctaacaagtaatagagttgtacagtgtccagctccttaatttaacaaatgagaaaactgacgtctgaataacttctctaacttatcgagtgcaaaacagcaat

SEQ ID NO: 3937 - DNA, 607 bp, Homo sapiens
gttttagaaatgagaaatgactttccttcttgccattaaatgttttgactgcatggatcaggaggacatttaattgactaaacattcaattaaataaggtcttttgaggccccctctctctgaatgaaagtattttacacaaattgtggttttaatcaggacacatgggtgtctgacctgggaatgtttgctgacaagctcagggtctcattggccccactggttctcctaattcagaaactattaatagtgcaaagttaattaaactggtagcatattataaatgcagctgttgtaatttctgagtcaatctgatatgtcagtgtggtatattgcataaagtctcagatttggtatctgacaaccttggattaaatttttatctctagattttaggaattgtcatttcctaatctatataattagaattattataaatataagagaaaaaagtgtatcttttaaattttcttattaatatgagtatagatatatctattagacatttactggtacccttgtctcccttctcgttattattctcacaacaattttaatctctcttggccaagtttctaggcaaaaaaatcatatgcctttgggccca

SEQ ID NO: 3938 - DNA, 520 bp, Homo sapiens
tcagggctgagggaggctggctttcttagctcccccagcgctgggccaggcagggtcacaccagctgtaacaaagagaaaaactggtgactgagacgttctggcctgtgggctctgcgaacatgtgtgtccccaaaacaaagcccgccacaggctgcctgttcttacacaccctgggagggcccccaccagactcccacagggtatgcttgactgagtctaaaattacctcttttattttctggtggagaagaattgaacattgagaacggcagtggtcaatgtgtgtggaaagctagatagccttaagaaaaatcattgtgtaagcctttcaggtagctccctaagtataggaacctgggaagcagattaaacagatgtgtatagtaaatgaggtcctgttttccagcatttgagttccctttgcagtagtggctggtaactctggtctgtggtctgagcatctggttttgtaaataaagttttattggcacacagccaccttcattcatttgcatatt

SEQ ID NO: 3939 - DNA, 88 bp, Homo sapiens
ttatgacatgtcacattgacatcatgatcacttctctacagctttgcacacttagaccttaggatttatacttttcactgagttcttt

SEQ ID NO: 3940 - DNA, 512 bp, Homo sapiens
ggtttattgaagccttacatatgggcagactagtggcagtgggctggacaggagaactgctactgtttgtaaaaagcatgcagtttacatagcattttcacttagtatcctctacccgggaacctcaacctagcaacctccatttaaccctaaataaagggccttgatgccctgtgtgccctgcattccaaggaatgggccaagggtttagatgaccctcatagataaggaatgaggctccaggctggccactcctggatttcttagcttggaactccaaaaccagcactcttcttagaccacagggccagtctcagggtatgtttaagttattgctgtcaggtgcatctgccatacactgtgtgtttgtgtgtgtgtgtggtgcatgtgcgtgtgtgtgtgtgtgatgtgctggagttgctgttgtgctgagtgggagagctcaacttcattccttgggtgacaagggagaagatactgatgggaggaggcgaatcacaggtttgcatttc

SEQ ID NO: 3941 - DNA, 519 bp, Homo sapiens
ggaaagaaagggagaaggggaggagaagaagaagaaggagaagaacaagaggaggaagagtagggaggagagaatgggatggaagatgaggagaagaaggagaagagaaagagtgggaagaggagtgaaaatgagaatagtatactagaattcaggtgtggagagggggtgggggcatgatgtggtgagagcagggtgtagcttagttgaggtctggacagcttggttgacaaggcgagaattcagtcaagaattgaaggattggtagttaggcaaactgaattgtatggaaagaacatttcatttcctatcgtctacccatgacctagaacagtgcctgatacacagtagctcaatgaaaactcactgaatgaatggaagtgcaggcaccatctgttgagtcctgttctttgttcacagactgacatgaaaattccacattttatctttgttcagtttccaactctcctgtgagcaaatcgataaacacgaacacataaacccaatgatcaaatactt

SEQ ID NO: 3942 - DNA, 471 bp, Homo sapiens
gaggcggggatgctgcggctccgcagcgggctgaggcaccttcgggcaacacccaatactcggggctccgctcggcttctttgcgccgagatgcctaagaaggctggtgcgacgaccaagggtaaaagccagagcaaggaaccagagagaccacttcctcccttaggtcctgtggcagttgatcctaaaggatgcgtcaccatagccatccatgcaaaacctggctccaaacaaaatgctgtaacagatttgacagcagaggctgtaaatgtagccattgcagcacctccatcagagggagaggctaatgctgagctctgtcggtatctttccaaggtcctagaactcaggaagagtgatgtggttttggataagggtggtaaatctcgtgaaaaggtggtgaagcttttggcttctacaactccagaagagatcttggagaaattaaaaaaggaagctaaaaaaaaaaaa

SEQ ID NO: 3943 - DNA, 76 bp, Homo sapiens
aacagccacctccaccacagcaataagttcattcttaaaagtatttgtttcaggccaggcatggtggctcacgcct

SEQ ID NO: 3944 - DNA, 543 bp, Homo sapiens
tctgcacactccagccacactagtgtcaattcagtcccacaaaagggccaagtcctcaccttccaaaagtgatgttcactatatcggaactcaacatccctccatggtccctaggatggtcactttctaacatcttcaggtctcagcaaaagccttacttcttgaaggaagcctcctctgattcccttggaccaagttaaacttggacacctagaacgcagtacaacccttcaggttgtaattattatgtaattatttccttccaagtatggctttcccactgtcttaattccagcaagacggatcacagtctacctacacttggctgacagcgggcatctaatgagggtaccacagtggactacaggtataaatactactgtgcacactacaataaaaatagtacaggccgggagtggtagctcacacctgtaatcacagcactttggtaggccaaggtgggcagatcacttgaggtcaggagttccagaccaacctggccaacatggtgaaatcacatctctacaagaaatacagaattag

SEQ ID NO: 3945 - DNA, 596 bp, Homo sapiens
tggccaccatgcctggctaacatttttttttatcttttggtacagagaggggtctcactttgttgcccaggctgttcttaaattcctggcctcaagcaatcctcccacatctgcttcccaaagtgctggcattacagatgtgagacactgtacctagctgaggaattttttgtaaagacatttcaccatatgggcccatgggcagatggacacccctgagggctggtctcactgagaggtatgtagaaagttttgagctcaaatgccaatattgctattcattatgtgaccttagataagtcccttaaacttcatctataaattgggagtcattgtatcaattccagagttgtcaagcttatcaaaacaatcaattgtatataaaatgcttaatgacctgcctgacaccatgctcagcacatactaattccctgttctttgattgttgacaacctggaatactgtgttaagaaagagtttgaagctagacatgggcctgggatagaaagaactttatggttgattagcacggtttgcaatgaacttgagaaggaaggggtaacatagtggctcaagacagcattcaactgaatgcc

SEQ ID NO: 3946 - DNA, 531 bp, Homo sapiens
caagaaaattgggtacctgaggaacaagggtaggagggtcattttgtatgtttcaaataccgtatattttgatttatgtactatttgaatgtatttcccattaaataacactttgaagatgtaatcagccaaatcctgaaggtaggaaattctacaggataaattatctggtttcttcaacaaacaactcaaaaaagagggagagcgacgaaatgttatagacttttaaagatgtagaaaatgtcaaccttaatatatctaccttatttggacattttgatccagatttgaacaaactaactgtaaaaaggcattttggggctgggcatggtggctcacgcctgtaatctcagcactttgggaggccgaggtgggtggatcacttgaggtcaggagttcgagagcagcctggccaacacgatgaaacccagtctctactaaaaatacaaaaattagccaggcgtggtggtgcgtgcctgtaatcccatctactagggaggctgagggaggagaattgcttgaacccgggag

SEQ ID NO: 3947 - DNA, 571 bp, Homo sapiens
gacctgctacccaggattggaagatgatgttaatttttccatctttactataaaacctagcagttcaacagccaacaatagcaactgaataaaactaaaaattggagcggtcaacttcatgagcaaactggacggcaggcttgttatcagggggtgggttggtaggtagcaaatgaaatattgaataaaagctatggtccaaaagccacaaatggaaggcactgaagacattaccaagcagggttgatgggtgggcccacacaacatacatatctatagacaaatcaagtgaagcagtcattctctcagtcttgctacaagatatggtaggtggccaatgtcagtcctgctaatatctgggccccaacagaatacattggaaatctcaatctagtctctttaaaatgaagccaatccactgccttcaaaaatcacacctctgggccaaacatggtggctcacacctttaatcccagcactttgggaggcccaggcaggaggattgcttgagcccaggagtttgagaaaagccttggcaacatactgagacctcgtctctaaagaaaaatac

SEQ ID NO: 3948 - DNA, 596 bp, Homo sapiens
gacttttattcttgggcctcaggagtttagattttgtgtttaactactttccaagtagggttaattattatttatggcttgaagattttttagatgagtcaaaagaattcttagaatatttcatgagttttagacatacctaccgtgcttttctttcttgactatgtaaaggtgagataaaatagaatgtgagctagtcctaccttaaatttggaatattaataagatgacaaccagcacacagagaatgaatctcacaattctattcacaaaaccacagttcttaatgtctatatctggatcattatttaaattcttcccatggtcattttgacagcttcctgatatattaagctatatatttctgtagccaacttttatgcttccatagaaagaaatttagacaggctgggcttggtggctcatgcctgtaatcccagtactttgggaggctgaggagggcagaacactgaggtcaggagtttgagaccagcctggccaaatggtgaaacttcatctctactaaaagtacaaaaattagagggcatggtggtgcacacctataatcccagcaactctggaggctgaggcataag

SEQ ID NO: 3949 - DNA, 502 bp, Homo sapiens
agaacaggacacgctttgatgaacactttgatctttttatttttaaagaagagtaagaatcatctttgattcccttcatctctcacaaatctggtcatccgcaaggtcttgtgaatttgaacacataaatagttctggaatgcacagccctctacctgcctgaatttctgccctagttcacctctctgactacctcaactccagagttatagcctcctcctgaaatacctgacctctcatatttcctttccctattaatgtcacagtcagagcaacaatcttgaacatactatctcattttttattctgttcataaatgttcattggccatcactgaccttgagactgagtccaaatatccattgtgttgctctcaagactctgcaaagtctgattgcctctctccccatgagcccaccttccagacacacgctcatacatgcctatgcacacacatacatgtgcacatatacttaccttcacatgcacacatgcacacaca

SEQ ID NO: 3950 - DNA, 528 bp, Homo sapiens
gtaaacagggctcagactaaatgaaggcaaaagtagagacactaatagtgtaactattacacggtgagtggggtggcaagagatacgatctgaatttgatgaaacaatatcaaaaaatcataagcatattatttaaaattcaaagaagtattatgaaagaaaactcaaaatagcaatattaattatattagaaggaagaaggagagacaaggaaggagtataaaggagctaaatcctcatgcatgaccgccagaaggcaagagcaatgtcaataatggtggctgggcgtgattgctcatgcctgtaattccagcactttgggaggctgagggggtggatcacttgaggtcaggagttcgagaccagcttgggcaacatggccaaaccccatctctactaaaaatacaaaaattagctggccatggtggtatgtgcctatagtcccagctactcaggaggctgaggcaggagaatcgcatgaacctgggaggcggaggttgcagtgagttgagatcacgccactgtact

SEQ ID NO: 3951 - DNA, 439 bp, Homo sapiens
aaataggatataattaaatatcagaaaattaaatggtcctacttgcagaccataatgtatgatttaaatattatacttagaaatttacaagaatgtgtgaactgaactgataagctaaagaatttctaggttaaaaaaaatcaaacgtacccacctattcaatgaaaaattgtcttactcttggggaagagcttgggacaatgatcagattccaccatctgcttgcaaccaagcccgtgcaattactagaaaatgttggatactggccaggtgcagtggatcacgcctgtaatcccagcactttgggaggccaaggcaggcagatcacctgaggtcaggagttcaataccagcctcggcaacatgacaaaactccatatctactaaaagtacaaaaattagctaggcatggtggcatgcacctgtaatcccagctactt

SEQ ID NO: 3952 - DNA, 86 bp, Homo sapiens
aagaggaaattgagggcaaaaaaagagctacaactaatagagaaaaaaatgataaaatggcaataagtcatttcttattaattact

SEQ ID NO: 3953 - DNA, 520 bp, Homo sapiens
cagccccatgattcaattatctccacctgggaccacccttgactcatagggattattacaattcaaggtgagatttgggtggggacacagccaaaccatatcaggatgttccccagtcctgtgtgctctgaggtcctcaggtgtgggtgggcagtaggttcgttatgctggcaatgcaggttagggacaactaatgatatgatgtggactctcgtaggtcagatccttcttcccagagacagcagaagccattgaagtttttatgttgcctttcttggtcccaagggtgaaggaacataggagggcccagacagtggcaaaacaagcagtgtctctgaggagagaaggtcaggaatatcaaggcatgagctgatcaaaccctgggctcggacttcaaatcctttgtggaacagagtgttcacataaagacaaaaacaagccaggcacggtggctcatgcctgcaatcccagcactttgggaggccgaggtgggtggatcacctgaggtctggagtttgag

SEQ ID NO: 3954 - DNA, 565 bp, Homo sapiens
gactgttaaagtgacagtcctccaactcccaccctttccattacaccagactgatccagttggtgagaattcctgccatgaggtcagtcatacttactgggaagaaattcaaaggtgtcagaaagagatagcttatgaactgtgactcatctaaaacatcccaaaatagtattatccagttcaatcacaccaccacatttgttagaactggctatgacaacattttatgctcaacgtatttacaggtgttccaccaaatcacgtaacaattgaaaataaatttagaaaatgttgaatgaggctaggcacagtggctcacacctgtaatcccagcactttgggaggccgagatgggagaatcacctgaggtcaggagtttgagatcagcctggccaacatggtgaaaccctgtcgctactaaaaatataagaattagccaggtgtggctgagatcacgaggtcaggagatcgagaccatcctggctaacacggtgaaaccctgcctctactaaaaatacaaaaaattagccaggtgtggtggcaggcacctgtagtcccagctact

SEQ ID NO: 3955 - DNA, 641 bp, Homo sapiens
cccatcttgattatactttttcctgctgtctctttcttcaaattctggatcttatcttctatcatatccttcttatttacaaattactacataagtgcttgacttttaaaattaagaccacttaaattcaatgtgtatttttagtcagagtttactgtcattccatgtccacttaggttctctctctcctcattttctctgtttattaatatttagggccagtcaacagcacaaattaatgggaaattcctcctttggcattactcagccctttgttttaatttggttagtattaaattattttagtagcaaagttatcattcagtggggactaaagaatttaagtgctttaagttttatacttcctctagataaaaatatattgttctctttgggaggctgaggccggcaaatcatgaggtcaggagttggagatatcagcctgaccaccatggtgaaaccccgcctctactaaaaatacacaaatcagctgggcatggtggcagcctcctgtaatcccagctactcaggaggctgagtctggagaatcgcttgaacctggcaggctgaggttgcagtgagccaagatcgtgccactgcactccagccctggcaacaatgcgagactccttctaaaaaaa

SEQ ID NO: 3956 - DNA, 589 bp, Homo sapiens
ttaatatgttctttacatcaatcctttgtcactcgtaagatattttaaatatatttcctagtctgtgacttagtctactaagtccgccactactccccagtctgtgagaaggcacactgtttggaaaattttttgaagcacaggtttacattttaatgttatcaaatttattaatcttttcctttataataggcttttttttggctttgcctttctctacttattttaaagcttatatattttaaggtttatacatttcccttgaattatgactgtggcttgcttcagtttctcattcaattctaaatctgaaaacctagataaaatacgtcaactcctaaaaatgtacacatattggtaaaattggcataagagaaaatctgagtgaacaaagacttaagaaattaaaatggtagttaaaaaaagaaaaacccttcccttcctaaatctcttggctcagatggttttgtacagaaggccatcaatctttgaaagaatcattcattcacatctttacaagttgcttcagaaaatagaaaaagaacaaaacaatgcccaacttgaggctagtgcaatcttgattccaaaa

SEQ ID NO: 3957 - DNA, 634 bp, Homo sapiens
agcaggcaaagccagctctctgggcagtgtattcacccaccaatgtgcatgccagagaagaaaggtcacagatcacagagtgattcctgcccattaggaagccatgacccagtataccccctacagcaacttcatcactgggaaacagggtaaggggaggggactgagagtttctcctccctatagtaagaatggtagctagcatttactgaatacccataggcaggcctgtctagctccgaatctcatgctcttaacttctctgctaggaggcaccaaaaaggaaggcagtgcaacttctcagatctaaaagacaagaacatatggccaggcatggtggctcacacctgtaatcccagcactttgggcggctgaggcaggtggatcacttgagttcaggagttcaagaccagcgtgaccaacatggcgaaaccctgtctctaccaaaaaatacaaaaactagctgggcatggtagtgcatgcctataatcacagctacttgggaagctgagtcaggagaatcacttgaacttaggaggcagaggttgcagtgagccaagatcgcaccactgcactcctgcctgggggacaagagtaaaactgtctcaaaaaaaaaaaaaaaaaaaaaaaattt

SEQ ID NO: 3958 - DNA, 569 bp, Homo sapiens
aatgtaaaaactaaggcacagagtggtagggaaaggattgccttagacaaagctaccattttaagttctggaccccagttgaattgtccacctggcgagagttttgcagggtggaaacaatgccttcagccagttatgaaataagcaaaagtctgttccctgagaggagacatctgcatgaaacctacaggcatgtgggaaccagatcttaaccttggtttcaatgcaagtatttgagaaattactgcaaacagcagtaactaccagttttgtcttttattattcagctttcttgttaacttcagagaagtgcaaatgtgaaatggacatcgccccatcccagcagaggaaaacataacatacagctaacagagacaaagactttctattgccaggaacaatggccaacactcatcactcttggtaaagacagtaggaaactgggattcaaacacacagtgaagaatttcagttagatgcaaggaagaaatttccacagggactgtgagtgataatgtggtatgttgcaaagaaaactgaacttaaatatagaacactggattttagtt

SEQ ID NO: 3959 - DNA, 362 bp, Homo sapiens
gtctccacgtgggcatctggtcttgttcattcgcagagtacgattcctgcctccgggctcagtcagattctctaacatctcccacaggcagttctttggaaatctaaacactgactcacaaatgagccatgtatttcattctgtcctgcactagggagggtgctccttaaaagagcgggccgtaccgggcatggctcacacctgtaatcccagcactttgggaggctgaggtgggtggatcacttgaggtcaggagtttcagaccagcctgaccaacatagtgaaccccgtctccagtaaaaacacaaaaattagccatgtggggtggcgcatgcctgtaatcccagctacttgggaggctg

SEQ ID NO: 3960 - DNA, 541 bp, Homo sapiens
aacactctcaagatttccaccaacaacccccactagagatataattgcttctcatccacagtggtctatgacaaaaatttactatatgcaaaagatgtgcctaagaaaatgtagaatttggaaaatcaaaaacaactgtgttaggcaaaggtgacagtaagcaatatctgcatactgaatggttggacatgcaccagctgatttcatcttcctgattcccatggtgagggaatctaactgggatagtgaggcatctaactgggaaaataaggtcttagaataaatacaaggaaaaaacaataaagtagagaaaattagtgaatcatcagaaaacctaaaggcacactgctctctacaaaaacatcaggaagtctccaaaaagaaacaagcactataatctggaatattcaaagaacaagagtaatattttttcaattaaaaatttgaacccatacccaaaaacacagaagtgctggaattttgagcaatctctatctcacagaaggtagaaaagccctagtaacaaacattgacaatatga

SEQ ID NO: 3961 - DNA, 497 bp, Homo sapiens
tagatttagaaataaggaaagttaagtgatactgtaactttcctaaggccacacactgaaaataatgtagccagaatttgaatactgattccaagccctcttaaacataaagctgtattgaatgggtctgtaatttctgacttcatctcttctgtatcttcagtggccagcgtggtgctgggtacatagtagacactgtacatttttgtttaataaaacaagactctgtgtcattatttatttgctttttgtctataaagacaaacgctgcccacccttctttcaaataccttttcaagttcactttcttccacaatgctttccacagctaacctctccagctcacttccatttcttcctagctcatggtctgtgctagaagcttgcaactaatgctctacttccttccaacacttatgtatttgtcgtccttctttttcatttatttttgctcatgtggtctcattaattcttaaactttgagttctttacactac

SEQ ID NO: 3962 - DNA, 387 bp, Homo sapiens
tatttatttttgtgagatagtgatatattcataattttatctactttttcttcagtatcatgtaagccccatgaaaaaataattttgtttgtttctttgttttattcactattccttccctactaatttgaaaagtgaaatgtcaataaatacctccagtcaataaacacctgcagattaaggaatgtatgggacccatggatctctttcatgtcagttcattatgctgggattctgtccattgttcaggatagagttctcacctatatagatttctacctgcaagtgagtttctgctacatacactatctttttccataagggatgataaaattatcttctatctcatttttaggtacatgttaattcctactcagcctcccacca

SEQ ID NO: 3963 - DNA, 540 bp, Homo sapiens
tgtgcctggcgcggagcaggtgctccctaattgctggctgttactattactgttgctgctgttgttattattgagagactaagaagcacattggaaaccatgaaaacccagagatgcaaattttaattgccagagagagatttttcaacattttcaatgtgctgtcatgaagtatgaaccatgcaaatgtaggtttgactacttcgttttgtggaagagccacctacggctaagagaggttagaagacttacctgatgttgcacagtgacaaagggtggagtccaattcaccagaacccaggtctgtctcctgaatccaggatcgtgactgctggtttggccgtgggggctgagaggccttggtacagtgggcagacgggaggtccctgtatatgaagggcagaagcttggggctgcacctgggaccctccaacatcattgggagaaaagcctggagctctcaagctctgacctggcacagtcaggcagacacggctcacaaagaccaaaataaccagaggcatcattaaggatgtcttc

SEQ ID NO: 3964 - DNA, 632 bp, Homo sapiens
ctcccacatgtgtgggggtgacacatgctcatgaaatttacctcccagatatgctttcttggtgttacaaaaatgtagccttcagccttaataagagatacacttaagaattcaaggtattggcccggtgcagtggctcacgcctgtaatcccagcacactgggaggcctaggcaggtggatcacctgaggtcaggagttcaagaccagcctgaccaatatggtgaaaccccgtctctactgaaaaatgcaaaatgagccgggcgtggtggcacatgcctgcaatccaagctactcaggaggaggctgaggcaggaatcacttggacatcagcgtctttaaaagaaccttattagataagcagcccacatctaactgcattctaactggatgccctgcacagttgaatctagaaggatggttctcagtgctgcattcctctggggggctgacccatgcccagagattctgactctattccacagtcaggactgagagcaactctcacagctaatgaatgattatcaaaatgaaataatttatcataagcagaatactaaagtaaagctgtgaaaccagatcctcctcaaacaggcgaaagaaagagagtcttcagaattgcaaacctggcat

SEQ ID NO: 3965 - DNA, 436 bp, Homo sapiens
atgtcccttctccctccctttgtctcaccattctgtccacagcagctggcgcctgaaaggcatgcagtggaccctctgcattttcatttcacagtgatctttctccagatatttctcatgtgatgtctgtatcttgctcttacctcttgagactgtgcatgaccttaatgtaatgatcttttgaggtaacacacacataccatttttctgcatcgtaagtttcaggggatggatttttcctatatattttcacattcttcactgcatcagaagtgatgctgagtatatagtaggtgctcagttgtttaaaggacattgaagagagaggagtcaaggtaaccaaatgcacaaggaagtaaagcaacatgagtaagagccagcagaatcaatggaaggcagaaatagacccacacaggcttcaggtgttaggattatc

SEQ ID NO: 3966 - DNA, 421 bp, Homo sapiens
tatccttcaaatttgaatctaaacctgttatccaataacgacagtaaggaaacatgcgtcttccttgcttggtcagaatcatctctgtgcttcgatgatagaactcattccacatactattgttatcgagggtaacagtgattccacccacagtacaatcagctgtaaggcaaatcttccctttagattttactggtgatgacacactactagccaaagcacaggcatcctgattagtaaccaaaattccttgatcagttttgccatttcctggctgctttaagatgacaaagaaggtaggtgctgctcctgccactgttccaccatcttgattagccaatataatctgctgtttctcctccatgatttcagtaggaaactcagtagtaagacaactgtaatcaccacatagtcacaatgg

SEQ ID NO: 3967 - DNA, 532 bp, Homo sapiens
tttatataagatgttcttaatttaagaaacaaacaaaatgacttttttcatatgtgtctggcatgcaacataagcaaacagacacagagtttggtaaggatttatttttttatgtcacattttgggtaacaagataggttctctctgtattctattctataatttagtaaatgaaacttgtaacacttttgtctgtcagaaaataaaaattaattgttcttaaaaggtgtatatagtcagccgggcgtggtggctcacgcctgtaatcccagcactttaggaggctgaggcaggtggatcatgaggtcaggagatcgagatcatcttggccaatatggtgaaaccccatgtctactaaaaaataaaaaaaaattagccaggtgtggtggcacgtgcctgtagttccagctattcaggaggctgaggtagaggaatcacttaaacccaggaggcggaggttgcagcgagccgagattgcaccactgcactccagcctggccacagagcaagactccatctcaaaaaaaaaaaa

SEQ ID NO: 3968 - DNA, 596 bp, Homo sapiens
tccttgaaaagtgagaagtctggaaggggtggctactgacatagtgaagcaactagttcaattctacaacttgacagctacccctgtgccaggctatctacgaggatacttagaatgcataagacattccttcaaggaactccaggaacagaggcctgacatgttgcaatgtttagtgtcaagcagtgtactagagacacattatcacactcaaacctcacaacaattctgtgaggtaggagttatcactccccttttatagatgaaacagaggcttagagtgattgatttattgaaagtcaaacagccagtaaatggtgtagccaggattccaaacttgctgtctcactgagactgtacttaattactggagggaccgggtgtggtggctcattgctataatcccaacgccttgggaggctgaggctggtggatcacctgaggtcaggggttcgagaccagcctggccgacatggtgaaaccccatctctactaaaaatacaaaaattagctgggcatggtggtgggctcctgtaatcccagctactcaggaggctgaggcagggcaattgcttgagccgagatcacactgcact

SEQ ID NO: 3969 - DNA, 429 bp, Homo sapiens
acttcatataaacatctgcatttcatctgcaaaacgcctatccaaataaggtcacgcttacatgtcccaggggctagaatttcaacatatcaatatgttcaatccataacaatgcaaatagtcttaaaggctgtcactatctaaatgtactcagtgtgattcaagggaccatgtctctgtagaaattctaatgcacaatccctcaagatttggcaagaagtattattctctgttacctacatatggaagaattagggtctgcacagcctgtgttctcattttattacaggctttcttggttcattgtccagaataacttatctatacactttaaaattttggattacctgttttgtttttttaagtcagaaatagcattcctggatatttggaaaactctgcctatttatcttttcctctccagtgttt

SEQ ID NO: 3970 - DNA, 364 bp, Homo sapiens
ttttattctttatattagatattaactcacaatcagtgctgctgctttgtaagtttctacttcctctgtgaaatgtgcaatatcagcaatgtatgtacactgaaaagagggagtttttaatttattgaaatatggtagcaggctgggcgcggtgggtcatgcctgtggatcatgaggtcaggagctcgagaacagcctgatcaacatggtgaaaccccatctctactaaaaatacaaaaattagctgggtgtggtggcacgtgcctgtagtcccagctactcaggaggctgaggcaggggaatcgcttgaacatggaaggtggaggttgcagtgagctgagatcacgccactgcactccaggct

SEQ ID NO: 3971 - DNA, 468 bp, Homo sapiens
caaaccatggaaatattaaaagtaagagctatacaagctggaatgattataggccatataaagtgaatcacccaatgcctaaggaatgattgtggccatacttgagccacagcgacagcactttgctctttttgcatcctaataataacacagccatacagtgctttactaaacaatactcacatatgttatttaattcaccctttcaacaacattgtgagtaattcagggactgttttacacagattttacagacaagggaactgagaattcaagagattaaacaatttacccaactgtctcaaagtcccttaacttcagagctgaaactcaaatgagagactacataaagtgatgtaccttgcagaataccaaggggacatggatccaagtgtgtttgctgggattgcattcagatagatgacagattgattaaaaagtcaggaatagcagaaattgactagagaa

SEQ ID NO: 3972 - DNA, 302 bp, Homo sapiens
gttttttgtacctataggcacagtaccacagtctacagtcctgattatttgtaagaactcaatatataaaaaagaaagtataagaaatcaatgggaaagcatgagattatacaagaaatgatgttatttacttacatggagaatactagtttagcagttttaagctatcacgtatcttaaaaataaatccagggccaggtgcagtgactcacgcctgtaaccccagcactttgggaggccaaggtggaaggatcacttgaggtcaggagtttgagaccagtctaggcaacatagccagaccc

SEQ ID NO: 3973 - DNA, 466 bp, Homo sapiens
aatgatttggaagagcaatctgcttatcttgttttctttggggtacagaaacagtttgcttttccaatgcattaggaaccaacctctgctctttcttttatctttgcttgtagactgggcaacttttgtctttcttatagtaacttgctacacacaccaaggtttagctaacatccaaccttctggctttattcaccttctttctttagagctactggtatatggtctgctttaagagttattataggcaaaaagtttttcaaatgttttgccataatctaacaggtcactgggtttcagcccggtgcggtggatcacctgagttcaggagtttgagaccagcctgaccaacatggagaaaccccatctctactaaaaatacaaaattagctgggcatggtggcgcatgcctgtaatcctagctacctgggaggctgaggcaggagaatcccttgaaacccgggag

SEQ ID NO: 3974 - DNA, 655 bp, Homo sapiens
gtttcgattaaatatcacacttcatgtatgaataattataaagatagtcaaaattctgaatactgttattcttcctctagagataatttgttttttgtttctgccatgcagttaggctaggggcagattactttaaagggattcaaagctgggctttagccatttgaggtttcagctgtttctgcttcaccctcattgttagggtatagccatttgaagataccaattgaaaaatctgctgcatatctacaactatctgatctttgacaaacctgacaaaaacaagcaatggggaaagcattccctatttaataaatggtgctgggaaaactggctagccatatgtagaaagctgaaactggatcccttccttacaccttatacaaaaatcaattcaagatggattaaagacttaaacgttagacctaaaaccgtaaaaatcctagaagaaaacctaggcattaccattcaggacataggcatgggcaaggacttcatgtctaaaacaccaaaagcaatggcaacaaaagccaaaattgacaaatgggatctaattaactaaagagcttctgcacagcaaaagaaactaccatcagagtgaacaggcaacctacaaaatgggagaaaattttcacaacctactcatctgacatat

SEQ ID NO: 3975 - DNA, 599 bp, Homo sapiens
aggggactcaggattggcaacttggcctgtgtccagccttgctggttggagagctcagacctccccaaccccaaatcctggtctaggagaagcagaacgatggagtgggtttctatgtgagtctccagcagctgcccctgttcagttcagttcagttcaacttgattcatttatgttgaattcaactcaactccaaaggttcaggctagagtcttccttggcgaaggattgtcacgattcctttcttacagctctcagtcctatctctgaagcccagggcactctgtgtgcaggaggcacgtaatgtttagaaagagaagtggaggccgggcgcagtggctcacgtctgtaatcccagcactttgggagactaaggcgggcatatcacgaggtcaggagttcgagaccagactggccaatatgttgaaaccctgtttctactaaaaatacaaaaattagccagacatagtggcgcacggctgtaatctcagctactcaggaggctgaggcaggagaattgcttgaacccgagaggcggaggttgtggtgagccgagatcgcgccactgtactccagcctgggtgacagtgggagactct

SEQ ID NO: 3976 - DNA, 347 bp, Homo sapiens
aagatagggtggttgactgagtttacaggtatggaaactgagatgcaggcttagtgacctgctcaaggtcataggcttagtaaatggtgcaaatggaaaccctcatatgactccaaacccagttctgtttctcttataaaattgtctctatgtccaaatgaaggatatgaagactaaatgaaggaattcttttttttaacaaaagaaaaacatgttaatgtgtatctgtcagacatggtaataaggaagttctggagatatgggggagtttgtaatttttagaagctatgggtaagaatgtactcagactttacagagagttagagtgctttaaacaagtgcttctc

SEQ ID NO: 3977 - DNA, 480 bp, Homo sapiens
atctgtaaagagtggcaaatatatattagattttagtctatgattaaaatgatgctataaaaccaaaataaattaaagatgtatcaaagatacacattgaaattgtgaaattgaaattgtgacaggacaacataaactattataagaaagactggttaaataattttacaatttcaaagtacggaaggcatttcaaaagtttaacctaaaaacacaagatcataaaatagaagtctaaaacatagattctacaagacttttataatcattattttaatgtattatttattttatacattttgttgaaggtataaaaatatcttcaacaaagaaagtacgggaaatttttgcaaaacatatgataaaccataagctgaattagcaaaaaattaaatgcctgttagaaaagatgttaaaattcaaatataatttaagacaagcaaactaaccaaacagaaagaactttatatgaataagcca

SEQ ID NO: 3978 - DNA, 544 bp, Homo sapiens
cttggaaccaactcaactgcccatcaatgatagactggtaaagaaaatgtggcacatatacaccatggaatactatgcagccataaaaaagaatgagttcatgtcctttgcagggccatggatgaagctggaaaccatcatcctcacaaactaacacaggacgagaaaaccaaacactgcatgttctcactcataagtggagctgaacaatgagaacacatggacacagggaggggaacatcatacactggggcctgttgaagggttggaggaaaaggggagggagagcattaggacaaacacctaatgcatacagagcttaaaacctagatgacaggttgataggtgcagcaaaccaccatggcacatgtatacctatgtaacaaacctgcacattcagcacatgtatcccagaacttaaggtaaaataaaatttaaaaaaagagaataatgaaatctgagagatgccacactgaccaaggaatcaagtttggcattgccaaaaatttggcacgctctcttatgagcctcacaatgtgatgta

SEQ ID NO: 3979 - DNA, 447 bp, Homo sapiens
gttggaaaaagacccttcacctgaaaataaaaatttgcctaggtaagttactgatatgcaccttttctactgtaggataagttatgaattcccctctgcctcttgtttctccaagcatgaaattctcaagcgtctcatcaataatttgagccaagaaaagataatgaagaattcctggccgagcccagtagctcacgcctataatcctagcacttgtggatcacctgaggtcaggcattggagaccagcctggccaacacggcgaaaccctgtctctactaaaaatacaaaattagccggtcatggtagcgggcacttgtaatcccagttactcagtaggctgaggcaggagaattgcttgaacccgggaggcagaggttgcagtgagccgagatcgtgccattgcattccaacctgggcaacaagagtgaaactccatctcaaaaa

SEQ ID NO: 3980 - DNA, 453 bp, Homo sapiens
ttttggctaagatcaaaattagtaacaaaaactacagagtttgagaggaaaagattatggcccgaaaattccatgcccaattattctgtatgagggcagagggaaatatttctcaggctggcaaaggctcagaacagaggccatccctgttctcttgctgagaaaattactctaagtcactctacctgagcaaaagataaatcaatataaacaactcaagaatgaggaagttgtggtaataaaggattgatggtgtccctttgggcattgtactttttagtctgtattgagttctttccactgcttgactaatagtggggtatatggcatgtggcaagctcttcctttttaagagcaaaagacatcgcacttgtaaaacaggacaaatggacttgtcccctcccatcagccccggagggaaaaccaaaggagaattccatcagaatacactca

SEQ ID NO: 3981 - DNA, 515 bp, Homo sapiens
gatttaaaattcacagtaatgttttcatgaattcatctgtgaataacattttatagacaaaatgtctgcactaggacaagagaaagatgtataattaccttgttctaaggtaccgccattcattgttattattttaaaatacgagtgtcgactgatgttaaaacacaaaatggggccgggagtggtggctcccgcctgtaatcccaacactttgggaggtgggtggatcacctgaggtcaggagtttgagaccagcctggccaacatggtgaaaccccgtctctactaaaaatacaaaaattagctgggcatgtgttgcgcgcccgtaatcttagctacccgggaaactgagtcaggagaattgctggaatctgggaggcggaggctgcagtgagccgagatcacaccagtgcactccagactgggtgacagagcgagactctgttcttccccccaccccccccaaaaaaaaaccacaaaaagggataattggccgggcacagtggctcatgcct

SEQ ID NO: 3982 - DNA, 549 bp, Homo sapiens
agtgtgactccatctcaaaaaaagaaaaggacaaagtatattggtccaaaaaagaagaaagaatgaaaaaaaggacaaagtatactggttagtatcgtaacagtgagatagtccccctttgagattagaaaataacagtatactcaaagtaacatcaataagaaccaacataaaatagacaagattcactatctacaaaagtaatctgcaccaagtagcaatgtatgagcatgtggtggagaatattgtctataatatgtgtactagaaggaagagacctcaagaaaaaggtcagagctggaaatgtagattagggaatctaggtcaaagttttgagattttaggagtcctgagagaatttaaaaagcgaaatagccgccgggcgtggtggccacacccataatcccagcactttgggaggccaaggcaggcagatcatgaggtcaggagttcaagaccagtctgaccaacatagtgaaaccccgtctctactaagaatacaaaaaattagctgggtgtggtagcacatgcctgtaatcctagctactt

SEQ ID NO: 3983 - DNA, 645 bp, Homo sapiens
taaacatgaatttgtggcctttctataaaggaagcccttcagaatatgtgaattcaccatggctctgattggttcacaggcaggagcccaagccctgagcttgggaggtggtgcttctggggaggccgtgggcaggacggggtagcagctgccctgtgggatgcggctccacttctgctccaggtccccaagaaggctgtgaaggcagggaagcctggggcgggagagaaagcaaataattccaagtcctatgtttcagacaaatgtgaattgatcaaattattaataaaagctgggcagaggagaccaatggagggaatgaggagtcttctgtgtatccaaatgttacctcaaaggttaaaaagaggctggacgcggtggctcatgcctgtaatcccagtagtttgggaggccgaggtgggcagatcacctgagctcaggagtttgagaccagcctgaccaacagtgaaactctgtctctactaaaaatacaaaacttaaccaggcatggtggtgcatgcttgtagtctcagctactcgggaggctgtggcaggagaattgcttgaacctgggagacagaggtttcagtgagctatgatcatgccactgcactccagcctgggcgacagagtgagactctgtct

SEQ ID NO: 3984 - DNA, 515 bp, Homo sapiens
cagattatgtacctcaactggtacctcccccttgtgtcataagacagttttaggcttccttatttgtatttatcagtcattttattgcaggcatggtaaaataaattttggggtctaggccattcattgactagactgctatctgtaatttatcaggttacttggacctgtctgccatcatcaagatatatggctggggagatagcaccataaaggaaacaattattgagaagataaatgacctgtgagagggctacaagtctctagagtgtgtgaggaaaggcagaaagttaccttggccaaagattttgcttgcatccatatatccagttagtttcgggcccaggaacagtgtattttcactgatagcttccccgtctttcaatttcattcttgttctcttagtcaatactccatagaaagtgcctctggccccacacttattattcctttggcctactgcagaaattagaatatattttgaattttaaaagtggcattcattgagcaacagc

SEQ ID NO: 3985 - DNA, 389 bp, Homo sapiens
aaagtttccaaacctctcacttttttagcatcaccaacctatagctcacaggaaaaatatggcctgcctcctgttttcatacagaccataagctaattatcatttttacaattttaaagaatttgaaacaaaaatggaagaagagataatgtagaccatatgtggcactcatacaaagtctaaaatatgtattatctggtctcttacagaaaaaaagtgtcaatgcccaatttagacaaaagcaaaactggtggttgatactatttccccataaatcttagcaccttagggtggttcttacctcaggaaactggtggaagaaaacaatcaattcaatagcacatggttgcagtaaggaaactcaactgttttgctttcaacacatgtgc

SEQ ID NO: 3986 - DNA, 536 bp, Homo sapiens
  misc_feature 455: n = A,T,C or G
attgttaatatgtgacacaaaattcacacaaatctttttaaaagacccataattgcaacattgccatctaaaccttactgctgaatgccaaagctgcactagctttatgtgcaccaacaataacatatacatttggaatactcctggtcattttcataaattttcattgaagaagtcttatgattggcttttttatcttgctttcatgaatttagactaagcccttgatgatgacattaaaatctgaaagtgcacataatgccagtgacacagtgagggacaccttatggaacagcctcacattaattgccagtcttaccacttggcgttcctttccaagtagtcatagctagtgtaagagccaagaaatctaggtgatggcaaagcaagcgcaatagaaaaatgaaagaaaatggtcaatctaactaagtaaatttgcagcaaatggaactcanatctcatttaaaaatatcaaccaacatccaccatttcaccataatttggtctataaaggaacacatcactaactctcattt

SEQ ID NO: 3987 - DNA, 537 bp, Homo sapiens
aattaattataaaagtagttacaagtagttacttttataattatacagctaaaaatgaatataagttatatttttactcatggttttggtgttgtcaaagctcacatttcagcataatcctttatttgctgttgagttgtggagtttatttggttcattaattattgaaaaaaacaagaagaatattaaataaaaccaacatacatggagatatatcctgtagtagaatgctttctttggctttcatgattaaaatgttaatgaagtggacaagcagttctttaataatatgaagcaataaacataagggaagaagaaggtaaaaaaataaaatgatgtgactcacccatgtcaaatattgcatacccatcaccaaatctaaaaactattcacgtaggtatattgtagtccatgtctttaacatcaattacaaccccccctttcctcaagattagccacaggacaaattagaagctgctctgtggatgctgcttctctttaaaaactggtttccctgaatcaataatactgaacttg

SEQ ID NO: 3988 - DNA, 478 bp, Homo sapiens
catgacaacttcttggaggtgctcatacaatgtttccaggtagcccctgtagtaactgtgaaaggccccatctcctaatggtgcatggcccattcgcagtgtcaagggcactgaagagagatcttaatggcatcatctaaaaattatccttaaccatgaacataagtttcttcttctggggtcacgggaagaggattccaagcagatgtgcaccagtcacttctgattgttagaacagtagtgttgctgctgctagtggcagccaaggctgatgtctaccaggcactgtaccaagcactttgtatacatccttatgtttatttcttggacaggtggcgagacttacccagccgtacaacacagccagtcatgagtgaagctgggagttgaaaccatcaaaagcctgagcatttctattaacagggagctcattagcacgtaaggcgctccacagctacctttaaagagttgcagagag

SEQ ID NO: 3989 - DNA, 424 bp, Homo sapiens
aattatatttcaatatttaaattttaatatatttagatgttttgtttgatgttgtttctgcttttgtgattggtgtgtttgggtatgtgtgtgcatttgtattggtatgtgtgggtgcaaaaaaaattttttttctctacctcttatgaagcattttaaagtggttgagttaaattaccactcatttccattttacagaggaggctattaagaaattgttaagacaacatttgctgccaaaggttaatatatacatataaacattatatacttacacatgtgattctatatatacctattcagagaaatgggaaaaaaattttttccgaaaacatagccatctgtatctgagcacagcacatttttaggtaacaaatacaacataatgaagtattatgtcttgttacatcaagagaatggtaat

SEQ ID NO: 3990 - DNA, 549 bp, Homo sapiens
tgtagtctcagctactgaggaggctgaggtgggaggattgccttgagaccagaagatcgaggtcactatgagctgtgactgtgctgctgcgccccagcctggacaacagagcaagaccctgtctcaaaaaataaataaatatataataaatataaaaaccaataacaaaaactctggcttaatctacctatttctttatactacattaattttgctgaccacattttggttttatcaggtgatttgaaccatatcatatactaattttttcagaagctattcaagtcatttcttgacaggtaactttttctccagactttctctaatgctgtgactgacatacaaaacctctgggtactgctgaacctttccctgccatctccctgcacccccatgtcttctttgtacctctgagagcatggggtacaatgcaatgctgtggatgaacaagtggatgacatgccatgtgagtggctaaattcagttctgattctgcctccattacaggggccactcacggtaactgatattaaaaaataaggctaggtg

SEQ ID NO: 3991 - DNA, 381 bp, Homo sapiens
ggggacctcacctttgggaattaattgctgacagtgttagagttacaaagtagccagtgtcacggagggaacctcaaagagacaaagggacacctcgaaggtgtcagagagacggttgtttcggacagaaacagaacagcgaagcggaaagaaaacagaccttatttctgttctgttccacttcagatagtagcagaggagacttggatttcattggtgttggttttcgtgattcctgccttctaaaatcccaagacttatttatcatttatcatcagctcagatcccaggaaaacagtccactgcacttcggtttctgctccaagtcacccattaaataaataattgaacacctgctggtgccaggcgcagttctaatgc

SEQ ID NO: 3992 - DNA, 370 bp, Homo sapiens
gtaggaagtctctgccgtattggattagaaattgagtaaaagaggcctcaggcttgggagtgcactgaagaaataaatggaatgcctttagattcaagaaaagctgtcctcttggtctttggcagtccttggtaataagacaggagaaaaggtttctttctttcaattggaaggtaccatggtatagtaaagaggacactggactggaaattggtgtaatctggccttggtcctcattctgctattctctagctgtatgaccttggccaaatcaatgaacttttctgggcatccatttcctcaccacagaaatgagagggtagaaccttaaccagaaatatgtattagaaatcttttggggccgggcacg

SEQ ID NO: 3993 - DNA, 605 bp, Homo sapiens
gtggaggtggcagatggaagacaggggggatgctgaaaagagggtgacttgaatgtaggacttagaagcctaggtaggcttctactcaacttgggggatgaactggagggaagagaagatggggcctcaagaaaagggtgagaaggaattaaaactggctgaaggaatgaacacaaggcactaggggaatcaatttgtatggatcatgtggcttaactttcacaagctgtgaggcattatttcttcttggcagcaagaaaaaccaatcagaagtcccagagaggcatgcctggaaagactcctttatttattcatcagtttgtttttcattcttttgattattccaaatgaaatttttaatgatgactgtaatgtatgcctaataaaacagaagctcaaataatgatgaagtgttgaaaatacaaagcgaaggccaggcgcggtggctcacgcctgtaattccagcactttgggaggccgagacgggcggatcacaaggtcaggagatcgagaccatcctggctaacacggtgaaaccccgtctctactaaaaatacaaaaaattagccgggtgcggtggcacgtgcctgtaatcctagctactc

SEQ ID NO: 3994 - DNA, 579 bp, Homo sapiens
gatatttgtgtgtgtaaagaattcattaaaagtggaatattccttcctgtttggccaattccttaatgaatatatttgcatttaataatagcatcttacctttagagctttcttgctcattttctctgcctttatcctaagcagtaagatttccaaggttaagaccaaaggctttgtaaaaatgtcatgggtttgtccttgtcaaaaaaaataaataaataaaacctcagaagtcttttctggcagtttacttcaatgtcatttcaagcataagaaactttatatcatcccagacatgaaatcaaaaatattgttttgtactgttatgaaagattttattctatatattttgcctttggacagacatattttagggcagttcataaagatgacattacaactgttttactttcattacaaccccaaattacaaatttatgtcttaagccttgtctttgtagaaagggttgtatgaaagcaaactccaagatgttaaatgaagcaatatgcttatttttaagaacaaattttacattattgtttgttaacgagttatatagactcatgtatacattattg

SEQ ID NO: 3995 - DNA, 521 bp, Homo sapiens
gacagaagggaggtttgaaaataaaccaatggaatatatggaagttttggagtaaatatttaaaagttcacgttgaccaattacccaagtgattccccaaggcagtaccagtctgatccttctggggtggggtgaagatttccagcaagaagggagcagtgatgctcctcctcaggggatgttaagcacccaccactcctctttggtggaagtaatcatgacatgtagggcttaaaagtagttcattattggccaggagcagtggctcacgcctgtaatcccagcactttgggaggctgatgtgggcaatcacaaggtcaatagatcgagaccatcctggccagcgcagtgaaacccagtctctactaaaaatacaaaaatttggtaggtgtggtggggcatgcctgtagtcccagccacttgggaggctgaggcaggagaattgcttgaacctgggaggcggaggttgcagtgagccatgatcacactactgcactccagcctggcgacagagctagact

SEQ ID NO: 3996 - DNA, 532 bp, Homo sapiens
gacctgccccatagtctaactctgttaatggaaatgccaattaaaagcctttccaattctcagtccaataaatttagccacatgctctagagtcctccacagtaaatgctggtccgaatacaaacacaccactttagcccaaggttcaaatgttacctcatctcattgcacgcacttagttatatcttataaaaacaacaacagcagcaaccaaaaagacacctcagctgttatgttgacccatgcacacaaaatccatcgctgctatctgctttgctatcttgagcagatctagcttaactagtaagaattatttatcaaaatagaagccactttggaaataaaactgacctgccgctctcttcattagtgtatcaccagggctaagaacttggggtcagaagagcaaaccacagtagatttttgtgggaaatgtcagggctttaatttaattaccaaaaaatgtatcagggaatagcacaggggacatacaaacaataaacttgccactagagtctaactctgaagttgg

SEQ ID NO: 3997 - DNA, 492 bp, Homo sapiens
caagatcacaccactgcactccagcctgggcatggagcgagaatccatctcaaaaaaaaccaaaaccaacaaaaaacaaaacaacaacaacaaacaaacaataataggtacaaagtcacataatatttctgtacaagagtgctcgatattcattaattcatcaaatatttactgtgcaactacaatgcacccatggggcacggttctggacttgaacaaagcccctgacctcaagcgacctgcattgttataaaatcgaaacactgcaaaccactatgatgttcagagaactgtgtaagtcacagcacctctatgcttaggaatattatacagcagtggaaaagaatgaagtagagctcaataaataccaggaaaggtgtgtgggattattacttaatgaaagaagccggttggaaagcagcatatggacacacgctggagaacatgtagaataaagttgggaagcacacatcccaactcattaacagtgac

SEQ ID NO: 3998 - DNA, 575 bp, Homo sapiens
gggaacacgaaccccagtgcttacccccactggctgtgggctagagatgtcttgttgtttagtaattgctcatgtggcatttttatgtgatgccagagattctagtagcatatttcttttaagctggaagggaggcctgggcacaagtaagctcgtgtggattagtgcagaggctgggtacagtggctcacgcctgtaatcccagcactttgggaggccaaggtgggcggatcacttgagatcaggagttgaagaccagcctggccaacatgatgaaaccccatctctactaaaaatacaaaaattagccaggcgtggtggcatgcacctgtaatcccagctactctggtggctgaaggagaattgcttgaatccaggaggtggaggttgcagtgaggcaagattgtgccactgtactccagcctgagtgacagagtgagactctgtctcaaacacacacacacacacacacacccaccctgaccaacagtgtgaatccccgtctctactaaaaatacaaaaattaaccaggcgtggtggcgtgtgcctataatcccagctactcgggaggctga

SEQ ID NO: 3999 - DNA, 534 bp, Homo sapiens
cttatgtatttacatcatattttatcaagaggccttgcccatcttgattatactttttcctgctgtctctttcttcaaattctggatcttatcttctatcatatccttcttatttacaaattactacataagtgcttgacttttaaaattaagaccacttaaattcaatgtgtatttttagtcagagtttactgtcattccatgtccacttaggttctctctctcctcattttctctgtttattaatatttagggccagtcaacagcacaaattaatgggaaattcctcctttggcattactcagccctttgttttaatttggttagtattaaattattttagtagcaaagttatcattcagtggggactaaagaatttaagtgctttaagttttatacttcctctagataaaaatatattgttctctttgggaggctgaggccggcaaatcatgaggtcaggagttggagatatcagcctgaccaccatggtgaaaccccgcctctactaaaaatacacaaatcagctgggca

SEQ ID NO: 4000 - DNA, 506 bp, Homo sapiens
ctgggctcattgtgcatggaaagtgctagcccagggttgggctacggaagcactctgttacctgctgctgtttctcagaagtgagccctttggcatggagagctggaggaagaggacgaatgctcaaggtctcagggctggagaggaaatcatgatcatggggtggcaaaggacctcaaggcactgccagacactctgggctcttggagaactgttcagagttggcgataactttctgtaatcctaggcatctcttctcttgtcacatttcattgagatatctgtctatcctatttaacccaagcctgattttggataggatccagaaatctaggtgaatttcaggggcctggttgcttcctcatctagcttggtggtaagaagctcagcccctctctgtgggccatgtggagagtacagaaaataaaactgtatcagggccgggcgcgatggcccatgcctgtattcccagcactttgagaggctgaggtgggctgatcacttga

SEQ ID NO: 4001 - DNA, 485 bp, Homo sapiens
caattcatctgtatacattaatgtattacagccattcagttgttgttgctgtttgagacggagtctcgctctgtcgcccatgctggagtgcagtggcatgatatcggctcactgcaacctccacttcccaggttcaagcaattctctgcctcagcctccccagtagctgtgattacaggtgcctgccaccacgcccagctaatttttgtatttttagtagagacggagtttcaccatcttggccaggctgatcttgaactcctgacctcgtgatccacccgccttggactcccaaagtggtgggattacaggctgagccaccgtgccaggccaattcaattggttatcaatcctcactcacatttctccattttaccacaaggatattaagataaactgttataaaacatgtcactagactctaaagaaactgaggatttatctaactctctctggtccttcagcctagtaacactattagaaca

SEQ ID NO: 4002 - DNA, 530 bp, Homo sapiens
tccagtctggtgacggcgtgagactccatctcaaaacaaaaaacaaacaaaaaaaggaacatagccaacacagcatagattatcaaccagctcacactgtggataactgaaacctgcaatgtagaacataatcctaggagtaatcccaccagaagaatgaactttcttgggcttgtgattgagggctgttccacggggtatggaactatactatttggcatgctatgtttatgaaaaaagcaggctccaagttcaagagcaagttctcctacaggtgtaggtggttggaatgtagatagtgaacaactggcaagcagctttaagtggcggctcctagattgaaactcaggtctaactgtagttaaaatcattgctttctcaagcatatcctactaatgtgaatcttccccaggtgttccatgattgagtgaaattatagactgagaccacaggtcttttggaatagcacttccctataccctctccagggcaagataagactctaagaattagtggtaggccatgtgcag

SEQ ID NO: 4003 - DNA, 390 bp, Homo sapiens
tccacctacataggttttcgtttatctagggttatgtcagtggcatgaggagtaagatattttttttttctgttcctcatctgtagctttccccacaaagagaactttctctaatcttcagggataaatctttggctttctggagatcaacatctgatataaaaagtggaggctgggcgcggtggctcatgcctgtaatcccagaactttgggaggccaaggcgggtgggtcacgaggtcacgagttcaagaccagcctggccaatatggtgaaaccccgtctctactaaaaatacaaaaattagctgggcgtggtggcatggcgtggcacacctgtagtcccagctgctccagaggctgaggcaggagaatcacttgaacctgggaggc

SEQ ID NO: 4004 - DNA, 488 bp, Homo sapiens
gctagactggaactactggccttgagtgatcctcctgcctcgggctcccaaagtgctgagattataagcttgagccatcatgccaggccagatggtgcacagtttttaaatgaaatatttaaatcatataaaaactcatggggagtaatataacgaatataatacgatacaatgcatacaatgaacaacacaatggcctaatatatgacaagtcacctttattatctatggacctctttttacccctccagctctccccaccaatgaaaaccattatcaggccaggcacagaggctcacacctatgatcccagcactttgggaggctgaggcgggcagatcacctgaggtcgggagttggagaccagcctgaccaacacggagaaacctgtctctactaaaaatacaaaattagtcaggcttggtggcacatgcctgtaatcccagctactcaggaggctgaggcaggagaatcacttgaacccggga

SEQ ID NO: 4005 - DNA, 496 bp, Homo sapiens
taactcttagagttcacgtgagatatactaaacaaatacaagatctgtattttcttgaataatacgtgtccactggaagcatccatctttactaatggtgttaaataaagaatcccaggagcatttgtacataaatggttatttgctttaatatataattagctccactaaaatcacagtatagtgtgatttacaatcacatgaatatctaagaatgaagccaggcacggtggctcacacctgtaatcccagcactttgggaggccgaggcaggtggattacctgaggtcaggagctggagaccagcctgaccaacatggtaaactccacctctactaaaaatacaaaattagctgggcatggtggcacatgcctgtaatcccagctacttgggaggctgaggcaggagaatcgcttgaactcaggaggcagaagttgcagtgagccaagatcacgccactgcactccagcctgggcaacaagagagaaactccat

SEQ ID NO: 4006 - DNA, 467 bp, Homo sapiens
cttctttctttgtcttttcttcctttagtctttttttttctttatggcctctactagatacatgggacctgaggctaaaaagacttatttttactttcagtcattttaataaatatttcaagaaaaactccacaaggggtacgagcaatctgagtgaggtttcatgatataaataaatgtaaacaataagttatgtttcaaaagaaaagaacatatttagggtagcttatctgtccctgtatttacatataaactaaacaaagagtctgtcctattactataaagctgtggactctcaaaggcccttcagagccccactattgacaagaacgtgaactctgaaatcaggctgcctgagttccaattccagttctgtcagttactagtcacatgacttcaggcaatttttttagccttcctgggtctcagtttcctcatctataaaatgaggataataacagagctta

SEQ ID NO: 4007 - DNA, 598 bp, Homo sapiens
agatggccaggggtgggggatggcttccacctaagcaaaacttgagggctatattatgtgaaccttgcccccaatgctccctgggaattctgctgttgtaataaaacttcagaagaggaaagaaaaaaggcagcatgatggaattcaaaataatgctctaaaagcacacagagagattaagacatccattgtaagacttttgtatggtgcttctgttggttatgctgaaaagagaccagacattgctgaacagagagtgaagctttggctgcgagaaacacacaaattaaactaaagacatttcttgattattagaatagggctgttgtattctgtgtcatcagggtttgagcatttacatcttacaccatattacttttaactgagcttcagttgactttatattaggaaaagttaaaacaaggaaaatgatctagttattagaatgacaggattgaatgtctttcctggtacaaatataatgccacaaacacctgtttatccagcaagatcccctttcccatatatgcatgattgactgatagatacgattgatagatagatagatagatagatagatagatagatagatagaata

SEQ ID NO: 4008 - DNA, 476 bp, Homo sapiens
gcaagggatacctagaggggttagggcaagactagcaaaaaacttcatgtaggaaaggtagggcacccactcccttggaaaatagttatcagggcagtgagcagatagtccataggccagtatgagccaaattttctgcattcagtagcatacagctctctggaggacctgcatgtttgcttatgaaggggcccaaaggtggggctagaagtgagcaaatcagaaaagtgcccaggttgtggtgaaaaacttcaagaggttaatatctggcaacatgaagatcccaggattataagtatgctcttactacaagtacctaattcaattttgaacttagctatgctcccagagagtgaaaaggagggcaaatggaggtaccaaacaggaccatgggatcttgtaccatagttcaagagctgaggtcagttaaagagcccagttcaagagctgaggtcagcaaactacagtctcagagc

SEQ ID NO: 4009 - DNA, 471 bp, Homo sapiens
ggcggatcatattccttcatctaccatggctcagccgggaactctgaacctcaataacgaggttgtgaagatgagaaaagaagtgaagagaattcgagttttagttatccgaaaacttgtcaggagtgttggccgggggaagtcaaaaaagggtactgaagatgcactgttaaaaaaccaaagacgggcgcaaagattgcttgaagaaatccatgccatgaagccagattctactgcaactgaaagagcaattgccagactagcagtacatcctcttctgaagaaaaagatagatgtgctaaaagctgctgtacaagcctttaaagaagcaagacaaaatgttgctgaagttgagtcatcaaagaatgcttcagaggacaatcattctgagaatactttgtattcaaatgataatggaagtaatttacagcgtgaagcaactgtcatcagtgagcaaaaagtcaaagaaac

SEQ ID NO: 4010 - DNA, 510 bp, Homo sapiens
ggtagcaagggggtgatgtcaaggtgctgagaactgccaagacgctctggcttgtggcatgtgacactctgatgttcgcagaaacccacccgctgattcaatacggggaccaggaacctgccatgacagtcacgactcagtctgcctgcacctacatgattaagaagctttattgctcacacaaagcctgtttggtggtctcttcatatggatgcgcataacatttggtgccgaagaccccggacagggtgactccttcgggagattggtcccctctcctcaccctcactccatgagaagatccacctacgacctcaggtcctcagaccagcccaaggaacatctcaccaatttcaaaccggaagacaggaatgtcaggcctctgagcccgagctaagccatcatatcccctgtgacctgcgcttatacatccagatggcctgaagcaactgaagaaccacaaagaagtgaaaatacccagttcctgccttaactgatgacattccacca

SEQ ID NO: 4011 - DNA, 475 bp, Homo sapiens
ttacgcacttcgtggtcctcaggtcccacagcttgatctgtggaaaaagcaccaggggccatcagggaggggccagggggtaccatggtggtccccaagtgcaaagccaggaaggcaaggtggtctccagtggcctgtgcaggtcatgaagatctccatctcgaattcttgagccttgttgttcatcaaaagcatgtaaccaggccgggcacggtggctcatgcctgtaatcccagcactatgggaggccaaggtgggcagatcatgaggtcaggagttcgagaccagcctgaccaacatggtgaaaccccatctctactaaaaatacaaaaattagccgggcgcagtggcgggtacctgtaatcccagctactcaggaggctgaggcaggagaatcgcttgaacctgagagacagaggttgcagtaagccaagatagtaccactgcactccagcccgggcgacagagcaagact

SEQ ID NO: 4012 - DNA, 540 bp, Homo sapiens
tatataaaactgccacacaatgatcaaattgctttacaataatactcaaagattgtttccaattatttatacttttggtagaaaaataaatcctagataagttttagaaatatatttattatagtgatgttttcaatttaacactacccaatgaaaatacctaatacagatgtatttatgattgtacatttatttatattagaaaatttaagatacgaagtgaattcattttaaactaagccaggcatggagggttgcacctgtgatctcagccacttgggaagctaaagcaggaggatcacttgaagacaagtttgagacaagcctgggcaacacagaaagaccccatatcttacaataatgttttgttttttaattagctgggcatggtggtgcacactgatagtcccagctacttgggagaatgaggcaggataatctcttgaatccaggagctcaaggctgcagtgagcaatgatgataccactatactccagcctgggtgacagagtgagatcccatctctaaaaaaaatttatc

SEQ ID NO: 4013 - DNA, 486 bp, Homo sapiens
caaataaaagacacaaaattagagttaattttattgtaactgggttggctccagagattatagttaggaagtgattacattaagctgtacatatgcagcattctagcaaatttcaatgcagtagacaaaatctataaataatgtgaaacacatattaacatgttaagcataatatgcattcattgtcttcaacagaataattctctattaattttttaaatgtaatacaattttactttaaaaacactgaaaaatcaacatatttcattaagaaaaaattataaatgttgcaaaatgatgatgaaaatacctatagtaataattcccaactataacaattttgttttatctaatactggtcagctttccatgtgtccaagcattacagaacttttcattaagcctaatcctcacaagaacattgctttgagtgatattccagagtggtagtcctttaaggcattagaacgatttgtgaaatcacta

SEQ ID NO: 4014 - DNA, 285 bp, Homo sapiens
ggaactacaatcagcagactagtcctcaataatgatgtcttagcctttcctgaaaaaattcatgaataaatgaaaataaaatgttccaagtgacacagtcatcatttaagactacttacataatgcatacatatatttggtaaatattcagattagcattacttaaatattggcaaataaaataaaataaataaataatggtaactattaacattaaagtgtatatgtatataatcttaatctataaggtattagtttgctggagatgccataaacgcatagcac

SEQ ID NO: 4015 - DNA, 546 bp, Homo sapiens
cgacagaagggtacccttgggtttgtattgtaacttggtatctttccattgtctcttaccacaaaaattccttttaagaaactgcattcagaattgaatccatcaaacttcagctgctcattctcctcctccttatggaagatttagtgactaagtctttgctttgattttctctcaaactttgagggttcttactttctctcctaattgcaacaatttggtgtccccttttgcttgggcgcaaataaaaacagcaacaaatggttaaaagacatgggggcgcaccggtgcacatgcctgactagctgatggactgcaagtttgggctgtcaggaaagagatcttcccacagcaccatgcactggcaatttcaacatgcgtgctatgcctggcacagtggtaagtgttctacgtgcattagagttctcctaggaggaccaataaggcaggccatggtattacttccatagtttcagattagagaattgggtctaaaagattttaagaatctttctcaaggtcattcaactactaagtcctagaact

SEQ ID NO: 4016 - DNA, 490 bp, Homo sapiens
gaatactaaaggtatacattttgtttctggcttttgttttgggattaatgttgttcatgaacatttcctatgttttcatattacctttatatacacatcaatgaaatatttgctggttataaaaatatatgtttcaatatagaaaccttagaaagtggggaatagttaaaagaagtaaacaaagcaatatctccatttcctctttcaaggctcactctatttctttccaggccttctggatatataattggggttattctttatacagaatttatatattgctttcttaatttatcatagggttcatgctatttaattaattgtgtttttagtgtgggatataaataaatgtttctttttgtagttatagtaattaagataacaatgaacatccttgttgataagtctttaaaagcatttctcatagtcttcttggaataggttcctatatatggaagtactggttcaaatgatatgaatattgcaaagc

SEQ ID NO: 4017 - DNA, 540 bp, Homo sapiens
tcagctaattcactcttttcttctttctggtaaggactttccagacatctgtagtggaagaactaggtctaggcccaaatcatttaattactagctgagcgacctgcacacaactgcaagaaattgttccatcacaaaacttcaggatgattggggttctctctttttctctcttttattccaagcttaaaaaaaaaaatctgctgaacgtcccactggagctgaaattgtagaagacaactagctctttaattatgatgtgcagtgagctgcttttacttttcacttgtctctgaagctgaattgcccagtgcctctgaatactccctcacatgtccctgtgatttgtatcagctcacaaaattaaaaaaacgcagacttgcagctctaatttgccagaatccttaagatctcttttatcatgccctgctgcctggatggaaagcagcattctctttagcggcaatctgctgtaatcattttttattcaggtggcaggcagggttcaagcaaaacatgaaagacagtgattggagcaca

SEQ ID NO: 4018 - DNA, 488 bp, Homo sapiens
agtggctgttattttgatagagataaaaaaatagcggctaccatttattgagccctttgattgttccatgtctcaaataagtaattcatatgctttcatttaatccacacattcattcaacaaatatttattatgtgcttacaatgctgcagatattgttctaaatgctggagatacggcagtaaaccaaaaaagtggtggtggttgagcagacgtggggtctctggtcttgctccattattctatcctccacagagggttccttctaaacattaaatcagatggtctctctttgcacaaatgcctctactggcttcttgtctcattcagagtaaagctttcctgacaatagtgctaaaggttctggaggatctttagtctccctgtcctaccccattttctaccactctctcttttgcctggcccacttctgccatcataaccaccttgctttcctttgaatatgtcaagaatattcttgcttcaaa

SEQ ID NO: 4019 - DNA, 435 bp, Homo sapiens
aaatgggttaagaatgaatggactgaggaagtggaaccagttgggatcaactcctctttttgaggaattttgatatgaagaggaacagagaaatggagtagcagctgagagcggttcagaatcaaggtagatttaaagtaggagacaactttggaaataatgatagttttattccccttttcttctttgttaaaaagaagacatgacttacctgaggaaattcttagctttaatatctacagtcgctataacatgagaaaattgtcattgaacgagatagcactttttgcattgtggtgctaaaaaaaaatctttatttttgtagagatggggtcttgctgtgttggccagccttgtcttgaactcctgtcctcaagcagtcctcctgccttggcctcccaaagtgttgggattacaggtgcgagctactgtatt

SEQ ID NO: 4020 - DNA, 451 bp, Homo sapiens
tatatgatttttctcatacacaaacacataaagtcaataagtgatcagtttcctttgtaagaacatacaaagtcagtcattcaggaagtttgtgatcttcccctggatgcaagccactggcagtcccaggatcccagtatatccaacacgaaggtcctgtcagagttccagtgttctcccgcacgacctcccacctcctacctcccagtacctcaacaggaaaggacacatctgtgaatcctctggcatgacttcaattccttacagctgtaaaatccactgcatggaaggaaaagaacatttcctagactgggaatccccagacactttcccaaactgaacaagtgaacagggttttcgctctggtgaatgataccccgtcaaggagagtgcagagaggaaaacagtcttgagatgattgtggtctctaaatgtctgggcttcactgcac

SEQ ID NO: 4021 - DNA, 121 bp, Homo sapiens
ggttatatcactacctatatttagttacagactgcattttctttgccaagaactgctgtactagctggattactgtgctacatctgagaaaagctgaactgtctgcaatacaatatatatg

SEQ ID NO: 4022 - DNA, 540 bp, Homo sapiens
acaacctctctttcacggaaggtcactatattgagcaccaacccttcgttcataattcagaaaggttctccatcctgggaagagcaacaaattaaaaaaccgctaccgacgtgcagatattttacagcgcaatccagtgagactctgcattttcatactgagaagtaaaatatgacctagacaagacccagacacaggctcataagaaagactacggggctttaaaattattgccttgatcatggaaagaaacatgaggaatcactggcagccacaactcaggatggtctttgggggcaatcagtgtttgacagaatcaaagaacatctggaaatcagcatattttgagctagttcacaccctgcttggttcatatttcaacagctctatgtactaaggcagttatatggccctgagaaaagcagcctggatttatcctttgggattaaacaatttcagcaaagctagcaggagtacaggaggtaatcccccctcactggactctaaatgctacacctgcggctcgggtgtgtcatggct

SEQ ID NO: 4023 - DNA, 396 bp, Homo sapiens
tttacaaatttaggatatgttcacaaccagaatccttgaataattactatccctatattttcacaggttatctgcttgttaacaaacctggatatttcattacatgcaagacagaattgtgtaacatgatagtcccaagaatagtaatgcaaatacctccattttactcccaacaattgcatttcattttatttttctgatacagataaaaaaattatcactgattatcacttagtattctctgtcttgtcactaagctttctagaaaattggagttgttccactttgcaactctacctctgcttcagcctctggcattctgcatatccctcagcacagggtaattaagtagtaatgacatctcatggggcacagcagcataattactggagatat

SEQ ID NO: 4024 - DNA, 518 bp, Homo sapiens
tgatttaactttataagctacaggaaacaacaagtgaaatgaaatatactaacatatataggtatacaggtatgtaacattctcatatataggtgttcaaaattaatgatgggattacatgcataaggctggagaggtggtaacaatccttaattctaaatacctaatgatgagagaaagtcaactaaatgaagctcaataaacaagataggtgaaataactgtagttaaagtcaatgaacttaatacactatttttgaaataaaggcctaagtaggcttcttaggataccaagaaatacatattgggccaggcgtggtggctcacgcctataatcctagcactttgggaggccgaggcaggaggatcatgaggtcaagagttcgagaccagcctggccaacatgatgaaatcccatctctactgagaatacaaaaattagctgggcatggtggcacgctcctgtaatctcaactactcgggaggctgaggcaggagaatcacttgaacccaggaggc

SEQ ID NO: 4025 - DNA, 526 bp, Homo sapiens
gattcaaattccatcatcaactcctcttctcttcgaagggttgaatctctcatactcttgaatattttaagagcttctagcttctctgaggctaataatggactaaatgaccaacatttagttcattatttttcccacccatctatgttttggggtgcattgtttgaaacccctcaaatccaattcccaaggcccctaatcccccactccccatagcattctcagactagtagccacaaagggcatgtgtgaataaatacacaagatcaccttgggtattatacctcttgaacactgccccttgctagatatacatcttgggaaaataacctcagagacttgagctgctccaaacaacctggcacaaacattgaggtttgaaatgagactaagaaacagactctgtaagtattattaaatgttataagcacccccgctagagaacaagtatagaaaggaatatgagcctataaatattccagaggtagacaaaccatgtatgtatatcacgtatattttaaaacat

SEQ ID NO: 4026 - DNA, 483 bp, Homo sapiens
agatacaggaaagaaggatcctgagcttactgggagagtctgggtcattctgtctcttaagcatggccattcacagagtagtccccagaccagcagcaactcatcctctgggaacttgttagaaatgagagttcatgggctccacctagaccttctgaatcagatgcccagggagtgggttcctatttgggttttcaaaggaattccagataatttcctgggtcatgagagtttgagatgcactgtcttaaggcctgggtgaaatagtcacaaatcctggcttgtcctggggtaaggctgaggccagtctagctcggcaccttgatttttgtgggacctgataattcttatctatttagtaccctgggcctttaatagcaccttggttacaacccagataaggaacataggctcttcttgacccaccattttgcactttcatgcctcccagatgcagctcacatgaggtacatcatagatttt

SEQ ID NO: 4027 - DNA, 529 bp, Homo sapiens
tatggtgtgtattgaaactactcaactctgacttggttgcaggaaaacagccatagacaatatgtaaatgaatgggtatggctgtgttacaagaaacaggtagcctgccagagctggccatcacattacggtttgttttccttgatgaggtctacacaagtctggaactgggtagacctcggaggagtacagttgaaatagcacggtgtttttcaaggacagattggggagctgtacttagaagagggtgctggtttttgttttcttaggcctgcatattgcttcaccttctctaggtcagagtgaagaaggggtagagatagtaggtagaaccgaataaaattacagatgcttctcttatggagagttcacaacccatttcaatagagaaatttgagtttttacatcttccttatgttaaattgaattctttcagtctgcaatcttcatttgtttcttgctttagagggtatcaaaagaagggaaaaaagaaaaacagaaggaatggtctagtgtcccaggcaatatg

SEQ ID NO: 4028 - DNA, 609 bp, Homo sapiens
gagactttttttatcagactgaaatccgtcctgcctttttagaatgagctcatttttcttcactccagctaatgctgacatttaccaaatccagtcctgattaagtaagcttccatcaccaagaaaactggaaaaaaggtaggattcataagacagtggattcccatccagtgcttgtagctctgttatcctctttagaagtatctgagggttaacaaaattggaaattgtagaggaaacaaatttgcactgaatttagacctaatttacctgaaaatgggattcctttaaaatccacagtgagcccacagttttgtcctgtgactgagattcagtcacaccttgaccatgtatttatttcataaattaagccttcaggccaggcatggtggctcacacctgtagtcccagcactttgggaagctgaggtgggtggatcacctgaggtcaggagtttgagaccagcctggacaacatggtgaaaccccatctctactaaaaacacacagtactaaaaaacatctctgctaaaaacataaaacactacctgggcatggtggtgcgcacctgtaatcccagctacttgggaggctgaggcaggagaattgc

SEQ ID NO: 4029 - DNA, 614 bp, Homo sapiens
ttctctattcctgtttccttgtctgtaaaattaggataataattgttcccaaatcataaagttgttatggggagtaataagatagagtgtgtaaaatactccatacagagcctggaccatagttaagagtaagtactctacaaaaacttgtgtttgtcattagagatacaataaaaagttatgaaccaaagtggccagtaaaaaaaaatgaaagtttttatatactgagcatctataatgtgtcagtcattatgttaaccagttttcatacattatttcttttaatttgttgtcttcgaattattttaaaagaattaaaagaacacagtatgatttaatgtgaaaacgaaaaagagaagattccagctgggcacggtgactcacgcctgtaatcccagcactttgggaggcctaggcagttgaatcacgtgaggtcaggagttcgagaccagcctggccaacatggtgaaaccccgtctctactaaaaatacaaaacttagccaggcgtggtggcatgtgcctgtaatcccagttactcaggaggctgcggcaggagaatcacttaaacctgggaggtggaggttgcagttagccgagatcacaccactgcact

SEQ ID NO: 4030 - DNA, 535 bp, Homo sapiens
tgaggaaacagtgatatagcaactggcgcatcattgctgatcttagacagggctcaagaagaggaagcaggaaatttagccagatctttcaaggaaatgaagggatagagggaaagaggaaagttgctagaggagtttgtaagttttaagaatacttttaaaatagtgaaagatcttgaacacgtttgtaacttaaggtaaaagtaccaattaagaagaggttaaatatactagagagagttgaatattgacccctgagggaataggaggggctgaagggttggtaggtgtgaggaattgtcagtgggtgagtggaaagaggcattttctgcagggtggcttcaattttctctttgaagtaaaaggcaaggttatttgcagacaatggagcgatgtggctggaagggaatgtgaggaaagcgaaatctggggaaggggttagggcatacactgattcacatagatggctcagccgatgttggattcggaacgataaatctacaagtgtgcttgtctatgccttttgagacagtct

SEQ ID NO: 4031 - DNA, 643 bp, Homo sapiens
ttctcatgctgtggctcaatcttaatgtactcaagctccaacaactgggaataagagcagatattacacacattccccactatctacaacagacaagttggtcattttaatgagggatttttgtctgttttattctttttattcctttttgcccatatcttattcagtattctttgtgtggtggctactttgctaaagtggttcaatatttaatcaaggattaaatggtaaagcagtttgcctattaaattataaaaacctttagtgtttacatagccttttctaattaattaaataacttaattgaaattaaaaattagattttaaagtaagctttgagaatacacaagttattttgaagatattcagccatgaatacaacatatatcagtcatggtattacaggacacacagacagtgccagcaacccaggaagatctccagagctcaggcagcctgagctacagtctgcagtgcttgttagatggacactcaaaatcgggctttggaatagtgattccctgagacaggaaaagcacatcaggttatccaaggaggtccagagggaatgggtgcagcacaccagcatggcacatgtatacatatgtaactaacctgcacactgtgcacatgtaccctaaac

SEQ ID NO: 4032 - DNA, 584 bp, Homo sapiens
cggaggttgcagtaagcctagattgcgccactgtactccagcctgggcaacagatgggagactgtgtttcaaaaaaaagaaaaaaatagcagcagtacttcacatcacagtcacattcaagagcaatctacacattcccgttctctcatccctcgctcttttagttaggtcatttggtaatgtttgtgtgtttcagaacataaaagctgaggacttccagctaagcatggaagattgaatacgtatgtttatccctgttccatcctgaaacccactaaaatattttaaaaatgggattagaggccaggtgcagtggctcacacctgtaatcccagcactttgggaggcgaggcgggcggatcacaaggtcatgagatcgagaccatcctggctaacatggtgaaaccccgtctgtactaaaaatacaaaaaaattagtcaggtgtggtggcgggtgcctgtagtcccagctactcgggaggctgaggcaggagagtggcgtgaacccgggaggcggagtttccagtgagccgagatcacgccactgcactccagcccgagcaacagagcgagactctatgtctc

SEQ ID NO: 4033 - DNA, 564 bp, Homo sapiens
caagagctctacagtcacttgtgtgtgtgaactggcaatttgaagaccctccacccaggctgggtgcggtcgctcacacctgtaatcccagcactttgggaggccaaagagggaggatcacttgagcccaggagtttgagaccagcctgggcaacaagcaagatcacatctgttcaaaaaatccaaaaagtatctaggtgtgttggcgcatacctgtagtcccagctacttcagaggctgaggtgggaggattgcttgagcccagaagtcgaggctgcagtgaactgtgatggcaccactgcactgcagcctgggcaacacggtgagatcctgtctcacaaacaagaagaagaaaaagagaacgaggaggaggaagaagacctgctgcttggaggagtctgaaaatagccatgggaatagtaacaagaggtttaatgctcatctgaaccaaccacttggcacatggttgctgtccactggcacagattgcttatgggaagctggtttcaacatttactggctgcacaagcctaggcaatttatttcaactctctaacctttgct

SEQ ID NO: 4034 - DNA, 511 bp, Homo sapiens
gcatgtttaccagcagaaggattttgtatatgccaaaggcaacaccttacacgaccctctatcacctatatgtatactatctccctataccatatcatcaataacattgaattagtgtcagaagacccagatgctagccagctggagaattacagctgtgactgcaggaaagccacttaacatctccagtctttctgtttcatctgtcagcagcaaatgtaggacgaaaggaaaaactaaatcaagcaagtgatgtgacagtgcttgaaaaattattaaaacacgataaatgccagtttctatttgcagcagcatctttagcatctcctccaagattgggaaacattgttaaaagaatatttatgtgaaacgttaatgggaagacaggtaaatgtaacaatccctaaagtacaggagtttctgactgcattcaaaacaggactgaatagagcaaggccacagggtcagggaagaagaacaaggaccaacatgttaaactgacctagcttca

SEQ ID NO: 4035 - DNA, 124 bp, Homo sapiens
ttacaaaatagaaacaaagagaaatatttgtgcaacccagatgatcctcatgggagcaccctagtactcccttgttccactgtaattgtaaatggacatgtgccacaaccccaaacagaacagt

SEQ ID NO: 4036 - DNA, 520 bp, Homo sapiens
tgtgcctgtaatcccagctactcaggaggctgagacagaaataaattgtatcagaacagtgtaaacatgtagacagatactgacaggaataaggttttgtgataactttttggttacctgaagcatttatgaatacaggtaagtctgtggctatgttatagaatattgaggtctccattggtttgacttccaaattagcgctttattaaactcggtgtcagtgtttgtacacctacttgggctgtatcttttctactatgaaacatattttaactgtgaaatgaatattttaaagaatcaccttggggccaggcatggtggctcatgcctgtatctccaggactttgagaggccaaggtgggtggatcacttgaggtcaggagttcgacacagcctggccaacatggcaaaaccccatctttactaaatatacaaaaattagccaggcgtgggggcacatgcctgtaatcccagctactcgggagcctgaggcaggagaatcacttgaacctggaggctg

SEQ ID NO: 4037 - DNA, 354 bp, Homo sapiens
agggccaagatatcatctctgctaatctctgaaaccaaaagtctgaagttaattgggcacaacttctggttgtagatctttgatggaaatgaactgaaattgaaccaccttataaaaactgaatactagatgaaaaggccgttagaaataaaattaaataaacttgaaaacaagaagaatataatgccccaataaataaccagtttagtacttgtaaagaatggtcttctagctgcttcagtagaagtgtccatcttgaaagtttgtgcccttgttattgatgggccaggtgtcattattttgcctattttaggccattgttaaattagacagacacaaattcccttcacccat

SEQ ID NO: 4038 - DNA, 142 bp, Homo sapiens
aacatatctggaaaggaatgtgatattgaagtcataatattcaaaacaattatctactgtggtaatctaataattgattcttgcgacaagaaatacagacctctcttggaatatacttgcaataatttcttactctgcttta

SEQ ID NO: 4039 - DNA, 474 bp, Homo sapiens
aactgttgtatttttaatagacaatttcacgacgttggcgaggctggtcttgaacccctgacctcaggtgatccacccgcctcagcctctcaaagcgctgggacaggcgtgagacaccgtgctgggacagtagtaacttctaatggataatgtatgcgtggggtggaaaggggagtaccagtatttttataaccctcagcacagagcagtttcataagtccatgccatcgtgccatatgccttcttcactggccacttcgattagtgaggaaagaatccaaagaagttaaaatatagtgggccgggcacggtggctcacacctgtaagatcacgaggtcaggagattgagaccatcctgctcaaaatggtgaaaccccgtttctattaaaaatacaaaaaaattagttgagagtggtggcgctcacctgtagtcccagctactcaggaggctgaggcaagagaatcgcttgaac

SEQ ID NO: 4040 - DNA, 82 bp, Homo sapiens
tttaaagtttgtattttttaattgtaaatcgacaaattacagctgtatatatttattgggaattaacatatccattacctca

SEQ ID NO: 4041 - DNA, 370 bp, Homo sapiens
ggacttgagcgatcctctcgccttagcctcccaagtcgctgggactacaggcccacactaccacaccagctaatttttaaatttttctgtagagatggggtctcactgtaatcttgaacagctggcttcaagcaatcctgccgccttggcctcccaaagtgctgggattacaggcatgagccactgtgcccacataacaatgtttcttaagtgaatacatgaatagctcatcatctatggaatactgtgctttacaccaagtagtttgcatttattatttagtattcataacagtctacctgcaaccattgcttttcctattttatagaggagccagaggctaagtaaattcctcagtctcacacacagt

SEQ ID NO: 4042 - DNA, 589 bp, Homo sapiens
ctatcatcactatagcttatctttcattaaccttgtatcctcttagtgtctggcaaagggtgagtaactaatcaaaatttggtcaattaatattaattttaaaataattacatgtatattagtacagagccaaaactccagctcgaaactcccacctgctttcattacccttcctggtgggcttctctgcttccccattggattataagcttcttgtagaccaggattatgtgatacttcattgtgtgagcatgtaaatagttgatactcagtgttcttaatataattgaaatgtaaattattatgattacacagggccagcataattaataggccatacactcaactgagaatacaagagataagttgtttgcactgcagatggtattttctaaaaatgaataaagtggcatgaactgaatgcaagtttatgttatctctagttgaaaagaaaagtttctctcttaagcactattacgccttcttttggcagcagcaataattttcttcttaaattcacaaaagtcctaattcttgaaaaagtatgctaaagcaatgtggtttactcaaacaacagcaagcgctctct

SEQ ID NO: 4043 - DNA, 428 bp, Homo sapiens
tgtgtattttgtgtgtatgcatatgcatgtacatatgtatatgtacatgtatatatatgttctaatctcaactcacttctctctccatgtaaagtgggtgagcaggtatgtgaggcaaagccctgcctcttgggaggagctgccctcactgctgtcttctagggttcggtccagttcctgttgtgtgttccctgagtctgttctgtggaagttgtactagtcagatttctccagagaaacagaccaataaaatgtgtgtgcatgtgtgcgtgtgtgcatgcgtgtgtgtgcgtgcatgcctgtgtgtttgcatgtgtgtgcatgtgtgtgcatgcctgtgtttgtgtgtgcgtgtgtgtgcgcgcatgcgtgtgcacgtggacaactcttgaacgatgcaggggttggggcactgaccccctgcacag

SEQ ID NO: 4044 - DNA, 553 bp, Homo sapiens
agtggggaagccctggagttcccattggctccatcattccacgtgaaagatgcaattaaagtcccccatctgtgagcaaacaagagcatgtcagggctggctatggcatgggcctcagaggagaactggccctcctcacaagcccacagagacactggtgggtgggggacacccctcccagtgccctgcaagagtgtgctgcagtcaacgttgtaggtacaaacatcaaaacaattcaggacaataccataactgcccattattctgaaaaacatcaagacccaaaataaatgcttgcttgcaaatgagtcatacgtacctaagggaaacctccatctacttctgaaatgcacatgaaggatgtagtaagcaatatgaaaattcattttccaaatcacaaaatgaaaatgttatctgtctgactagtgatttaactttaagtaaacagtttatataaaaggccacacaaactgctttttaccatatgagaagctgtgcaacatcacttgtagtaagaaatggaacctacaactgcaataagatttctcaccta

SEQ ID NO: 4045 - DNA, 567 bp, Homo sapiens
tgcccaggctggagtgcagtggcgtgatcttggctcactgcaaactccgcctcccaggttcaagcgattctcctgcctcagcctcccaagtagctgggattacaggcacccaccaccatgcctggctaatttttgtatttttggtaaagatggggtttcaccatgttggccaggctggtctcaaacttctgacctcaagtgatccacccacctcatcctcccaaagtgctgggattacaggcatgagccactgtgcccggccacatttgtttccttttaagaggatttttacattatgttaaaaatcttgattggtagaagttatatttcataattttcttcttcctttgtatgaataatatgcttttatagtgacgtcacaagaggtgccttttgcagagtgcctcatacgtgtcactggactaagtaagcattttatctcattaatcttcacaacaggctattagagtattataattttaattttgcagatgagaaaactgaaacttaaaatgttttaaacttggcaaggcacggtagctcgatagctcacgcctgtaacctaat

SEQ ID NO: 4046 - DNA, 481 bp, Homo sapiens
gtcccgttgctgagggaacccttcgggtgtttgttctctgtgctgaaggtccgtcaagtcaatgcatatgaagtccaaaagaggaactcgagggtagaaagataaggttttatctgcttatggctacccagaaagccttttgagttgaaggagcgaacagattttttcttttaatggaaggaaaaacccacacttcccacaccactttttctagataaatttcgacgcccctgaaacagctctgagagcaaagaggtcgcctatgctatgggaacaaagaaaagaggagaaaagctggataactgactcgtctgtgataatcagaaataaccactttggaaaccacagctatttgatgtggtcataattaggtctcgtcctcctggtttatgttttgtgattttggagaatttcataatcaaatgtttagaattggaagggctagataatctaggttccagtgttgtcatttagagatgag

SEQ ID NO: 4047 - DNA, 120 bp, Homo sapiens
aagcaactcgaggggaaaggatagttttgccaagaaactatatgagagtggctagatattagtattgaaaaaaatatatctaaatccttactccacaccaaaaaaaaaaaaaaaaaaaaa

SEQ ID NO: 4048 - DNA, 391 bp, Homo sapiens
cattataagacctacttaatggattaatattctgcattttaaaaatagtgattaaattaagtagatacgtgccttgtgtatttaatgaaaaggagaacagaaaagtacaattaacaaaataaggtatgagaagaggaaataactattgaaataatattcttaagtaaaataaaaaattattcttcagatatcataaaccctgcataacatagataatatgctaggaatattaaaattattttattagaaatacaaagttcgaacagaataatatctgtagtggaaacaatatttttaagaaactacttcattaagaacaacaacaataacaagaacagatgatttcaaaatgggattcaaagaatcttcaagcttttacaaaatggtgatg

SEQ ID NO: 4049 - DNA, 437 bp, Homo sapiens
ataactacttccagcggtgatggcataagagagaccagatttatgctcctaccttaaacaactaaaaatctagggaaaatgggaaagaatggttttctgacactggacaacaggtagtatagcattgtaatctccaaaaaaggggaaacaaataagatgattcccgtgattgccttgattactgacttgagagagttcccaggccacagagtaggaggggaaacacaggtagagcccggtagactctttgaaataagaagataaagttgggagttgggaagaacaaggcagatagagttgaaagattagtactgaataagagagtactgcagacagaatatgattaagacatcagttcttcttcaagcaaatccatagattcaatgtgattcaagttaaaaaaacattaacctaattctaaaaatttatatcgaaag

SEQ ID NO: 4050 - DNA, 592 bp, Homo sapiens
ataactacttccagcggtgatggcataagagagaccagatttatgctcctaccttaaacaactaaaaatctagggaaaatgggaaagaatggttttctgacactggacaacaggtagtatagcattgtaatctccaaaaaaggggaaacaaataagatgattcccgtgattgccttgattactgacttgagagagttcccaggccacagagtaggaggggaaacacaggtagagcccggtagactctttgaaataagaagataaagttgggagttgggaagaacaaggcagatagagttgaaagattagtactgaataagagagtactgcagacagaatatgattaagacatcagttcttcttcaagcaaatccatagattcaatgtgattcaagttaaaaaaacattaacctaattctaaaaatttatatcgaaaggcaaaggaactaaaatagccaaattacttttgaaaaggaacaacattggagtatgtcaagacttgctattaagctacaattatcaagacagtgtgatattggctaaacggtagacagaccaatggaacacaatagagtccggaaatagatccaca

SEQ ID NO: 4051 - DNA, 522 bp, Homo sapiens
ctataaagttgcagctgtcaaaggacgatatagctaccattgaaacgtcagaacaaacagctgaagctatgcattatgtaagtaccaaggcaacattggatcttcctaaataatcttttatatctcacaaaatatatctaacccgattgtcccaaagtcccctttctgacttttttttgttctttattgaagaaattttcaataagtataaccaagtaacaaattacttgttgtttttcagtatattagtaaagatccaaatgcagagaagcttgtttccagatatcaccctcagatagctctaactagtcagtcattatttaccttattaaataatcatggaccaacgtacaaggaacagtgggaaattccagtgtgtattcaagtaatacctgttgcaggtttgtaatttgctatgtcaaataatgctctcaaaaaagagaagttggactgcatgttctcactcataaataggagttgaacaatgagaacacatggacccagagagtgaaacaacacaca

SEQ ID NO: 4052 - DNA, 171 bp, Homo sapiens
aagctatttgtagaagcagacagaaagctccaggagagacgatccttgtcagagggctgggaacagcaccagaaaaactgtttcaccccatctctgactcagatacttcctgccctggctggaatcagatgttgccaagacagctgtgggaaaaaaaaaaaaaaaaagggg

SEQ ID NO: 4053 - DNA, 445 bp, Homo sapiens
ggtattgggaactgccagaagggtgttgttggagagcaggctgggtttctgccagggacgtgacctgcgtgtgacgcaggaatgcacctgcatgtctcggctcacctggagacagcatcagctgacattcctgatggcatggagagcaggaaggatgctcagggccttctatcatcactttgggattcctccgggtgaccggcccgatgcccagctcagagagaagagactttctgctttcaacccgagagcagaaccctcatctgcaggtgcgtggagtctccttatttgctagcttcggagctgagcaatcctcccacagatcagtgcctaaataaacttgtgggataaacagctggtgtggaggagggaactaaggactggagtgaaagggtacatgagtggaggaagggctggacatgcagaacactcatatcaaacaggt

SEQ ID NO: 4054 - DNA, 508 bp, Homo sapiens
taacattgtgctaaattatcatatttcattgattaataaatggtgttgattgtaaggtgcaccctcaataacgactagcctaaaaagctagtaaaggttttttgatgttgattttgtgaagcattctttttttcagaaatattaaaatgtaaacatatctttgacttgaggggatactatattttaaaaattgcacaaggcaagactgtacaagggtggaaatggaactttagcgtttaagaagtatgagcatttgaagaacttattggcagtctaataattctaaaagaatattttgggagctatcatgttgagctccattccttaaaagtcagtgaaatggctgggcgtggtggctcacacctgtaatctcagcattttgggaggctgaggcagaatgatcctttgtgaccagcctgggcaacatagcaagaccccatctctaccaaaaacttttaataagttagccaggcatggtggcacatgcctatagtcccagctattctag

SEQ ID NO: 4055 - DNA, 419 bp, Homo sapiens
atctaagatgatcattttcccactcgaactgagtgaaaaaggtgtttattgttgcagaaaacatctgcgtataggtattggatgctagtggtgcatatatgaatacctatctctgctcttcaggtggtcacagtccactgggggagaaaaacacagatacttagtacaatttattctatactgcagatgtgcagagtgctgtgggtatgtagataactttaagctgaatcttggtcggtgagcaggtgttcagaagatagacttagtggccaagtgtggatcacttgaggtaaggagatcgagaccatcctggccaacatggtgaaaccccgtctctactaaaaatacaaaaattagctgggcgtggtggtgcatgcctgtaatcccagctactcgggaggctgaggcaggagaagcgt

SEQ ID NO: 4056 - DNA, 199 bp, Homo sapiens
agctgtgcctcaatacaaaatgctctatacaagttaactaccagtagtaattgttgacttagttaagaccaagattaaaaggaatgatttaattgacttaattaaaaataaattttctggttgggtgcagtggctcacacctataatcccagcagtttggggggctgaggcaggaggatcacttgagtccaggagttca

SEQ ID NO: 4057 - DNA, 507 bp, Homo sapiens
aactagtagtccatgaaaaagcaattcttccagttatttagcaattctgtaaattactactaggactaggtctagctctttttctaggaatctaaaaaaaaattcaaaattattttaagggatgttagagaggtagaggctcagataaaaaggtgaatgttagtgatacctaatttaggacaagatttatatgcttagaaatttttcttttattatttctaaagcacactattccaaatagagccatttgcttactgattagaaattatttgtgatcagacttcattagcaatgaccccaagagacgtgagtctgttgtgagtcacagtaagtccacaagtaaacactgttcatatgattcaaatttttcgttttattcacttaccctgtaaggttgctaggaaggactcaaactttaagcaagacagtggtgtgatctgatttttttttttagtggaaaaaagaaagttctgaaagttgacatgttgacatgcaagttatatagga

SEQ ID NO: 4058 - DNA, 393 bp, Homo sapiens
ctaggaaaaggaaaaattcaaaaaacctgcctgcccctcacctcagctgttctcccttcaggaaatgtgttaaagaatcagtgagcatggaggccaagatctctcaataaaggtatttatcacagcagtatttgtgaatgaaaatagaaaacaatacagctctccaccaataagtgcctaagtaaatcatgcttttcacataatggaatattagacagacctcatagtcctattggtaattttctccatgctaatattactatagcataatgataaattaaaagggcaaggtcaaacttgcacacactattatgatctcaattaggtaagcaatcatgtggatagaaagtgactggaggccgggcgcagtggctcacgcctataatcccagca

SEQ ID NO: 4059 - DNA, 487 bp, Homo sapiens
cttttgctaactctatgacttcagataagtcacccagttattctggaacttggttaattcatctaaaaaaactggttattataaagataaaagaactgtttatttaaccaacagccatttcccccatctttcttcctgagagagccctgattttactcaggtatcaggcaggcagcaaagtgctcggaaaaggcaggtccagcccaagagctgaaccactattggtctaaacccatcatggcaaccccattcccattttccagtgactggtttgctggtacgcaagtaagccagttctagacaatggagcacgagagtatgctggctggggagcttctcagggatgtttttgcaaatcaaaagagcaatgcatgaaagggaatgacccttcctttctgtcttgagatattatcttatgaggcagccatcttacaaccatgagaagaaagccggccgggtgcggtgcctcacgcctataatcccaaca

SEQ ID NO: 4060 - DNA, 538 bp, Homo sapiens
aatgtgagtccattcttaacagcaaaatttcctctttgcttgtcaccagggaaaaatgggtttgcatagaaaaggtggagattgagggggaagcagaatggacaaggagtaaagagggaatccaactacttagatttgagctttcgttcttctttggtagttgtagaggtgagcttaccaaagcatagatgacaggcaatgtggtatacaagttactacactccaaaagtctggggttcttacttattttgtgcatgacatccaaagtagcctaataaaatcttttcacagaaaaaaaagctttactttcctttgccaaatttttaactttttattctgaaataatttcagaattattgaaaaatttagagactaggacaacccagattcctcaaatattaacactttaccacatctgccttctcattcctctctatatacataggtgcatgtgtggttttaatgtttatttatatacatatcattattattttcttaactgtttgagagtaagttgaagacatgatgctccttactc

SEQ ID NO: 4061 - DNA, 486 bp, Homo sapiens
acataattatattaagcctacccaggataacctgtcttttgattaactcgaagtcaactgattaggaatcttaattacatctgcaaaaattccttcactgttaccttataacataacccaataagaggggtaacatttcataatattcatagatacttctcatactcaagaggaggggagtattcagagcttgcacaccaaatgctcagactctcggtctctgcagcctatagaagtcggcctctcaggcacggaggaagaaaaagagtagatctccttatgttgtggatctctgggtacaaaaacaatatccaacctcataagatttgaaaagtggcagactacaggatcttaggactcttgcctcctactccaaagtgaaatgtttttactaaaggaatggcatgttggagatgcaagttacaaaaacagatctcacatttggtagagagtaatagcgcactgtagaaagtacagtgagagact

SEQ ID NO: 4062 - DNA, 464 bp, Homo sapiens
ggaaacagagaacactcacagatgtggtttactttttcttgtttgggacatctatttatttgccgataacataggacaaggagtgcgttttatctttcaaaggaaagactttactcaattattgtgtttcactgtttgcagttcaagatctatctatataagtatgcagataatataccctcagctggttcactttacctctctggccttatatttctcatttgtaaatttaggaaactagattttatagtcaaaatcagctagcatttactgaatacttattatgactgagctatttggttaaataattttattcaattctcattttttctagaagagaattcattggtttacataattttagttggaagtggactgagggaaaatggcagataggaggcaggactaacttgcagctcccacttggatggacagaacaacatatggagactcacataatgaac

SEQ ID NO: 4063 - DNA, 430 bp, Homo sapiens
  misc_feature 383: n = A,T,C or G
acatacatactaatatgattaatcttctttctttccttttcttgtgtttcataaaagagcaatttcatataaatacctattcttaggtatttatatagtaaatttgagggacaagggaagttgaagtactgatcaagattgggatgagacagaacctcatttgtcatttagatagggaaatgttaagtataacctaagaatatgtatttaaatgaaattgctcttttaattttagagtgacaaggggacttgtttagccaaaatcacttgctttttgaatacctagtatgtgctaggcactgtcctaggaactgagatgaagttgataagcattgtccccgccctcatgaggcttacatgaagctagaacagagagaccttanacgggatgacataaacacacaggctcaataaactctacagtaacttc

SEQ ID NO: 4064 - DNA, 560 bp, Homo sapiens
gtaacaactttacaatggaagtttcctatgagctagggaggcagaaatcggagataacattttcctgaatgagtctttactatagtcactcaggaacatatcttacatgtacgatagtaagactcaagagggtttttttctgattgtcaatgtcctgagacttcagtaaaagaaaatctccggtgtgacaattccaaatgccagtctgaagcctgagtcaatttgcctaataaaactgatttcaccattaaaatagcaataattgttgccttggtggaacagttctataatagctaaagacaagaagaagcagataattagtaaactcaagttgagccaagttttctaacaagaaacactgaaaagagccatttgcagaaggtcaaaaataattaccattaatgtaaaaatgcaaaaggcacagaatattggtatgtgatgtttgtggctactaatatgcaattaaagttttaaactatacgtaggaataaaaaggaataatacgcacctacctgaagaaagaagttacttctagaggcagggtgggacgagatggaaac

SEQ ID NO: 4065 - DNA, 364 bp, Homo sapiens
gcacctaacacgccccacaaataacacatctaatttcaagctccatgagggcagaggacatatatctctttgtgctcacattgtgtctccaatcctagtacagtgagtgactggcctttaatagttgcccaatacatattcattaaatgaatgcataaatatctcccatgtgtttatatccttatccatttctcactctttttgaccatcgctccatcagtttctttctcgtcatcatccttttattacctactttcacttctacaagcctgtctgtcaggtttttcactcatcatcccaactattcatctatccatttctatacctaaagctccctatctgtatctaagcagctatctaacat

SEQ ID NO: 4066 - DNA, 447 bp, Homo sapiens
tagaataaatttcaaaaacatcattgacaaggttggtattcagaattgatttttaaaaaactacaagtcgttgttaaagttcacatagtccagtagaaaaaggcaaaagaagaaatgcaaatggacaataatttgaaaatgcccaatatatgaaataatgtccaagacatgaaaaaatccttagtctcagtagtagccaggagatacaacataaactcttaatgagattccactacacatgcctcagaatagagaaaagtagaacgtctagcagttcaaagcgttgacaaggttggagagcaatagcaacactcatcaagggcttgttgggatgtaagttggaacaactacttttagatacaatacctagtaaagttgaaatttatagcccttgcttaagcaatagcaattttattattcctagagataaatatcctagagaaatat

SEQ ID NO: 4067 - DNA, 555 bp, Homo sapiens
cctcaacaagcacctgccaggatgatctacggacctgactttcctctccaacaccaagggacactgatggctggggagcacaggcactggggaatcttaccacaagcacccagcccaggaagggctttccatctcccacagacaggaggcatcctgtctcaacaagcttctggcctcagaagtcatttcttttccaccaggcctgagaatcccctccttcaccaggatacttgtgggtgggagatgctggtgagggaggtgtggaggggaatctccaccacaataagtagctaggcctggaagcactcttcatccagtcagaccagagactttcttttccccacctagaaacataaagaagcctagcctagaaaaatgtgttctgtcccctcaggcatcacagtatagacccctgggagccccaccagcaccagatacacaaggcccaccaaaataagaccaaaaaatcttggaaaattaaattttccttagaactactgcccactaaagtaggctaggacctacgatgtaaacctaacagagttactacctact

SEQ ID NO: 4068 - DNA, 512 bp, Homo sapiens
aagtatcctttctactgaaagtgtattgctttcataccactgaaaagtcaaaacattttacatcaaactatagaaagttggggactgtactgataaagcacttgtctttagaatttttttaaaagaaataaaaaacctcttcaactcataataagacaaacaatccaatttttttaacccatttatgatagaggttgcaattttttgaattttttgcaatcagaccttggcaatgaccttgagcagtaggatataaataattcccacatgcttagagttccaatgacggaacacgacgcctgagttaaaatgccaaaacatttgaatagaaatttcaccaaagacatacaaatggctaatgaacacatgaaaagacgttcaacatcattagtcattagggaaacgcaagtcaaaaccacaatgacacacattcgccagaacggctagaatcaaaaagactgacaatgcaccaagtcctggtgatgacgcagggaaactagaaccttcaaaca

SEQ ID NO: 4069 - DNA, 533 bp, Homo sapiens
aaatcacaattaactctacttgaaagcacattaagtaacctttttttaaacaaaataattaagaataatacaaattgcttttaacctttactgttcagcattcttttctaagaaggttattgcaatgaatgattttaattatgtccattattagccaaataaatgacagaagaacacgatgtgtagaagcattaattaacataccttatcttggcttattggggcaggtatgaaagaggaataagattaatgtaaaatataggaattaccacaggttagtatgtgtaggagtagaactcagaaattgggaaggctgcacaattcaagctcatgttctaattggtatgggcatctcttaatgttaacccaaaaggtgagacttcaaaaagtatatgttaaaaatctgaagaaaaaatctggttagcagccctctgagagaaaagtaaaaagtttaaagaaccatccaggtttctaggaagacatataaggacactggccatgagagatatatatactgtgacattatctgaaag

SEQ ID NO: 4070 - DNA, 587 bp, Homo sapiens
gtccacggtaggcccagtggatcggtccattgataaactcagtaagtggtctttggtctttacgtctctttgtgatggaaacccatcgtcagtgatgccaacactacctgcgttagtgtttacttggcccccccgccagctcttcctagggagtaacaggctttggagcagctctttccagagctgtggctctacttggctatttccatggtcagagaaggcagaggggtggagacagagggtcgggtagcaaggagaggactggagaccaggacccagcaatctctgaaggcttcccggggctgctcaccaggttgtgagagtcaggcggggtttcagtggaagccccatcttgagatctgctcttctgtcccagaatttgggggaaagaattgtgtatttggccaggcatggtggctcatgcctgtaatacctgcaatttgggaggccgaggcaggtggatcatctgaggtcagtagctcgagactagcttggtacatggcaaaaccccgtctctactaaaaatacaaaaaatcaaaaaattagccaggcgtggtgatgggagcctgaaatcccagctacttggg

SEQ ID NO: 4071 - DNA, 440 bp, Homo sapiens
gtgaatattgaggataaatctaatcccaaaattatagtatgattacatttggaagatgaaagaggggagggtgtgtgtgtgtgtgtgtgtgtatgtgtgtgcgtgtacccatatatgggtgattcatgagttgagagtataaaagaaataaataagcttctttcataacagtataccaatacataataatgcataatgcataaatcagtgccaatatggtttaataagccctgtataagtatttgaaattataaacctatatgtaactttgataactattaatagataaattctggtattaactaggctttaaaggactaggtaaaagtagtaatgcttaatatcagatgcaaaactagtggtatgagtatcagtaaaaatatggaaagtcccactgaaatatctatggggaaaattcaaaaagagatgggtataggaga

SEQ ID NO: 4072 - DNA, 569 bp, Homo sapiens
ggcacaaattccgtggaaattaagcagagtgcttcgctatttgcctcaacaagaaaaagtcatttgtccacttttcattgaacaatcttccttcatccataatttttgttttttagggttttctttttaagacattgtggaagccattctggaattaaaagcattataatagataagcaactatatttacttttattatggaaattaacagataggaaaatagaacagaaagcaaggtttaataatcaaataagaatacttacatgtcttctaaataatattaaacacctatcatctacaaaggtaggttgaaatattattgataattgctgggttttacttgccaaattgccacaaacacacctaatacctgacagtgtcaattcaactgtccgtgattagaagataacacactggaagtcgcacaccaccataaaactgaagccacacatgcgtacaaatggcgacagtgtctggtgtacagcagcgctctgccttgtccagaatacacacttgaattctttgtcacaattcacttcacgtggcactgcaatagcgtcctctcgctc

SEQ ID NO: 4073 - DNA, 488 bp, Homo sapiens
gcacctaacacgccccacaaataacacatctaatttcaagctccatgagggcagaggacatatatctctttgtgctcacattgtgtctccaatcctagtacagtgagtgactggcctttaatagttgcccaatacatattcattaaatgaatgcataaatatctcccatgtgtttatatccttatccatttctcactctttttgaccatcgctccatcagtttctttctcgtcatcatccttttattacctactttcacttctacaagcctgtctgtcaggtttttcactcatcatcccaactattcatctatccatttctatacctaaagctccctatctgtatctaagcagctatctaacattttgttaatatattacaagatatttttatttgttcataattgcatctatgcctctttcatctccttgtcattcattaatccatcattctccaccatgcttttaacctaagttatattgcgtatc

SEQ ID NO: 4074 - DNA, 550 bp, Homo sapiens
ggtcgaggctgcagtgagctgtgtttgcaccactgtacgccagcctgggtgacagagtgagaccctgtctcaaaaaaaaagagagagagagaagaatcaaagccaactagaggtataaacagaattttagaaggcagaaagagaatgaatgataactagactagaaaagcagacaaagatgaaactcaacttctggcagaaggggaagcaaacaaaaaggggcccaattcacaccacagaactaaggatgagctaaggattttgtaaatgtgcactgttgtttataacttggtaaaatattctatctccttaaaagcaacatagagaaggaaggaccaacaaagtatttaggacaatgaatgaaaaatatctacacataggcatgtaactgagacatctcagaaaaatgagaatacacaacagatcctacaggctttcagagaaggaaaaacaacacacacgaagactgggaagtcgagatggcaacagactaaacaccaaaagtaaaagggtaatgtttttgaaaatgcagggattacagattacacct

SEQ ID NO: 4075 - DNA, 517 bp, Homo sapiens
ggacagcgacctggattgtccttctcccttctctgaaaaattaccccccatatctcccgtgtccacgtcaggggatgtctgcaggttggtttgccaggaagtgccattctagccatctctgctcgcatcaggaacctcctcttgctttagtatgtgaagtttcaggaaaatgaagtaataggaagttgtaaccagttgtgggttgatggttttctccagaagaatggagtatcaatatcgtttgaaaaacttaatttttatgatgtgagtcccaagatagttttacaaatgataaaagaggaagaagctggctgggcgcagtggctcacgcctgtaatcccagcactttgggaggctgaggcgggtggatcacctgaggtcaggagtttgagaccagcttggccaacgtggcgaaaccccgtctctactaaaaatacaaaaattagccgggcgtggtggcgggcgcctgtaatcccagctactcaggaggctgaggcaggagaattgcttgaacccg

SEQ ID NO: 4076 - DNA, 439 bp, Homo sapiens
gaagtaattcactcatatgctatgttaaaatttttctgttcttatctttctttctttacctttcctttgttctttaccatgtgctcccaattctctattctctctcttagcagtaactttatgcacctgccatttttttttgtacccattgcttccttgtattctccatccatcaatcaataagccttgggcttccaggactctgcttctttggatctaagcctggcctgctctctctgttatttgtggtgcatccaacctctaattttaactttgcttggccctatcatgtaaaaatgactatttataacaaatcattttagcctactcaaactataggattagcacatattgaaaataggtctgtattaggacaatataaaatcattctggcttgagtatatcagaatcaataaagtagtaaactcaggataaatgc

SEQ ID NO: 4077 - DNA, 108 bp, Homo sapiens
taagcctgaaaaatgatttgcccaaatgaaatcctgttagaaagctacatatcaagagaagccatcttaacctccctcaccactatcatacattattgaggcttactg

SEQ ID NO: 4078 - DNA, 466 bp, Homo sapiens
tgttgctttctgcatgttgcatggctaggtggttacacagcttggtttttctgattccctgctggtttacgtgtgtttccccagagtgttttgaatagtactccctttgttttcaagtgtattgactgcttgagttcagattctagctccactattttccaggggaactaggactaaaagaaaatggaactctgtcccatttttgtcatgtgtaaataagaatagtggtgcttccctcatacggttgctctgaggacggtgtgtattaacacctacgaggtgcttaatgctgtctggtacttagcaagtactcaggaaaagttaggtataattttatgtcatggcattagttttattactttaaaagtattacctaatggtttcttacattttggatttactattagttatctggttatatgtatatgtgaaataaatatcagaagatacagatatcttttctctc

SEQ ID NO: 4079 - DNA, 504 bp, Homo sapiens
ggacttgagcgatcctctcgccttagcctcccaagtcgctgggactacaggcccacactaccacaccagctaatttttaaatttttctgtagagatggggtctcactgtaatcttgaacagctggcttcaagcaatcctgccgccttggcctcccaaagtgctgggattacaggcatgagccactgtgcccacataacaatgtttcttaagtgaatacatgaatagctcatcatctatggaatactgtgctttacaccaagtagtttgcatttattatttagtattcataacagtctacctgcaaccattgcttttcctattttatagaggagccagaggctaagtaaattcctcagtctcacacacagtgaatggcaaagcctgggttcaaattcagttgccattctccaaagctcacagatttccaagcaacttctctttcgaaaagcacaaaagggagctgttcgggataaaagaattattctaagacacaattatgatag

SEQ ID NO: 4080 - DNA, 500 bp, Homo sapiens
acacatggtgggacattgaattggatttttattttacaagtatggtacaattttcataatgaaactctaagctatttgagggcagagactgtctgatattctcatttgtattctttgcatcgcctcacactgtattatacacatgattaggatcaagaaattcttattcattgactgaccttgaaatctggggttaagatctttttctgggatgaaaccgacatattttataaactcaccactccctgagcactcattattagacttcaataatataatctccatggtgaaaataaacataaaaattgaacttaacggcagggcgcagtggctcacacctgtaatcccagcactttgagacgccaaggcgagcggatcacgaggtcaggagatcgagaccatcctggctaacacggtgaaaccccgtctctactaaaaatacaaaaaaattagccaggcgtggtggcagtcgcctgtagtcccagctattcgggaggctg

SEQ ID NO: 4081 - DNA, 540 bp, Homo sapiens
ggtgagtcacaaacacaccacagcactccagcctgggtaacagagcgaggcccttatctatgaaaacaagaaaaaagatgaaacaaatttcaacatgaggtttggaaggaacaaacatctaaatcacacagtagttcctgacctgaagctattgtcacattattgatgtgtataatttagaaatatgtcattaatagccaatactcagatctagaaaactagtggacaaagcgagtgctttaaaaccaaagtggcatttaaaaaaaaatcaaacctactggttttcctactaagtaagtcttgaaataatgcactatagagatcctgtcttatctatacagctagagagaataacaaattttacttttatcagttaaataaattttgtcttaatatgacttattatttatatttatctttttacatttcaaaaacactatgttattcaattgaatgacttataatttttgagttacctggtcactgtattatcattgtcagttattatatttcacatgcattacttagtaaagacaaatc

SEQ ID NO: 4082 - DNA, 299 bp, Homo sapiens
agccactatgccggccgcaaaggattctttaacacaaaagggcaggactcatgagactgacctgaccattacatggtgcagtgagagttcaatttaactaagcctccttatgcttctttgactaatttagggccatgcagtgtcggggtgtatgagggcacaaaagcagcttctccctggctatcttcagaaggaatcttagattgcccttgaacaccatcaacaatctgctatttggagggctggaaactaagcctaagaaaccaccaggcttcggccgggcacgctggctcatgcct

SEQ ID NO: 4083 - DNA, 449 bp, Homo sapiens
atttagaccccttttttgtcaacttgctagtaaaagaaacataaatagatatttaggtgctgaaatttgacaaattataaatattggctaccggacaatttttaggagtatgttttattatttactccttggttcagcttcccctttcaataactcaggatcaagttggttgagctttttacaagattttccttattttacctggcatttgccaaagtgatccttaaaaatggactatctccttcctaaaatgtagctcgccacgcaggagtttataaacaacttagggctagaaagtgcagctgcagaaactgggataaaagattagaatggagggctctgtgaagtctgaagttatttattattgaaaaggaagaaaagtaagtgctgttagaaaatgagaaaagtgaaagttaagctatgtggtaaagggaaaaaaagaagtatta

SEQ ID NO: 4084 - DNA, 415 bp, Homo sapiens
tttactttgaagagcactaaaattagagccgtcctgcttttaaggcaaggaaggtgggatagcagatgcagggctgggagagttcatgtaatcagtgtcccccttatccatgggggctgtgatccaagacccccagtggatgcctgaaacctcagatagtactgaatcctatatatacactgttttttttctagaaatgcatatctgttataaagttgaatttataaattaggcacagtgagagattcacaataactaaaaaataaaataggccaggcctggtggctcacacctgtaatcccagcactttgggaggctgaggcgggaggatcacctgaggtcaggagtttgggagcagcctggccaacatggcgaaaccctgtctctactaaaaataggaaaattagctgggcta

SEQ ID NO: 4085 - DNA, 613 bp, Homo sapiens
taacacattggattgatcctccaggcaagaggtggtccagcatccggggcccctaactaatgaaatactctgggcaggggatagcagagtggtgcagagtcctctctctccccatatcccatcagtctccactgtcaacagtataacagccatcgcttgctgagtacttattatgagcctggtaccattctaagtgctttatatgtatggactcagtcctcaatgagtttggcaccattatgattcccactttacatgcggggaaatggaggcacacataggtcaaggaacctgcccaaggacacagaaccaagacaaacccaagaagtcggccaggcatggtggctcacgcctgtaatcccagcactttgggaggccgaggtgggtgaatcacctgaggtcaagagttggagcccagcctggtcaacatagcgaaaccccgtctctactaaaaatacaaaaattagctgggcatggtggcgggtgcctataatcccagctacacgggaggctgaggcaggagactcacttgaacctggtggggcagaggttgcagtgagccatgatcgtgccacttcactccagcctgggcgaaatagtgaaactccatctc

SEQ ID NO: 4086 - DNA, 425 bp, Homo sapiens
caaagatgattgctacattatctgagagaagtcgagagcttcacaaggaagttgaagtagctaagaggaatttggcccaacagaaaattatatcagaaatggagtctaagttagtagaacaacaacttgcagaagaaaacaagcttttaaaggagcaagaaaacatgagagagctagtagtcaaccttctccgcatgactcaaatcaaaattgatgaaaaggaacaaaagtccaaggatttcctgaaagctcagcaaaaatacaccaacattgttaaagaaatgaaagcaaaggatcttgaaatcaggatacacaagaagaaaaaatgtgaaatttatcggagactgagagagtttgctaaactgtatgacaccattcgaaatgaaagaaacaaatttgttaacttactccacaaagctcatcag

SEQ ID NO: 4087 - DNA, 510 bp, Homo sapiens
ccagatcatgtgcttagggtatcaagctaattctgaacttcagccaccagtgggaaaaagctgttgttatattttcagtcttggcaggagctgggtgaggctgaccacgaaggctaaagaccttcaattcctacaaatgggcaagtctctggcaggcagagactgacagccacaaaatttcttttaatcatatcgcaaatgttacctccccagaaagactttttctgcctgctatagctaagatgcccctcaatactcaccaggtcatcccctgtcccattgctctgttttattcactatctgaaaacacctgaggtatttgtccatgagttcagtgtctgtgtctctccactagaatttaagcttcacaaaagctggaattttgtctcattcattcctatatttctggcacctagaacaagcgcttggtacacaatcagtggtcaggaaatgtttgttgaaacccaggctggaggaaccagtcatctagtataagaaccatttcccaca

SEQ ID NO: 4088 - DNA, 460 bp, Homo sapiens
gtcagaggggcctggcctgggcccaactacatagaatcatgttgcacaaaatgcaggacaaagagttcaacacaaaagtggatcagagcagtgaataactcagagcagtaaactgaactttattttttatagggttggggtcaggtataacagtgatgagggagtccaaaggaccttggcctcagatcttttcaagcaggcatgtgctccaatgtcatgaccccagaacagaaacagacaaaactagcatagatcccattgaaccactaggaaaggaatgaagagtccatgtgtaaactatccattgttcaactaggcaattttattttggacagtgtttgcctaaacaagggagagagaataaggaaaatataagtaaaaagcaactcagtaaagaatatgattaaaaggcacaccaagatgcaaaagtaggggaaatagagatttaggtaacactcta

SEQ ID NO: 4089 - DNA, 374 bp, Homo sapiens
atttagaccccttttttgtcaacttgctagtaaaagaaacataaatagatatttaaaagctgaaatttgacaaattataaatattggctaccggacaatttttaggagtatgttttattatttactccttggttcagcttcccctttcaataactcaggatcaagttggttgagctttttacaagattttccttattttacctggcatttgccaaagtgatccttaaaaatggactatctccttcctaaaatgtagctcgccacgcaggagtttataaacaacttagggctagaaagtgcagctgcagaaactgggataaaagattagaatggagggctctgtgaagtctgaagttatttattattgaaaagga

SEQ ID NO: 4090 - DNA, 502 bp, Homo sapiens
catacctcagttgtgctagatgatgttagatgcaggcacactgtatatgaggttggatgggttgtgcactacacagctccatgggcgccatgcagctatactctatgtgaatacctcctcccacgtggaagtgttcagtacacaaccagcatggtggtagatagtaaccctggccagaagcttaatcaatggaggattttaagccatgaaaatagagaggtagtcattgacatcgcttaatgatcataaactgttttaaattcataaatgaatgctttgtttggattttctatttccaatttcaactaactttgctgtgtgctcctgagagcaagtggttttgatagaaacagactgccacatagaaaattcatacactttggttccctgggaaaccaggccaagaatagttttctttgcacatcctggtttcctctaatgagggccagtataagaatgtgagtgtcaacagtgtaacccataaatcccaaggaatcattat

SEQ ID NO: 4091 - DNA, 506 bp, Homo sapiens
gcaaaataaaaacgtgatattttaaagatgaaaagttttcatcaaatatttcttaatgattttgaccctgaatattatgatgccattttttttaaaggttcttaatccatgttaggtcacaaaatagtaattggaccttataaaattactacttttgagcaagatgccagttggctctcactaatattttctagaaaccaactagaatcctaagagaaaaattgaccacgttatatttaatatagaaatataatgtcattaaatttttgtaattgcccttagaattcgtatcaatattgtttacctattggatccagtctcctcaggttttctaggccatttgttcgcttctttcaaataataggcacagctcagctaccttccttcagagagggcagggccatttctttcatgtctgcgatggtcattccctagtagcacaatgctagaatttagaaagtgcttaggaagtatttttggataactgaatatataaacgaatgaca

SEQ ID NO: 4092 - DNA, 351 bp, Homo sapiens
catctcagccacaatacttattgcctggactgtatattgaagttcaaatcatattctatgtgatatttaaacacagcttcaaacatacaaaccacaaaatgccaccaccacgtgccttgctgtgggtgtcatttcactcaccgtgttaaatgctaccagagttttcaatctgcagacaggatattcagttctgggaaattttcatgtatgtttacaaataacttccttcctattatatactcgttttcccaaaactccaacttggacatcctggatttatcttctacttctaatttctctcctgaattctcagagttgaaagttatgaaatacatattgaaagaatgcccc

SEQ ID NO: 4093 - DNA, 485 bp, Homo sapiens
gatcaaattaaaaatacatatgtttgtctgggagcagtggctcacccctgtaatcccagcattttgggagaccaagatggaaggactgcttgagctccggacttggaagccagcctggacaacatagggaaaaccccgtctctacaaaaattaaaaaaaaaaacatagccaggcataacggtgcactcctgtggttccagctacttgggaagctgatgtaggaggatcacactgagtaagtacaacatgcccacttggtactatataactacttgtgcccaggagggtgaggttgcagtgagccatgatcataccactgcactccaacgtggacactagagcaaggccctgtctcaatatacagagatagacagatagatagatagacagacagacatagattttccttactgtaagttagggtgctattttgacaggtggacttgaagtttgtaagttactcctttgactggattctccatata

SEQ ID NO: 4094 - DNA, 509 bp, Homo sapiens
acgtaggtatagaaatatagatacatattaagaagccatgatttaataaaagcatatactttttatttagtaaaatatttagtatttagtaatagtaatagtaatagatacatattaagaagccatgatttaataaaagcatatactttttatttagtaaaatattagtatttagtaaaatactccatgaatataaattgaagtgaattaaatggattctcgagagaaagacaaattcagagttcttgaaccatgaatataagattccagtgggaaggtaccaataaacttgtaggcttagttgtttagcaagagcgctggttatcagcttaattagtcagacctagtccaccttatcctaacgagcagtggctgttatagggaaaattgttattgtttttgcaaacagttggcctgaatttcacacttagccctgtccttactgcctgtgtgacatcaggcaagtcacttgaacctcttgaaactcaatactctaccatctataaaat

SEQ ID NO: 4095 - DNA, 496 bp, Homo sapiens
tatgctgattttcccaatgctgaatggtatagcagctggtgaattttcaataagatacacttttctcctgttctagcaagttttgatatttgccatttggttccagaaacttattgtgtctatgttcctaaagcactttgactctgagagagaggacaaactgaacctgatatatgatgtttgtgccccttgacggaggctgaattttctgaacttgaatgatcaatacaacagtgtcttgctaaaaattgtctcgcagaaaatttttcattcatttttcttgatggcaagtaatgtattccttcatcagaacaattaaacatctttaatgatttttaaagacagggtgtaattacatgcacatgataaaaatttaagcagcaccaagggcgtacagtgaaaattaagtctctttcctgactggagatcatagtatgagtgtttcatggctcctttcagagagattccatgtctagcatttatacatgcacataaa

SEQ ID NO: 4096 - DNA, 569 bp, Homo sapiens
tactgcagagtaaaataaaaccaccagataaacagagcccgaaacggaccaggatagaaaaataatgccaattacacttgaatccatttaagcagcagcttctggaggaagaaggaggctacaataatagtatccaaaataaacaattcagtaattgatcaactagtcagaggaaattatcctaattcaagatctcatatgaaatataaagtgttatacagacaagaatgaggaaaaaaagacaccaggagatgtatctaatgtgcagttgtgagttcaattgtttatgcaatttaaaagaatatctggcatcgctacttctacacactcttctgaatctgtcttaaatgcactatcatttaaacaaaaacacaaaagcagtctgtcctactttttttccaaagaagtaaatatacagaaaggttttaccataaaatgttagcaatatttcctgtagattataaatgacatcaagaaaccataaaaataaaaattttcactgtggccaaaaaaacaccaaaagccaagtcaaaagacaattgacaggtgggaaattttttttgcaactc

SEQ ID NO: 4097 - DNA, 571 bp, Homo sapiens
tggagcacactcctgcagtcattcaaggaagaggcaaggcccatgattggcattctcagtcaaatcacacgaagggctgcttttctgatatagtaacacccaacagatgaaatcaggagatttcctcttcaagccctttacatttccattgtggccagagtctcagatctgggtgcagacacaaccctgctacactacaggcctgtcctttgaaattcctccacatccattcctcaagcagtctccagtctgggtcaagctcctggagaggctcatcttcccacctgaactctcaaacatccttggtcacataggattgattaagaattcattcctggagctcctgctgcagaatttcctcctccctattcacctctgtgcatctctttacttccttgtttaagaaacaagggcaggccgggcatggtggctcatgcttgtaatcccagcacttcgggaggctgaggcaggtgtatcacctgaggtcaggagttcgagaccagcctggccaacatagtgaagccctgtctctactaaaagtacaaaaaattagctgggcgtggtggcaccc

SEQ ID NO: 4098 - DNA, 579 bp, Homo sapiens
caactactaaaaatggctgctgaagaccaggaaggagggagaaaaggagaggaataggagggaaaaaaggcagccataggtggcaaaaatttggccctgaagcacagacaggaaccactagcctgcctctcctccttccctggtatctggggaagagagtcctggtggtgtaccctagcatttcagaacaccgtctatgaatgtcaaagctgatttacgtatgttcttttcctgcaggtattgttgaaattcaaactctgtcatccttatttatacttctaaaaaccacatttggtttaaagattctgtttgctatagatggggaaagaatttatattcagcttactagcgcatggaaaagaagaacattaggtctgtgtggcacttttaatggcaacataagggatgattttctgtaagtatgatttctgcatagttaacatacttaatgactggtcatttaaaggatataaattcattaaaaatgtttacttaactaataattgcttagctgtcattatcccaagagatttacatggatcatcgtatttaaaatgtatagcaatctctgataaatat

SEQ ID NO: 4099 - DNA, 609 bp, Homo sapiens
gatagccctgagtgagcagcattcacatcacgagatattaaagacccataaaaaattttaaaattgtattctttcttaccaaaagcataactctgtaacttcaaaattcattcttcaaagatggatatattattggaagcatggtttataacataaaaatctagtctcaagcaagacagggctagggagctggcagacctgaaatttacagggaaaaataattgcatgaggctctggggtttcagaggtaaccactttaaacaaattcctttgaattttgtttaggtagaataaggcactcaaaaatagcactgtccaatagaaatataatgttagggcctggtgtggtggctcatgcctgtaagcccaacagtttgggaggccgaggtgggtggatcacttgaagtcaggatatcgagaccagcctggccaacatgggtggaaccctgtctctactaaaaataaaaaaattagctgggtgtggtggctcatgcttgtaatcccagctacttgggaggctgaggcagaaggatcacttgaacctgggaggtggaggttgcagtgagctgagattgcaccactgtactccagcctgggcaacagagtgag

SEQ ID NO: 4100 - DNA, 467 bp, Homo sapiens
ggttcttacaatgtgcctaaacataatacaaggattttatatttcagatctgagctgtaatctaagtgaaagtatattatgaatatgggacaatatgaatgcggtggtgctgtgaatagagtgaagattggagtcatgcagaatttgaaatttgagtcttgactctgtcacttacagttatctgattagacacacacacacacacacacacactttctgaatatgtcagtaagttacatatatcattgattattaagtgaaggtattacatctgcttcacaacatttgcaatgaagagaataactggcaaggttgctgtgtggattaattataatgaaataataatactaattacaattattattattcctagtatcctaatgttttatatatcttgacttttttcttataacacctcaaggagaatgaaaacaattatttccattccatagatgacaaaacgaagc

SEQ ID NO: 4101 - DNA, 574 bp, Homo sapiens
attgcattctcagcatatactacagttgctcttgacaactacaagcaagaaagaggggataattgggtcagtccaaggacacctggaaagttgacctgcagtctcctgctccaaccaagatatttcccttagaaaagctagtgtatttcacatgcccattgacctctccagatctggaggtggaggtttgtcttgtcagatcaatgtaacaccttggctgactctgtctcagtgaaacatcattgagtcatagccagaatacattttactagtcccaggaggactactaccactagcagcacagccagacctctctgcagtagtaatctagccctgggtctcaaagatctagataagaggttgccatagaggttaaagaaggattcttcaggtggccccactgtctacaaccaatgggtcagcttctggatctcctctacctatgtttctacaatacctaagatgtttatcccaatacagtaagaggtgttggcaattgtatacgcttctcccagttgagctaaaagaaagtctggagggccgagtgcggtggctcatgcctgtaatcccagca

SEQ ID NO: 4102 - DNA, 599 bp, Homo sapiens
tacaggtgaggatattgaggtacagagaagttaatcacctgctcaaggccatacctactaagtggtttggcaggaaggcaaacccaagcagtcaggccctataacctgaaagtagacacctagccacaacactacactgtcagtcagttaaagtccagtcagacaattgccagtgagcgccaagtgtggtagcagataccttagtggatgagcagggtacatcacttgaaaaaatcaggcagatgggaaaggaagatgttagcttggtgttatgcaaactctccagtgctaatagagtcctaaatacatagttcctaagtagtggcagacaaccctaaagcaagtctcaatttggtatggaactgtacgcagactgggtaataagatttctgaagcaaaatgagttctgtaaactagactcacattgagcatgaacttgcaatgccaatgccaatgccaatgcgaaactatggaacagggagccagagatgcttcagctcatttagtccacagttatactaaagagaaaaatcaatcaattgtaactgacccaaaaatgacacagatgatagaattactggatgggacattaaagcagc

SEQ ID NO: 4103 - DNA, 636 bp, Homo sapiens
actcgttttgctccatatcaccagctctgggtgtcagcggtaaaagctgtctaaagcaaaggcccttgatagtcaacatggatctccttccatcttggaaatatttttggcatcctggtagataacctaataatgcccttggcagctcctccaagcaagttaactttggtaacatgttaaccaatgttataaccttgccatctagatagaagatttccacaagttagcctctcttcaagggagaaagaagaagtcataaacgggtacaattgtccaaaaattccccctggcattttcaccatcactgggcagagattgttcttcccaattataaaacgtactttaatcccaaaacaattgcctaagtcttatgccttgggaaagaaaatgaaccatgacgacatctctaaagacaattccaaatgttttagagaactgttatatcgaaaggagcatgggaacagattttcatagtccctgtccaaccatcgcaattattttttagtttcataccctgaatagttgatcttcaaaatgcccaagttgataccaggccattcaaagctgtttaaaagtaagctgacacttgaggaataacagtcacagtcataatacaatctaacatctctacaatgc

SEQ ID NO: 4104 - DNA, 556 bp, Homo sapiens
ggttaagtaaattgtggtacaaccaaacaatgaaatactatgtagctataaaaaataagaataaagaagctgtttatgtactgacaaaatgattgccaagatacaaattaaaaagcaagatgtggtacaatgcatataaagtatattgccatttgtgtaaaaacagagggacaaagagtatgtgtgtattcgcttgtgtatacatgaaatattaccaggatacacaagacacagatattactaactacctctagaatggggaacttttgtatctttttgcgttttttgaattttgggacttgtaaatatactgcaatcaaagtattaaataaggaataaaatagttcaatttaaaagaattgagatggtactctactcatatttttctttttaaaaaattatttaagataccaaagatcagcattcactaaatggaattaaacacactcagaaatattgataatacagtagataaggctgggtacagtggcttacgcctgtaatccctgcactttgggaggccgaggtgggtggatcacccgaggtcaggagttca

SEQ ID NO: 4105 - DNA, 630 bp, Homo sapiens
ggttttccatcaccaagtttccatatttttagtaaacaccataaaatccctattcctattccatgtccaaagtattactccttcaaaagctgccaattttgaatgatatatacttttcattttgtgttcaatcacttaaactcattcatttaatatttcataagggcttactctgttgtagacactgaggatagaatagtgtacaagacaaacatgtcaggctttcaccaaacttacaggaaagcaatggaaatagtcaactgatgagtcaaaatcataataccattgaataagtgtgttttacacaatatccccatttccacctctgttaatgagtgttgattatgtcacattgaaaaccattaaaatgtttacccatactctcattagacaatgagcatccctgtgttttcttgagtaatatctagacactggaatttcattcatggcatccaaacatctctagtgaagtcatgggcaggcagacagctaatctaattacctaatttatggtaatctgctcatgggttctcttctctaattaaatctgcattttagtatagccttctagagaggtaatgccctaatacatagcctataaaattaatgctactaatttcagcaactctg

SEQ ID NO: 4106 - DNA, 420 bp, Homo sapiens
gattacatatttgtgtaatcactttgggaaatattgtaatgttatgcagaaatattacaggcaataaattcttacgatctgggatcttcaatcacagggatagaatttcttccatgttttccagtgtgtgtgtgttcatgaagacatttgtaatttcaaaaacccagaaattacatgaataataaaattgtgacatatttattcaatggattgctatataacagtcaaaatgaatgaactgtagctacaaacaatgtaaatagttctcaatagtgctaagtaaaagaagacattcataaaatacatgaacaaaacatttactcacataattttaaaacatgcaaaatcaggccgggcgctgtggctcatgtctgtaatcccagcattttgggaggccgaggtgggcagatcacgaggtca

SEQ ID NO: 4107 - DNA, 339 bp, Homo sapiens
ggtaattccaagcctaagcacttttgtctcctgttgcctgtccacaaattctaggtccctatgaggagctataagttatggccattttttctgtctgctgatgtcacacaataatgtgggaaagaataatgtaatcattgaaggtttggggctagagcgagtatcttttgcctcgtttaatattcttgactcatgatttaagcaggttcataggactgttacattttccaagtagaaagactttcttccattcaacaaaaaattcattttctggctgggcatggtggctcacgcctgtaatcccagcactttgggaggctgaggcaggcagattgcttg

SEQ ID NO: 4108 - DNA, 330 bp, Homo sapiens
  misc_feature 276: n = A,T,C or G
tatagaccaacaagcattctctcatattcttggcaaaaacacacattagtaaaaacttcttcagtaggagctgttggtattttagacacagaccctgttacatgtcctctccccacagatacgtggatcatgtgtattcactgcagcagcaatagattcaagtcaagataagtgtccattcttgggagactgagaggaatattctggagtgcccacaaggacaaatcctgtatttgctgatctggaacaatttccaagatgtatactgttcagcanagagcacaggtttgtagaagagtatagagatacatctttttttgtgtgtggaag

SEQ ID NO: 4109 - DNA, 397 bp, Homo sapiens
cgtgctagccaggatggtctcctgacctcgtgatccgcccacctcggcctcccaaagtgctgggattacaggcgtgagccaccacgcccggcctaataactgttttaagtaaaaatcatcaatggattctgaagctataggtgaaagtttaatgagtaataggatatttatacagtctcaaactatctccccacaagatatctattaattagaaagaggggaaaaatgtaactttttgaagagacctggcaaacacctctttaaccacgtaggaggaagagatatcgtgtgcctcccgatgtgaggcactgagaaggatatgtcacatctacagtattcctgccaaaatctaaccaggaggaagcatcaaacaacgtcaaattgacgaactacacac

SEQ ID NO: 4110 - DNA, 576 bp, Homo sapiens
atgagcctgtggtttcttcctttcaagtgaaagaaaccataacacagatcacctgtctcttgttacagatgaaatgacaaaagcataggctatggctttaaagtacatcatagtatgcttttaaaacagtttaacagctgaaattacacagctttatctaagcatattttagatttataaaggatcgtgtttctcctttctgagtttttattaaagaattttgccttctgtgccatacagtttgaaactgggcaatgagaatagtcaatagtttctgaaattataaggtcaatatcagaaagaaggaaaaaaactaaactaatataggaactgtaataagatgctttttgaactttagtgtaatcattaacaaatttatgatataatctgtctttgtctttttagttatctttaaaatggccaaaaaattattttttctctcacaggtttttgtgaatcggatgaaataatatgcatacagtcctatgtgctcttaaaactaagttctggctgggcatgatggctcacgcctgtaatcccagcactttgggatgccgaggtgggcagatcacctga

SEQ ID NO: 4111 - DNA, 505 bp, Homo sapiens
ctcactcttgtcacccaggctggggtgcaatggcgtgatcttggctcactgcacgctccgcctcccgggttcaatgattcccctgcctcagcctcccgagtagctgggattacaggtgcctgccaccatgcccagctaatttttgtatttttagtagagacaggtttttgccatgttggccaggctggtctcgaactcctgacctcaggtgatctcccaaactgctgggattacaggcgtgagccaccatgcctggccagcttatcaaaactttaaggagtactgaaaatcatttagaagttagtaagttatagtctttatacaaaaaagagtcaagtgttcatgttgtataactacacttagaagacagctaggattttaaagattttcctttattttgtgtagagaagaaacatcacacaatattctacttgtcatctttcctcaacttaattacatatatgctcacacaggcaaaatatttaagtatatcataccatgaatt

SEQ ID NO: 4112 - DNA, 341 bp, Homo sapiens
cataatttcttacagcattttatatagaacttctgcactaatacctagccaatcaataatattcaagaatttggtctgtattttgaaaacagtatctattattatttctgcatagttacccaataatttttttttccttagagttgggggcctaattatattgtctaggctggtcttgaactcctaggttcaagcaatctttctgactgggcctcccaaagtgctgggattacaggcgtgttacaccctgtgcccagccccccagtaatatctttaatgttctagcttatgttttactttgttttataaagaatgtgtaaggctgggcacagtggctcaca

SEQ ID NO: 4113 - DNA, 451 bp, Homo sapiens
gacaaaccttcttaagcagtttctactccttttcactcggctttccttcctatttcccagaatagttcccataacaaaggcagtatgaactaactctaaggtagagcacagagaactggctaaacatgtgtgttcaaattaagcactgtccttggcatgaaaaattcaatctggtcatagtaaaggaatatggaaaagtctcttctgtatgtctacataaatgactatataaaaacactttcagccaggcatggtggctcacacctataatcccaacactttgggaggccgaggagggcagatcacctaaggtcaggagttcgagaccagcctggccaacatgatgaaaccctgcctctgctaaaaacacaaaaaattagccaagcgtggtggtgggcacctataatcccagctacttgagaggctgaggcaggagaatcgcttgaaccca

SEQ ID NO: 4114 - DNA, 518 bp, Homo sapiens
gaactgattttatttcagtgtttgataagatttagaatattttcattgttgcagactcagacttattcacgtccctgccctaccccaaggaaacttccataggctccctgtctttcagcatcaggcccaccctactccctgtaagggaaggctgtgctcacttccctctggggtacagcattcatttggcaactctgaccctgcgtcaacgtctctgcaaagtctgattcttcagttagaaaccaccccgctctgtatgagttcatctctgtaggaattgattgaaagtggggtacggaattgattgaaagttgcatattggccagggatcacgagatcaggagatcgagtccatcctggctaacacggtgaaaccccgtctctactaaaaatacaaaaaattagccaggcgtggtggcgggctcctgtagtcccagctactcgggaggctaaggcaggagaatggcatgaacccgggaggtggagcttgcagtaagccgagattgcaccactgcact

SEQ ID NO: 4115 - DNA, 465 bp, Homo sapiens
ggagatcgcgggagcgagcgcgcggtaacagttcgcggcagttcgcgcgggagcggggcgcctgggtggatgggcgcttgggcgcctgggctgccggacggtgggaacggaagtcgctgtgggacgctgaggaagccaggatggcgactccgagcaagaagacgtcaactccaagcccccagccttccaagagagctctcccgagagacccttcgtcggaggtcccgagcaagaggaagaattcggccccgcagctgccgctgttgcagtcgtccgggcctttcgtggaaggctctatcgtccgcatctcgatggagaacttcctaacatatgatatttgtgaagtatctcctggaccccacttgaatatgatcgttggagccaatggaacagggaagtcgagcattgtgtgtgccatttgccttggtttagctggaaaacctgctttcatgggacgagcagata

SEQ ID NO: 4116 - DNA, 666 bp, Homo sapiens
agggaaggttggaaaacctgaggccagggctctaggcaacaggaagggatgaatgatggtcttgcaagccactatcactgggataaatcgatttaaccttctatccatctttgtgtcaaagagccttagcttgggtcacatgactaaccttggttgggcaggacagggcaaggtgacttgattcaaccaagacagcacttagtggaggagaagtaaataaattgctattagcaaaagaaaggagtactggatcctagaaagctaaagaacaataaatgtctactacaaggtttaattttgatggctcccaaacccatgttcctttcattaagttaaaagttctctattcctgttagttggtcaagtaaaagacgtttactttgggctgggtgcagtagctcacactggtaattccagcactttgggaggccaaggcaggcggatcaccggaggaaaggagttcgagaccagcctggccaacatggtgaaacccctgtctctactgaaaatacaaaaattagttggacgtggtggcacacatctgtagtcccagctacttgagaggctgaatcaggagaattgcttgaacccaagagacagaggttgcagtgagccaagatcacgccaccacactccagcctgggcgacagagtgagactctgtctc

SEQ ID NO: 4117 - DNA, 402 bp, Homo sapiens
gaagatttccaactgttgtttagcaaaggtaagaacactaaaaactccttgaattttcctgagttttaagatccttgacccagaaaaagagtggattcctggggtccttaaaaaggtaattggaggctgggcacagtggctcacacctgcaatcctagcactttgggaggctgaggcgggtggatcacgaggtcaagagttcaagaccagcctggccaagatggtgaaaccccatctctactaaaaatacaaaaattagctgggcgcagtggcaggcacctgtaatcccaactacttgggaggctgaggcaggagaatcgcttgaacccaggtggcagaggttgcagtgagccgacatcacgccactgcactccagcctgtgtgacaaagtgagactccatc

SEQ ID NO: 4118 - DNA, 530 bp, Homo sapiens
agagcactgtcttctcttttcattttaatcctaagcaataatgccatattctatccttggtcaatgtcctggagttgattgattgatttgggacatttccactactgctcccactgggtcttctccatctgcatttttaaaatgccacctccatcatccacacatgctttctgctaagcagccctccgttcttcagccagtgtttgtgggtctgttcctcctgcatgtgctttttcacggaaccctagatttttaatcagatgtactttttgttgttattgttaacagccatgaaacctatgctctaggaaccatgtgaacaagcattttaaaaggcacaaggggctgggcgcggtggctgatcacaaggtcaggagatcgagaccatcttggctaacacggtgaaaccccgtctctactaaaactacaaaaaattagccgggcccggtggcgggcgcctgtagtcccagctactcgggaggctgaggcaggagaatggcgtgaacctgggaggcagagcttgcagtgag

SEQ ID NO: 4119 - DNA, 461 bp, Homo sapiens
tcccactacaccatcccccactgacatgcaggtaggtatctaggctctgctgtgattggcagcgcaaagaaaacactaatgccagtgaccctgccccttcacactgccactgccactggtgcaaatgcacacacagaggccagcagcttggcacttgccagtgtcctgcacctgctgccactgccaccagcacaaatgcaaacacagacaccatcaatactttccacaaaagtgttccgcttatgccattatgaccctgctaccaccggcacaggaacacacaggaatgcctcagccctgctcctacctggaccctactactgtcaacatgcatgtaccttgcctcacttctgcggtggctgacacatgtgagcaagcatggctcccattgccactgccccaacaaagcactttggttggcaccacccaccagagtgttgcgataagtggactgggaagac

SEQ ID NO: 4120 - DNA, 509 bp, Homo sapiens
gcagttttgttttgttttgttttgagacctctcatagcaagaaaaaacattacataaacttttttttgagacaaggtctcactttgttacccaggctggagtgcagtggcacgatcttggctcactgcagcctcgacctcctgggctcaagcagtcctcccaccttagtcccccacgtagctgggactacaggcacatgccaccacgcccggctaatttttgtatttttagtagagacagggtttcaccatgttgcccaggctggtctcgaactccccaaagtgctaagattataggcgtgagccaccatgcctggccacataaatataaacttaaaaatacacaggaaaacctttcagaacactttgaaacctattttggtcctattacgattgcactgaatgtcccccagcctaatgaagagcaattagatgtcatttggtggcattcttggtggagacagtaagctagggccgcaggagctgcttagtctcccagggtccagcatt

SEQ ID NO: 4121 - DNA, 180 bp, Homo sapiens
ttctgtcttaacttgaaattaaagaattgggagaagactgcaatgaaagatatgaaggtctgtggagaatgaacacatgagctaataattaatatataattgagccaaattcataaacataacttaaccctctctgagcttattttcctatcaataaaatgaaggagctgagtaatatgc

SEQ ID NO: 4122 - DNA, 570 bp, Homo sapiens
aggatggaaaaggaacttgagaaaactggaaggcatgggaagaccctgcttaccacacagggacaagtgtttaaaagaagtaacagttttaacagaggatgaagggaagtaaagaagggagagtgagagaacatggagctccaaccgcacatgctatttactgaataaatgtgctgttcagggtgattttagtccatcaacaaatattttgtgagccctactataggccaggcaaacagtaatgaaaaagcaggaagcatcctttccctcatggatcttacttctagtagttaaaacagacactgagcacaccattatatgtaattaattaatcgcaagtggataaatgctgtgaagaatatatacatagaagtgtaggaagataggctgggcgcgatcacgaggtcaggagatggagaccatcctggctaacacggtgaaaccccatctctactaaaaatacagaaaaattagcttgggcatggtggagggcacctgtagtcccagctactcgggaggctgaggcaggagaatggtgtgaacccgggaggcagagcttgcagtgagctg

SEQ ID NO: 4123 - DNA, 77 bp, Homo sapiens
tgctgctaggctgcctcatgtctagccctgctttgtgatgaggtctgctctcccatgtgtcccagggtctttatttc

SEQ ID NO: 4124 - DNA, 548 bp, Homo sapiens
tgagctcaagcgatcctctgcctcagcctcctgagtaggtaatacgaaaggcgcatgccaccaggcctggctaattttttatttaacctttttgtagatatgaggacttgcgatgttgaccaggctaaaaatgaacaaatcttaattaacttaaatatttctaacactttgggcattcaggaaaacagctccatctatgttgtgaagtaatgagaagtatatggcagtggataaactttgaatgaaaatattaaacaaggccttaggagaaaagtgtaatatgcttattatagatacattaatttaaaaaattctctggcttaatatcattaattatactcaaattagactttgatttaaacacaggtcctaaatttggattaaatataatagattgaccacaaatttatttcgtctccctccggaagcctcatcagtcataaaataaaggttacacccatgaccagcacagaaggttgacagagataatttctaataaatgctgagacataaaaagtagataaagggagtggtaaataacacagaaa

SEQ ID NO: 4125 - DNA, 620 bp, Homo sapiens
tgtattctaagaaaggcaatcactgattttgttaaaatttaaatacatttttgaagcaaacagaaattaataagtaaaaaagcttaaataatatgaaaaacttttgaaatttaagaactgaaatatactgaactttgtaaaatattcaggaaataaggacatttatatcattatgggctttgtagacataatgaaaatgagaatactacatgtgaaatttaaggtcagagtcaaaaccttaccattccactctgcccaaattctactaaagagaaaataatatctttaaatgtttcattactacaaaagatagtaaatatattaataagcattttattctagttggaaaaaatgtataccttaaatgcctccccaaatagattaaataagtataacaactaaaaatgataaattagaaaataaaaagatcagatatgatcatcaaataaaattttgaaaatagattaccaaaggggtaaacttttaacaaatctaaccaagaaaaatgaagagaaaaagtaataaacagagtgaaataaaattagaaagactcttccacaagggaatttttaaagtgtatcagaaaaaataaaaaataaaatttctcacaattagctcaa

SEQ ID NO: 4126 - DNA, 606 bp, Homo sapiens
aatgtcaatagggagaaaaagagaaacagttctgtagaaatgaaggaataaaagtttatgaaaattgtctaaattttttctaattgtctacaattgtgtaacaattttctgatgtgtaaataattaatgcatcacttaaataacgtgacaaaaaactttaaatagttgaattattcgcaatcatcgacttcaatcccttgggaataacatccaagggcttgacttaaattatgaatgagttatatctatttatttatttatagtctcatttattattttccagaatcgcattctaaaataatctgtgaatggtacacaccataaagttgatttaaatcctcctgtgaaaggagaaagtttaatatatatagtaaattctataattagggaatattataattttaatacttaacattttaatggataacttcccttgggattcctttccaattccccttggttattcctgaatctcaataaaggttagacccatgcccagaaaaatatactcatcttatttcactctagtcttacagtctacttgctgatgtcatcctgctactgcccataacctagttgctttagtgctctgggaaaaatgatcct

SEQ ID NO: 4127 - DNA, 601 bp, Homo sapiens
agtgctgggattacaggtgtgagccaccacgcctggcaggatttggaaatatttttgctgcttgctgattccacctaacctcctcttttctgacccacgcctccaacacacatatatctaagattctggatactggtaattaatcaccatggtaattagaagtgtttagcagacaactctttgatgcatcaaacaattttagtgagagagatgtactttctgtattggtttagagtatacaagtgccaatttcctacagcaaataatttattcacataatttggctgcataaaaactaccatatgtaaagtggtacagccactgtagaagacagcctggcagttcctcaaaaaattaaacatagaattaccatatgattcagcaattccacttctcagaatatactcaaaagaattgacaccaagaacgtgaacagatatttgacaccagtgttcatagcagcattattcacaatagcaaaaatgtggaaacaacccaaatgttcatcacctgatgaatggataacaaaatgtggtatacacatacaatggaatattatttactcacaaaaggagtgatattctgatacatgctacaacat

SEQ ID NO: 4128 - DNA, 98 bp, Homo sapiens
taatcattaagctaattagaaagattacagcaataaaaccagatataagagcaatataacacaatcaatatattttctataaaaagatcctatttacc

SEQ ID NO: 4129 - DNA, 369 bp, Homo sapiens
tacacacaaaacacacatgcacacacacctatgcatgcacaaacatgtacgacacacatgcacacacatatgcatgcacaaacatgcacaaacacacatgtgcacatacatatgcatgcacaaacatgcacaggcgcatgcacacacacccagctggcagcctcacaaccaagtgaaaagaatgattattttgggagccctactaaaagccccatcctcagaatagagtcagtagttcaactaaactagaagcaacttggaaaatttctcccatggagcagatgttccttgatttgattcagaatttagctctgaaaaaaaaaaaaaaaaaaaaaacatttggggccgttttctacgtaaatccaaaca

SEQ ID NO: 4130 - DNA, 510 bp, Homo sapiens
taatatctggcatataataagcactatatacatgttacctactggctagaattcatttgattctcacagcaaccttatgaggtagggtactatcattatatctacctgttttacagatttggaaactgaacaagcagaaggcagccaaagaggcagagagggcaaattctgagacaagttctttcccctgcccgggttccagttctgaacaggaacatgggtctggcctatactggacacggactaaggctgggggaagcatagatagtctgacccaccagatctcactgtgtcattctcctccaagctctgggcccctggccccaagtagcacttgggtgctgctccaggggacaggtgaagggccactagtgggaaaacatgcatctaaaagtcaggagatctgggactgagtcccaactcggctactaactagccctgtgatttcaggaataggtcagtcactcattttgaaaatatttgttgagcacctactatgtgccaggcatt

SEQ ID NO: 4131 - DNA, 563 bp, Homo sapiens
ctagtagctgggagtacaggtgcctgccaacacgcccagctaattttttgtacttttagtaaagacgaggtttcaccgtgttaaccaggatggtccccaaagtgccgggattacaggcgtgagctactgtgcccggccacttcgtggatttttaacaagagaaaaatttcaagatattgtaaatttaaaacaaaattttatgtgtaataccattgaaatgtctttaaccagtatcaatcacgtgatatgaaaaatattaaatatatatttattgaataaatgaatgaaaatcataattaccttgatcactatatttaaaatttaaatgaagcaggaaagtaaatcttcctaattatcatatacttaactgtttaaaatcactctaatgacaagtaatacgctttcaatcttgcattataattttaaaattcctgtattgtttcattcactcatccttccattaattcagtgaacaaacattgattccttacccactaggtgctaggtattatgatagattcagggagtacaaaaatgattaaatgaggggatcagctggagtg

SEQ ID NO: 4132 - DNA, 217 bp, Homo sapiens
gtgctgggattacaggcatgagccacctcgcccggcctgggtggatcattttattgcatctcccttctggggcacccctcaagtgaatatatcatttacatcccgtgacagataaagaaacaaaaacacagaggtggaagatgaacccaggtagtttggttgcagtgcccagactaaggaattaattgttctctatcaaaaataaatttatggacct

SEQ ID NO: 4133 - DNA, 391 bp, Homo sapiens
ttgtttttaatcaccaaagagagttggaggagaaggcatgagaagtgcccatatgcctttttaaagactcccagaagactattgtttacctcctctgtctgctaccagataaaggctagttagaaacctgactattccctaacacatggaaagggtgcagacaaaccccttctaggaaaaaacaaaacaaaactgggaggtgaaattctttgcctatttttttctgtgctttaccctaaggaatagcctctggcattgctagtgtgtccatttaaaatcacattattctctaggtctatggagacttgtaaatgccaagactcttttgctcccagagctaagtgatgaaggatccaaatggtctgatagaaactgtaaaagttgtggcact

SEQ ID NO: 4134 - DNA, 484 bp, Homo sapiens
taattatattaggagaattaaaagtctcagatcaataagctcagctaccacttcaagagtatagaaaaaaatcagactataaatccaaagcaagtagaaaaaagaaaacaacaaaaataagagtgaaatcaataaaactgaaaacagaaaaataatagaaaaaatcaataaggcatggagctgcttccctgaaaaaaatcaacaaaatctataatttctcacaatacagtcatctgtctgattcatttagagatatgaaaaagcctcggaattgtgtagataggatcaatgggagcgtgagaattccaagttcagctataacatgtactgtgtgatatcaggcaagtttcttaaaatttatgtgcatcagttcctttatctataagatgtaaagatactggtgcctaacacaatggaggttattatgaatgataatttttaaaatatgtaagacacaaggaatgatttctgtcatataagaagt

SEQ ID NO: 4135 - DNA, 121 bp, Homo sapiens
tgctgttaacacaattcctccggattactaaaaattttcctagatctaataattccaccttttgttttctcattaatgagtcattagctagagtcatggctggttataaaatatataggca

SEQ ID NO: 4136 - DNA, 585 bp, Homo sapiens
aaatacctcccctgaccctcacctccacaaaaaagcaggcagtctccactatcaggaagcaatgagaatgctcccttttcaccccaagggctaagcaacacacagtacatttacagggtagaattttcaagagacaatctcagagacaattttaaaccagaaactgattgaaaatgtcatcgaactaagttagacaaaggagtctacaagacaagatcaaagtaaaaagtaagtacaaatagagcctattttaaaaaataatgataaaaccaactaaccttactgacacctactaagtaccaggtactgtgttaagaatcatatacattacttcatctggtcctatccgcaacccaataaagtaggttcttttattatctctatttcagaaatgagaaaacctaaactaagaaaagttaactactttatccaagttaagaggctactgaatagaattaggactcaaatccaagtctaacttcatttctcaagcaagacgttctaaaaaatattaaaaagctgccaggcgccgtggctcacgcctgtaatcccagcaccttgggaggctgaagcaggcggatcacg

SEQ ID NO: 4137 - DNA, 176 bp, Homo sapiens
cagcctgggtgacagagtgagagaccctgcctaaaaacaaaaaacaaaaaccaaaaaacattctgagctaacaggatgcaagaggaggagaaaggaggctggaaggtgaaagaacattagaaagtcaaggtagtcaggcatggtgggctcatacctgtatcccaaaactttggaag

SEQ ID NO: 4138 - DNA, 374 bp, Homo sapiens
catcccccagaatctcttcagctataaatactgaccctcattttgtatgactaccagtacaaatcattccgaaagcttctttgtgacaccaaatattttggttaaaagatgtttcctactttctaccccaagagacatccaatataatataaatctatttcatatcattataaaaacacagaacagatttaggccttagttctaaaaacataatattgatatacaaatagttaagacgaggcattgggaaaatgaaaagtaattcatactgctcgacaaacctaagagtatctttaaaaagctaatattgccatggtgaaattatttcctttaatgttaatgtgtaaacattataacatttaaacattataaac

SEQ ID NO: 4139 - DNA, 388 bp, Homo sapiens
cccacctcggcctcccaaagtgctgggattacaggtgtgagccactgcgcccagccaagaaaaggtctttctatgttgcccaggctggtcctgatctcctggcctcaagtgatcctcctgcctcagcctcccaaagtgctgggattacagacatgagccactgtgcccagcctaggaatgcatattgtatatatggataataacaattaaaaaatgtaagtcagactattgaatctaaggggatatgagtgcaagtaactacacacatggtggtggctcgggaaagcttttacagcaggtgggcctgctgaaaatccttccacggccttctaccactcttcagataaaattcatactcctcagaaaggcacacacaggctgggcacgg

SEQ ID NO: 4140 - DNA, 597 bp, Homo sapiens
agacccttgtgtaagagtcccttgtgtaagaaccatcttcactcgaggctgaacacatagaatgccgacaggctgtgttgtagccaattgcacatgctgacatttctgggccttaaccttggtgttgctaaaccatcccaacataatctgccccctcatgaaagccgtgttctgtagtcttgcctgaagatgggatgatggactaaacaggctcttaatgttgagttcattttcatctatatttctgtcccatgttcctttacctggattcctgtctctagtactgctgctatctcttaattgtccaatttaatcccagtaccactgccttgggctgggtactgttccttcatgactctcattccaaatagcttggttcataccccatattagtctgttctcacactgctataaagaactgcctggctgggcccagtggctcatgcctgtaatcccagcactttgggaggccgaggcaggtgggtcacctgaggttaggagttcgagaccagcctggccaacatggcaaaactccatctctactaaaaatacaaaaattagccaggtgcggtggtgcatgcctgtaattccagctac

SEQ ID NO: 4141 - DNA, 544 bp, Homo sapiens
gatagtacagtggctcagagcatgcactgctcaaccaggatgcaccccagtcccaccagggctgtgaggacccctcagtaggccgcatctcattctaaagaggcacagttcctgaacatggtgagacccatgaatcctggaagtatcagcccattcattcccttgctccaggtttgggcagttgggacgaagtagcacataaggggtggcttaaacagcacacatggactccttgccatcctggaggctggaagtccaagctcatggtgccagcaaatgtaggtcctggtgaggggcctcttcctggcttgaagagccaccttctcactgtgtcctcctatggcagagagagatggctgtaggaagaggtttctcttccttttctacaagggcactagtcccatcatggggccccacccatatgatctcatctaaacctaaccctccccaaaaaggccccacctccagacaccatcacgcagggggccaggtcttcagcacatgaattttgggaggacccagatactcagcacataacacgttg

SEQ ID NO: 4142 - DNA, 576 bp, Homo sapiens
tcaaaaatatttagaaaaaaaaaagaatggttatatctgtacctaacatgtatcaactattttttgtcattattccccaaacaatatagtataataactatttacatagcatttacactgtatgaggtatcataagtaaactagagataattcaaagtatatggaaggatgtatgtacattacatgcaaatactacaccattttacataaggggcttgagcatccatgaattttgttatctgcaagaagttctggaatcaatcccccgtggatacaaggggatgactgtgtattatctataattatttttaaattagtaagcatttaaaaaattcctcagaatttctaatatggtaatattcataaatataacacattatgtggggtcctcaatagtaacagtgaaaagagattctgagaccaaaaagtttgaaaactttggatgacatgaatcacactcaatagtaaaaacatccttacttgagtcaaatcacttaggaaagccttagagaaagagtgtaggagaaaatcacttaggaaagccttagggaaagagtgtaggagaaattacacatg

SEQ ID NO: 4143 - DNA, 592 bp, Homo sapiens
aggaagacagcaaagtacacagcatttttctgacaaaattccttccacgaggatgccattattttggtttttatgttgaagatgtgactaccacttaattagtactcaaattggagtggcaaaccagaaagtcacagctacagactttcagtggagctgactcgcccctgtgtctccttcctgttttcatgtgttgcagcccgttctcttcagagcctgacacactgacagtagacctctgcaggacaactttgacacccagttctctccaagctgccagtgagctccctgtgcagcctcactcctcacctacagcatgagcccttgcagctctcccagcatcacaatcttgtatctcagtcctggcttctttcactgctggcatccctctgtctctccctttttcacctacttttcttttttcaaagaattcttctctttcatctgcttatatgaaaaataatgacacctctgaaattctttccttgtagttctgcagcatcaatgccaggaagacaggcctcatcctcccagcttctatgctgctcctttcagatcccttaccctgtccccattttcatgacacgggctc

SEQ ID NO: 4144 - DNA, 612 bp, Homo sapiens
ctcagtgaagcactcaaagctactcaacaatatttttactcagctcttctcaactctctttctcaattcctatagcagctgttctaaaatgtctaccaattttctcaagatctccaggcactcttctcaatcccatcaattaatgtcctgattgataaaacagaggtctctacattcttcctctctatttccaaacttattaccacctacaccttctctacctgcacctttcttagaacagaaaggcttctccaatttgtaagcttaatgtccccatatcagttattgatttttcccgtatcccacacctcaaccctattctattactgataggtcaccccttcttcttagacagatctttcttccttttcacaaatgcataatgtgatatatgcatttgtgtaaaaaactcacattcctcaaggtcctaaaaaacagtaaggtttttggataaataacattagtaagaatcttatgcaattttgtaataatcatgataacaccaccaacaatcacaatagatcatttagatcacctaggcaagcaatgcagtatggccagaggctgccatagcacatattaaaagtacacacacacacgacacacacacac

SEQ ID NO: 4145 - DNA, 584 bp, Homo sapiens
gttacagaatttgtgcggtacatttctacaacagccttatgcaatgaggttgaaagaatgttggaaaggcatgaacgctttaaacctgaaatgtttgcagaattgctacaagcagcaaatacaacagatgactataggaaatgtcctagtaactgtggccaaaaaataaaaattcgccgtgttttaatgaattgcccagagattgttacaattggtttagtctgggactccgagcattctgacttgaccgaagctgttgttcggaatctagcaacacatctttatcttcctgggcttttttatagagttactgatgaaaatgccaaaaatagtgaacttaaccttgttggtatgatctgctacaccagccaacattattgtgcctttgcatttcacaccaaaagttccaaatgggtattttttgatgatgcaaatgtgaaagagattggaactagatggaaagatgttgtctccaaatgcattcgatgccactttcagccactacttttgttttatgcaaacccagatggcacagcagtttctactgaggatgcactcaggcaggtcatcagctggtcacatta

SEQ ID NO: 4146 - DNA, 582 bp, Homo sapiens
gtatgagccactgcacctggtcccaatttaaagctttttaacaagagtttttcagaggggaagggatagcaaagagtctacctaacctgtctaagaatcaaaagctttattgcctgaagcaatttatagaaaaagtgtttccaagtctgggaagaaaaaaaataatgaaccttcagtcattctttcagccactgttgtagtagcaaattgtgtccaataaaacaaaatccctgccttcaaaaagagggtcacctaataaattatatgaaatattcagagttcagcaaggcctcaaaaaagtatgaaaccaattgtacaaaagaggtggaaagttaacaaaaaaaagacataacaactgactctcagaagacaatcagaagtgtaccaggtaaaggcaggagatggtgaagggattaatattccaggtaagtaaagaatgtacaaacgcaaagaaatatcaagcagcatagtctgaatagcaaatcaaaaaataacaacaggttcaacttctgatagtgatagagtaacttatatctggctaacatttctgcatataacaacaataaatcttacataaaatac

SEQ ID NO: 4147 - DNA, 489 bp, Homo sapiens
cacatgtaccctaaaacttaaagtataataataataaaattaaaaaaaaaggaaaaaaaagaggcaactgtttctaagagttttgaaaagtgtgttcgcacaggtttcactaaaacaaaaactataactgcaatataaaagctgctacaggtaacagtgctctcccaagttatttaggtaaaggctttataagctttagttattctttctatagaaaagaactgttcactttattataacaacagtcaaagtgatttacatgtccatgacaacttaaggttatcatttaaaaatgccttttacttatgttatcactcacgcagtgcattcttctcaaaaatggaagacatggccaggcatggtggctcactcctgtaatcccagcacgttgggaggcctaggtgggtggatcacctgaggtcaggagtttgagaccagcctggccaacattgtgaaacccagtctctactcaaaatacaaaaaaaattt

SEQ ID NO: 4148 - DNA, 550 bp, Homo sapiens
gaagacgccagaagggctgtgaagtcatccaatagtacaacaccagcctattgcaatgacttgataaatatctgttgaacattgttcagtgcacaccctgaaaacagaaattgtcagaacttgcatataatagtaagatagatggatttgggttgagaaaacctatctaggctttacttcatggcacacccagcttttcctcttgagatatagactacctgaaacaaaaccaggacatttttaacctgtcccattgtgtgccctttgactcagttcaccagggaatgaatgctttaaccagatgactagggcagggttggtctctctttcacataggtcttggttgttctttgtttgtttgttttgttgttgttgttgttcgagatggagtttcgctctttgttgcccaggctggaatgcagtggcgtgatcttggctcattttaacttctgcctcccgggttcaagcgattctcttgcctcagcctcccgtatagctggcactacaggcacgcaccaccatgccgagctaatttttgtatttttttctt

SEQ ID NO: 4149 - DNA, 551 bp, Homo sapiens
tggtacgtacctgtagtcccagctactcaggaggctgaggtgggagaattgcttgagcctaagaggtcgaggctgcagtgaggtgtggtcgcagcctgggtaacagagtgagatcctgtttgaaaaaaaaagagcaaagggcaaaaaactaagagttgcatatgaaagaaataccaatgaataccacggaaaagatgttcaattccattcataagatgagatatacacatttggtttataaaaagatagtggtcttcacctaaaaaaaaatagcaaaagttaaaagtctcagtatatactatatttgttgaagctgcttcagggaaagaatccagccttgatggtagaagtataaattgataccacctcttcatttgtaatacagctattaaagtaagtgcctataccctttgaacaatccaatttttagaaattcatcctacaggacaaagatataagtaccgggatcttcatttatggtataattaatgacaaaagactaaaaatgaccttatcgtcaggaagagaggacagcttgaataaattacgtg

SEQ ID NO: 4150 - DNA, 572 bp, Homo sapiens
gagcctgggccgctgcgcagaggcgcggcggctgtacaactcggccttgtcaccatgccggtcgtccggaagattttccgtcgccgccggggcgactcggagtcagaggaagatgagcaggactcagaggaggttcgattaaaactggaagagaccagagaggtacagaacttgaggaagaggcccaacggggtgagtgctgtggccttgctggtgggagagaaggtacaagaggagaccactctagtggatgatccctttcagatgaagacaggtggtatggtggatatgaagaaactgaaggaaaggggcaaagataagatcagtgaggaggaggacctgcacctggggacatcgttttctgcagaaaccaaccgaagggatgaggatgcagacatgatgaagtacattgagacagagctaaagaagaggaaagggatcgtggaacatggggaacagaaagttaagccaaagaatgcagaggactgtctttatgaacttccagaaacattccgtgtttcctcagcaaagaagaccgaggagatgctttccaaccagatgctgagtggcat

SEQ ID NO: 4151 - DNA, 580 bp, Homo sapiens
gaaaccccgtctttactaaaaacacaaaaattagctgggtgtggtggtgcacacctgtaatcccagctactcaggaggctgaggcaggagaatcgcttgaacccaggaggcggaggttgcactccagcctgggcaacaagagcaaacctccatctcaaaaagacaagacaagacattacctaataatgtcttatctagtggtaattattaggtaatgtcttatccagcgagtcctttctctggcactgattagttaaaaccctcagaggatcactcagttttcaaaggtctcacctcttcctatattaaatcattattaatccttgcattggtcaagaaaagtttttaattaaacaaaaggcagaaaattataataaatgattgtgaattgtccatttgttactcactgagcttaacagatccttccattcccaaaagtacattgtcacttttgatgtctctgtggatcacttgattagcatgtaaaaactccaatgcctgtaaacactgaacagaagaaaaacacctattaatgaaatagtccctgaaaagacacagggaggcacatgcagtagctatg

SEQ ID NO: 4152 - DNA, 604 bp, Homo sapiens
acctagtgctaaaaatgtatttttagtcattcccaattttttttttcttgaaatggagtcttcctttgtcacctaggctggagtgcaatggtgcgatctcggctcactgccacctctgcctcctaggttcaagcaattcttctgcctcagcctccagagtagctaggacaacaggtgcccaccaccacacccagctaatttttacatttttagtagagatgaggtttctccatgttggccaggctggtcttgaactcctctgacctcaggtgattcacccacctaggcctcccaaaatgatgggattacagacctgagccaccatgaccagccccaatactttgaaatttaaataaaaattcagcaatttccaaaaccaattctatcaagcaattatttctatcaagttcattacctgtgccagacttgtgaatgcctcagcataattccctacatggtaacctttagcctcatttctaagatagcaaaatacatggtccaccaatgaattttaaagttcaacttaaatatataaaaaataatatataatattaatatattaatttataatatatgggatattatatattaaacattaaataat

SEQ ID NO: 4153 - DNA, 554 bp, Homo sapiens
tcacaatccagccccaggtgcttctcagaagcagaggcgagggccggctggggacactgcagtagtgggctggatgttgcttacttcactgttctcagccaagggcccagcagtggctcctctggggtctccttaaaaggtggctcgctgcccctggcttgccccaggctatgggtcgacgttcctggagtaaagcctgactttatgtattttataaaacacaaataattttcatgagcactggtggttaacatcaactctttggagctttttgtgtttgtttatttaaaatggaagctgtctctcattttcatccaaagagatttcttccctggggcggtcaacaagtcttggcaagtgctagatccctggtttagtttttgccatagcttggctgttactgcaaagaaaagccctctcactaagccctgtgagtttgcatgcatgcctgtgtgcttctgtgagtgctgtggaccctgtgtgttccaataatggatcctggggctcagtaaacacagtggctaaaaggacatctatgctgatgaaatcgtctc

SEQ ID NO: 4154 - DNA, 513 bp, Homo sapiens
tgactcaccaaaatgcaagccattaactacccctggacactggaccagtgggatggaattcctcgcttgactgaggatggaaatgcagtgaagacatcttgggatgcagcccacaaaggtattagggtggccttcggttgaaaaaggcaaagtgaagcaatcaccaggctctttccctccatggtgcagatgtggaaaccacctggccaatgtccaccctgtcattacctggtgtgggggtggggaggagggcaggcccatgactagtagagatcctctttggattgcatgtgagggtttgaccaacacaaaggatatcagatttgaagagccaaagctgtaggcccacgtgttagcaccattcagctaatggggacacctgagccttcctgtgatctagataaggagcaaatccttgcgttacctggtgcagatctccatatattctatgagctctaccaccgttagccattctgagcctcttttagagtagtctggagcttgtgggtggcg

SEQ ID NO: 4155 - DNA, 610 bp, Homo sapiens
tctgatcacttggcagactgagagctggggctggggagacaagtaagaagggaggggcagatttattggtactcactctgatttgcctgggcttcggttctccaagtagacctgtttaagagggaaagatgaggaaaaaataatggaaaggggatgagactgactcttctgatagagaggggaactggcccttcctgtgatcttcagacctgtcatcacctgctaacaggaaaggaccacagaaacccctccctccaagaaagtcttttgtttatttgttttacaaagctcagtgatgttaaggccctaagtgttgtcagttttcatagttcaggacaaaaaagaagaaaatacaatgtattgtaatcttattgtgctattgttcttttgtgcttttgttcaaagacaaaacagaaaaaaaaggtcaacttatcttctctttattgagcacctactgcatacacaaatattgcatcttctgcaaaaacacatccaaatagacctgactaatgctacaacaaacataataaaatgtgatcatgtatgagaaagttcttaaaatacaataaaacccttggtaaataggcattatcagttattgctattagag

SEQ ID NO: 4156 - DNA, 572 bp, Homo sapiens
tcacaggagaaagagagtcccaagaaaatcaagggcatttgcattacaatccacctcaatgcccaaaaatatcccgctgaacatgcagaatttcaaggaaaacagtatgttttgcttatttgcaggaaagaaatgaatgttcaagagagggaaggggctgtggtttaaaatctccaacttgcaaaggaaagcatatgtcaaccaaagaatcgtctttgaccctgcagattttggagctggtcctgtcggggcaggcagaggatccacacacagtatggaggggaaggcactgtgtttggggacagactgaaaggatttgcaatcctattgtttgggaacaatagctgacactgaacccttctttataacaggtatcatgccaagaatttgccaaatatatattttttatttagtaagataaagtaaattgcccaaggtcacatggctagaaaattgcaaagtaggacacacaatcctggcttgactgcttgctggatgatcttaacctttctgtgcctcttcttccagattgttaaaaatggagcatgataaggattctatctgtgctccgc

SEQ ID NO: 4157 - DNA, 542 bp, Homo sapiens
ccaggagcaatatgccgaggttcagactcttagagccagaggctgcatgacctctaaactgtgatttctaatcttgtagctaatttgttagtcctgcaaaggcagactggaccctaggcaagaaggggggtctttttgggaaagggctgttatcaattttgtttcagtcaaaccatgaactgaattcctttccaaagttagtttggcctatgtcctcataatttcctcagttataattttgtaaaggtggtttcaggacctggagcaactagtttagctctcaagatagaaaatgtgggtcaaaagagagagagcgacaagagagaagaaacctgcctggagccagcacactagcctaggccacctactcagatggtgacctgagagagaaatacaattctggtttgcataaacttctgtattggggggtctctttgttatagcagcctagcctgtttcccagttaatccatctgggatcccagaaacagggataccacggaggagagacacaaaaggaacacccgggtgacagtgagggag

SEQ ID NO: 4158 - DNA, 600 bp, Homo sapiens
catgaaatattggcatcatacctcttctgcatatattgacgtgatataaattaattttcatcagaacagcctaaattgcatttcatttctatttattgaaacacatttttactgagcacatgctaagtgccagatacttcagtaggtaagagaacagagaataatcctgaaccaaattattataatgaatggtgtaaatttttattagcatatcaaggtcccattctgattagcctgaccaccaaaccacatcagccaaagagggctgatggtctgtttatgctgttgggtaaagtattgtgttccctttcttcaaagtccaagtctctataacatacattataagatccatacaaaacatttgttatttaagaaatggaataggccaggcgcggtggcccaggcctataatcccagcactttgggaggccgaggagggtggatcacttgaagtcagcagtttgagaccaggctggccaacatggtgaaaccccgtctctattaaaaatacaaaaattagctgggcctggtggtggacgcctgcaattccagctacttgagaggctgaggcacaagaatcacttgaacctgggaagcgga

SEQ ID NO: 4159 - DNA, 516 bp, Homo sapiens
acactttgtttttcaaatttgaataatacaaatatagaatttgcatattttactcacagtattcttcagatatagtatttaaggtaataccatctttgatgaaataaaattatagaaaagtaagagctaagaaacataaatacaaagaaaaatgaaagtatgcattaacttattttttgtatgcctgatattttccctttcctgtgatttctagtcttatacagtctttatgattttatgcttttgagatttggagcagccagaaagcccaaactgcctgaagtaaaaatttcttcaaatagtaacagtaaaagcacaaatgaaagtatcatgtctcctagactttccactgacttggacatgcttggagtatttcaggatcttggcgggaaatgagatctctgaatcccaatagcagtaatccaggagaagcaagagatctaggataataacttcctattaacgttatcatgtttagcaaataaaatacagggtgcctaattaaatttgaatttc

SEQ ID NO: 4160 - DNA, 513 bp, Homo sapiens
acagaacattctagatggtggaactagatcatctcagacaatgaggaccagtgaaagggtctggccattggcaagaaatctgctctaatggtctctgggatgatgaagctagcaaaggagctgctgatttttacaattaataaaatccaataagttttcagcgatttggcttaggagccccaaatttaaacttggttaccacgccttactaattattcacattatttgtctccctaaaaattacctcagagaaggcctggaatgctacattggaaggaatgtgtcaaacttattcttgacctattatttgataattcttagagaaacagttgggcacagattcacctcccaatcactggccactatagggtcctttggagggactaactcagcaaaggagcagtggacaactgagtctgctggcctctctgttcctgcccaacttcaggtttctgaagctgtggaaaaaaaccatttcactggtcatgaacagtgtcaaatgtacaacaccat

SEQ ID NO: 4161 - DNA, 505 bp, Homo sapiens
gaccagggtggtattagtgaccagagaaaaacataaatctgttggggtatctctgtcaccttcaaaagttagtcagaaaaaaatgtacacaaagatgacaacttatcatcagcaagtttatgtaatgtaagtttgtgatatgtaaattgcatgctatatatcactatgtgaagcatgactgttcagttagattgcattactattcttcaaaattaaatttgctcattttcaattccaagttcttttgggcatatacaaaattcaaggagtagctaatgcattcgctccattagtagaaaaaaaaagaattttacaaacagttttaaatgattaaacttttatatcaactttaaatagaaagtcatgtaggtacaataatatttcaataatttcaacccattcatggaatcaaagtaaagctttttggtgtttgttctctaaaagatgaagcatctgacattacttttaatataaatttaacttaaaagttcaaaattaaaaaaat

SEQ ID NO: 4162 - DNA, 490 bp, Homo sapiens
ctttgattgcagcaggtctttggtcacatatggagtattgattaacattccatgcagtggtccctgtttgtctccatatgcctgaaacatgatctgcaggaaaaaaaaatggcatggggagttaagagacagaaaaaaatcagagagctgcctagaggggctttttttgcacaaatattatctctttgaaaacatttttggtaggttgagtagctgagatatgcctcttaacactgggtacttggtgctctcacctctccacagattaaccaactccaaaaaatatatatatataaccagccatataccataactgctctcacttttagattagttgaaatcaacaagaaagaaggccaggcgcagtggctcacgcctgtaatcccagcactttgggaggccaaggcgggaggatcatgaggtcaggagatcgagaccatcctggctaacatggtgaaaccttgtctctactgaaaatacaaaaacatta

SEQ ID NO: 4163 - DNA, 589 bp, Homo sapiens
acttcaacttgggcaaaatgcatgctcacgtttgcaaccacctcccatatgtcattgcactgtacatctgaatcttcaccccagctccctttcagcactgaagtccattttggatgtctgttgattgagggagccacctgcattttcctcaggcttctcagagggagcacagacttcacaaccttcattatccacctcccaaaccagctctttgatctgggctcctgacctgttagtagcacatctaaacgcagtagaacaggcacgtcagtcattcttgctccactgcctttcccctaatttccagttagtcgattcttcatccaaatagctttcaaatttttcccctctctttcatccccacctgtctctttgccttctttcagactttctccagacatccttctagccaaactgctttcagagtgacctgtctgcaaatttgtcaaatcattcctatattaaatcttttaaatgacttgccattgctcaagttgtacatagagagcttattttaaaagcccaggctgtgcgcagtggctcacacctgtaatcccagcactttgggagtctaagcaggcttgatcac

SEQ ID NO: 4164 - DNA, 572 bp, Homo sapiens
atgttctaagccttgtcttcaacaagaccattacagttgataaagtagtgaggtccacagggaaatttcctgcagcaacccagtaacatcaaaccaaagccaaaggtttggagccaggaaaggggctgagggagctggcaaattgcataatacctaaaactcttaggaaccaagagatatgccaagtaacaggtagcaaacttaaatgtgtacagtgtcttggcaagtagcaggagtgtgtaaagctgcttcgactgagaagggagacaataaggtatggtggagattgtggcaaagtagagaccacatgccctctactcagcactggccaattgttacctcctcttccaattttcaagtctaatgggaaagctatatttttatatgaaacctctgaattggcatttctctcagcatttttattttgtttttacatcatgtgtggataagacaaaacatgtctgcaggtaggcaatatctcctgaggcagtggaatggtccactgagttttctccttcagaaataaaacctatagctgtgacttgtctctgggctggggcaagacaaggctg

SEQ ID NO: 4165 - DNA, 601 bp, Homo sapiens
aaatacctcccctgaccctcacctccacaaaaaagcaggcagtctccactatcaggaagcaatgagaatgctcccttttcaccccaagggctaagcaacacacagtacatttacagggtagaattttcaagagacaatctcagagacaattttaaaccagaaactgattgaaaatgtcatcgaactaagttagacaaaggagtctacaagacaagatcaaagtaaaaagtaagtacaaatagagcctattttaaaaaataatgataaaaccaactaaccttactgacacctactaagtaccaggtactgtgttaagaatcatatacattacttcatctggtcctatccgcaacccaataaagtaggttcttttattatctctatttcagaaatgagaaaacctaaactaagaaaagttaactactttatccaagttaagaggctactgaatagaattaggactcaaatccaagtctaacttcatttctcaagcaagacgttctaaaaaatattaaaaagctgccaggcgccgtggctcacgcctgtaatcccagcaccttgggaggctgaagcaggcggatcacgaggtcaggagatcgag

SEQ ID NO: 4166 - DNA, 608 bp, Homo sapiens
agaccagaacctgtttgaagaaggccaaggacaaaagcagctttcatctgacctccccaacagctaagggccacagttggagtttgagaaggaaaaacaaacacctcctactcacacacatcaaaaggcgaagggaacctcctgcaccctggcctagcccagagagggcaggcattggagatgagtccaaacccaactcctgtcacctgtgagctgtgtgacccaaagaaagttatgtaacctctctgagcgtctaatgtcctctgcaaagcatgaagatgaaaatcctttccaagggttatgtgtgtcttaaaacactttcgaggccaggcatggtggctcatgcctgtaatcccagcactttgggaggccaaggcaggaggatcacttgaggtcaggagttcaagcccagcctggccagcatggtgaaaccctgtctctaccaaaaaaatacaaaaatcagactggcgtggtggtgggcgcctgtagtcccagctacttggggaggctgaggtgggaggatcgcttgaacctgggggcagaaggtgcaatgagccgagatcatgccactgcactccagcctgggtgacagagtgagactctgtctc

SEQ ID NO: 4167 - DNA, 508 bp, Homo sapiens
agatagaaaaggaaaagggaaaggctgagccgcagaaatgtgcaaccagtagagctgccatgttattctggaagatgttccagtcttcgctggaactccaaaccttcgcctggctctccaaacctgaggcagcttcttggcttccttactttctcatggatccttagaaaccccccaccatctgaagtcacagaatttgttgttccttgaaacttgaaaaagccaacacactgattttatgaagtgaaatgtcattaaacattctctggattaatcgacaaaatcacatcttttttcccttctaaatgagaaagacaaaggaaaaataataaagatggaatactttagtattaggaggaaatcattttattttcctgagcagaattatgttttcaattatcacagggttgaaaaatcttcagactagaaaagaaaaagtactttcagttttccctctttcccaccctaattaaataaaatatatgtgcaagggacagagtaacacaat

SEQ ID NO: 4168 - DNA, 594 bp, Homo sapiens
ttacaacagctctcatttattcagaccttattctgtcccaggggccgggccaagtactttatgtgcattgtatataaattaatcttcctagcaacctcatgagacagatactattaccaccttcattttatggataatggattaaaagtcaaagtggttaagtgacttcctctttgtcagtggagaaccatccagggttttacaactgcagagcccattaaaccattgtcgtatactgttgatccttgttctcacagatttcaacatgttgggaggatgacatagaaacctgaaactaagcatacagggaagtgggctctagcctatttgaaaaggctctggagggctgggcgtggtgactcacatctgtaatcccagcactttgggaagccaaggtgggaggattgcttgagcccaggagtttgagaccagcctgggcaacatggtgaggtcctgtctctattaaaaattaaaaaattagcccagcatgatagtgcatgcctgtgatcccagctactaggtaggctgaggcgagaggatcacttgagtctggaaggtccagtctgcagtgagccttgatcacaccactgtact

SEQ ID NO: 4169 - DNA, 512 bp, Homo sapiens
tacggctccgagaagacggcagaagggtcacatgaggtcgggagttcgagaccagcctgaccaacatggcaaaaccctgtctctactaaatatacaaaaatcagctaggtgaggtggtgcatgcctgtaatcccagctacttggtaggctgaggcaggaaaattgcttgaacctggtaagcagaggttgtagtgagccaagatcgcgccactgtatgccagcctgggcaacaagagcaaaactctgtttcaaaaaaaaaacaaacaaaaaaacaaataaacaaacaagattgtccttggtttccttgaacttctactgcaacaacacatgatttactttgttttgttttttttttgtcattaattgactggttctaggaaaggaaaatgtaaaaacggaatactgagctaatagcaaaacaaaaaagacatagggtacaaaggagatttgaatctgctctacttgggagaaatcaatgaaaaaaaatattccaagaaataaaaaaattcaac

SEQ ID NO: 4170 - DNA, 577 bp, Homo sapiens
atcagtaccagctagggtaaacactactctagtatcaagtgtgaggtggaattagtaaatgaccagcctgccaacatggcaaaaccctgtctctactaaaaatacaaaaattagccaggtggcacatgcctgtaatcccagctacttgggaggctgagccaggagaattgcttgaacccaggagacagaggttgcagtgagccaagattgtgccattgcactccagcctgggcaatacagcaagactctgtctcaaaataaataaataaacaaataaaaaaacaaacactacattctactagtcttcatcaattgacttcattcatctccaccttccccaactcttaacttccctatcttcatcttgatggcaaccaatgtaacacaatatgaaatttttacttttaaaagttgacattaataagagttaaaaaactaaacatgcggccaggtgtggtagctcatgcctgtaatctcaacactttgggaggccgaggtgggtggatcacctgaagtcaggagttcgagaccagcctgaccaacatggtgaaaccccatctctactaaaatacaaaaa

SEQ ID NO: 4171 - DNA, 633 bp, Homo sapiens
ttactcctgagaccattacaaattctcagcaggctgggagcacagttgagatggataggaggaaatcagtgcgtggctccttccttcctccttgcattcccacaacgttctcaagcatttgctggtgtcaggccctggacacagagagatacagaggagactccagagggctggagaccaagccctcctgcaggagctggtggtctaggaagggaggccaggcagggcagtgacattgtgatgtgaggggctctgagacaggggccctgaggaacagacagggctcaagagctcagggtcccggggtcctgggctagacctcttttccacacatgatgcctccttaccgagcaccctctgggtgtctcaaactcactaatggcacacagaggagggttaaattaagaaatttaaaaattggactaaatcactgccgctaagacagaattcctccatgccctggagtgggttcctccagcactcagttcccaaccagataggtcttggctcccacctggccctcttgtctgtctagccctgactttgtacttgccattcatttgatgtatcatgcatttatcaagggcccctctgggtgtgcacagcactgaactagatgaaatctgatcaact

SEQ ID NO: 4172 - DNA, 584 bp, Homo sapiens
accagctatttaatagatttacagtttatcaccttacaggggcaatatatttaccatgcaatatcttttggaaatatattattattactgctcattccattctgagcaaacaggaaatcttgtagtttgatccccagaatacctttttggaaaagaaacttgaaaacaagcaattccaaaacccagacataatttttaaagttgctagataccccacaaaggataattatacatattaatgtccactgtgggtgttgttaatctgttaagaattctcaatcagatccataataagaacactattatgcagttatataattttgtttcctgtatgtctcttaacaagggaacagaaattctaaaggatttatttcacattgtccttggctcacagcccagggggttaacacattaaaatgaatcacttggctatgccctgttccacagctacaacattcacccaggcctcatacacctgacctaaaggaaaactggagagagaggttggagcatgaacaaatctatccctgctgctgcaagggtggttgagagcatatggcaccctggtgcattccccttgaatt

SEQ ID NO: 4173 - DNA, 309 bp, Homo sapiens
tacggctgccagaagacggcagaaggggcaaagggccccagttcctctggctggggtgtttgctgggcctaggcgcaagccacgcatccatatgggttcctctgcattgagaactgccgacaggacgtcctcggagtcccaagcaattgtctggtttgtgatggacccatctttcatttcttgattattcagtagcttcgtgtcctagaaaccaagaggaccatttctataaaagaggttggttgaataaagacagcgtgagaatagaggagctcctattcccgaagtcagctgcctgttctgctttca

SEQ ID NO: 4174 - DNA, 574 bp, Homo sapiens
taccattagcttttttattgggtactatcctttgactaaatgcccatgtctatcaaagtgatgacactcaacaagcacaagcacttctctatttattcattcttaccatgtactcattagaattagattaactttaaaaaaaatgtaattgatcctatcataacaacatatacaataggtgagcatatgtactgtttaagcaatatagctaataatcattagaactctatttgtaagccccacaattatagtatctcagtaacatttacatttaccattattttccattagactttcccttattctagcaataaatttcatccatagacacaaaaattgaaatttaaaaattttaaagtctcagtaagtcattcaattccaataccattatacattttatgcttaataattatcaaactctttatagactttgttgtttcaatcgttttaatagtaattacaataatcctttctacacatttttaacacttagagctttatgagcaaagatactaaaatataaaaaatgctaagtgctggccgggcgtggtggctcacacctataatcccagca

SEQ ID NO: 4175 - DNA, 561 bp, Homo sapiens
catgctctctacttcaactatagtaaaacgtccataaatgtttgtttagtaaatgaaagaaagagacacgctctgccccattttctctaagtgtcccaactctctgttccactaccatcttcaagtcttaggaatatgctattcattgtgccagaaatgtctcccagttgctcccaagactgtatttccctttctgtcttacaacgcagcaatagtcacctctttcatggcattttcttaaattacacctccttggtttggctttatagtcactcttaaaaacttgcacggtggctcatgcttgtaatcccagcactttgggaggtcgaggtgggcagatcacctgaggtcaggagttcgagaccagcctgaccaacatggagaaaccccatctctactaaaaatacaaaattagctgggcatggtggcgggcacctgtaatcccagccactcaggaggctgaggctggagaatcgctcgaacccgggaggaggaggttgtggtgagccaagatcgtgccattgcactccagcctgggcaacaagagtgaaactctgtccc

SEQ ID NO: 4176 - DNA, 635 bp, Homo sapiens
tacggctccgagaagactacagaagggaatagtattggtaaaactgtgttaaaatcaaatttttttctgaaaaaatatcactttaaaatgtaatcaatttatgaatcttctccctagaaaactatttaataaaactcttataaaaatatgctttgaattatccaaacctaaagttaaaatgagtcatggaattgtaatggcaatagaaaaattacaatcacattatcagcaaaagctgacagtttgactccctctttaccaatctggatgtccagacagtaactgctgtcttcaagagactcacctaacacataaggaatcacataaacttaaggtaaaggggtggaaaaagatattccatgcaaatggacaccaaaagtgggcaggagtagctattcttatttaagacaaaacaaattttatagcaacaacagttaaaaaagacaaagaaggatattatataaggataaaaggacttttccaacaagaaaatatcacagttctaaatatgtatgcacctaacactggagctcccaaatttataaatttataaaacaattactaccagaccttagaaatgagatagacaacaacacaataatagtgggggacttcaatactccactgacagcact

SEQ ID NO: 4177 - DNA, 517 bp, Homo sapiens
gttgtctgataacagtaatatttttaatgtgttgagtgatatttttaatttgttaggcacatcgcaatcttttacatttatctgcatatatattatttggtcctcactgcatccttgtcaagttgttttggcaggcattattttctattttatctgtgggaacacagacccagcaggtctgtggtggaagagccagttagaaaccaagacctccacttccaacccagctatcctttcattctaacacactccctctggtaaattctagaaacaggcagcaaaacagccaaaaactaaagcagcttactttttcatatgtaatatgtaaatgaatagcaatggcaaatgacaatgggaatgtctattaagaaatatataataagcctggcgcagtggctcactcctgtaaataccagcactttgggaggccgaggcaggcggatcacttgaggtcaggagttcgagaccagcctggccaatatggtgaaaccccgtctctactaaaaatacaaaaatt

SEQ ID NO: 4178 - DNA, 542 bp, Homo sapiens
ccaacccaaacctaatatgagcatggaatttcataactttaacggttcttttaataatgttcaatcagatatgaaattaagaaaacgaggcttgccttctgcccctgctctgcctaagctgacgttttaggcagagtgtgaataatatttcctagttcccatggagcagactgaacaaatgatgtgagaatctcttcagttccaaccaagtggcgggaaccagctaagagttgggtactgctgaggaaaattgatgggcagttggtaaaataggtgtgaatgagagaaagctttgttggggaaccatggtgggtatgtgggcacgttctacattactacaagtattgggaatttcccaggggaacagcaaaatcttgtcttatttatgtttaatttaaaaaaaattcccactgggtgcagtggctcacgcctgtaatcccagcactttgggaggctgaggcaggcagatcacgaggtcaggagatcgagaccatcctggctaacacggtgaaaccccgtctgtactaaaaatacaaaaaatt

SEQ ID NO: 4179 - DNA, 590 bp, Homo sapiens
tcacacagatgatttgcacacttattcttgtccctaggccagttgtttcttccaaaatacccattactcaatcgttcaccctctcgtgaaccacttaggaatcttgttctatgaatcctggagcttcaatatttgacatcttcagaagaacatgaatgctatcctagcctggtagcaataaggtaccatttctcagaaaacacgcacctatgcacacaagcaagcatgtatacacacatgcccgcatcatatctatacaattttacactgtgatagtgagctttctttccctagataacttcgtaattgctttcgctacatagtattgtttaaaatatcaaattataggtgctgggtgtggaggtttgactctagtcaaagcactttgcaggcaaagctgggagaatcgcttgaggtggggagtgtgagaacagcctggaaaacatagcaaaatctaatctctactaaaaataaaacaaaattagttaggcgttgtggggtgcacctatagtctcagctacttaagaggttgaggcaaggattgcttaagaacaggagtttgagatcctatgatactcactcctgcaaca

SEQ ID NO: 4180 - DNA, 571 bp, Homo sapiens
ggaaagggcttttctttccggtttggtgtacttttcttctttctcccaggcatgagtggcctgtagtgtgtgtgcaagacatccagtggtgctcgcttcccactgacttagtggcaactttctgggcagctttctagccagtttgcaccagctgacattccaatgactctttcgggtgcctcagtaggtgcctttccagtgagttccagcgacaccttagtgagtagtttcctagtgaattttgtcaggaccctactgtgctgccagttctagtttgtacctccatgaacttctcggccatccaatgtgccaaactcacatttccaaccaggtctgagtctcatgcttccggccctgttcaaaatgtgtttcttccttaggtactgttccttagccccagaggtagtagctgctctctgtacctgccattcatcattcatggtagagcttgctctgccccttagtaattaatctcctgttactaccgaacaattccttaggttaaatttgccctgttccacttctgtgtgatttctggaccttgactgatatagatctcaagacaaagagc

SEQ ID NO: 4181 - DNA, 530 bp, Homo sapiens
taccagaaagagaacaggaagataagggggaagaaagaaattgtataagtaaagtccaaagagttttcaaattttctaggggaaaaaaaatctatatatatatctatatgtacatatttgagacagaatctcactctgtcacccaagtgggagtgcggtggtgagagctcagcttactgcatcctctgcctcctgggttcaagcaattctcctgcctcagcctcccaagtagctgggattacaggtgtgcaccacgaggcccagctaatttttgtatttttagtagagacagggttttaccatgttggcccacctggtcttgaactcctgacctcaggtaattcacctacctcagcctcccaaagtgttggaattacaggcgtgagccaccacgcctggccaattttctgaaaatattaatctatacatccaagaagctcaatgaattccaagttggattacttaaaggctggtcctcactctaatgtgctactctgcctccaccctaagaaggataaactgaaagagat

SEQ ID NO: 4182 - DNA, 484 bp, Homo sapiens
aggttaataacataacttgccctagactaaacatacacacacatgtcccatatgaacccaggagtttatcatgcaaccttctcattatgacttagctttcacattattattcatgcaggaaaagaatgctagcagtaatatttcttgacatgaattagtaagttggtagtataatttacactttttttggtcttgtgatctgatagtaaaaatcagttcattacatcatcattgggtatttgaattaagtaagttttctcccatccttaagaaaaatacaaaaggccgggcacaatggctcacacctataatcccagcactttgggaggctgaggcgggcagatcacctaaggtcaggagtttgagatcaacctggccaacatggcgaaaccccatctctactaaaaatacaaaaattagctgggcgtggtggtgcacgcttgtaatcccagctactcaggagggtgagacaggagaatcactt

SEQ ID NO: 4183 - DNA, 568 bp, Homo sapiens
cctcaagaagaggaaagatatctttatttttcagtatggacacactgaagataagaaaagctacatttaattactggtaatcagcttggactctggcctgattaccttagctaattacttgggttgaggaggtggaacataattgtagagaaaaaggcaagcaaactttaaaaaatgtctgctggaatgatgattcacttggaaccaaacattgttagagtagaaatctatatttggtagtatctgtttgaaaaaatgggaagagagagggattgtgaacttgtacaactccttttttaatgtctagttaagttgaaggtgcatatatcctttgatccagaaatttcacttctaaatgtagctcagagaaattcttatgtgtagaaatagatgaggacatttagaacagtatttcttgtaatggcaaagcaatcctgtttgtaaataggaaaatgggtatatattgatacaatagaataatgtagtggaaatgttattataaatcctgatatataaaaaaaagaggtcgggtgcagtggctcacgcctgtaatctcagcactttggga

SEQ ID NO: 4184 - DNA, 542 bp, Homo sapiens
cagcctcccaagtagctgggacaacaggcgtgccaccacacctggttaattttttttgtatttttagtagagatgggatttcgccatgctggccaggctggtcttaaactcctgacctcaggtgatctgcccgcctcagcctcccaaagtgctgggattacaggcgtgagccaccgtgcccggcctctggttctagtcatatgatgttctggaaaatgcaggattagggacagggtttgcctgggagtgggagagtttttggggagatggaactgaaatgcgttttgattacggtggcagtcacctgactgtttgcatttgtgaaaactcatagaaatatggccagaggctcatgcctgtaatccccagcactttggaagactgaggcaggagaattgcttgaggctgggagttcaagcctgcggtgagctataattgtgccactgcactctagcctgggtgacagagcgagaccccatctctacaaaaagatttaaaaattagccaggcaccgtggcttgcacttgtattcccagctactc

SEQ ID NO: 4185 - DNA, 537 bp, Homo sapiens
ccataggtctagctatatgaccttgaataagtaacttaacactcctgaacatcagttttattatgttggcacagaatatgagtttaagaactgtgattcattcattcaaataatattcactaacctcatcttcgggtgctggaaagatgccaggtgctgaaggaacaacagtgataatgacatagtccctactctcacagagcatgcagtctggtgcaagagaaaaacacatacagtggccaatgtaagtgactgtgactagtcctttgatgtcagtaccagattggagctgcttgagattctgaccaacatctgaagcaccaatatgcaaaattacttcaaagttatttagaaatgttatgccagatatggtggctcacggctgtaaccctagtactttgggaggccaagacaggaggatcacgtgagctcaggtgcttgagaccagtttggtcaacatggcaaaactccatctctacaaaaaatacaaagattagccaggctagtggcacacgcctgtagccccaactactcggg

SEQ ID NO: 4186 - DNA, 566 bp, Homo sapiens
cccaaagtgctgggattacaggcatgagccaccgcacctggcccttgaacactgtatctaaggataaacagtcttattcacatcagagggggcagaatactaactgactaatttgtggaaatactggagctaaacatagtgcctaacacctcctatgtgtatgaattcccaagtctgaacagggcacaagtgaggagagagaaagggaggggaggaaagagaaagggccaggtgcagggaggagataaacacagacacagagaaagacagagaatggcttatcaaattaaaataagaagaataattataatagttacaatttattaaggtggtcttgtgtatcaggtattttatatataatgttttgtttaatactcacaaaaccctctaagatagaaattattactccagatgagaaaactgagattcagaacagttcatgacaaattcaacagggtctatggctgaaatgggattcagtgtgactccaaacccatgtttttccaaagaggccatactacctcccatgaacacaggtcagacaaacaaacagaaattctcagctg

SEQ ID NO: 4187 - DNA, 365 bp, Homo sapiens
  misc_feature 1: n = A,T,C or G
ngataatcaaggaaaccttttccgggtggggatctctgaaattactcagtgagcaaccctaattaacctgattttttgctgataatcactctcaatggaatcaaatcacaaatccggggatggatttgagcggcactcagaaggaagcagccctccgcgcactggtccagcgcacaggatatagcttggtccaggaaaatggacaaagaaaatatggtggccctccacctggttgggatgctgcaccccctgaaaggggctgtgaaatttttattggaaaacttccccgagacctttttgaggatgagcttataccattatgtgaaaaaatcggtaaaatttatgaaatgagaatgatgatggat

SEQ ID NO: 4188 - DNA, 600 bp, Homo sapiens
atagaagtccctgattgcaagtgccactggtattcattgtaccacttaggttttgttaagaaacagaaacggaattactttactaaactgctttatgattacacagatagactctgggagtttgctagcaccttttattttaaattatgaacagggaaaaaacaataaagaaaataaatacaaaaatttagactttttaaaatgacttaagggagaagcaagtcacacaataagtttgagatgcagagcagcgaatcagaacaaatagctgcttacatgaacaaatcagtgggatgtgaaaatgcatcaccgtaacctacatttttttctaccaggagatttgcagctgactatcgggtgactcattcctatgcttagggggtgaggtaatgctattgtgaagggtgatgtcatctctgtacctgaactgcatgcatatattgcttctgtggctctcaaggaaaagctccatctgctttcacatatgcagcctgaaagacttgacaagattggcacaaaggtcagcagccatgtgtatgactcataagcaaccaattagcgaagagcagctatttaaaagtgaacttttaaaatcacaat

SEQ ID NO: 4189 - DNA, 80 bp, Homo sapiens
tttaggtcattcagttaataaattaggcagcacacacctatacatgggataagttgcctacaaaatctaaaagataccct

SEQ ID NO: 4190 - DNA, 586 bp, Homo sapiens
tagtactttcttggatggctttggtcatcttttcactcaataaatacatagagactatgggatccatgccagccagtgggaatcctgatctcatggggttcatgttctagcgagagagacacacacttactaaataaataataaaaagaattacagatggtgacaaaatctctgaagcaataagcaggatgcaggcagtggggaatgggagatatttgaggagggatttcactttagatggaacagctagggagggcctctctgatgtagtacattttcttctgagaatgtgaaggatgagaagcagccagccatcaagtactaatagctaacatcattatttaaaattgttattaaaacataattaatggccaggtgcggtggctcacacctgtaatcccagcactttgggagtccgaggcgggcagatgacctgaggtcaggagttcgagaccatcctggccaacatggtaaaaccctgtctttactaaaaatacaaaaaattagtcaggcgtggtggcaggtgcctgtagtcccagctactcaggaggctgaggcaaggagaatcgggaggcaaggagaatct

SEQ ID NO: 4191 - DNA, 93 bp, Homo sapiens
agacagattacatgacacttgtaggcctgatgccatggatgttatgtttatacaaagtgcaagggcattttctcttctaccaactaaatttat

SEQ ID NO: 4192 - DNA, 557 bp, Homo sapiens
ctgtgactttcttcatattctttgcatcacccagactgacctatttcagtctcctgaaatgggccacgctctcatacaccttcagacttcttttatgagcaactacaggcattcctgtgtactttgctcctctcatagaatttccttcctgtcattttttggtaaacaagctccataaatattatttgtttcagcctagacaacacctcttgggattctagaagaaaccccctttacttcccataggcgtgtactccccacagcacagtatcttcagtaccatcatagcatttatattaccatagtataatttcttcttcatttcttgggaacatgcttaaaggaataaaatgtttgagagcatagtctcttataccattttagacccagaaaacagcacatgactagctgataatagatgtcagcatagaaatattgaataaataaatagggaaaattattttagactgtaacctatcaatgtaagttccatatcaattagaattgatagtaaaatcagaggacataaaagatatagaataaaatatatgcaactt

SEQ ID NO: 4193 - DNA, 614 bp, Homo sapiens
catgcctgtaatcccagcagtttgggaggctgaagtgggtggatctcctgaggtggggagttcgagactagcctgaccaacatggagaaaccccgtctctactaaaaatacaaaattagtcgagtgtggtggtgcatgcctgtattcccagctactcgggaggctgaggcaggagaattgctggaacctaggaggccaaggttgtggtgaactgaaattgcgccgttgcactccagcttgggcaacaagagcaagactccatctgaaaaaaaaatggagtgtgtgtgttagagtgcgtgcatgcatgtgcaagagaaatcgcagtgggaggcagttaattggaacaatatagagaaggggctgctaaggacctgagtattatgtttatatttaacaatttaagataaggctgtgtatgtatggtggctcatacctgtaatcccagcactttgggagggcaaggtgggtggatcatctgaggtcgggagagaccagcctgaccagcatggagaaaccccatgtctactaaaaatacaataattagccgggcatggtggcatatgcctgtaatcccagctacttgggaggctgaggcaggagaatcacttgaacct

SEQ ID NO: 4194 - DNA, 593 bp, Homo sapiens
attttaatgtaaattaaaattggggaaagaaagggaaaacaatacagattccatgcataaggcaaaggttcaattgtgggtttatccgtatgagtagactattattttgtcatttaaaaatcatagtttcagctgggcgtggtggctcacgcatgtaatcccagcactttaggaggctgaggtgggcggatcacctgaggtcagaagatcgagaccagcctgaccggcatggagaaatcctgtctctactaaaaatacaaaaaaattagctgggcgtggtggcgagtgcctgtaatcccagctactcaggaggctgaggcaggagaatcgcttgaatctggggagtggaggttgcggtgagattgcgccattgccctccagcctgggcaacaagagcaaaactccatctcaaaatcaatcaatcaatcagtcaatcaatcatagtttcacgccaggtgcagtggcacggacctgtagacccagttacttgggaccctgagacgagatgattgcttgagcccaggttttccagtctagcctgggaaacatagtgagaccccagtctcttaaaaaaaaatcatattttcaaataa

SEQ ID NO: 4195 - DNA, 365 bp, Homo sapiens
ttagtagagatggggtttcaccatgttggtcaggccggtctcgaactcctaacctcaagtgatccacccacctcggcctcccaaagtgttgggattataggcgtgagccactgcacctggccccatgtctctaactttggatttttaaattgagataatgtggatgcgcctcacacagtatccaccatgtagtaggtggttattagcgttaatttccttcccctggtgtcccatttcttaactatgggtttgtgtatgtattttagctttcatgttcactagcaattttgctattgtacacacgaattacatggaatttctaccctaaaaattctgatagataaaactatatatgaaaaacctag

SEQ ID NO: 4196 - DNA, 453 bp, Homo sapiens
caatgtagctggatgcagaggaggtgtctcaaaagtacataaggattaaacgtctatcctccttccaatggggacagtactgggctagaatttgcctctcaagggaagcttcctcctgactgttgaaagtggagtttttctgtttacaaatagggcatggggtctgaccagagggaatggagttgaggaaatagaggtttggggcaaaggaccaataggaccacccacagagaaaaatctcatttcactagaaagtgtgggagggactaaaatgttaggtaaaaactctgactccaaattattttcaggcagaggttaaaaaaagaggtgtggggcttggtgggctgtcctcacagtaagccttttagcaggaaagaaatgatttgtctcatagaggaacagttttaattcatttggcagtgctgtactcttacatggaggaaaacacaaccc

SEQ ID NO: 4197 - DNA, 291 bp, Homo sapiens
gtaggtcagcaatactcagtcttgacaggcaatgtgcatccttatcccccaggctggggttagggtgctccttctaccctttaaagaatttcatttccagaaaaaagggccaggcgcagtggcttacgcctataatcccagcactttgggaggctgaggcaggcagatcacgaggtcaggagatcgagaaccatcctggctgacacagtgaaaccctgtctctactaaaaaaaaaaaaaaaaaaaaaaaaaaaagggggccgttttttacgtaaatccaaacttgaaaaaa

SEQ ID NO: 4198 - DNA, 449 bp, Homo sapiens
aagcagaaatctcctggcaatttttggataagtttttgtttcctgatttagataccacttctttctcctttttcaccctttctggaacacagacatgagactagagataaagcagctattttacaatcatgaagtgacaaactcaagcatgaaagccaccttgtaaggatagtgaagtggagagataaaggaagcttggggccaggtgcagtggttcatgcctgtaatctcagcacattggaaggctgaggtgggaggatttcttgagcccaggagttggagaccaacctgggcaaaatagcgacaccctgtctctacaaaaaaatacaaaaattagctgagcatggtggttcatgcctgtagtcccagttattcaggaggcttcagtgggaggattgcttgagcccaggaggtcgaggctgcagtgagccatgatcacaccacggcac

SEQ ID NO: 4199 - DNA, 422 bp, Homo sapiens
gtttcctgtaaagagtcttttaaaaagagaaaataacagttttttgaaaaatttttagaagtttctgcacatgaataggcatccctggatgggcctgatctgggagccctcatttttagatgcattttttaaagtgttgagttgttcatctggaatttccacataacggccatcttaattttaaattgtctttggtgatatttcatcatttttgtaattgttttctgcttcctgaacctaatacttatacatgtaaaaggcaagcatagctggaaaatagattacttaattctatagaaatcaaggattttatttttacattgaatctttggtgtcttccagccaagataataccccgagagggaaacaccacacggttgggtcatgtaatgctttcacagtaaacctcattacaggaacat

SEQ ID NO: 4200 - DNA, 572 bp, Homo sapiens
aacctcttaaataggtccgggtcaataaccagaacagaaaacttgcttttggccacatctcttaaggaggggccattactagttaagaagagagttccatattaaataaataaataaatgttctggttgtgggttgtttaattcaaattcctattcagttcatctgataataaactatatttaattcatgatgtaattctgtgttccgtaatggtttttacaaagccccaacttgaaaaaacttttttgggtattgcttattagtggatgcagctgttgagaaggggcaaggttttgactttatgttgtagttcatgttcactgatgcagagaggtgtttataatgtattgtgagtgacttaagcagagcataaaacaccatattatcccattttgtaaaataaaaaaacaggcaaatgaaacactaaacaacattatttattaacattagaaaatttgaaacatcaaaacatacttcagagcaaagaaaatggggaacacctaaatgtttaactataaagcaccagcttaataaattgaggtagatatatatgtagccttgaaatatggct

SEQ ID NO: 4201 - DNA, 471 bp, Homo sapiens
ttgtgtgctattaagttggagtgaaacccacagtaacatgtattaaagcccatgtttaagacatcttggtcatattttattaaagaacgacagctcttaaacatgtacatctttaactggaacttgttgcagttcttagtaatggcaactgattgcttggcattttacaggggtatctattaaaactcttttctaggccaggtgtggtggctcacgcctgtaatcccaacactttgggaggcagaggcgggcaggtcacctgaggtcaggtgttcaagaccagcctggccaacagggtgaaacccagtctctactaaataatacaaaaattagcctggcatggtggtgcgtgcctgtaatcccagctactcagaaggctgaagcagggagaattgcttgaacccgggaggcggaggttgcagtgagccgagattaccccactgcactccagcctgggcgacagagcgagac

SEQ ID NO: 4202 - DNA, 525 bp, Homo sapiens
tttggtacagctgcaacacactcaacggaatgctatactcctaatatatgctgaatattgcctactgattgattctatggaaaaaattaagtattaagtcactcataatgtacaaaatccagagaaagcagaaatcctatggcaatgggtgaactaatgatctcattggtatacacttttgggaactcaactagaaacccttccttagggtcacttacaactgctttccttaggaaataactctaggtctgaaatgcaatcattctaaaatgaccttggatatatggaatagaaataacatcttgagatgttattctaatcaattcattgagaattagttaagtaagaatctgagaagaaggtttttgtgctgcatgttaacagggaaaagaagttaacaagacctaatatttcatcaaaatcattgggccacatctaggaaaggtcaagttcatggtgaactttttctccatcttttaaaagaaaaaatagtaagactcatgccagtgatcccaggactttgag

SEQ ID NO: 4203 - DNA, 511 bp, Homo sapiens
aagattattttaaaatattacagtaaacaataaacataacgactacaataattgaaagtatctccagggaacaggaatctgtgatgggaagggttttagcagaggactgctggttttctttttaaagctatggtactgttggagttttttaactttgtcaatgtttgattacaatattaaaattaaattttaaaaggcaaatcaagatcgtccaatatttagttgtacatcctaatgaatgataccaattttacgcaattctcaggaatcctgctattgcaggaatatattaatacttaggttgtatatctagctcatattgattaaagggacatgcttttactctcagatttcactggaagtgttttagcacgcagaattaaaaatattacctaccatgtcattaaaatttcaagaggaatgttttcaagtcagacagtggggagttttatgggtttttaactcactttctgataatacacacttggctttcgattcacatgtgtcagct

SEQ ID NO: 4204 - DNA, 583 bp, Homo sapiens
gaatattaattgtcagaaaacaaaaatgaaatacagaaatagcttgattatttacagcttggctcagcatttgccacatttgcacatggtctgaccagttaacagactatgattggcttaagcttagctactatgattggctaagactaagccacaagttacaaaatatactcttaatttaattgcagtctgtttacacactatgttaggttaaggatgtaagtacagaggcagctttaacaatctaatttaacaatattatctaatttaacaatattatccagtggcatagaaagaataatgtgactttaggtttttactaaataaataaatgtagaaatatcctaatagaggacacagtggccaaagtatactccaaaaacatacaagtcataataagatttaagtgagattttaatgacaggtttttaaaaaattgtcttaagaataaatcattcaaaccatggtaaaatagttgacaatcgggaggctgaggcaggagaatggcatgaacccaggaggcagagcttccagtgagctgagatgcgccactgcactccagcctgggcgacagagcgagact

SEQ ID NO: 4205 - DNA, 507 bp, Homo sapiens
agtatatgaatgtgtatatatacataggtaaatagagaagcatagactaggtactaatgaaagatatcttactctaagggtaaggacataaaggctaaaatatcttctcaatttttgactactttttatttttatgtctcttgattataagtttctttacatattatcacactcttcaaattcattttatacatttttttaaagtcctctttctgtcacctatacagactcttctgctcaacaactctaagaaatagacaaggtgctgtttttttgtttattttcattattttctaggaaatgtttaggtattttagtgaattcaaggttttaagcatcacatctgcatatatagctccaaccttacttaagagcagagatgcacaattcaattggattgaaccaaattctaaactctaaagctggccgggtggggtggttcacgcctgtaatcccagcactttgggaggctgaggtaggtggatcacctgaggtcagaagtttgag

SEQ ID NO: 4206 - DNA, 519 bp, Homo sapiens
gatattttattgtaactatctatggagggtaaaatgggaaggaaattaggtgcttcctctatattcattactcatgcgtgtttattaaaatttagttatataaatgagaacttgacacattaacaagtagttatatggctgttaactcaatttctctttaaagacttgagaaaataagggaaaaatgaaagttaaaaagaagaccctatttattgaactacagccatttcattctcatgaaaatggtatgttcatggccaatgcagttaatttactggtgaacaaaagtagtccaaactagttcattgaaataatatagtgcaaatccactgacctcagaaataacctcagaaacttatatctaagcttaaaaggggcccgttgtctgggcgcggtggctcatgcctgtaatcccagcactttgggaggtcaaggcgggtggatcgcctgaggtcaggtgtttgagactagcctggccaacatagtgaaaccctatctctactaaaaatacaaagaaac

SEQ ID NO: 4207 - DNA, 108 bp, Homo sapiens
ttagttttggactgatgatcttggacattttaatctgcctgtatgctaacttcaaccatctctcatttacaagaactatttaggaaaaatattgaatccacctggctg

SEQ ID NO: 4208 - DNA, 636 bp, Homo sapiens
caacaaatggtttcatcctccactgttggccactggttgagtcaccgaattgatcacagtctgcaaagtggagatttttctctcatccattagggctatttggttaccatgaaaaacagtttctactggaaaagcaggaaatttgcttatttccttacttttctccttttaattagcatttatcagaataatgagttggttgcacatgcttgtcttgacaaattaaagtcaaagggtccagtccctccacagtgacagatgcccaatggccttggtggcttccacccacgtagaatgggctagacagatggtaaatcatgtttgttgaccacaatgcaaatttacagaatcacccaaattccagctgcttaattaagtacagctgcctctacaggctaaagtctgaagacaatttaggtaatagcagattcacctcagcaaaaaagtaagccaaaaacactgacctgaaattagcaagtttcaaaactggattcatacaagctttttatgaggtgaacttcagtttctgattagcagcagcaatatgaactttcatctggcacataccattaggaaatatttactccataatctgttacagaagatctaccagtcaaaacaagtaacacttacttt

SEQ ID NO: 4209 - DNA, 515 bp, Homo sapiens
cctccattcataatttatgttgaaaataactcaagttatttgatagttttatatattttctaatagttttaattgaaaattatacttaaactaggaaaaaatatacacacacaaccaaaagactttattaaataatttatgagatttatttttcagttgtcatattttaattttccatgtgactttaactattaacagttcttctttttaataatgagtaatacatagaccaatgaatacaacttctaagaacttaagaggtactgcatatattagaaatgctctgcaagcaaagttaaatttccttttaattataaacctattatgattggaagggatattagagattactgagttcaaactcctcatttgacagatgaggcacaaatgcccacacaggctcagtcatttgcctataataagccacaagcagccaggtacagtggctcacgcctgtaatcccagcacttttgtgtggctgaagcaggcagatcatctgaggtcaggagttcgag

SEQ ID NO: 4210 - DNA, 407 bp, Homo sapiens
acatctaggaccctgctctggtatcaccatgtctcgattcctccttctctatatgccaaagcttccatggaatttttaaagggcagaactattgtctctttgtctttgaggcacaaagacttaaggccactaactttcagtacatggtggagagagggaagacctggatgggttaaaataaaggaagaaactagaaaatgtccagaatttagctttgggtaaaataacaggtttttaccgtagcctctttggattggtaaatgacagaatccaatgaaagcaatgtgaaacaaatgaccagagcaagtaattcattttaaaatattaaagcttatttctttttttttctgactctggaaaacttttctctgatggaaatgacccctggcaacagtgacattctgaca

SEQ ID NO: 4211 - DNA, 628 bp, Homo sapiens
tcatttcagatgttttacttgaattcctttacacctattcagaaccactctttccatcttattcactcttttaaaaattttgaacacaaaattgaaagttgcatgatataataataatacttaaattacatatttcagaaaacctatgatttagccagtatttatgaggaaggtagcattggcttaaatctcaatagcagggcttaacttagatttacttatttacttataaacaccctgagttctttcacaaagaaattgtgagagcttacaaaaataaacataaaaaagataaaacaaacaagtgacagaaacagagtaaaggggatagaagggtcatactataataaagcccttgatgtacagaagtataaacatatgtgttatgtacacactgtagttattaagggtaggtcacatatttggcctcaaagcttttagcagtgaaagcaaaaaggaaactagtatcagttacaagaaccagggttcctaagacttgaaaatgagaacgaaatagaaaactgtaattcaggaaaaaaaatataccccaaactaaaaatctgagaaatttccctcatggcttctataaaaaggtattggataatgtaatagaaagctccctacagta

SEQ ID NO: 4212 - DNA, 559 bp, Homo sapiens
aacttttcttcctctcctcacagaactttcactttaattggtaagtgttaaatatctttggatctccctttcaccatctgtaaaatagctacttttcaaggttgctagtgagatttataaataataatgtagggggtatatctcttatttttaaactagctttctttataaacataaaatatttataaaactaaaggttggaaaacacttgtatagtacttaagaggacaaaatgatattcatgtttctgtgttgaaacaggttacttttatgttaggttaagacaatcccagttgggttatgtttccaagcaatttcacccctaaaatgtataaacaaagtgtttcacttttcacctgaaatgtcacttctaccattaaatgccccttcctttcaaaagaactttcatgatgtagttgaaagtgatgggtcgggtgtggtggctcacgcctataatcccagcactttgggaggccgaggcaggcgtatcacctgaggtcaggagttcgagatcaccctggctaacacggcgaaacccgctctctactaaaaacacaaa

SEQ ID NO: 4213 - DNA, 650 bp, Homo sapiens
tgacttactttaaaaacaagagattgcaggaaagggagactcaaggcactgcagaactcatttttgtgatattgtatatgggcagctgtgcctttctgtgttttctagtttattttgtgtgataacagtgcccaatagcactttattttttattgtggtggcatgtgcagtttctttggggagcaaaccgtcctgacctttggatttccttttctgggtcttaattgacaattcagagttcactgttaaattgtcagagtttggattgctttttctcttatctttcctattttaaagtttatcttgcctctcttttttttttcttcctgtcaccaacaaagggagatcgttctcaagctcattgctatcagcttatcattgcctcattcagaagagcttggcattttttgtaagtgtttgggaaatctgagacagaagtgtcaactggattttaccagtctgtcaaacaccggagctctctggctctgtggaaaccccttaatgtaaccttttagttcctatggctcctcagatgaggtccaagactgttccacactgggggttgcggggaggggggttactgaaagaggaaactgctgtaacaatttcagctttaaaaaatattcacatacaactcaatagcaaaaaaa

SEQ ID NO: 4214 - DNA, 295 bp, Homo sapiens
gtttctccaagtctccaggttcatgatgcatatcatcatcatttccaaatctcagagtttcctcaagagagggcaaccacatttgtaactgtcttctttctgtcaattaagtgtgtgtattaattactagggctaggtcttttcattcctttgcacgttttaagcaggaatagatgaggcaaagcccatttgtaggttattttttagtttaactatgttaaattaaactatgttggtcaggctggtctcaaattcccgacctcgtgatccacccaccttggtcaaccaaagtgct

SEQ ID NO: 4215 - DNA, 541 bp, Homo sapiens
agcttattctcaacagcttctcctttttcatttggttaatgtcaaatatgagtcttagacagcttattctaatgctcaacagcttattctgacttttccaagatgaagatgaagagcaggccagtggcatgggccagatgcagtcagatgactgactgaccaggagggcctccgtccagtgaccagtctcagaatttaaaggacccttcccccttacttatgcttgtactcagcccaggtgagttaccagccatttctctcataaagggagtttaagcaattctggaaagagtaagccttttttgtttatgaaagttgcatctgaggtagccttgtctcctggaaatccccaggccaaggttggaaatccccaagccagtctgtatcacattgctaagtgacacttagtgtcacccctactctgtgacatactgctacgtgacatgtagtatcagcaagatgcctgaataagccttatggctatcattaatcttataaccagggtatgtctcttatagtatactacaagatgaaataaact

SEQ ID NO: 4216 - DNA, 518 bp, Homo sapiens
gtgaacataaaaacccaatcattatgcttatctattacaaaaggatcaagtttaggctcttaaaagctcccaaatcaacttgatcaaaaacaataaaagattactgtttagtttttcaaatatctgagctactaagaaacatattttggcactacatgagttattctatactaattattgtgagcctataaagctcagtaaaaatttttaattttcttgcagaccagcaaaatttggttatttgacatcacttcaatcactgacaagcagggccataaaagatgtgtgattaatgctctaataggtgatctgtcttctcctaaagtagacaaccagtagaggctgtaaatatcacagaatgtctttgcttcaaaacaactgttataccttaggaaaacacctaaaggaattgcgttcaacagttttccaaatgcttgtcgaatacaagttccacggtgcactagttggacacggcaaacatcaacacatctatgaaagaacgaaatagacaaagcagg

SEQ ID NO: 4217 - DNA, 290 bp, Homo sapiens
gtttctccaagtctccaggttcatgatgcatatcatcatcatttccaaatctcagagtttcctcaagagagggcaaccacatttgtaactgtcttctttctgtcaattaagtgtgtgtattaattactagggctaggtcttttcattcctttgcacgttttaagcaggaatgagatgaggcaaagcccatttgtaggttattttttagtttaactatgttaaattaaactatgttggtcaggctggtctcaaattcccgacctcgtgatccacccaccttggtcaaccaa

SEQ ID NO: 4218 - DNA, 249 bp, Homo sapiens
tgaggtctaagaaggtcgggaattcagagctcccaggtccgctccccatggaatcaagatgtgtcaccatctaaacatatgcatgtgttcaagcaggaggcacacctcagctatgtgtctggaggttttatgtggacaaatattgacctaattgaaacattgggcatgtgaccgaattcaatctccagctccgctcttctctgtggagaaatttgaggtgataccacctggctcacacatggtctttct

SEQ ID NO: 4219 - DNA, 596 bp, Homo sapiens
aagagagacacagtaaatcatggctaatgagattattcagatgtaatagtccaagtaaatgtttgatggtgtccatcaataaggcaacaagcaatggtggcaactgtgacaaactggaaccaacgccaatccaaatccaaaattttaacactatgctgaccaaataaaaatgccacagcctttcatattttaagtaaatatcacaacataagattttcatcagaaaacttgtctccaatttttagagccttttgttaatcttgccactaccttagcaggactttagtgttccagatatgagactgctagttttaagtcaaataattatttattcttatgcctgcctctcaactgtgttgatcaaattcataaaaccaatcttagtcttaaattccttacttcacttccttgtcttcacttcctctgggacctagtctatcatgctgcagccttgacaacttgccaagacaaaaagttgagagttacgatagtaggaagaagagctacagagaatagaaaataataataataaaaatgcatgtgatttctggcctgagacaactatcagtatatcaggagaacatgacacgctctga

SEQ ID NO: 4220 - DNA, 501 bp, Homo sapiens
ggacagaagttatttgcatctctaccagacaaaaataatttgcaaacataccaattttaacttagtttgatatctatctttgcagaagctgagtcttcattcatagtaaatagcgtaagttaagcaaaacttacatatccctaaaaaattatattcccagaaagtaaggacctaagctgacaacatagctgccctgggcaggtggggggcacaggtagaggaatatagaatcgccagtgttggttaacttggatttcaaaaccatgtgagaatgagggtgagacatggggaccacttgtggggtggaagaagttggaactgagaccctaccttaatcagggatccttgacaggcctcaccatcattgaaaggatggacgagataaaaaatctactttctagcacagggattcgatagggaatttatttttctatctcagcctggcatctgtaaggaaatttgtaaccaccattcaaattcattttcgcagtgtcactcagt

SEQ ID NO: 4221 - DNA, 577 bp, Homo sapiens
tgcctggccaaattgtaagactcttataatggatgagtagaatatatttaagattatataaaaacacaagtcacttcatgatcatcgtctgctggaacatgaaaccagctttcttgtgtagatgtgtgatcagtaatgttattcacaccgagaggatcattctgtggtttttaattcatgattttgtaatctgatagtgacttttcattatgtctcctgatttataattacatcacagccattatgattggaatcattgggaagagttgaaatgagcaatttagaattgtttctgaaatacagaaagccttattttttggtgggggttgttggaggagatatgtctgtgttctgtaatttcatttgactaaggaatttatctttggtcttctcccagagtgaggacatcgatacttccatagctatattccgtattaatcacagtttgctttgtgggtttcattaggctaaataagaaaaacgtcgttatgtattttctgctttaaaaaatgcttcttgatataaagtcttctcagatcagtcccacatgtgataaatctattcaaactattaaact

SEQ ID NO: 4222 - DNA, 526 bp, Homo sapiens
tgtttactcaagagaaacttgtaagtttgcaccaagagacatgtacaggagtgttctgatgtactgtttgtaatagcaaaagtctagaaacaacccaaatgtccactgattgtagatgaatcactatgtggattgtggataaattgtagtatattcagtagtgaaatatcacatagtagtaaaaaaatagtaataaactatggctatatgtacatgtataaccttagaaatgtaacaatgttatttgtagaaagcatttcccagaagactaaaatgttacgatgtaattatattcagaaggaaaaggaaagaatgtgttgtttaggcatgtgtaaatgtgttaggggtgggcacagtggctcactcttataatcccagcactttagggggccgaggtgagaggaacaagtactcggaggccaggagtttgagatcagcctgagcaacatattgagccctcatctctactaaaagttaaaaaaattagccaggtatggaggtgtacatctgtagtctcagctactca

SEQ ID NO: 4223 - DNA, 455 bp, Homo sapiens
acaacttggcctttgttgacactgacatttcatctgaacagtaatcactattcatttacttagggaaaacatctggaggattgtttttgtttttcttcagttttcatctggatgtctggcattgtgtcaaggttttactctgagaagctttaaaaagcgagtccagttagtgtgttacttcctctccactttgtaataatacactagagtcttgctcaaatgccacccctgggatgcatgctaggaaccatgttatagaggaaagagcaggataaattccttctgatgttcatcgcacaacagtaaattccctcgtaaacctaaaccaatggcccactttagaaatcatcctgggccttacgttgtcacattacaatgagattctaatgtgcaggagaccctgggtatccttggatttaactgtcacagtttcttctacttgctaattacccatg

SEQ ID NO: 4224 - DNA, 539 bp, Homo sapiens
atgttggccaggctggtctcgatctcctgacctcacgtgatccacccacctctgcctcccaaagtgctgggagtacaggcatgagccaccacgcccagtcaacatttatatttcaagaaatgttgataactactttctgaatatttgtaagacacccttgtggtaatacatacttaaaactaaattgttcattgatgttccctaaatgagtctgttccttaatgacccatcaccaattcatgatgaacttcaacaaagcttccaaaagtctcacaattcacttcagcgttgggagcacttgaagaaagtagccagcagatatcaggtatatgccacttaaatctgtattacagatataataatgcaattcttaattaaattgattgctttgcctagtcagttacagatggttggagatcgtttttttaactttctttaaagaaatcttcaacagttcctactgatccccatgttggccttgtatctgcttttagaataacatcaaaaatgacaaatatggaccctggctggagtgggag

SEQ ID NO: 4225 - DNA, 164 bp, Homo sapiens
cggaagttagctaaatatatgagagaaggctctgaaaagcaagtacacaaaaataatgttgagatgtgtcaccatgaagattaggaggctactgccaaacaggtaatttaccatttgtatattgtagatggagaaagaagtagggaatcataaaaattatagat

SEQ ID NO: 4226 - DNA, 592 bp, Homo sapiens
attttagcaagagggacgaaggggagaatgggcttgcagaatttgcagtgaaattttctcatgtttcctctgtgatggtttatattttctttacaaagaatttatctgtggtctggtatagttatcaggaatggtagagatgggcaaatagcacgaggggtaggcatctaaaatgaaaacatttgttcagcagttatcccatgccaggtactcaactaagagccttttacatccatcattccattcgttgctctcattaacactatgaggtgtatattctttcatgatgcctgtaacagtttcctagggccataggaaaataaccaaataccacagactaggggacttaaataacagaaatgtattttctcccagttctggaggctggtggtccaagagcaggtgtggacaggctggtttctcctgaggcctttctccttggtctgtgggtggctgccctctgcgcatgcacatccctggcatctctctgtgtgcttaatctcctctcctttaaggatacccgtcagactgaatcagctaatcacctctttattattaacttaatcacctctttaaatacagtcacattctg

SEQ ID NO: 4227 - DNA, 537 bp, Homo sapiens
gtcaagtaagttagactacagaaagcatatgttaatctactaggttgttgtatgaaaatcatttaacaaacagtacttttctttgttctcatcttttagtataggaactacttacataatttgtgcaactatggggatattcatacggtttttcttttttggtgagttacattaattgattcttgaatgctaaaccaatctacaattcctgggattcactttagttggtcaaaatgtataaaactttttctgtattgttggacttgattcactgaaattctgttaaggatttttgcatttatgttcattagagatattagttggtgggttttggctaatggttctgatatcgagacaatgctggtctcatgaaatgagctggaaattgtttccttctcttctcgtttctagaataatttttataagtttggttttatgtcttccttagatgtttactagcattcatcagtgaatccatctagacctggaatttcctttactggaaaatatttaatttttaactataaattatatttg

SEQ ID NO: 4228 - DNA, 556 bp, Homo sapiens
tggtgtgttatgtaatatttgcaagttccaacttgggaagttgaactttactgaactttaaaatgtagcaactacgtatggctgtattttaaagctatagtaacaactgagcatgttttcttgtgttttgtttttcaaaatgtattctgtgggataaagttgccactgagattttcaggtctctacaatgattaatttgaaaattttacatatggattttaaccattttttaaactgtaattagaatccactgtcaaatgtgttacagaaagtttagcccgttgagagatccccttcatactaacttgcaggttcactcagtttgggggcatgctttggggaacaaccttcttctgccatttacctttaatttaaaattgtgggccaggcacagtggcttacccctgtaatgccagcactttgggaggacgaggcaggtggatcacttgaggtcaggagttcgagaccagcctggccaacatggtgaaacccagtctctactaaaaatacaaaaaatagccaggcattggtggcgcacacctgtaatcccagctac

SEQ ID NO: 4229 - DNA, 553 bp, Homo sapiens
gatgatagtgaccagcagagggcagaggccccaggctcaacagccttattaaaaatacaggacaggggaggggaaagaaactcattcattaattctagccgtatttattaagctttcatgatgtgccaggcactgagctagatgctgggagagactgttttcattccagcgtcacgacatgaaacagaaggctttctgttttcattaaaacatgacggtttcattaaaacatattctggtggtgtcgacagggatatgcacacacacacacgccacacacacatatgtacatgtatatcattatataaatttatgttttatatgcaatataagcaacatttaattgtgcgtgaataacatatgtccagatggtgatgagcacgctcagaatcaaatcaagcaggacgaggagaggtccaggctggcaggggccagcgctttagcctccgaggccagggagggcagtgtggggcggacacacacgtgacgagaaaggcgccacaggctgggatctgagggaggctgtttcaggcaggagaaagagccagggcag

SEQ ID NO: 4230 - DNA, 468 bp, Homo sapiens
aggagaaatgctttggagattaaaacgtaaaggagataaccaaattttactaaacctctatccatcatgaccacatttcctttcattctaaaataacaatattttggaaatgttgaccccctgcccaccatttttgcctgagaagttttaaatgcgaagaacttgctcctcacttttgaagcacggtgttttctttaggaaccaatctgtatcacatgcattctattggtttgtattttattacatatcattctattacattttaaaatgcatttctgagcccatgtcattgatttcatgattcattaatgggttgcaagcagcagctggaataacactggcttaggtaatggcagtatagatgccacatggcagtgtgttacttaaaccatatatcaatcaacacagaagcgacataaccaaaatgtttttaccatcatttatagaagattatgagtttcatgcagc

SEQ ID NO: 4231 - DNA, 301 bp, Homo sapiens
attagaattttgcatctatgttatcaacccaaatatcatcactgattgtgttgctcgatgtggatgactataaacaggcccagcctcattctgttgtccaggctgtagtgcagtctgctcctctgcctcctgggctcaaacgatcctcccgcctcagccctccaagtagctaggaccacaggggcatgtcaccacacccagctaatttttgtatttttagtagagaaggagtttcaccatgttgcccaggctggtcttcacctcctgagctcaagtgatcacctgcctcggcctcccaaag

SEQ ID NO: 4232 - DNA, 510 bp, Homo sapiens
aacacctcatcgattctacttgttattgttttccatctttggttttattctgtttagcagaactgggtattctccctagttcttctaattttgacccttagtaattcaaaccttgatttagcaaaattgactcttacttttatgtccttgactttattcctgcgactaaatattctgtccctagattcagttttatgtttctggtaacttgaccttgattacggatgttgaacttgatcctgattctgatcatttggatggccactccattcacctcaatgtatgttaatgcaagcaaaaaggcttgccaacataaccactatatgaattaaaatgactactttattacccaagatgatttaaagagaaaaatataacaaatatcaagggtttatcaaagaaggatgaattctggaaaacatgaggtgggcggatcacaaggtcaggagttcgaaagcagcctggccaacatggtgaaaccccatctctacttaaaaaatacaaaaatta

SEQ ID NO: 4233 - DNA, 529 bp, Homo sapiens
aggtagaaacaccttaggagtaaactagaaccatggggctgggacttagaatcactctagaaaggtaaatgtaggcattgtctatgcagagacagtaactgaatcaaaggaaatagatgagattacccatggaaactcagtagcataagtggggaaaggtctaggattaagccctaagtaactagtatttaaacttaaaggtactacagattctacaaagatgactatgaaggatagctggagatataagaggaaaagtagaatcggatggaagagatgacaaaggtcaagctgtggtggtggggtgaaggttcaaaaagtagtgagagatcaacactatttgatatgttgaaaagtcaagatgagatttggaagataaaaggattttcattaaaatggaggagtcctgaggatgtgtaaatattgatggaaagaagccagtaggaaaaaaaggataaaatcagacaaaaataactgctaacctcaggttcctaaaccagtgttttttggtgggaggggaaagggaaag

SEQ ID NO: 4234 - DNA, 598 bp, Homo sapiens
aaggctattataatcaaaacagcatgcaaatagatacagcaaacaatagaatgatagaaaacttaagagtaacctaatatgttaacactcagtaaaaatgacttcactgtttgtcttacgaatgccaacacatcatgtcttgaactggatttaatatcaagacctaccagacagtgtttcatatattttgaaagttccattttattggtaaattatattctacggaatgtatcaaatcttttaacattgggagagataacattttcatactatgagagaaaattttcaaaatagttattttctaaaaattactgtttttgtttactcacaagaaaccccaaatgtccaaaattcaatcattgagaacacttaaaactctaacacagtaatagcaaacctacactaaataatatgaatctgctttcagagtggttggctgctaagaaaattagtaagtttagtcaaaaatttaaaacatacccatgaatataagcattgattttggtacaaacaagtgataattaaatgtgtttagagaaaagtcagagctgatcacaagattatttgaattgaaaatactcaacagtaccttgaatta

SEQ ID NO: 4235 - DNA, 513 bp, Homo sapiens
aagatcataggatttatggagtccctgaaacctaccatttgaccgcagattatttcatttcttccgagaataatatgaagacgtgatttaatgacatggtactaatttttaatattttaaatctatctgtcttctgcagtgtaacttagatgcgccttctttaagaagatgttttattagagcattcatatttgcgaaacgttgtatgagttcacttggttatgatgtgaacattcatgaagtataggcctcttttatacagcagtccctttgtacctgaggagaagtggataccaaaatccatggatgctcaattcccttacataaaatggttcagtatgtgcatataacctacacacatcctcccatatagtttaaatcatctctaagtttcttacctaatacaaagtaaatgctgtttaaacagttgttatactttattgtttagggaatagtgacaagaagaaaaaaggtttgtacatgtctaatacagatgcacgtgtctttttttat

SEQ ID NO: 4236 - DNA, 464 bp, Homo sapiens
atttctttaaaaaggcaatttattttattatttttttcaaacccagcacagaatattaacaaagtagataatacataggatggatatggaatgatttgcttggatcactccaagcaaggcatctgaactattcacatggttgtgtttggaagctcccagggtctaaacgctgtaagatttcggagatttataccagatcagactcacaaatatttgattttcctcatttttcaagattttttcccctctggcctttcatttattcatttagtcttcagtagagagaccaggggatggcttggatttaggggcttaaccacctccatcttcatcagctccattcagctgaagctgttgctgttcttctgaaaagatcccaggagcttcccaatacatatgcaatctctgtaaaagcagtgtgtttgcaaacacagctgcaagaaaagcctcctacagcaagtata

SEQ ID NO: 4237 - DNA, 110 bp, Homo sapiens
acctcacatcatgcaccaaaatgatttccatgttcattgcagatctaaatgagaaagatgaaacaatgaaattttcagaggaaaacagaaaaatatcttcaagactagct

SEQ ID NO: 4238 - DNA, 588 bp, Homo sapiens
ttcccttttatatccccagcatgaaaaacagtgactggcacagaatagacattccatcaatatctgcttaatgaatgaatgcaccctgaagtacatattaaaattaaaatttaagtagagatgtttaaaattggtgatatagttactccttttctatgggaacacatctctgaaataatacagtggaaaaataatacaatatatcaaagtttgagagcaatagttctatgaatttaatttgtaaaaagaaaactagcatttattagcttttattgaccataggcaaattattcacagtaattttaacttcagaattgcacatgtcctgagcacaactctgtggccattgccttctagcagtattttatgtgcactcatagattacaaactgaaaccaacgtcagcctatcattagataaaatgtaccctatatcccaatgtatcatctgtggtttatgtgttttctaggccaagacagtatctttggaataagaaatacctagatgtgctgggcgcggtagctcatgcctgtaatcccagcactttgggaggctgaggcaggtggatcgcctgaggtcaagagtttga

SEQ ID NO: 4239 - DNA, 573 bp, Homo sapiens
gagcgcatggacccccgagaccttcccacctgagatgaggagaaacccacgatgtgatctccttccctagatgctggaggcattagagctaagtcatgtgttaagaacagggccgggcgcggcagctcacgcctgtaatcccagcactttgagaggccgaggagggcggaccacctgaggtcgggagttcgagacaagcctggccaacatggtgaaaccccgtctctactaaaaatacaaaaattagctgggcgtggtggtgggtgcctgtaatcccagctacttgggaggctgaggcaggagaatcacttgaacccaagaggcagaggttacagtgagctaagatcacaccactgcactccagcctaggtgaaacagcgagactcagtcccaaaaaaaaaaacagaacaagtttgggcccacatacccaaaagcctgccttccccgtgttccttcggtaattaattgtcccactttaaagtcgaagctatgaagacccagcaagattacctgggcggatcacacagagtctgtgccaacaagagcctggcccagggagaccacttcctgcat

SEQ ID NO: 4240 - DNA, 533 bp, Homo sapiens
taatgcaaaaagccaccttttgatcagaaagcactgggcacggcctttcaagtttttctacacttctttccacattagccaaatgagcccgtgctctaaagatctgtagttaatgccgattctattttccatttttattctatgttttatttgtccatagcatctaggaaaacactcatttttttcccccatagtcctcaatgtcaatcttaatttttctggcttagtccctccaaagaatgaaattgttccttggacaagtaaaagaaaattctagaaaataaaattgtcaaagaagaattataattttctaaaatagaaaaagagaaactacattgtgagctttttttccacagatgttataaattttgttgggaggaaatgcataattattagaatcttaacaaatatcaccctattcgttctgcagcaaagaacagagctccatgggaggaaataatttggattatctacagtaaggttgggagatctaggaagaaggacctaggaagaggccaccactcccagcctct

SEQ ID NO: 4241 - DNA, 535 bp, Homo sapiens
ccaagtgtgtttatttgcacaataaacatggtactttacattctgaaagctctaacattcgcaaagcactcatgagctcatacgaaggagacaggtgagtatccatgcttccatctcgcaaatgtcatgttacaaagcaggaaagcaggacaggtgagatgataaactctgtttttgtttgtttggtgggttgtttttgtttctgtttattcaccacaccagagtagacaaactaatgtctccaatctccatataacttcctcttggttcagtgagcagttaattaaaataatttcctactaactccaatttggagaacctcagctctaggctggatgaaaggcaactgatgcctaaatgcagtccaacactggtgcccttttactccttcaagtactgaaataaagagtccatttcactaataagctgatgagttaaatgctagctggacccagacaggtgtgtttacccctgcttcttgaaacagaaacaaatgtgacatgtgacttccctaaaccaaacgtttaaatttgag

SEQ ID NO: 4242 - DNA, 503 bp, Homo sapiens
tatccttttctcaagcgtgtcttcttttggcttttcttttcacttgctattctttcggtcacttagtcaccatacttttaattagcatcaactacacgccagacactgtattctgcagaggggccagaaaggttcctaaccacagcagtgtaaggagaaatgatacattaacctagtcactcagtacaacatgcagggatggaaaaggatgaaataaattctctgggaatacactggcctctctatttgcctttcttttctcagtttttgctgtaagtctttttcagtgatgagtatcagatgtgttacattgaaagttttagtcttttttcttgccctacccagttttagtctttattatgaacctttagtaatcttagtcttatttccaatctccactctaaagtcttcaacatctgacataatttacttgagaagctttgggtgaaaatatctatatagacttacagagttcaagaaattgaaataattgacagtaatta

SEQ ID NO: 4243 - DNA, 501 bp, Homo sapiens
cggtgatgcttgtagaagatcattttggagcaaactatatcttgttcaccatctattccctttgtccatgacatgtcctggcatgtggtagatacttgatcaatatttctagaataaatgaaatgctactttacattcaaaaatttgttttaaaaatggatgaacacatttggaatattccagaagaaatacggaatgaaaatacacataagccaggctagaatgctcatgaggaagccaactctgatccctcctctcctatccaaccacgagtatttactccatctctgaaatccactgtggctttgctagcattccaattaaggcgcctttctgacaataatgcatttgtgttcataagtgggcatcatagcttcacaatttccttagcatctggcacaaagaagaaactcaagaaattatatcacttcctaataaaattgcttccaggcaagttgaatttgtggatgacatataaaactccatcacagcaggacactc

SEQ ID NO: 4244 - DNA, 515 bp, Homo sapiens
agtgaaagcagaaactgggtgggcccagcaatctgtattaacaagcccttcaggtgattctgatgcacactactgttccagaagcactaatttccagagttggctttcttggaggggaagtcgagaaagcctaaattacttttttctatgtaagagaatttatgatgtttaacatttggtgtgtgacaataagtgtttttgctgatttttattaatcagcgagttcctggggaaaaccccagggcaaaacgctcagaaatggattcctgcacgaagcactagacgagatgacaactccgcagcaaacaactccgcaaacgaaaaagaacgacatgatgcaatcttcaggaaagtaagagggtaagtttcaaggtctgttttactaaaagatgggaagtgtggattagctggtgtttggtgtgtgtgctgtattactaagaaggcaaggttcatgcccagagtatgtatgttttaatgaatcctcatggtagcaatttttaaaaatatcttgaact

SEQ ID NO: 4245 - DNA, 588 bp, Homo sapiens
ccccatcacccaaataaaagcatattcctgtttatgaaatggttaaggccaagcgcggtggctcacgcctgtaatccccggactttgggggctgaggaggactgttcacgaggtcaggagttcaagaccagcctggccaacatggtgaaaccctgtctctactaaaaatacaaaaattagccaggcgtggtggcgggcacctgtaatcccagctactcgggaggctgaggctggagaatcgtttgaacccaggaggcgaagtttgcactgagccaaagccatgccactgcacttcagcctgggcgacagagtgagacactgtctcaaaaacaaaaaacaaacaaacaaaagaaatggttaagaattcaggctctgaagtcagaggcctaaattaacagccacgttctgtcactttccactatgtctcctctctaccatcttactgatgaaaatctgaggcctggaacagataaatgtcttagatataataaaagcactgtttgagtggattgttgcaaggattacggaagtgggaactgtcaaaggaaaacatcttttcatttttttatttacaaagtactatcacct

SEQ ID NO: 4246 - DNA, 505 bp, Homo sapiens
acaacttggcctttgttgacactgacatttcatctgaacagtaatcactattcatttacttagggaaaacatctggaggattgtttttgtttttcttcagttttcatctggatgtctggcattgtgtcaaggttttactctgagaagctttaaaaagcgagtccagttagtgtgttacttcctctccactttgtaataatacactagagtcttgctcaaatgccacccctgggatgcatgctaggaaccatgttatagaggaaagagcaggataaattccttctgatgttcattcacaacagtaaattccctcgtaaacctaaaccaatggcccactttagaaatcatcctgggccttactttgtcacattacaatgagattctaatgtgcaggagaccctgggtatccttggatttaactgtcacagtttcttctacttgctaattacccatgggaacacagtgggtgatcacttgtcatttttgttgcaatacatatttgagt

SEQ ID NO: 4247 - DNA, 432 bp, Homo sapiens
ttggaagatcatgatcagcccaaaggaatagaccagtggatatgtcatgaggagcttttctgggaaaacttctcgacctgattgccctgtctggaagccacagttgacaattattacctaagaacctgaagcttactggaaacgtttattgtattgctcttgaacacaaacagataaccaacaatcacgagattctaggtacagccaataacaaacacagaaacaaaaaataaacaaaacaactgaaagtaaacagagtctatacagtgtgggaaaaaagtaattattaatttcctcagagagggaagataatacaacaagaacaagggtgtgatataaaatggatattcaaaaaaatagaattcttaaaaattaagaaatttattgcagaaatatataacttaatgggagatttggaaggtaaagctgact

SEQ ID NO: 4248 - DNA, 490 bp, Homo sapiens
gatggtaacactgggaatcctatgaaagattgtcgaagtgctaggagtaaataaatccagaataagcaggtctcagaaaacaatatcaaaaaatatatataacattgaaagtgagtcatcactttggaaggcaaggcctgtagcatgcaggacaatacagagttagaaaggttgagtcttcctgcatcagacttatgtcattcacgcacgcagacacacacgcacacacacacacacacacacacacacactattggctcacatagttattgaggctgacaagccccaagatttgctgtcagcaagctggagacctaagaaagctaatggtgtagtcccagtacaagtctgaaaagaatgcacatgccatatcaatgtccacaccaggaacctggagttgttatctgctctaacaaagtctgaaggttaggaatcaggaaagtcaatggtgtaatttccagtgtaggccacgcacagtggcccatgcatg

SEQ ID NO: 4249 - DNA, 517 bp, Homo sapiens
gaggttgcagtgagccgagattgcgccattgcactgcagcctgggcgacagagcaagatttggtctccaaaaacaaacaaacaaacaaacaaacaaaaaaagtgacatttttcaattcctttatagtaatgttagtacaccttggagtttatgaaatggccattcgtggagcttgaatactagtgataccaccagactattctttgctctttcctgctgccccactcttgactctgttctcaaaagcgtgattggcatcaaatagtcttttttttcttttttgagacagagtctcaatctgtcacccacgctggactgtagtggtgcgatctcagctcactgcaacctccacctcccaggcttaagcgattctcctgcctcagcctcccaagtagctgggattacaggcacatgacaccatgcctggctaatttttgtattcttagcagaggcagcatttcaccatgtttgccaggttggtcctgaactcctgacctcaaatgatccaccttccttg

SEQ ID NO: 4250 - DNA, 377 bp, Homo sapiens
gtagagatggggtctcgctatgtcgcccaggctggtcttgagctcctggcctcaagcgatcctcctgccttggcctcccaaagtgctgggattacaggcatgagccacaagcgccggcctctctcttcttattgggataccagtcctctgagactcgaaactgtcccccaggccttggccatactgataaatatctaggccctacaggagttcgtgtccatgaacccagtaaacgcaattcctcagccttaaaatctagtcactgactcatttcaggccccagcacagacgaaaacaagccattctgtttgcccagtttacattgcgggtctccaagaagtggaatgttcaccaatgattttaagaaaacagggcct

SEQ ID NO: 4251 - DNA, 510 bp, Homo sapiens
ttgcaaatgtaaccatccagattaaaaaagagcattccaggaccccatgagatgcccttgtattcccttttgattacctctcaccccacaaaatatactatagattagttttgcctgatttgaactttatttaaattgatcatttttaattactgaactgagccttaattataatgtgaaatgagcagaaagatatttcaaaatgtttcatgatggttctttatggccagtatttttgtatatcctgtagaaatatgtcattccctttattttcaaacctcatttgtgagattttagggatacgaatgcctttttgggactggtgtggctgtgttcttcttattaattattactgaagtaaagaggaaatgatatcagcagatgtgcagagcttttatttgcactgaatacactattcatttagacaaaaagatcatttctcaattcaaatcagaatattctaatttaaggctgaaatcagttgtgtcataatctctatggaaacaaagc

SEQ ID NO: 4252 - DNA, 382 bp, Homo sapiens
gtgtgtatatataaatgcaaaaatagatgtgacttgccactggtctgtgggactcaaaacaatccacctgtttggaaatgtctgttgctgctattgtagaagtttctttacgttgagatggagtttcactcttgttgcccaggctggagtccaatggcatgatctcagctcactgcaacctctgcctcctgggttcaagcgattctcctgcttcagtttcacaagtagctgggattacaggcatgtgccaccatacccagctaatttttattagcaaagacagggtttcaccatgttggccaggctggtcttgaactcctgacctcagatgatccgcctgcctcaacctcccatagtgctgggattacaggcatgagccact

SEQ ID NO: 4253 - DNA, 551 bp, Homo sapiens
cagaaatcagcctggcattggtcttattaataacaacacaagaaggtagaggaaaatggaaaacacctcttcaaaaatttaagaggaaaaatatattcaacttagaattcttcgcccagcccaaattaatcagaaatgagggttaaacaaagaaattttccgacttgaggtatcaaaaattgtactatccatgtatcttttcacagaaagctgtgggtgaatttaatgatgatctccaccaaaataaaataagaatgtaaataaagaaaaaagataaatggcatatttgtcaaactgagatcttacactcatggagatcttacaaactgggtgaaaaggtaagtttgataaaggaataatagggtagcctgaggctagcaactgtgtgaagctattacaatcattagtcctaaaaaacaggaacaggagcaattaccaaataccgtgagttttccagtaaagtctaccgggcaagagatgtggcctttagcattggacacagtcaacctgtagtcacttctcagggcacaagctagaagaataagtgcctc

SEQ ID NO: 4254 - DNA, 546 bp, Homo sapiens
ccaccaataatttaaaaaaaagtcaattaaatatgcgtagcttacttaaccttttgtccagtgatcaaataacttagttctgactgttgaaattgactggacaaaagttaagccagtgaagaaattttgtgatatcatggggtctgtatttccaaaaaattaaattttttatgtctaaaagcttatgcaaatatgtattatttgtgttggattaactaataaattatttgctttagtatatgccgctttaagaacactgaaaagtcagtgtccaaataactatattctaaacgttaggggaaccaaagtatccatctctaaatgattattactaaaaataattgaagaaatttgtttagtaaatttataaaatggtaaatctgacttagttgtcaaaattagctttttccatttaattttgacctatagattttttaaaaagtggaacggttcagaattttcctattaaaacttttatttgccagcctgggcaacatgacaaaaccctgactttactaaaatgcaaaaaaattagccaggcatgct

SEQ ID NO: 4255 - DNA, 520 bp, Homo sapiens
agatatttgttagagcagcacccccacttcttagtaccaatttctgtcttagtctgtttaggcacgtaacaaaaatacaatagactgggtggcttataaacaatagaaatttatttctcacatttctggaggctgggaaatccaagatcaaggcagtggaagacttggcatctggtgaaggtctacttcctggtttgtagatggtacgtgggaggggtaagagagctctccagagtctctgttaaagtcactaatcccattcctaactacctaatcacctaccaatgggtccatctccaaataccatcacaatggaggttaggatttcaacatatgaatttggggggcaggacacaaatattcagtctatagcaaaagcataaaaatatttgagcaggggaatgagagcaagaatgagtcttttttcttatcactcctaagtgatcttaataagcacaagcactaaccccccatgactgtcggatctccagcccgggtttctcatctagactgattcaca

SEQ ID NO: 4256 - DNA, 557 bp, Homo sapiens
atagtgtttggaactgtggggccaaataaatgtcttcacatacatgttaagaactactgtctggtctgatcattctctgaattccaggtactaaagactatgtactttctgttgctgttgttcctcagcatatatggttacagagtgcctaattgtaaacacatattctctcctaaatatgtatcatagttttcttaaggtgaagagtaagtacccttgatctttgtgctaaccacagagactggaaaagaggactgtacacagaatatagtcactgagtgccttttggattaaatctatggtcatatagtcacaggccaggcttaatctgtccagattcagcaaaaataatttccatgcctaatgcaatgcctgatctagcatagaagaaattggaaaggagtgaatgagtattcataattcattaaggaaggttagcgctatcttcatcttttcaattcaggtatttttcaacaaatacaacaataatagtaataaataaataataataaatccatagagtattttctttgagttaggcactgtctttcaaggat

SEQ ID NO: 4257 - DNA, 481 bp, Homo sapiens
gaaagataaaagaaagttatcatatattatgttctgtagattgtttctttcggtggtatcaaaagaattggcccatgtttgaagatctgaatttaattaagtctacacagaatatagtttaaaggtgtgaagactttgctattaatatgataaatactttttcttaagacattgtttatctacagaaagactaccatattcaagatttaaaggtagattgtttttgttcacatcattttgatcttaggttttgctggaaacattcacaagaagggggcctttaatttatgtatgctttaagaatacttaatagctaatctacaaattaaaaaaaaaaataccgggctaggcacggtggctcacgcctgtaatcccagcactttgggaggccgaggtgggcagatcacgaggtcaggagatcgagaccatccgggctaacatgcagaagccctgtctctactaaaaactcaaaaaattagcc

SEQ ID NO: 4258 - DNA, 605 bp, Homo sapiens
aaagtgattaagagtgtatgtataattgacaatgatgcacactagtgcatgttatcaactcaagaaaggggctttgtcgcctgatttccgttaaccttaatagtagttaagctgcacacacaaagcataatgtcctcatgctttaaaaaaggaggggctttcatcacctagattatgaaatattgattaattcatgtatgctcagacatccatctaaaaatggaatcattcaatctgtcatccttctccctcatccacatataaaaacaaaatgcaattctgagaagaacaaaaggagtgatgagagggtaggaattaggaagaaggataagagcagacaaagaaacaggctgaaaaataaaacatgtcaaactatgcttacagacagacacgccacatccacacacaatcacacacacacaacaaccactctactaattaatacagcttgcttttgtgccagatattagggacacattaattagagagaaatctcattcatccatttttcagttcattaattatgcatcaatgacaaattcgtattggcctgctataagacaatctgttccaacaaagatctgatgctgcacatgacacagcag

SEQ ID NO: 4259 - DNA, 566 bp, Homo sapiens
gggataaattggttactcaaatcagattttctaaataaaacagtgtaaattcattacaatcaatatagtattaaaaataagtaggtcagtgaaataaaatttagaaatatattcttgtatataatagaactgaacatgatggtgacaattgattaggaaaaggatagattaagaaaggatacattatttatgagtgttgcatatttgtatctctggaattatgagtatggaacaaaatattcaaagttgtatcatcagttgttagcagttgaaggaaataaatgtgaaatctcttatgtattacaatacagtgaagtataaatgggataagacaaattaaaaataagacagaatcttggatttaggggctagtagaaacacaaactgtgaaagagaaaatatttgagtttgtcaaataagtcttttgaatggcagaagaggctataaacaagttcaataggctaagacaataataatccccttgtatatgtaatgtagatggcaaagtatttatagcaattgcatggaaaatcctcttataataaataaggaaaagatattttaat

SEQ ID NO: 4260 - DNA, 609 bp, Homo sapiens
tgaattcatttttttgccttgtactataaagcttaatatgaagtcatagctcagtctttcgggttaagattttttttttaaataaagaaaaagtaaacggcctcaaatttaccagcagcaagcaaacaagggaagggaagtagcttcatgctgtaaatgtcaagcaatggaaacagaacataagtcagaaattcatatttgttcgtattttaaaatgtatgtataaactttgcattacatttggcatgttaggggtggtgctacataatcaaatacatcaaaatgttatagcaagtgctgtgaatattcacaataggtatgataaataaataccatggaatccaacaagacacccaacagattctcattctccaaaaaccttactaaagaaaaagagtaggttgaagaaattctaagaatgctgctaatgtcctccaacttagagagagggtgactgagagctgagtagaaagacacaggaagatattcgatactagaggtcccggaggatctggaggatcctggaggatcgcacccctggaggatctcagaaagacaaaaacagatactggaacttaccaccttcagatggagaaaatagataatatt

SEQ ID NO: 4261 - DNA, 558 bp, Homo sapiens
gtgaaggtatccctagagaaggtgactctgcggctgagcttgaaggaagagaattggtaggtgacaaagaagaggtaaggacatgcaagaaagctcagggaaaagagattacatgatcctggctggcaaatgtgaatagtttgttctattggagaagggtaaaaggggagtgggttcttcttagtctcaactagacacataggacaaccattggtgacacttgacatctgccaactcaggaatcacgggtgttcctcattagcaagagcctttgcagcagctacatggcaaatagctcagatgcaaggaaggacgatgtatattggatggttcaggttccacatggcttaaaagtctcatgcctttcaggaaccatttctctctcacaagaactccataggcattgcttcttggttcttggcttcttctctcatgctaactataggagtctccataatcgggaaaacccaaagtaaggaatcttcatcaggtatctatagttatcccagtccagctccagtcctcttaaaacaggggtcattttacagaagcagtact

SEQ ID NO: 4262 - DNA, 576 bp, Homo sapiens
cttgttctcttatcatatacaaactagtgtggttttagtttctcctaaactatttctattcaggtgtttacatatgcctctgttctttccttttcttatacctcttattttaaaatgacctctatttcttatttattttatcagatgagcgcatttgactacatcattatagttctgcctaattgtgcctggaaattaacacgttagatacacatattattagattataaattactttcttctttgtgtctcctttatattacatttaggacaatgtggaatattttaaattgtgataaaaataaacattcccaaatctaccatattgaccattttaaaatatacagctcaatagtgctaagtatatttacattgttgtgcaaccaatctccagaacttttcatctagttaaactgcaactctataccccttaaacaactctctattttcccctccttccagctcctgaggataatgttgatttttaaattctctgcataagcatgtcattttaaatgcgaattttattttgagattgtgaaagaaattttacaaaatatttgtttaaaaaaatga

SEQ ID NO: 4263 - DNA, 573 bp, Homo sapiens
catgccaccacacctggctcttatttctacttttgaattataagcttgaggacacagccataccttccatttctctgagtcactcttagaattgaacacagtattttatgcacagataaattcaataagcaactgattatttcatataaacatagagtattaaatgtctgaaaagtgttacatgtgtataacaaacatgcttcaaagcttaaatagcaatatgggatctaagagttaagctctcttattacataggtaactgaattctgattttaccagataaaagggtaaagaaaatactggccaggcgcggtggctcacgcctgtaatcccagcactttgtgaggccaaggcagggagatcacgaggtcaggagattgagaccatcctgaccaacactgtgaaaccccgtctctactaaaaatacaaaaattagctcagtgtggtggcacatgcctgtagtcccagctactcaggaggctgaggcaggagaatcgctggaacctgggaggcggaggttgcagtgagccgagattgcgccactgcactccagcctggtgacagagcgagact

SEQ ID NO: 4264 - DNA, 598 bp, Homo sapiens
cacacacacacacacacacacacacacacacacacacattggttttgtttctctggagagccctaatacaacaatttatagtagagctaatccaaatgactgacgaacatatgatgttcaacctcactactgtcaacaaagtatacagacttaacaatgaaatatcacttctcacccaccagattgaaaaaaaaagaaaagatataaaacacatacatttaaaaaaaatactgctagaggaaagaatagtctcatacatggctagtgcaaatgtaaactgttactgcctttttgcagagcaatttagcaatataaaatacacacatatggttctgcagtaattccacaccagataaactattgaatagaaataaaggaccattcaattagaatgtttctacaatagtggtgatcactaccttctataaaagtagtttagagaaatatactttggagccatactgactagtttgccacctattggctatatagcctggggcgtttcttacctactcctgctcagttctctaaaatggggagaataacctaacccctcagtagcttaatacatgtagagcgcaaaaaaaaaaaaaaaaaa

SEQ ID NO: 4265 - DNA, 534 bp, Homo sapiens
gggcggtgaagcccagacacacatcagccttcacgcctgggctctcaagttctccccagcctggttttctctgaacccaacccaagtctctccactcctgagggatgatacatgcccacccctctccggaagcctccacgcccaccctctccttccacttctcccagctgcatctcccagccacgctgcctctgacctgtcttccccagacccagcctcatttctccagaccccgggcccctatctcccctttcctctgtcatttgccagatttgctatgtggccccgggaacacagtcttcagcaatctctgtctagcacggtgcagggaattaaaggtgactcacgcctgtaatcccaacaactttgagaggccggggtgggaaaatcccttgagtccaggagtttgagatcagcctaggcagcatctccagatccctttgctacaaaaacattaaaattagccaggcttggtggcatgcacctgtagtcccaactactctggaggctgaagtgggaggatcgcttaagccc

SEQ ID NO: 4266 - DNA, 577 bp, Homo sapiens
agtcttagtgcaaagatcagtaccatgcatgaaattccatctcaggttctatccaataatctaccttatgtttggtaacatattttgcatattatattatttcttgttctatcaaggaaatataagaatattaatagaataagtgtcatttggaaattttgaagtgtaccatttttaatgtatttaatattattaaaaacaaatgttttgatatatttaataatgactgaaatagacatgatctctgaaaatgagtgagtttttctcgtcatctgatagaccaccctatggcagctaaaatagacttttaaaagcaaagcaatgaggttggaagcctatttatgtaactttgagtaggataatggtacattagcttctccagagagagattaaaatatataactcctactctaggaaatgaccatcactctgaattgatgctgtgattgtgggatttattatctgtaagtctcagtaatttttcaaatgctggctgggtgtggtggcttatgcctgtaatcccagcattttgggatgccaagacgggcaggcgatcacctgaagtcaggagtttgag

SEQ ID NO: 4267 - DNA, 652 bp, Homo sapiens
caccacccaggtggtgctgcctgggaggaaaggcggcggagctgggactagtttgtttttactggagacgcgcctccccccctccccgcccctcacttcctgattgaaagtacctgaggcaggccagggactagggaaggtggcagctggacaaaggtatgaaggaaggacgagatgaggcacaggtcctggtattggaaagaggcagaggtacctcagaagcatgccatagaggttagacgggacctaagagggcatctggtccaaccggattcgtgttaccagcgagtaaactgaggccaggagagggactgctgcgagctgctccagcctatcacctataaagactacagtccctttgtaaaataccatacagctctcggagaactcccagttggcgctgcaggataaaatccaaacttgttggcatagcattccagccacttgttcacttacctttcccatttgagctcctaggaataaacagaaaaacatttcattttctaaatatcaccagataacttcacttttggtaacttgaattattaaaaaagtcctaccgtccctcatctcttgccacttccccaacattactggaggctctggctacaaataatttgttttccttgactactcaactttctttggatta

SEQ ID NO: 4268 - DNA, 594 bp, Homo sapiens
ccattgtgattatcctgtggggtaattatgctggaattactatcaaagactggtagtgaagaacccccttcccccagttgtatcgtcatgttaaaaaagcaaaaccaaatacaagcaaccaaaaaaaacaggtcactgtggaatggctaaaaacattcctttttgtattagagactaatatgaaaaacctgtcctcttttgaaagatatttgtcttctaccttaatggaagaagcttgtagtttgtgaacattcaaacacatgacacaaataattgctaagttgttttattctgctttctgccaagtacttagtgattaaactgtatttctcatttcatcttactgtagtattgaaactgtcatgttctgctgaatagagccatttgtttctccacactggttgattagtgtttttggttgtcattttacttggctggcttatattctggtatataatgactaattggcctgaacttggatgatggagagttgggatggggaagtgagtggggggcaaggtgtcagcccactattgtcagcccatatttctaaatttcttcttccaggactccactgatcactcatctcaacat

SEQ ID NO: 4269 - DNA, 650 bp, Homo sapiens
cttcagtaattagatactttaattttttttaatttatggggcaagagaaatggagtgtgctacaccctaacaggttaaagcagcagcagcagtcacatttactggcagatgctggccagaggagtggttggtcttctttgtggtgctcatggtgtttttgttttcatctgtgtagagctgtgattatggagcattcttgttcttacatactccatcctgggcatggaatgcgcttgtctaatcttagcattctgtgaaattgtagatgtttcagcagagaaacaacacagcccagctacccaggccagctcccaggggaaagctgctggggctgctttttttctttcttaaaaattactccaagaatgggaaactacagagaaagaagacagagaaaaacaatgagaacaaattatggctattgagggctctgaacagagatttatctcctagtaaagacaaatggagtaaaaacaatgatcaaagttataacaaggaaaaattatgctcgtgaagaatcaccaaatcagcattaaaagagggttccacttacaaacaaaaattatttaaaagttgcagcttcaagttttattgcaatagatactagaattttaaaaataaagacttgtttgaatatctagtcatatatt

SEQ ID NO: 4270 - DNA, 593 bp, Homo sapiens
gaaggtaactcggcaacatcacagctgaaagcgctcaagcaatccacccaattcaacctcccaagtagctggcaccacaggcatgcactaccacacccagctaatttttgtatgtttttgtagatgcagggcttcatcatgttgctcaggctggtctcaaactcttgggctcaagtgatcctctctccttggcatcgcaaagtgttgggattacagacaggagccaccacacttatttgttcttaccctcaaaatagtcagaatttaatcaaatattatgagacacagcaaaaggctaagaaacaaaacaaaactttaccaggagataaagcaattcacagaaccagcctcaaagatgacttatatgctatgactatcagatggaaatcttaaaatgattaattgacatgttaaaggtcatggagaaatggtgtacaacacacgtttcaacaggaacatgaaaatttcaatagagtccaagtgaaataaaataaattttaaaaatatcagaaatgaatagatatttcaatgaactcatcttcaaactctataatcagcaaaattgaagataaataaatatatgtaacccagtc

SEQ ID NO: 4271 - DNA, 578 bp, Homo sapiens
agtagagtaagcctactataattatgtttcttttcaaatcaccctgatttgtttctcttgttctgcaggaattattttgtatcttcccattcttgacctctatgtcaagtgactttttcagacttcacaacttaggcattaccatttagcttctacttctggtcttacactactttgtttctcactctttaattagaaatggttaatttgacttcatgtcttaaggcaaggagaaaatgagtcttaaacagtattaagctcccataaatatttcactttatgctaattcctgtgcttccagctgagccgtttgaagttctcaaaaaagtgtttctgttcccctcaattaaatacataactggaaaacagtaaaataattatcagttttactaccctgcactttattttccaagctttcattctggacgttttaaatttttcttccacatttttcttccactaacccaacccagtgtcataggtgctgcctccagcctggttagactctaagacccaggctttggaggaatcttagagctccctcaagtggacatacgtttaatgcacccttaatctct

SEQ ID NO: 4272 - DNA, 641 bp, Homo sapiens
atctgacatatgggctgacagcacccatgtcaacccagtacgtcaataatgtgtggaaggcatttaatggctttcttattttaagataagaaatacaaaaataaagattctaatattttctcctcataccttgttttgtctgcccgtcaaaatacacagactggatgttggtggatccttgtctagacagcagattctgagtttagatactgcatccgaacagaggaggagacctgtatttacacgtttgtttttatttctgaacaggttccttacctctctgcacgtgtctcccgggttatactggaaatggttatgggacaaatggatgtgtgcagctcagtaatatttgcctaagtcacccctgtctaaatggacaatgcatcgtgagtcctttgtttttcctgtggacagagagtacctgagaattagtttcacgcctataaaatgtaacgttataggattcaggaatgtcaagataatgagtcaagtttcagataaggaactgtcgagaactctcagatgaaagatagataatgattttagttcttaggaaaaaacattgagttaattttttgtctcagtggtttatgaagtactaaaactacgcctgcagtttgatctaaataaatctgacatac

SEQ ID NO: 4273 - DNA, 620 bp, Homo sapiens
ttctcctggggaagtcagcaaggaaggcctgtgctgaaggaggggtgctgtcagagaatgtctgcaagaagccagccagagttcatgcagagctggttgtcaaccgcagcagctggaatagaagacagttgaagcctagaggatctgaagagctgcccaagatgtgtccaacgcacattgcaattggcttcctataaattgtcagtctgtgcagaagcacaagtgaaacttgtctctgcaattgagaacttaaaatagtcttggaaacatggtcttgggactatgtacttatgttttaagagattgctaattcaatcctgtttgagcaagtaggaaatagagatcacacatgtttcattctgcattcccaatatgaaacacaaagtttgccacaaaacaaatgctcaacacaacttttaataataatgactgtttatgtgtgaattacattttagggccactagaacttacaaatttagtcattaaaagaataactctgatatattttatgacactagttgctgtcacatgataaatcatagtattaggtttagtctttgacatgctggggtcgtttaagaagtctgctcctaattgtcatttcaactcagaaattgctg

SEQ ID NO: 4274 - DNA, 579 bp, Homo sapiens
cagaaacatttggtttagaaaataaatggagtctaagtaagaccttgagcctttagtgggttagttgtcagcttttggacagatccctttaccttcttacccttagctttctcccctatgaaacagggccatgatcttgtaaaaggatgaaaatgacatgagtaattgcaaataattataaacatcagggaaaattcaatctacatctactacgccttccattccttttcaactatgttatacatttcttttaactttagctattcatggtgcaagggatcttccagatatctagaaagctaattcaaagactgacattagaaaactttacagaaaaaaaagattaaagagttgcaggcatgggtgcaaagagcaacatagctgctaaaggaagcttgaaatctttgtctagtcctggggacccagctggagttgtcaggaatcagcagagcaggtgttcagctgaggtttggaagaattcttagcccattgaaatactttatgggccgggcatgatggctcacacctgtaatcccagcactttgggaggccaaggtgggtggatcacgaggtcaggat

SEQ ID NO: 4275 - DNA, 485 bp, Homo sapiens
ctggaatacacaatcgtttatgctagtgatctaggagcagagtgagaagaagattgagagtcttaatactcaaaatgatactttcatttaatctcaatatttagtatcaatacaggacctctgccttcagctattcctgttgtctgcaagtctagaaacttttccctttcctaataacaagcttgtagtagagtgccagggttggggttgcttagctgctgcaagtcagggaggacaactaggagatctcacagctccttacgcagactggcgatgaatctttctcttttaggcctgccttcacccctgcttccagggatatcttgtgcaattttctttccagagtctaaaggtactgctttttatttcatcttcttgattttttataggtgtattccctttaaaaattacatttttatcattttagtaggatgtttggactgagcagaaactaatgaatgtgtacaactagttatctttactta

SEQ ID NO: 4276 - DNA, 552 bp, Homo sapiens
cctgtcctggacacagcgggttatccgagaggttttctttcaccatgtccactgtatcaatgatgtccatttctgatttacttttatgaaagacggaatgctgcatctgatccattatgtactattcgcaggcaaattctaatgataacgacctaaaatgtgtatatgtatatttcttgtaattctaggctaagtctattaaagtattgatattattgttgttttagtgcttttcatgatatattggaaatttcactgttttcataatcttgtttgctctgcaagtaccccttttactcagaggtagttacaatgtaggaaaaagaatatatttaaaataccaatagtagttatttctggattaagctggagactacaggtgacttttattttcttttgtctttctgtatgtgctaaaaatttccacaataagaatagtttatatttgttaagtgttttctctaggccaagctcagtgctaagtttttaatgttctttattacataatatcttcacaatagccccataagagaggtcctattattatcttca

SEQ ID NO: 4277 - DNA, 638 bp, Homo sapiens
attgtcacccaggctggagtgcaacggcacaatctcggctcactgcaaccttcgcctcccaggttcaagtgattctcctgcctcatatatagctgctttattgagatgtaattcacatatcatgcaattcacccattgatgtaattcacccaaatgatacaattcaatggtttttaatctatttacccagtggtacaatcattactacaatcaattctagaatgttttcatcactgcctagggatctttaaaaattccaaagcccagactatgccacaaatcaattatatcacagtctatggcggtgggacacagacatcagtagtttgcgaagctccccaggtaattccattgcacagatatgtttgggaagccatgctgcactggaatcactgtcagagtttcagggaaaataaacacagaaataaagaaagaggagatgttcagcagagagactgtcctatgataacataagcacagaagtggtggtgacaataatcatattgaggacgaatttaatgggaaagactatctaaagaattacactgcaacttttataatcgggactaaaatagcaatttttttactcgttggtaatacatctccaggcacagcatcctctgagagtatgtataagt

SEQ ID NO: 4278 - DNA, 426 bp, Homo sapiens
gcttggtaaccccttctgcatgtcttagattcacaggtagaacataccctccaattttttggacatctgtttctcatttctgctgaataatatgacattctgatggagaaaaagacaaaggaggcattttttccctattgcttcctttttacttaatttaaattatattagttaaagcagtctctgtgtgtgtgtgtgtgtatgtgattcaaacttttaaatcatagataaaatggcaaaatataaagaccaagtttttctcaataaaatgttattgcaacaggttttaaaaacacacaaatttctggctggggcacagtggctcacacctgtaatcccagcactttgggaggctgaggtgggtggatcacctgaggtcaggagttcgagaccagcctggccaacatggtgaaaccttgtctctac

SEQ ID NO: 4279 - DNA, 658 bp, Homo sapiens
attttatatcgtaagtgtgattttaaataattacttcaaatgtctacctacatttacatgtatttatttgtttatttaggtaggggtgtgtgagtagctacagttagcttcaagatttaggaaatatatattttttttatgtgtgatacaaagattttaacagtacaaatggtgtttcccttggaggcatccttggtgatgaatgtgttaatattttcaatatgggttttggctgatgacaattctgtcacatctgaaataatttggattgactacatagcattatctaaatttttgtcatgtaaatatcgacattggcagcataacgtgaaaaatacatggatttctatttatacctctgacattaatcccccaaatgatattttgatgttgattaaaaatttttattcatacattttaaatgcctgatttaaatatcaatttttcaatctatcaaccaacatttctgtaaattatgaatcggatttttacattattattcatgtcatcatggcactgagttataattcatgcaactgatttaaaagtcagtgctttatactttgaatataatgagctataaatattgtagtaggacattttccaaaggcatttaaaaaaatcatgtttataagtttgtagtctgacaccacagagt

SEQ ID NO: 4280 - DNA, 428 bp, Homo sapiens
acattggcctgattttgtactgtatttaaatgaaatcatacaatatgtactcttttgtgtctatttttttaaacattacatttgtcataatcattcatattgttgtgtgtagttgtagtttgttcattattattgctataaagaatttcattttatgaataaaatgcaatgtattcattcattatagtgttcacgaacattttgactgtttctattttgggtttatgaatattccaataaatattttttagtaaattctcacttgttgttaagtacaatttatagaggataggaagtggcaacaacaatgagtgttccccttttgcctatgggaaaagagaggcaaagggagaattagtgttagtggcccaataaggcttctggtgcctgtttcctgattcttgggacagagcacattcttcctgcta

SEQ ID NO: 4281 - DNA, 578 bp, Homo sapiens
ggggagatgtggttttggatactagtactgaggaaagttccccaagattagttaagatgaaacgtcttagctcactttcatctgagaagacggtggatgggcaaggtggaaccaatttctgtcatagtaattatgacaaatacgaacaccaacaactaggtaaagtaaaaacgtatttctttgcatcctttaaaaaagtattttaggaaagtaaaactatttttacaagtatgaattctagtgagcaggaatattttgaaaatcaagtttaaatattaaaatgtttaatgaagtatatagttggcctacttttttaataaaatttttcttcaagtatagctggagaaatatttatgctgtaagtcaagataaaactataatgcacttaatagttttgatctttggaaaatattttgaagcgttattgacagtatgttagttacacctataggatatgtaaacaaaaaataagatactgaattgtgtctgttactatagaaaccatttaaattttgtttaaaaatatgttccattgttttattttaaaagataatgaatatttgggctgaaatattaaa

SEQ ID NO: 4282 - DNA, 460 bp, Homo sapiens
tgattctcctgcctcagtctcccaagtagctgggattataggcatgggccaccatgcccagctaattttgtatttttcagtagaaatggtttttcaccatgttggccaggctggtctcgaactccttacctcggtgatctgcctgcctcgggctcccaaagttattggattacaggcgtgagccaccacacccaaccagagaataaaaacaaaattaatgacatagaaattgcttagcattgtaccaggtaaatattattttaccagtaagtggttttaaaaagcagcatcattctgtccacaagatccactgcagcaagaacaagacaaattatgccctgaaaataacacctcattaacaagacgtactgtggcgtggtggctaaagaattagagggccgggcgcagtggctcaagcctgtaatctcagcactttgggaggccgaggcaggtggatcac

SEQ ID NO: 4283 - DNA, 564 bp, Homo sapiens
tgaataaaatataaacatgttttattggtggtcttggttttatttatagctagactgtgaaggttccttcctttaatatctgggttactcccttcctctctagaccacttacattttttctaattagtctaagcaaagcaaacagaatgagtccaagcaccattcacttaagcaaaagaagatttaatgcttaaaaaaatcctgttataaccccaaacgttagagagtcagaggtcagcaaagaagagttctagtttgtggtgtctttggtggatcatcacagtgatgaaggcatcagtgtctgagccttcatcacactagtcttgtatgatcctcgattaactggcattcatcctcaagatgaagataattcaaaaactattgaattatacactttatttatttattttgaggtggagtctcactgtggctctgtcacctaggctggagtgcagtggtgcgatctcagctcgctgcaacctctgcctcctgggttcaagtgattcttctgcctcagcctcccaagttgctgggactacaggcatgtaccacctcacccaacta

SEQ ID NO: 4284 - DNA, 553 bp, Homo sapiens
aagtggtttagaggactcaacctatcgtgcaaccaaaactttgctttttaccccacttctttaatgttccctgaaggggaatggaattttttcccttaagttaagaaggcatatgtgtggtgaggggagaaaagctggccctcgtgcctcagggtttgccacacaagcaaatatagctccttcaacaaggcacagcttgggcagagacacaggggtctctggaagggaaaggccacagggatcatggagggcagctgccctgagagccggcagctagtgaaatggaacaaattactaggcagaaggaaagaaatgagaggaaaagggatgcaacttagaggactggcctgggggaacagaaggtgactgcagggcagggggttgggggtgtcaatgtatatgtgcaactttcaggttaaactgcctagtcatattttcacttttgtcttaatagtttcaaccttctataagataagattagtgtgctcttaaagctctgaaatcatagtggtttaaagacaatagaagtttatttttctcttatataaacagt

SEQ ID NO: 4285 - DNA, 413 bp, Homo sapiens
tacaaaaacaaacaaacaaacacaaacctctcaaaatatcagatctagattttttttttctcagtacggcttacttataggtggtaatcgaagctatcagcacaaaagctgatatttccttaaaaccttgatagcttttggcaaatgaagctataagcttaaaaattcaaacccattaagaaatactttcactacatagaaattttagagaaatttttctttatcaaatgattctttgctttgcaaaatggtcaacccatatattatattatgtactttccacaaataatctgtattttttaaatcttccctaaaaagcaaatttttggtaaagaatggctgatgacaacattcatgtgtaatttctttgctgtagcattaaaaatcatttgcgaagcacaaaatacatacca

SEQ ID NO: 4286 - DNA, 643 bp, Homo sapiens
atgtaagtggaccagtgcagttcaaatccatgttgtgtttgtcagctctgggacagttttacttttgtgtaatgacagttcaatgggttggcaaagttatcttttaccaatctaaaatttcatcaaaattatatcttctttaaaaaataaaaatactgtctgggcatggtggctcatgcctgtaatcccagcactttgggaggctgaggtgggtggatcacctgaggtcaggagtttgagaccagcctgggcaacatggtgaaaccccatctctactaaaaatacaaaaattagccaggcatggcagtgggcacctgtaatcccagctacttgggaggctgaggcaggagaagtgcttgaacctgggagacggaggttgcagtgagccaagatcgcacaactgcagtccggcctgggtgacaagagcgagatgccatctcaaaaaataaataaataaataaataaataaataaatacatacatacataaaatacttgtgtaatttgaaaaaaaggattgcagggtcttcaaaatagctttttcattatattatatttaccagtaacttcagaaatatttatatgtttagtgctttttaacctccaacgccttttttgataaacttcctacttcaatttcatag

SEQ ID NO: 4287 - DNA, 629 bp, Homo sapiens
agggcaagactatacagactttaactttgaattcccccaaattagtacagggtttagtacagagaaaggacttgatacatttttatacacttttgaagaataaattgatatttatttagtactcagtgtcagccaagcacttaaacactttacattcattaccccatggcatcctcacagccttctgaggtagaaagactcactgaaggttcagtaaagtggggaggaaggcacgacttgaactcaggtctgtctgactccagatgtcttagaaaggtagaatctttcacttggaagacagtatggttaagatcatgttctccgggccgggcacagtggctcacacctgtaatcccagcactttgggaggctgaggcaggaggattgcttgagcccagcagttcaagaccagcctgggcaaaatagtgggaccccatctctgcaaaaaataagaaaattagctgggcgtggtgggcctcgcctgtagtcccagctacctgagaggctgaggcaggaggatagactgagcccaggaagtcaaggctgcaatgagccgtgattgcacccctgcaccccagcctgggcgatagagtgagaccctgtctcaaaaaaaaaaaaaaaaaaaaaaa

SEQ ID NO: 4288 - DNA, 605 bp, Homo sapiens
caaagacagtgattacattgacataacaaatgtccattggggcaggcaaatttctactgagtctaaaaagcattccaaattctaggagcaaaagttctgattttccttaaaatctttgcaaataaacagcaaagggtattctggatgtcttgtcaatgcaaattaggtttgatttagagaagttttaaatttaatcgcaatgaaaagattagttaatacatgaatctttttatgagaaaaaaatcattattctggataaagtcataattgtttgtttacaatattaagagcagacacctaaacatacaataataccaaagtattgagaaaattaccactggaacaccatctcaagttatcacaccatttacctctttagagccagttttgtataagtagttagaagtggttttggtttttttgctaaaattttactttgttttagtaatatctagggaatacttttaattccattaaaataccttcatagaaagtgttaatgtgtctaccatgccatatgtttatttttactttccccaagttaggtagatagagcaagtcctgctaccataagtttaaaattattaagacaacgggctttttta

SEQ ID NO: 4289 - DNA, 549 bp, Homo sapiens
  misc_feature 216: n = A,T,C or G
tctacatatgtatttttaaatgaaaatataaatgtaaattgatacatttgttttatatgactaaaataggacacatttcttagatattattcttactgacatttcaaggcaaaaagtagtttagaatgtcttaaaaaaaagaatgtcttataattaatttggaatataaataagtataaagatttaaactgtaaaagtcccatcaattgaagtcangaaagagattaacagagaaaagagggaaagataaatgcagaatgaagacagagaaaggaaaggaggaaggaagggagagaaagaaacaagatcagccgggcacggtggctcacgcctgtaatcctagcactttgggaggccaaggcaggcggatcatgaggtcaggcgttcgagaccagcctggccaacatagtgaaaccccatctctactaaaaatacaaaaaattagcttgggcgtgttggcgggcgcctgtaatcccagccactcaggaggctgaggcaggagaattgcttgaacctgggaggtggaagttgcagtgagccgagatcgag

SEQ ID NO: 4290 - DNA, 646 bp, Homo sapiens
tttctactgtgcttaccctaatggattttttatatagtctcactttctaattcataatctgatctctagtttcatcagagcaccttagtttttaagtaaaggctcttcttctattaaccacttctaaaatgacaaatcgggcttattctatgcagttcaaaaaacagaacaaggctaagaggtgaagttatagaaaagacattttcactcacagaaggaaaaatttggacacagccagagtagttaaaacacaaaacaagaaaccagaatggacaaggttgaaaagtagtaaactttaagtcatttagtagcacttaagcagatgacaactatacctattcatttgttatattttggaggggcatcttatagtcttgattaagtgatttctgtacctctgaaatacagtagtctaggccaggcatggtggctcatgcctacaatcccagaactttgggagactaagcgggcagatcacctgaggtcaggagttcaagaccagcctggccaacatggtaaaaccctgtctctactaaaaatacaaaagttagctaggcctggtggcatgcgcctgtaatcccagctacttgggaggctgagaggaaaatcacttgaacccgggaggcggaggttgcaatgagctgag

SEQ ID NO: 4291 - DNA, 599 bp, Homo sapiens
tcccattccttcagtggaccagggatgactttgaacccaaggagttagtgtagagataatatcaaggctggatttagactgcataaatcttagtcattctcctttttactatttgtatatacagtatttgattttacagagagtgtattagaagtccacattcctagtttgaaaccattggggccatatgtggtttaaaatttttgaaaaatgtggaattcccaaaaggtaacaggatgcatgtactgtatagtaatgtaccatcactagtttagggtagtactcctgtaaacaatcacattaatatctctcgtgagggccaggcgcggtggctcatgcctgtaatcccagcactttgggaggctgaggcgggcagatcacctaaggtcgggagttcgagaccagcctgaccaacatggagaaaccccgtctctactgaaaatacaaaattagccaggcgtggtggcgcatgcctataatctcagctacttaggaggctgaggcaggagaatcgcttgaacccaggaggcggaggttgcagtgagccgagaccacgccattgcactggagcctgggcgacaagggcgaaactccgtctc

SEQ ID NO: 4292 - DNA, 531 bp, Homo sapiens
aatcttattttagtttttcttggcaactttggtgtaacagttggctataagaagggctataagatgttaggattgctattcctgctttaaatagttccagattggcaattttggggcaattctagcggtcacctattcccttatttcctaagctgggaagaatggaattttcttaaggctgaaatcctaacctgaattttactgatagaaccacaaagtggtacctagccgacagattcacacatggtgttcacttctgctgttgagtagcacgtgggtcctggtgctagtgtttcttttcctgctcagaggacctcttctctcttactgatttacagtgacgtccagatggtggagtttgctacaaagcagcccactgtatgaaagacatgacattgtattcacctggactctaggttgactctaaagaaggcaagggtcctttggtcacagggagaactgttgtgttccttcacaaggtagcagagactttgtgttctagagacttgagaccacctctataaatataac

SEQ ID NO: 4293 - DNA, 602 bp, Homo sapiens
aatgtacatcttatagctaccaagacttgctgctggtgtgaatgttcaggtaaaagagagagaaatcaagaatggctctaggctgggtgcagtgactcatgcctgtaatctcagtactttgggaaccgaggcggatggatcacttgagctcaagagttcgagaccaaccagtctgggcaacacagcaagactctgtctctccacccctcaaaaaaagaaaaaaggaaaggcatgactctgagggtaaattctaggaaggcatgtggggtgggaaatggggccagcggtgtgattaaagaatgtacatggtagtagagggatgcagatctagataatattgaaaggccaggacttggacttctgggaatgggaaacatgatagaattatctgtaattttccagaatcaatgactagttgtttttttaaaaaaagaattatctgtaattgtgttttttgagacggagtctcactctctcgcccaggctggagtgcagtggtgtgatctcaggtcactgcaacctccacctcccaggctcaagcgattctcctgcctcagcctcctgagtagctgggactacaggtgcccgccactatgcccggc

SEQ ID NO: 4294 - DNA, 602 bp, Homo sapiens
atcctttggtacttgtagactactatcttcttccttggaactgcagtatctgtgcaatgaactacaggataacaaaagatccttaacaacagaaatccagggctgtgaagcacagacctcaggccagttgtctttctactaataatgagaataatattattagtagccatcattaactaccaactgatttctaagtgccagctgctgtgctaaacaattaaatacacatatttatcttgttttatacttctaagaaccctgtgagcttgttctattattaccactttacagaagtggcaattaaaactcacagaggtggccaggtacgttggctcacgcctgtaatcccagccctttgggaggctgaggcaggcggatcccgaggtcaggagtttgagaccagcctggctaacatggtgaaacttcgtctctactaaagttacaaaaaattagccgagcatggtggcgagcgcctgtaatcccagctactcgggaggctgaggcaggagaaccgcatgaatccgggaggaggaggttgcagtgagctgagattgcaccactgcactccagcctgggcgacagggtgagactctgtctcaaaa

SEQ ID NO: 4295 - DNA, 581 bp, Homo sapiens
atagcatttaaataattttctcctcccccaagtagtagtgtttctggttgctactttttaatggctgcatagttcaagcaagtgtaccgtaattttacttagcaagtatttgttaaacatttaggttgcttctagttaccttttaaattgtcgctattattgtgctgtggtgaccatattcatgcatatggcttttctcgtattttggtatataacctgataatttgtcagtttaaatattagagattcaaacatgttttttaaattattaatctacctaattacttccaagagattaacagttgctatcatggaagtggtgagaatatttggagttttggatttgactttattttacagataaccagacttgtagctagaggtgacactaagcacctgactcctcatctaatgttttgttttcgtcttttatattaggctgtgattttagtgcttttgaccgaccagttggtatgctgaagaatgctttgtgggccttcgtgaacaccttattttgtagaagtacgttatgtcatactggcttagaagtcatgtacctgtatcctctctctcacttttac

SEQ ID NO: 4296 - DNA, 594 bp, Homo sapiens
ttcttttaacaagtatgtaccaagtgtccatgtattagagcctatattagatgaggaatatgatggcccctaaattttaaaaaatactcagaaaatacaaaatgtaataggacatcaacggatataacagatatccatgtgatacataaaggatatcaattcaaattttcaaagcatacatgcttggctattactacagataagtcagttgaaacatcaaatgaaagcagttaagtcagttcaaagagtcttcagaaaaaataataacatttaaccacaggatgtggtcaatctcctgtcagaccacaaatagtcaccagctgcagataagtctatgattagaaatgttttcagccagcaccacagtgtattggtttgtgaaagagaacaggcaaggtagggggttggtgattagaagtgaagctgggtggccatgatcctataaatttacccattacaacaaattaaagagggcttattcaaagggctgtacaatacctctctattttggctgccaaatgcttagaagagttactttcacgcagaagtcaaaaaaaaggctggccatggtggctcacgcctgtaatcccagca

SEQ ID NO: 4297 - DNA, 572 bp, Homo sapiens
tcgtgcctcagcctcccaagtagctgggattataggcgtgcaccaccatggctggctaatttttctatttttagtagagatggggtttcaccatgttggccaggctggtctcgaactcctcaggtgatctgcccgcctcaacctcccaaagtgctgggattacaggtgtgagccactgcacccagccagttctctttctatctctcctcttcttccccatctctcagctcagatgtctctgtttcttgtgtgtaagtttcattctctcctgccaaggttggactcactgcaggtggtagtagtggtggtgatgatgatgatggtgacttagctgttaactatgtgctaggcaccactctgtgcacaccactatgaggcaggtgctattaatactctcactttacagataaggaaatggaggcacagaaaagttagataacctgccccaggtgacgcagctggaaaatgctggatctgacagtatctagtaggaaagatggccactggcagccccaagccaacactcttacagctggaattgccacagagagagagagagacagagagagaga

SEQ ID NO: 4298 - DNA, 624 bp, Homo sapiens
atttttagtatatgcaggtgattcccaaatgtattctctaattgagctacgtcttccaagagtctgacctctatatccaactgccggttgagcagctctccctgggtgctgcacaggcaactttgatgtccagtatctaaggtcacacagctcaagctaagaaactgggacgcgtcttgagaggcagaggactctaccgagcctactgggtcatcacctgaatccaagagcatgcaacacacctcagaccagaggccccaatacaagacaaaacatcaccttaatgtccaggtgaaacatactcacttcttcacccgtggacactcacttcttcacccgtggacactcagagctcccgtctctgtcagacacgtgtcacctctgctaacacacccaggcatctccgggaggacagggaactgtcatcttctccaagatggttctgctccacccaacccaggctttcctaaagccccaaactccacaccggaggcaacgcctgatgaagcaacgttcccgccacagcatccaccttaaccttccaaatgccactgctgtgaagaggagccatcgcagatcgccatggcgacagagcccttctgacccaggggatccactgctctc

SEQ ID NO: 4299 - DNA, 648 bp, Homo sapiens
gctggagtgcagtgacgcgatctcggctcactgcaacctctgcctcctggattcaagcgattatcttacctcagccttctaagtagctgggattacaggcgtgcgccaccacacctggctaatttttgtactttagtagatacggggtttcaccatgttggtcaggctggtcttgaactcctgacctcatgatccgcccacctcggcctcctaaaatgctgggattacaggcgtgatcccacaattaccgtgcctggccacagtttttatattatcttgatttagggcatctatataaaacaaataattaaataaaatcagtattttaaggtaagaaccttacattttgtagtctcaactgactcatatatcctgttttcgtagtccctctttttatgattaatgttatcttttcattattttatagttttaagcctatcttgtctaacatttctttttcagatggccaagtgtgatggttgtaaacgacagggtaaactaagcgagtccattaagtggcgaggcaacattaaacatttctgtaacctattttgtgtcttggagttttgtcatcagcaaattatgaatgactgtcttccacaaaataaaggtaaaattaaacttagctaatgggatttttatgtcagt

SEQ ID NO: 4300 - DNA, 475 bp, Homo sapiens
tattctctttctgtaagtcagatgacttctcctgatatccagtctttaatatggcacctcctcttgggtattatataagaagagtagacatgtcatgtcatctgaacattcaatgaagggtcctctgcccactgccctcaaaggcaggtggctgcacactgtcatagatgtgtggtgtgtgtgtgtgtgtatgtgtgcatatatgtgcatacatgtatgcatatgtatgtgtgtgtttgtgtgttggttgggggtgattctaccatgaggactgggtcttgaaaatcagtgttcagcatccaaaactactgaaatctcatcagttcctgtcactaggaaatctctaaaaataattttaaagtacgtttttttcctattttattccacttccacttttcacaatccttaaagcctttcttcaaaaacggcaagagcgaagacctcaaggaatgttctatgaatggtacccatcaac

SEQ ID NO: 4301 - DNA, 612 bp, Homo sapiens
gatgcaaactgaaacagtggctcttcctgggtcttgagcttgccaagcttcctgttaaaggtacttcattggctctctggagtcgacagtctgccaactgcagtacagatcttgggatgtgacagtccccataattatgtaagccaaatttttgtaataaatattactctgtcttctgtcttccctctctctctctctctcacacacacacacacacacacacacataacacaaacacacactctttctctctccccccctttcttgctctatcaattaccctatggcttctctttctccagagaactctaatacacacatcataatcatagagcccacataaaagaataagcagatcatatatcatatgtaaatattaaatctatttgtgctaaatctggaatttctaagagcaagaaggaaggaaaataaaatgcttattttgaaactaaaatccttaaataatggtaatatcactggtaattaaaaattttgcttgtacattttggaactactttaaggctatcagggacagaaatatgtgcaacattctactgtattttttacaaagaaaaatttgaccatagatgcatctgatccaggcagaacatt

SEQ ID NO: 4302 - DNA, 632 bp, Homo sapiens
attactagctttgatcgctagaacttttcttctagggatgacacctccccaaatgcaaaacttgctcctgctagtgtaattccttaagcactccttccctaactacctccaaccaaatacacaacataagcacacaggaccttccctttcctgcctaggtcttgagttattttctccggaaatagtaagttggaggataggaggaaggcaacattttagctcttcttgtgtttttgtgtcttcatagccaggtttggaaaggctgcatgggatccgtggtggaagacattttaaactgatacccatcctctctccacctttttcttttttatctttgctcttaaaatgtaaaagttgaatgctttcagatcagaggaaatatttaaaggataaaaagccactttaaaaagtacttgcttttattcaacttcagagtgaatctctgcgttacttcagtttaaagttacaagcctctggatgcataactgtgagcatgagaagagaagcagagccttatattaaatcatcttgaaaaagtgatgtggatagtctgtaccttaagtatgcaaatctctgagttacctgtttaaccttatttagttaagcaaaatggaaaacaaaatatgcaatga

SEQ ID NO: 4303 - DNA, 624 bp, Homo sapiens
gggtgagggagtagagtgggcaagagcctgggtttcagcagagggagctggagaatgaacccaggggcgctggagctgggggcgtgggagagtgtcagagagctggcatgaactggcaggttgcctggaggggagggctggttccaaagccagtcttatagcaatttttccatttcttgatagtgaactttggaagagctaggggtggggaagatgggaagttgaaccacctctgagataaaactctctgagggggctgaggtggtcctgggttggggtgccccctgctactggcaagagagaagcaaactcaatatggaggtaagcttcccttggttaggccaggaggatgcccagagtgagacgaagcaatgggcttcaatataaaacttacccaaatcacaaagtaagccaccgagtgagagtcggcagaaaagaaggaagcaacagattttagaccccagggacggaatacagaatagccatatatgacacgtttaaagaaacacaagatgcaatcgcaaagatgagcatataaacgaatagaaatgaagagagacagagagatttgggggaaaacaaatggaacttcaagaaataaaaagtattatctcaagttggatg

SEQ ID NO: 4304 - DNA, 612 bp, Homo sapiens
gtgattcttaggccttaccaataatttgaataatttttcagaaagcactgatattttaattaggtctcagaaccctctagcccatataatataatgtagaaaccccaaatgatctccaagtaatttagtgttgacagttatcctgacctgagatgatctggagttggttgagccctcttaaaccctaatgcaatgttctgttctttacaccatgaacagatccttccaagggcgaaactagttattacaaaaataaattagcctcatgaagagatgaatatatagtagaaaaccactgcttataattggcccatctttcatccatgaattttgaaacaggaaaaaaattaaatatatgtagtctctcaacctaggccctcctcaacctagaattttcactctccttagggttagaaagaataatttcgtggtaagagctgaaaagctagccatacaagcaacatgaaaattagcaatcccctgaaggtcacaaaggggtagactctccgctctttgacaataggatcttgttcccttcctcaggaagtgcatataaaagtctgagcaagctggcacagataaatctcctcatccaatgattatatcacccat

SEQ ID NO: 4305 - DNA, 627 bp, Homo sapiens
tccggctgcagggcctccttaaactcaggcaggcaatgccattgaggtgttatttctgtccctatatcagtcaaagccattgaggcacccatgggctcaagtgcctgccgacctcaagcgcagcaccatcactctgggctcagtttccccatgttccaaagactcctctgaggccctttcctgctctgaaactgctgctctggggccaggagaacctgagggctgccatgtgtcagggatttcctgtaccttcctgcctgaagcattggggtgggcaagagaagatctcctccccagctccagcctgcaaagtagcattgcagacccacctcctccgttgtctgacaagactcccagctgaccgcgccatgtggggggctggccccatgcagggtgcttcccgctcaccgcctcactggcttgtcctccccaaaacgtggcccatgcatgagcccaccattgcacccctgggtggtgtcagtgtgagtcttccaagaagacaccaggacaggattagacacgcaagagagctatggaggaaatgcctgtgtaggataaggagaggaagcgggaggagcagggaggtccctcgggtgtcaatacaggtctcacctctgtgcaaggagc

SEQ ID NO: 4306 - DNA, 611 bp, Homo sapiens
ttgtttttttcctagtatggtgtatcatatgtgcatacatatacgtgtgtgtgtgtgtgtgtgtgtgtaaaacatgcccatatctggtccagtgcaatcactcatgcattcttttctctggagtataaaatctcatgtccatctaaaacatttctgcttttggtccatctaccaagaaagcagtggctaattcatttcaggtcttccaaatttcccagatggaagtcagacatcattaattaaaatttcttcaaaatgcaagtgtctcacatttggctcatactggtccacttaagatcctctctagtaaccctacctctcacctcttgcatggggctatgacacaaagttccccaaagacaccttcctcccagtttattcctgtgcttcttttgcgcactctgagtgagttggagtaaagagtgtgctgttgttctccggacactactataagttctatttggtgctctgtctcacatctctgttacctcatatgtggcactttagatcttaattatcatctctattttaataatttaacatccttatatctttttaacaaatatagtttattccttaggggaaaacaacctcttcctcagatctcactc

SEQ ID NO: 4307 - DNA, 519 bp, Homo sapiens
aatttcatacttttatctgagtagattagattgctcatttcacatcaagtcatgcaactaataaccctaggatgtgtcatcccaaactcactatcttctttagaaagtccctcttatgaacaacattcctcttgtggagagtggctgaataaaatcctaaatgtaaagatcccaaactggtaacttttcatctggaagttagcaagaatgccacctcagcagctgtaaggaggaaatacccttacagagatgaggatgcactgcccttgtcatctcagactattagagggctgatgctgaactactggactcatacaatgaggatcaattccttctcctcttgattttccttctagtaagggataagaagttttcttgcagttcatgaaatcataaaccatgaccatttagaaatctggctcagttcttttgctttacagataagaaaactggacaggacgtggtggctcaatcctgtaatcccagtacttcgggaagctgaggcaggtgaatcacctg

SEQ ID NO: 4308 - DNA, 601 bp, Homo sapiens
gtatatctcctaatgctatcgctcccccctccccgcatcccacaacagtccccagagtgtgaagttccccttcctgtgtccatgtgttctcattgttcaattcccacctatgagtgagaatatgcggtgtttggttttttgttcttgcgatagtttactgagaatgatgattaaagattttaaacattggaaagtttaaagtcttttaactccaatgaaagacctttgactaccccttactcccaaaagtttacatttaaattttaggagtaatgtagcattattaaaatgatgtccttttttaataataagagaaaatttcaagaaaagtaaaaccctatgtgtatgtatcttaacatattttttttctttagagaacatatgaagtgtgcatgtaggaatatttaaaaaaatattaatctcaaggaaatgctgttaaattatttgcctgaaattatctgttaggtcattgatacacaaacatttactactattttactgtataagacgcaggataccaaaatgggaaaaaaaaggtttcttttctttatggccttataaactaattacaaaaaaaagtatattctcagataattataat

SEQ ID NO: 4309 - DNA, 450 bp, Homo sapiens
tgggcttcagaggtatagaatcagaatcccaagggtgggagccaatatcacctagctatgcataagtatattggtgagccctaaagtatgagaatttattcctttagaacagaatttagtgggtctaacatcttccttggggtatttttgaaaaagtagattaagccttgtgcctagaaattctaattttgtagatctgggatggaccctgataattggaagttaacaataattttcccctttgccccaggtaattctgatatacatggaccttagatgatgactgcatttgcctggacttctacattgttatcttctacattccatcccattctacataccatctgggagttatttttatcaaatatgaacatggtgtcatgtctctgcttaaaatcgttggctaggctgggcacggtggctcacacctgtaatcccagcactttggga

SEQ ID NO: 4310 - DNA, 515 bp, Homo sapiens
gaaagggtgagggggatgaggcataaaagactacacattgggtacattgtactctgcttgagtgatgggtgcaccaaaatttcagaaatcaccaccaaaaaacatattcatgtaaccaaacatcacctgttccccaaaaacctactgaaaataaaaaaatatatggggaagaaaatataactgtttatatttaattttatactgtatgttttaaaaattatatttttgtttatgtttcatatatgtgaacatgtataatggattaaaaatagatatcaagagtgagtgttcaaagtattttagtcatcaaaaaagtttggatgctattgtagtgtgtcaataaaaagagtcaaactctaaaatatttgaagagatttattctgagccaaatacgagagacaatggcttgtgatacagctttcaggaggtcctgagaacatgtgcttagggtggttggggtgaagcttggtttcatacattttagggaggcatgagacatcaatcaaatacattta

SEQ ID NO: 4311 - DNA, 374 bp, Homo sapiens
gtgtttaaaccacccagtctatggtacttgatgtggcagcccaaactgactaatacaattgttaaaatctaccttccagatttcagtagacacaaaatgaaccagcaacatctcagagattgtgaccctttgtgtgtacaaaagatgagcccgctttttttctaaatcagtgtggaaactaaaagtaaaagtaagttatatcctaaaatgccaaagtttgtcgtaatccagtaatcactgccctctaaaatacgccattaaaagtagctccttagtaactcagtaaagttcaagtaattaatcacaacaacaaaatgccaaaatcctgtgtgcctatagctctaaggtatatttcagctctgaaatgctataat

SEQ ID NO: 4312 - DNA, 522 bp, Homo sapiens
cttaatcacggcaacttctgacctcatgaagaacaaagactgtagcattaacctgtgagtcttaagctcaggacacaactgtgcctgtgactgagaaccttttcctgataaccaattcatatgttcataacagatacagaaatgaagaaggcaaggtccttatttctataacaggagacaaaacctgaaaaataatcataatgccaaaatagaaaggagtgaacatcacaagaaattagagaaatctgacggaaaatatagctacacattggaatcactcagaaacattttataaaatggatacttaagtcccaccgataaattccgatttactggtctggagtgggacccaggcattcgtaatttttaagcctccccagatgctactaatgtgtaaccaggatggagaaaccctgttctaaataggtaggacttggggctaaacccatgactttcagctaggaggattagaattgcccatggagtttttctggctgggcacggtggctcacgcctataatc

SEQ ID NO: 4313 - DNA, 77 bp, Homo sapiens
ttttaaaatttatacaattaaacttttttctaacatgaaattttttgctttgtgaggataaaaagacaagctacaga

SEQ ID NO: 4314 - DNA, 450 bp, Homo sapiens
cataagttgagaagaaatctccctttgaatgattaccagatatcccaagctggtcagtgtgctatgatctattaattcccaaatcccacttaacctctcattaatttgtctatgaggacaactctgattacaggatgagtgactgagactgatgtcctccacatgggatgaggtgatgagggtagaaaaattaaaaagggttagagtaaaacatgcacagaacaatgaaaagccaaagataattgtcatattctgtctcattgaaatattggagactaataaatcaccattctttgcctatgtagagaagccttggttgcctaactgtgagaagcaaaaaagatgagtttcttacacatgcttgcaaccaaacctcatattttcaatactactactcatgtatattagagaaaaagatgagataaaagtagaaaacagtgtatttttaat

SEQ ID NO: 4315 - DNA, 587 bp, Homo sapiens
ctcttctatgtgagcaaaggctttagtagaaaatttttcttgcaattatacacctgtcctcaatggatctatggttcaaattgaccctttctctggtgtcaggaaactaagaaattaaagtgttcaaggataatagcaagccaaggaacttggaataatgaaatgcaaacatgtttggggatcaaaccctcaacacaggccacccacaattttatacaaaaattctgattgaagaagcattccccttgaaaaccagcatgagatgaggatgccttctgtcactattcctatataacacagtattggaagttctgaccagggcaatgaggcaagagaaagaaataaagggtattcaaataggaagggaggaagacaaaatgtcttcctttgtagatgatgtatgctatatctagaaaaccccattgtctcagctcaaaagcttcttaagctgataaacaacttcagcatagtctcaggatacaaaatcaatgtgcagaagtcacaggcattcttatacaacaacaggcaagcagagagccaaattacaaatgaacgcccattcacaattcctacgaagagaataaaat

SEQ ID NO: 4316 - DNA, 542 bp, Homo sapiens
gaaatgtgtgcgcactgtcctgagttttcatctataagaacttgagtgtgtatggatcaattaactggaactcctcagaaaacagggtgaagttttgaaagaaagttcaagttacataaagcattgaatcacaaattactttgtgatttctcagaggatgtcagcggtaaaggcggtaaggctcacatgtcagatctccatggggaatttttatacctacaaattaaagccaaattgattaccctgtatagataataacgtagagttggagatgccacataaagagaaaaatcttcagcaagtgtgtaattattagaaaaccatatacttctagctcatgattcttttctgctttgtgttgggtagatgcagaaaagttataagcatcaacttaatgtggttgaggctttctgaactgatctccatttaaccagttcactgcattaactggtgttctcaactccttctatgacataagtcaactgatgctcatgctgggtgggttcgttgaccatggacatcccagttgcatgccacgcact

SEQ ID NO: 4317 - DNA, 478 bp, Homo sapiens
tatttagagacggagtctcgctctgttgcccaggctggcgtgcagttcacgatctcagctcactgcaacctccacctcccaggttcaagcaattttcctgcctcagcctcctaagtagctgggattacaggtgcccaccaccacgtctggctaatttttgtaacgacaaaaatcacatgtaaccacacccaattacagcaaatgactgcaagaaactgtatcaaatttttttcttgttaatgtgtgctgcagacaatcttcagagaagtgacttatttctattggacttttcctggctaacattcctaagacagtgccatagctctacgtacctagatcaaagttgttggaattgaacaggaattctggtaaataaaagaactctgggataagttcttttacatctgccatattgtgctttgacgctgaataccaggcctcgcgcacactgtgaaacatccggtcagccaggtcaaag

SEQ ID NO: 4318 - DNA, 399 bp, Homo sapiens
ccattgtgattatcctgtggggtaattatgctggaattactatcaaagactggtagtgaagaacccccttcccccagttgtatcgtcatgttaaaaaagcaaaaccaaatacaagcaaccaaaaaaaacaggtcactgtggaatggctaaaaacattcctttttgtattagagactaatatgaaaaacctgtcctcttttgaaagatatttgtcttctaccttaatggaagaagcttgtagtttgtgaacattcaaacacatgacacaaataattgctaagttgttttattctgctttctgccaagtacttagtgattaaactgtatttctcatttcatcttactgtagtattgaaactgtcatgttctgctgaatagagccatttgtttctccacact

SEQ ID NO: 4319 - DNA, 641 bp, Homo sapiens
ctagctgaatggtaagcgctgcttgaaccaacaggtgaactgaattatggacttggtaacagtccttccattaaaagaccacaatatctgcatttagcagtaaaattctatcaattaaccccaaataaaaggaatcaagttattctactgtaaaaaagagcaacagtcctttctgtgatgatttaatttacacatttagaaattattctaacattcaaacaacattaaaaaaataacatcacctacaaacaagtaaaaatttaactgttgcaaaaactgaatggaacttaagttgttatccaatttgggcctataaaatttaaggaaaaaatggactctatgattcttccccctagtccctaagctacaagcttacaaatcttttcttcttacaatgcattatgtaacacttaaagcaaaactaaatatgaaattttcataatttttcatggttttatactttctatctttttactattacacaaggaattacaaaaattatgtatatttagtaatatcctattcaaaagtatggtttgctttttgcttaagattcctatgtgcttaattaatcattgaaaatactataataaccacaccacacacaacactaatgcctgcaccatataaaccaaactaaa

SEQ ID NO: 4320 - DNA, 469 bp, Homo sapiens
tacggctgtgggcatggtggcaaacgcctgtaatcccagctactggggaggctgaggcaggagaattgcttcaacccgggaggcagaggttgtagtgagctgagatcgcgccattacactccagcctgggcaacaagagtgaaactccctctcaaacaaacaaaaacaaaatatctatggtgcatgtaccaagccagtaacattgtgcccaacaccaactctatgcagcatccttccatgaaaccactgtattgaaactgtcatcttggactctggaaactatttgtagtatgtggaaggggccagcactgagtgcacagttctttatctcttctgtgccatggaccctttggcagtctggtaaagcctgactccttctaaaaatggtttatggccaggcacggctcatgcctgtaatcctagcactttgggaggccgaggcaggcggacatgaggtcaggagatcgag

SEQ ID NO: 4321 - DNA, 511 bp, Homo sapiens
attaggccaggcacggtggttcacacctataatcccagcactttgggagaccatggcgagtggatcagttgaggccaggagtttgagaccagcctggccaacatggtgaaaccatgttgtctctactaaaaatacaaaaattagccaggtgtggtggcgtatgcctgtaatcccagctactcaggaggctgaggcacaggaatcacttgaacccagaaggcagaggttgcagtgagcagagattgtgcctctgcactccaacctgggtgacagagtgacaccttgtcaaaagaaagaaagaaacaaacaaacaaagaaggaaggaaggaaggagagagaaagagagagagagaaagagagagagagaggaaggagaagaaacctcgaagactaaaattcaaggaaaaaaatttttaataggacagaattcaagaaataagaaatgattaatatcattaatatgtaatgattaatatgtagtaagaatataaataaagagaacaaagagaga

SEQ ID NO: 4322 - DNA, 512 bp, Homo sapiens
ggcaacagagcgagacttcgtctcaaaaaacaaacaaacaaaaaatccagccctttggattactgctttaaacataaatgctccaggagggcaacacatttcaccatcattaagacctttctgggcattaatttgtcaccttgctttgtaataccctaacagtaaagaaacttccccaaaccagaaagacttgctagggaaacagggagaggatcaggtctgatgctcaagggtagaagcctgggaaggaccccagagtcaggcctctgggaactgaggccagggggagggaattttggaacggaagggacctccgctctaaaggcaaatccccattggcccactcagaggcatttgccaatcagtggtaaggtggaggggaggctgggtccagaggtgctgaatttcagatggaagcacattcctcagcctcctccatggacatgtctcatgtgacagagtcttgctcatagcaccagagagctctagcctctatattgtcatcatgtgac

SEQ ID NO: 4323 - DNA, 575 bp, Homo sapiens
tgctgggaacgttacaatttgatgctttttcttacagaagtgacttagttagaaaaagtggtatgaaatttgtccctgactgtagctgacatcctcagtggcaccatctggaccctgaaaggcactcagatcatctttacctcactggctaggtttgttacagatgatagcacttaccaggcttcctccttgcaggccaaggtcgggtctgtgcaatcactgatgcatcctgctataagtggattaatgtctctgtccagttgagaaagtcaacacatgaacttagaaagaaatctacctggttttctaagctagattctgttggctcatggaatttattcagagtagatatgaagctgtagggggcatgactgagatcagtattgcatgtagacttcattttgttgttcagagtcttgttgacaatagtcttaaataaacgctgtatgagacaaacaaaatgcatttggtcccatgcaatgtcaattaaataaatcagaattgccaaaaaaaagtggtatgtacatgggaaaattcacaaaggaacataactatatagaaaagatgagcggatc

SEQ ID NO: 4324 - DNA, 543 bp, Homo sapiens
gaagatactgtcagtctgacatacattatgcatctgtctatccagaattcctcacactgctgatttctgaagagcattccaacttcagtggatctttttcatctctgcgtcttgaccatctcaacctggcccttctgacaactccagtgagaagaaggcagaaattaagaacagaatatatattttttggtctcagtcatgctcaggatggcgcaagatgagaaacagcctggaatttcccatccttgacaatctttaccatatcctgcccttcttgggcattaagatagagttaagagataggaaaaaccaagaaaagcaaaagagtcaaccaataagaagagtataaaaggacaaatatgtcaatagtttatgttatggagtttgaattctcacttctccactttccagtaatatgacattgggcaattacataaattcaattagcttcagtctccttttccttaaaatgtggataacaaaagggttgactccatagggttgttatgactcaacacataacataaaaagtactcaaatatt

SEQ ID NO: 4325 - DNA, 536 bp, Homo sapiens
aatcattgagaaaactagaaatacaggaaaattatgtagagcaattaatcaatttaaatatattttacagtttccccaccttgtataaactcctgaaaatgttaattagcatatttttctaaggtttctaagaagcagttgactctagtgactataagcttgtattttagagtatacaattgaaaaaaaaattcattctgctgcttattagcagtgtaatattgggcaagctactttattccaaaaaactagggataagatgaggtaaatactaggaattatcccatagttatgttgggagatttaattgggataatgcttgtaaaagcttaccacagttgctgacatatgctgaatatgatttttaccataattattttgatgatgaacccacccaaggttcatctaattataaaaaaactcattcagtgataactctggagctggactacctggagtaaatctcagtgattccatttactgttgtgtgacattgggcaggttacttgcctctcctgattcctcagtggcaaaat

SEQ ID NO: 4326 - DNA, 563 bp, Homo sapiens
gtgtttgttatactgaaggcttaataaatagtaaggagagtagttgttcagttgggtattgattaaggtgaagtaataggaaaagtaagggtagaatcgatgagtaatgatgaactcaaagcagagggtcagcaaactctagccattgggctgttttctttctacaagctgagaatgctttttacatttttggtaggttattaaaaacaaaaatgaagaatattgacagagactgtatgtggcccacaaagcctaaaatatttataacctggctctttaccgaaagtttgtcaacccctgacctgaaatacataccatgaagaaaaaagttagacttgttcccttttaggaaattggattaggtactgtaaagtgtaatatttcatggggctacattttcaaacatgtgcctttttcccacatggaggaaagaactgtcatgtatttagcctgctcttttgctataggggttttgcatacttcgattgttcttacccttgagagatactataaccactttacaaatgaagaaactaggctcatagaggctaagtaagcctaaa

SEQ ID NO: 4327 - DNA, 619 bp, Homo sapiens
gggacgaacaaccacgtctggccctcatctatctagttccttttctaccttatatgataatacacagtctaattttctctttttgactatatcataatatgaatagtagccagagattgaatattttatcttttttatactaataatgtaaggattttaaaaagtgtattgtggtaaaacttcataagaacaacattcctctgtctttaaagctataatttttaatgatagtttaatgtaaagtttattgtttcggcattaaagttggaatgattttcaagcatacttttaattaagtatttaatttatttatatgtatcaatatattcactcttcatctctctcctaggacctttgctcaatcatgtcaagattgaagtatctaagtttaatatcttcttcctctgtatcttcttcttaaacatcattcacattctagactgcaagtataattaacataatattggtatctccaactgggtgttagttaatctctttgggccttgcttttctaactataaaattatagaataaattttgatgatttctatctatgttcaattgatgacaattcttgaatgggaaatgtacaaaattgacctgaacatcttatcatacc

SEQ ID NO: 4328 - DNA, 398 bp, Homo sapiens
aaatgataaacaccaatgtaaaagcgtatgaaggaaagtatgtaaagctcaggagtaaatgtacagtcaaatatagaataacataatactgtaagggtggtacagaaataactggtaaccccaatataaaactttaaagaaggctgtgtgtggtgactcacacttgtaatcccagtactttaggaggctgaggtgggaggatcacatgaggccaggtgtctcacaccagcctggacgacatagcaagactttatctctacaaaaataaggaacaacaaaaaaattatcagttatggtggtaggcacctgtagtcccagctacctgggaggctgatgcagaaggatcgcttgaacctgggagtttgaggctgcagtgagctaggattgcaccattgcac

SEQ ID NO: 4329 - DNA, 598 bp, Homo sapiens
gattgttccaaaagtactttaggcacaactgagcacagatagtctttggatggctttaatccaagcccatttcaatatgcctctttttattgtccacacttctttctactaccactaacttaaataattcatataatcagctagaagagttttcaatgaaaactcatctttgaacacaagaaataaggactgagaagtggtgaacaacttgcaactgaggtattctgaaaatagtcctaacataatgtcccccaggtgtagccatatatggtaatttggtaaatcaacaatgaagtcttatgcaacagtgagaatctaagtatcaagcactagatgaggtactgggcaagagaaatacaaaagagaacactgctttaccccatccccaaggagatctcagggacagaaatgtcagcatctacctcaatacaatgacagctgagtgactatctcaagtgagaactgaagaacgtatcacaggagagctgatcttggagaaggaagaggagttggcttattagaaaagagagcctggtcgcgggtgcctgtaatcccagctactcgggaggctgagacaggagaagtgattgaactcatg

SEQ ID NO: 4330 - DNA, 571 bp, Homo sapiens
gtggatatgctgagtgatgaggacaaatgtgatctaaaatcagaggatcaactcatacaattgagaatcaatgtcaaagcagatggtacttgatcccacaggtctttcatgcaagaaatcaaaaggatttacaccattatactacagacattcatcatgctctttaacttgcccgataacagagaaggtacacaattacaatgacacttcagttgaatgtacacttcacgtctcttcagtggaagagtcctaaattgatcaccttggatatctgtttgctgaaactgagtagataatatttattattcctcacacccacgtggtgtaataatttgcctaagtttcttgtatccactcgtttagctttccaaaatttcttcatccattcatggcaccaaaggataatatattagcctcaataaaaatatcatcaattatcaattttgacatacttctacagagtaaaactgctacaagcgttagatattaatatgttttacattcacaaatcactccaatattcattgaaaatgaccactttaggagttaattagaattccacatacttttt

SEQ ID NO: 4331 - DNA, 154 bp, Homo sapiens
aataaaataaaataaaataaagtaaaataaaatgtgagatcctcaactaaaaacccaagaatctgaacctaattctatgttcctgacacatttgcttaaagctgggatgtcttccacatgattaccttattcaaatttatatctctagagcttc

SEQ ID NO: 4332 - DNA, 541 bp, Homo sapiens
aaatgtaatgcaaaacttgtccatgtctttcttcctcctacagcctttctctggggttttattctttttccttcaaaaatatctttcttatcattatctatgtcattagactgctgaaaatttatatctgcaatgctatctgtacacaaatcataatgtttgtgcaaacagcactgagatatgggtaaaagaagttatcatcccttccttgcaaacaaagaaatagaggagattaaataaacaacctacacgttagtaccagagtttgtcccaggtcttttgacttcccagatgaagactttttcttcaacactctcttagctgagatggacagacataagaagaccttcacagttattgcttatcttccattgttccttcagtgatggtctctgaccatatggctatattggtcttattattgagaacatgtcatctacctatttcctcacatatcaggcaaatatttcaaaatacaagtaagtaaatggctttgaaaagtcagtcgttacagaccaaaagaaaagcatacatctataaa

SEQ ID NO: 4333 - DNA, 553 bp, Homo sapiens
taagtaagctacagtttggtgttggttttgttttcccttttgcttttggtcccttgggagcacagagcctaatttttaggcctatttagtagggaaaaatgtatatggacttaaggtctatttttcataatttctatattatatttctctcttttatatctttagtcaatatattttctggctctattttattttcaattttactgtatttaaaatatttttacagcttgactcaatcctgtgaaatgaggcacatacattaaaggatataaacacacatatgtaaaaggataattatttgttttacaaggaaaaggtgtaacattttcttgtaaaatctgacttcactctcttccaatttataatgtaagcaatgcacgattaagaaaaaagtgctctgtaaatattccttatttgacaggtattattctggacacttatatttatttgacacttacacactatttaccaacaaattaagtatgtttttccattttatagacaagtcactgaagatcagagggcttaagtaactgcaaattccgattgactc

SEQ ID NO: 4334 - DNA, 644 bp, Homo sapiens
agtgcatgatgagtaggagagggaaagcgtagcatgagatgtgaaggcaaagcatgttcccaaatgaggcttgagggatggtttccaaggggaagtgacatctgtgttgcagcctggaagggagaagaaactcctgaggaagagactaggaaaatgggaatagatgaaacagccacacttgaagggaagaaagaggtgagcacctttcctccagtgagttaacagttgtaactctagtccctagaacagagttatcgaaacaaacttttagctaactcataatttcttaaatgttgatagaataacattgcttaacacagttaacgtcatccagctagagcttatgaagggcatcatatttaatgttgaaactcagaagcattctcattacaatcagaaacaaggtaagagtgatttctgttatctttgttatccaacattgttttggagacaagagttaacagtaaacaatatatattttgagacagtagaggcaaactcattcatttgtcttctttggatgatacacttatctatatagaatactcaagaccctacatataactcagaggagatcaaagttactgatacaaaataaatatataaaaatcaagaattattcttatacctcagcatacccatag

SEQ ID NO: 4335 - DNA, 556 bp, Homo sapiens
catgcttggctaatttttgcatttttagtacagacgggtttcaccatgttggtcagggtggtcttgatctcttgacctcgtgatccacccgcctcggtctcccaaagtcctaggattacaggcatgagccactgtgcctggctaaacagcattactatacattctatatttacaaatttacaggtataacatgtcttgtatgatacatatacttgtagaatacctattatatatagatacattaagtgtattatatatacctataatggaagtataatacaatacttctattaaagtttacaatgcaaagtgaggatactcttcattctatgattaccactataatggataaattctgttagtgtggtattacaacaaaattcagtacactacacatgagaaaaaccatgtacttttaaatttcttaagttttcactgagttaggatatggcaacatcaacaacaatcaaatacagagaacataacttaatctttttgttaacaaagaaggcaactgagaattttgtaatgcttcagtctcataattaagaaaaaa

SEQ ID NO: 4336 - DNA, 559 bp, Homo sapiens
caattctggtagaaaaaatccagaatggttctcagtaatggagctaaatgatttcagctctcctgttctctatagtactcaaatagaaggaggacagtcaccatatttgcttgttgcaattgtgcatgtgggcataagtttcagagatgtatgtcctgttgccccaacttttgcatttcctgtgtcattataaaccttttccaaagcataatgacacaaaacatgatcatatttatatggttcattagcaaaagggaatagctactcataggagagatgactgggccaagcccaacttggcaacagaatgaagaggggatcaatatctaggcacacctgtaaccatttgtggcacactagaatcacggggaagcactgccttagtgtacctagtatcatctatgttcacaagaggtgctcaatacatttgtcataaatgttaataaattactggttagtcttagaaatgcatggtttgggccgggtgtggtggctcacacctgtaatcccagcattttgggaggccgaggcaggcagatcacgaagtcaggagttcaag

SEQ ID NO: 4337 - DNA, 633 bp, Homo sapiens
tataaacactatacacttaggctatgctaaatttatttttataattttcttttctttttttttgaggcagagtcttgttctgtcacccaggctggagtgcagtggcacgatcttggctcactgcaacctctgcctcccggattcaagtgattctcctgcctcggcctcctgagtagctggaattacaggcacctaccaccacgcctgtctaatttttgtatttttagtagaaacgggatttcaccatgttgaccaggctggtcccgaactcctgacctcaggtaatccacccacctcagcctcccccaagtactgggattacaagcgtgagccactgcacctggcctttaattttctttctttaataataaattaaccttgctactgtaacttttttactttataaactttttaattttttttaacttcttgactcttaccaatattttgtactgcatgtaatcaaatatgggctatactgcttctcctgcaaataggtgatcagaacatggacaggaaagacacaccaatttctattcctctgagaagggtgctggggatagatctggggcctaaactgtgttcatgtgttttcttaactaaaacaatttttttaaaaaaaagaatctgaag

SEQ ID NO: 4338 - DNA, 425 bp, Homo sapiens
cagagcgagactccatctcaaaaaaaacaaaaacaaaagaaatgcacaatctcaggctcaccctgacttacagagtcagcatccacatgtttgttagactacccaggcaattcctaacaaaattaaaaggcgctgagctatttttttccaattaattgtagactgttgtcaaatataataaaaaagaatccggccgggcgaggtggctcatgcttgtaatcccagcactttgggaggccaaggcaggcggatcatgaggtcaggagattgagaccatcctggctaacacggtgaaaccccgtctctactaaaaatacaaaaaaattagccaagcgtggtggcgggtgcctgtagtcccagctactcgggaggctgaggcaggagaatggcatgaacccgggaggcagagcttgcagtgagcagag

SEQ ID NO: 4339 - DNA, 613 bp, Homo sapiens
tggcttccttactttctcatggatccttataaaccccccaccatctgaagtcacagaatttgttgttccttgaaacttgaaaaagccaacacactgattttatgaagtgaaatgtcattaaacattctctggattaatcgacaaaatcacatcttttttcccttctaaatgagaaagacaaaggaaaaattaataaagatggaatactttagtattaggaggaaatcattttattttcctgagcagaattatgttttcaattatcacagggttgaaaaatcttcagactagaaaagaaaaagtactttcagttttccctctttcccaccctaattaaataaaatatatgtgcaagggacagagtaacacaatgtttgccataaatgaaccaagcacatgacgtctatgcaatttaatagattgttcagttccatttaggtcacattagactttcatttaaaatgcatcacgttttatttattatttacaattataccactaaatgctgctaaatgtaccaagtctagatggtgcctgtagcatgcaagggtctgggcccaaaaaccagggtcacatagacctggaaagttaggcttaatatccactggcttac

SEQ ID NO: 4340 - DNA, 526 bp, Homo sapiens
ttgccagtgttggaggagaggcttagtagaaggtgtttgcatcatggaggtggtttctaatggtttagcctcatccccctagtgctgtctgatgataaagttatcctaagatctgcttgtttaaaaagttaaaaagcacctcccctgactcgtttcagccatgtgaatatgtgcttgcttccttttcaccttctgccatgattgtaagtttcctgaggcttccctataagcataagtctgtacagcccacagaattgtgagccaattcaatctcttttctttttcaattacccattctcaggtatgtctttatagcatgtgagacagactaatacactcatcctcagaaagcattcaatttagctgtgtctaaaggtatgccagctgtcctgggacattatcttagccaatcattcttcctcttcagcaagatctatttgcctatcacagcttgaccacacttcctaccatacctgtctgtaacaagtagcctataacatctggagggatttcattgaaatcacag

SEQ ID NO: 4341 - DNA, 502 bp, Homo sapiens
agacagattcagatgccacctttcctgtgagatgcaggttggcatagcagccactggggagctggtttcctgccatccacttgagagcatcctggatgttcttgggatcaatgaagatgaatttctgagcttggccaaagcattttgtgacaaacgctgtcagcctacatgggtaaagaggaaaatatggcatgaagaggaatttccaggtgagggtgcaatcatttcttcatttatttgggtgtatacttccagaaggggagctgagggaacatatgccatagcaggcctagaaaagagaggcattaatgggcaccaatgaggacaagaacaggggaggcacaagctcaggaagatcgagggacttgaccatccatgagggtgaaataaacagtattaaagaggtagaagactgagtgcaagaaggaaaggggttaaggggagaggtagtggaatagttccagagggctcaggaattatgctctggagtacagaactcatt

SEQ ID NO: 4342 - DNA, 623 bp, Homo sapiens
tcccgggacctgcgtgctgccgagagaggaagcgaagggcaccatctttgtattttgtgtcatgacttctcaagagaagacagaagagtatccttttgcagatatatttgatgaagatgaaactgaaaggaattttttgttgtccaaacctgtttgctttgttgtatttgggaaaccaggtgttgggaaaacaacattagtccgttacataacacaggcatggaaatgtattcgtgttgaagctttgccaattttagaagaacagattgctgctgaaaccgaatcaggagttatgttgcaatcaatgttgatcagcggtcaaagcattccagatgaacttgtcataaagctaatgttggagaagctcaactccccagaagtctgtcactttggttatattatcactgaaataccatcactttcacaggatgccatgactaccttacagcaaatagaattaattaaaaacttaaacctgaaacctgatgttataatcaatataaagtgtcctgactatgatttgtgccagagaatttctgggcaaagacagcacaataatacgggatacatatacagtagagaccagtgggatcctgaagtcattgagaatcataggaaaaaga

SEQ ID NO: 4343 - DNA, 433 bp, Homo sapiens
gagcaccgtcttttcccactcatctcacactatgctacttattctgaaattgcccaataaatacacctattaaggacacagatgattggtttgtctgaaagtccagatggaaaacagactcaacttttcttttttggtgtatatgtgtttgtgtgtgcgtgtgtgtgtgtgcgcgcgcgtgcgtgtgtatgtgtgtgtggtgggggagagaatgcacaaacactcgaggtggtttgtatatttgactggtgaatttcatagttgtttttctggggttacttagaatttgagagtccgtgagaagcattaggaagaacattactgagaaaaaaggaggggtgggaagcccctagacttctccccgagggtatccccgctgcagtcttctttagatgtttggattccccagtcctcttgttttgaggcgtgatat

SEQ ID NO: 4344 - DNA, 91 bp, Homo sapiens
tatcaaattaagtacgattgcaacacacaattccacttacacccacaaatgttcatcatgtattactcacaggaagcctcggaatctgctg

SEQ ID NO: 4345 - DNA, 521 bp, Homo sapiens
gagtctcagggtattgaaataacttgatcaatatcacaaagtttgtaagtagcaaaattctgatttgaacctaggtctgtctggtttttataaactaccctattctggataaaattcaggtctcctgccaatttcttttgcaaccttagtagttacattgtgtattttaaccaaaattataggttccgaacagttcagaataattgccactttttgaggtctctattctagctttctattcccatagtgaccatgtcaaagttacaaaatacgcaagagatgaagaaaaatggtgtaattctctacagaggaagagacttgattttgttttttgtttgtttgtttgttgttttttagtacacattaactgctgaagttaacaagtgtaccttgggtttaatattggagttaacagtctggaactaatacgctttatttatcaggaggaaatgtgttaggttggaattgaatttcccttccctcatttttatactgtatgcttaattttttaaatctacctt

SEQ ID NO: 4346 - DNA, 507 bp, Homo sapiens
aaagcaaaagaaagagaaagaatagtaataaaagggaccaggtgtctgaaggctgagttgcagggtgccccattgctgaagaactgcttccagaatgcagctgtgtaagtctgccagtgtggccagtgtggctgggtgcaagctcttcagggtcccaggctacacacaagcgattttactttatttctaaaatggactaactcggtttgaaacttaacccaactcactcacaaaaggaatgttctctcatggccatgaatgcaaaaccaccacgagtggccacaaacaagtataaaatagacaaaatgaggcttggtgcagtagcccatgcctataatcccagcactcggggaggctgagggtggaggatcgcttgaactcctgagctcaagcccagccagggcaacatagcaaaaccccatctctacaaaaattagccgggcatggtggcatgtacctgtagtcccagctacttgagaggctgaggtgggaggatcacctgagcct

SEQ ID NO: 4347 - DNA, 513 bp, Homo sapiens
gttactggaattcttaaaattgtctaagcaatttagactatttaattagcactgtcaacacaatggaagattgagaagagaagcaagttcttcacaatgtgaaggttggattaaagatggaagtgaaaccacagtggtagtaagatattgtaatgatcctagttcttccagaactttcattttatgagtcagaatggaagggtatgctttatgtccagacttggagctccacttacatactcatgctctcgtaattttcgctatttgatcacgagtggcatatcccttattcttgaaccattcaccttattttaagtcggagtctgaagccacatctctaatattgactactcacaggtcctcgtggttcaacaagaatgatatccagattgtgcttcagaagtgctttgggtccaccacctactgcatttgtgtcacaatcccattttctgctaaatagggtaagttcttcccattcttcccattcctttacagtcttacttatgtgacata

SEQ ID NO: 4348 - DNA, 498 bp, Homo sapiens
ctagaagtatatgagtcaaaaccaagtaactaattgtttgcattattttcaatgtttaatcaatatttagagctttatgtaatgacttctaatagtaattcagaatcctctaaccagaagaatatctccccaacaaagtattttatttctaattctgcaaggtgagaattcaggcataaaaatggtaaaatatgccaagagaatgctgataactcaccttgattgagtgtcagggcaggagcatacaccaccactcctgtgtagagaatctggtagagaaacaagaatcagattggcagtgagaaagggacatagaaaggaaaactgcctagaaagttctttatcgacgttagacttgtattctcttcaacttgttcatgaaacattgcattcctgttgactctaattttgaagttgctcaccactatcagtagtctgtagaggggatgtaatcattagatggaggaagagagttggattttcaaaattgctactaat

SEQ ID NO: 4349 - DNA, 468 bp, Homo sapiens
acatattcactgaaataatttaaattcaattatttcacttcacgcttttagttttcatacgactgatgccataaagttcaattagtaggaaacttcaagttcatattttaagagaaaacctgctagaagagggactgtgaacttcacttaataatgctaggaactggccgggcgcggtggctcacgtctgttaatcccggcaatttgggaggctgaggcaggtggatcacctgaggtcaggagttcgagaccagcctgacccacatggtgaaaccccatctctactaaaaatacaaaaaaaattagcccgggtggtggtggcgggcgcctgtaatcccagcaacttgggcggctgagggaggagaatcgcttgaatccgggaggcggaggttgcagtgagccgagattggaccattgcactccagcctggcggagaagagcaaaaatccatcccaaaaaaaaaaaaaa

SEQ ID NO: 4350 - DNA, 429 bp, Homo sapiens
agataatattaaattctaagtccccagataatgaaaggtgcattgttccatcttgtggcagagaaccatttagaaaacattttgatctcattttttaaatcattagaatacgctgttgtattttttattgttttcatagcttaagaatgacccctattttttattgtacccctgttttggacaatttaacccttttgataacccatattttaaaaaaaaattttttgtttatctattttaactctgaaaaagtgaataaattgaaaaacaaaattagtatttatatggttccgactcccaggattattgattcctccttttttgtatctttatgtaaagcattattctttctactttctagttacagatacacacacacacaaacacacacacacacacacacacacacacacacacagtgactattcc

SEQ ID NO: 4351 - DNA, 563 bp, Homo sapiens
gcggaaaaaatcacaagcctaatttaaacaataccatttattgtcgaacttgagaactgaacagctaccagctttaaaaggtttccctgagtctcacacacacacactattttatactagtttctacacggacatggttaacgtgacagggttatgtgatgagctatgtggtacatcaccaagaagagaggactcttgtgaaagcagggtttaaatctctatgtcggattcaaaattaatttgaaataaatggtagacctaaatataagaaactattaaacttctagaataaaatctctgtgacattgggttaggcaaaaatttcttaagcaagacacaattagcacaataaagaaaaaaaaataggtaaaatgaagttaatcaaaatttaacatttttgctctctaaagacacaagtaaggaaatgaagccattggaaagcagcagccagggctgctcacctccaaggcggagatccttaacaaaggcttcagggtgaccaagacatgagcaagccagggtacagccactactgccaccccgccaagcatacaaagttcaag

SEQ ID NO: 4352 - DNA, 636 bp, Homo sapiens
gagatgccgggcgcatcaccccctctctgagcctcagtttccccatctgtaaagtggggagagaattgcacctcatatggctgtagggaggattcgaacaagatgacatgtgtcagaagcggggccaatgggaagcacttggtgaagggggcacccttccagtaggcacagtctgagtgcccggccccatcctcagagctccttgtctgtctggtccagtggaggagacagaacccagaaagagggggctatgacagcatttcccagacccagagaagaaggggagagactcagtggctctggccacctccccttcaaggctatacagtccagaaaggcctccgcaatccttttagagagggagaaactgagcccagaggcaagaagggcttggccaagatctccccttatctgcagccgaggttgggtgaagccaccagtcctcctgcctgccccatccatgggtctttctggtgccacagactgggaggcagttctgcagtggactcgaggcagggcagtgatgtcctttgaccctgtcccacctatcccctacccttatctttctctctcctttctcttccaccctacccaccactgttcctcttcctcagcccagcgaagagaaataaccct

SEQ ID NO: 4353 - DNA, 626 bp, Homo sapiens
gaaataccaagtgacagagtggaggccagctggatggtggctgcatgtggagtccaaggagtccaaggccatgggagtttggttccagcttagggaagatggcacaagccaggcctttggagttggagcttgaagagtaggcggggcacagccctagtcacactgtgcagaacatcctgaagacacgtggcttctggtgactgcagtcgcaccggctgaaattaagcttcccttgaggtcccagcactccttctatctggcactgttccttacaatcagcatagagtttgctcaccactgcatttttgtcccctcccctgtggattctagcagaggttagagccttctctagaccttgcaggctggactctcagaaggaaggaagaagtggaggaaggagaggtggggattgaaaatgacttgtattggccatgcatggtggctcatgcctgtaatcccagcactttgtgggagctgaggcaggcgaatcacgagacccagagatcaagaccatcctgaccaacatggtgaaactccgtctctactaaaaatacaaaaattagctgggcatggtggcaggtgcctgtagtcccagctactcaggaggctgagacaggataatcact

SEQ ID NO: 4354 - DNA, 533 bp, Homo sapiens
tggaaagggctcaattcattgacaggacaaatcaattcatttgacatactctgggtatgagtttgattctcttacctgcagtgcctgagctagcccagaccatgggacccactttaaaacaaggatgtgtccgtggacatatgaccatgggatccactggccctatcatataccacaacacccagaagctgccagtctgatggatccatggaatagttctttcaagacatagctaaggtatcaacttagagatgacaccctgctaggattgggcactgtccttcaggatgtggtgtacatattaagccaatgactgttatatgatactatgtctccaaaaggttaaacgcatgtgtgcaagagctaaaggttagaagtagggatattcatgcttaccattacttccagtgacccacttaggaaatctgtgcttcctgtcccgctaactctaggctctgagcttctaggggccatggtttccagagacagaacactttcaccacagcacccattaaactttaagctacaccact

SEQ ID NO: 4355 - DNA, 76 bp, Homo sapiens
aaatacagacttttctaatacatggtgctgactcagatacctagacaaggacatgaggagatacttactatataag

SEQ ID NO: 4356 - DNA, 583 bp, Homo sapiens
ggagacgagtggggagcagatagcagcacaaagggcccaatcagacatttcttaccatgatagatcctgatgtgcagttgatgcccaggacagacagaggtcttgggagaagctgaggttgctttctaatttctttctctttctttctttctctctctttcgctctctctctttctctctctctttcttttctttctttctttctttctttctttctttctttctttctttctttctttctttctttctttctctctctctctctctctctttctttctttctttctttctttctttctttctttctttctttctttctttcttttctttccttctttccttctttctttctttcttcctttttgacggagtctcgctctgtcacccaggctggagtccagcggcatgatctcagctcactgcaatctctgcctcccagtttcaagcaactctcctgcctcagcctcccgagtagctgggattacaggcatgtgccaccacgcccagctaagtttattattattattattatttaatagagatgaggtttcactatgttgcccaggctggtcttgaactcctg

SEQ ID NO: 4357 - DNA, 570 bp, Homo sapiens
gacacattcaccttgtacttcacattttcttctactgagtcagtctaatgtaacctctctgaatacctctagcacttgtttctataatcctcatttcatgtaattgttcagtcatctgtctccctgtctacattcaaataaggaaggcagagaccagatctattttttccattgtattctgaaaacctagcacagtacctttcagttttatttttatttttagacagagtctcgctctgttgcccaggctggagtgcagtggtacaatctcggctcactgcaacctcacctcccaggctcagctattcttttgcctcagcctcctgagtagctgggactacaggcatgtgccaccacacccagctaatttttttgtgtgtgtttagtagagatggggtttcataattttgaccaggctgatcttcaactcctgacctcaggtgatccacctgcctcttactcccaaagtgctgggattataggtgtgagccaccgcacccagcctcagtacctttcacatagcagattctgaacaaacatttgtggtaggaatgtcttgtagcttttcgt

SEQ ID NO: 4358 - DNA, 575 bp, Homo sapiens
tagtccaatgtgggacacatctgagggtggaatgagtgctatgaaacactgtgcaggctctccagcaccaacccaggagtactgtcttcttcctattaggtgggtgcaaaagtaatcgcaattttcccattactttcaaaggcaaagactgcagtaacttttgcacctaatactatagctttctattgaactgatggagcacattgaagccacatagaattgattcttcatcctttttgtcctccggccagaaggcccaggtgagcaggcactgactccaaaattgtttaatgcttgtataaaacctaaatttcctatccaaatatgcacagagcttatgcacacacacacaaacactcccaaagagggagcctatggtgcatcctctgacacactcatgttgctcatttacagccgtaccccagtgcttagtgcctggtacaaagtaggtacccaccaaatgcttgttgaatgaataagcaactgaacaaaggggaaaggcagccaaggcagatgaaaccataactgagtcttaaacccagcacttctccattggctagtggctccctcctgca

SEQ ID NO: 4359 - DNA, 602 bp, Homo sapiens
aagaatcttttctatctacagaactagagagatagcagcatgaggactctgcccactattgctggctttgaaaatggaagaaggggtcacaaagtcaaataatataagtggccactagaaaagacaagaaaatatgttctctcttagaatctccatgaaggagtgcagtcctgctgatgtattgactttggccaagtgagacccatgttagaatgttgattcctagagtcttacagttctaggagtcagacatgaacaacaatttgtgttgttttaagccacttagtttatggtaattttttatagcaattggaagtatatatatatgcaagcacacacacatgcatacacatacacaaatatgtacacatatacacaaacatatgaatacacacatgtgtataagtgtatgcgtgtatacatggatatacacatatatgcttatatttaacatccatatttacatgtatcgtgtgttatactttctcaaagtcaggtgatatctcctttaaattctctaaatcttttaagaaaggaattcattgctgatttaacacaaaatcaattttaatattgtccaaatatttgattagtaatatttg

SEQ ID NO: 4360 - DNA, 641 bp, Homo sapiens
cagcaaactcatttttgtgtcacaaaagaaggtatgagatctcctcagagaagaaaatctgaggaagaaaatcctgagattttcctcatctacaaaataggtataataatacccatcttataaagttgttgtaagaataacgtgatttaagatgcctggtacttaatagggactcatcaaacattatccctgttttaaaatttctcctagaatttctacctggtctttgattactgctgaagcatagttactcatactaactgagttgctcatactaactgtctgacatcctttcttaccaaagtcacaattcaccagggggaaaaagaaaagccagagttaacactttgggctccaggatttagcgaattttcttcaaagtgctgttgcttggaactattcacatcaaagccagcttgtagctagttctcatccagatttggattcaacacctactttctggaaaatttatatccttatgtaagtgaaatagtttgtcgttatgttttcccttgagttttagtaaaagacatttaaaaagaagtccaaaaccattttgtctgaactaaaagagaataaaaagttttctgccacatttgtttaattataacttgatcaacactggcaagactttcctcaca

SEQ ID NO: 4361 - DNA, 539 bp, Homo sapiens
ttagatttccctaattatgaatgatttgaggagcttttcatgtgcttattggccatttgggatcatttttagagaaatttctacttaactcttttcttgttaaaaaaaatttgattgttattgcttactagcggtttaacctcgtactaggtgctcagtctctctgggactgaatcttctcatcttaacagcagggacactcacctcacgaggttgctggggtgcataagatgaggtggtacgcattgatgctcaacccagtgcctgattcacgggagaaacctaaaacatttgttattattgtaccactgtgaagaccagctgattttcttgagagtattttgagaagcagcctggggtatggatggaaggtaaggaccccaaccccacccaccaaggaacaagcttcatttgcaatagatggtgatggttggtgcccttttagctcagtagtgtttcaggtaaaggccagagctgaggacaatagaatttcggaagggacaaaaggaaacaagctggctagtgcccagggaggacat

SEQ ID NO: 4362 - DNA, 586 bp, Homo sapiens
gtgatctctttgaaacacatctctaaagccaaagtatcaattgaactaaatatgtcatagagcaataagaaagtgaaacaccacactgcttcagagggatcgttttaaacatacattggctagtttaggagctcattgtttatcaaggtagaaattcgagccaggaaaagatagagactaatcagtattttttttaaatccatgtttatttatattcatgatcttctctatggatttcttagtcttcatggtgattttaagagttggctaaagaaattttaagtctcataagttgcttgttaattcaagagaaaagtatttacttctgttttgctaaaagatagccaaagcaattttgattaacaaaggttgtgatatgactctgagttaatggcatgttgaaagtaagggcaagtcagtaagatttaacccatatgttgaaagtagctcataaataaattcacagtctcttctgacaaaacgttttctgagaattggtacattataggtgtgtatctggtagtaaaatttattagagaggcagtaaaaaattcattaacataaacaaatcaaaaatccaatgcat

SEQ ID NO: 4363 - DNA, 480 bp, Homo sapiens
catcagtgaaatgaatttatatttttataccagctttcagtataaaaactatctgggccaaggattattagataatattatacctaaaatattataaaatattgatacccagatgatttaaacatttattatctcagaacacattatggttaagatcatgtatcagtcagggctatagatcaaaaacaaaagaaacaggctctggctaccttaatccataagaaaatttattggaaagataacagcattaatggaaggctagaaggccagtcttggggaactggtgggaggaatggagccccaagaaagtaggaatcacagaaaagtttatatggcaagagcaaactggtctgcttgccactcctggagcagcctctacttgaaagtttcagaaaagtgcaggtggtaaacaaggtatgtcataattaccactgactgttccaaagaggagaggatatcccacccatttggtctccatag

SEQ ID NO: 4364 - DNA, 456 bp, Homo sapiens
tatcatcttcattatcttctgggtgtttactgtgtcttaagctctaggctaaatgatctatatacatatatatatatagacatttaattaccacaactacaatgattcccattttacagatgaagaaactgagtctcagggtattgaaataacttgatcaatatcacaaagtttgtaagtagcaaaattctgatttgaacctaggtctgtctggtttttataaactaccctattctggataaaattcaggtctcctgccaatttcttttgcaaccttagtagttacattgtgtattttaaccaaaattataggttccgaacagttcagaataattgccactttttgaagtctctattctagctttctattcccatagtgaccatgtcaaagttacaaaatacgcaagagatgaagaaaaatggtgtaattctctacagaggaagagacttgatttt

SEQ ID NO: 4365 - DNA, 637 bp, Homo sapiens
agggttttctttttaagacattgtggaagccattctggaattaaaagcattataatagataagcaactatatttacttttattatggaaattaacagataggaaaatagaacagaaagcaaggtttaataatcaaataagaatacttacatgtcttctaaataatattaaacacctatcatctacaaaggtaggttgaaatattattgataattgctgggttttacttgccaaattgccacaaacacacctaatacctgacagtgtcaattcaactgtccgtgattagaagataacacactggaagtcgcacaccaccataaaactgaagccacacatgcgtacaaatggcgacagtgtctggtgtacagcagcgctctgccttgtccagaatacacacttgaattctttgtcacaattcacttcacgtggcactgcaatagcgtcctctcgctctttgttagttaattttaatggcttttaatttcttcttgctgaactgtttgcaattataatgcaaattatggatactagtccattatttgtggatgtgacatactctgattacccctttccattccattgttgtctacgaagttcacacttgagaatcacatagtcaaattacaaaaaaaaaa

SEQ ID NO: 4366 - DNA, 550 bp, Homo sapiens
ccatcaagcattttgagcaaagccaaaatattatgaagaaaataaaagaatgaataactatcagaataagaatgtgtggagatctgactaaataatatctctgttttattatagaaggaaatgtaaatttatgtggaagagtgctttaaactgtaggaataggacttccaagaaggtatattttggcacagttgccaagttcatgacaatcaagtaggtcgccttggaataaatgaaggaaagaaagctctctgccaatctgcaatcgcaccccttactcctactgaactggcacatatactcacagatattgctagattttaggttactgagtgacattgatttgtaggtgggaatcattagtgtcaaaagagtatgtacaagaaaatgttttccttctgtttccctttaacacattcctgaaattgttaaattgagtacaagcattttgccacatggaaaaaggcatggccatcatcacccttcctttttactggcatacttaaacattctcatgtttttatcttctgttctcccacagtatactagt

SEQ ID NO: 4367 - DNA, 608 bp, Homo sapiens
ataataatcattattgattcctgccatagcatcatggagacccagaatcaaattaaaataagtgaatattgacagatttcaaagaaatctaattaaagtcttcctaccattttcttatacttacattgtttgtagttacaagtaatatttgccttaataaatagttatacagtatataaataaaggtctacaacctattccattgccaccgcccaaccaaagttctattttattcaaacacaagttattttgctaatgtcagcctaatttataaatgcattaacccattcatgataaatgttaaaaatttcatcatacactagcttctccttgagtctcaatgtaagatggtaacagcaatttgttttgctactaagcttctggacaaaatatcaaaaagtctcataatcctgaaatttcatcatttgtgaagctgggatttccatgcctatcccaccatgttcaggggagaattaaatgttataattgttcatgaagggtcttagcacagactctggcatgtaggcaaagatcaatagcactaattggaatagacgctaattggaatagcactaattggaatcccatccatatcccacacttctctg

SEQ ID NO: 4368 - DNA, 637 bp, Homo sapiens
atgtaaccaaacatcacctgttccccaaaaacctactgaaaataaaaaatatatggggaagaaaatataactgtttatatttaattttatactgtatgttttaaaaattatatttttgtttatgtttcatatatgtgaacatgtataatggattaaaaatagatatcaagagtgagtgttcaaagtattttagtcatcaaaaaagtttggatgctattgtagtgtgtcaataaaaagagtcaaactctaaaatatttgaagagatttattctgagccaaatacgagagacaatggcttgtgatacagctttcaggaggtcctgagaacatgtgcttagggtggttggggtgaagcttggtttcatacattttagggaggcatgagacatcaatcaaatacatttaagaaatacattggtttgggccagacgcagtggctcatgcctgtaatcctagcactttgggaggctgaggcaggtggatcacctgaggacaggagttcgagaccaacctggccaacatggtgaaaacccatctctagtagaaatacaaaaattagccaggtgagatggtgagtgcctgtaatcccagctactcaggagactgaggcaggataatcacttgaacccgggaggca

SEQ ID NO: 4369 - DNA, 565 bp, Homo sapiens
ttgctcattcattttgatggtagtgaaataatttccctaaattgaaaatatatataccacttgacttactgtgaatgaataaaatgagactgatttaaatgatttatttcatatatctgggttttccattaaatgcaagactacatatatgcttgtgacttcacatggccctgctttgaaatgacacaagctctgtaataaatattgaggatgacagaatccatctcctcatctcattgagaaatcttttaaagaactagaacatgacaaacattattctgaatttcagctctgactcttactagcttctaaccttaaagaagttaggaaatgtacctgaaatctctattagcaaataaaattttaaaataccccgttaaagattcttgaaggatgaaaataatgtttgtaagagctagacacttagtgcatgatacttattgttagcccaatgcagggaggtgccatgaactcttccatatttttaagcacaaatatttttaacttttatcaagatgtgtgacaactcagaatttgagggatttgatgaagttatttatcatta

SEQ ID NO: 4370 - DNA, 490 bp, Homo sapiens
ttatttattatctattggatgatatccctaaatatctgtaaaatgaatgaaatcaatcccagctcagaaatacattctaaacttttgataatacccaatttgcctatagatctatcttcacaatcagataactcattgtgcttgttttattttttaaatagttttcctggctcattgaaaggcactgcatgaagtatgccagatgatagtcagaacaatcccttatgtatgtaacatgcatgacaatttcaatggtactctcatgtccatcatccaatttaataatgagaaaaaggaagactaaaacattgtttctgttttcaaggagattacaatttagtgataacatattaacacagaaacatgccagaaaaaaaagaacacataattggaagccaaattgtatgatttcagactataaacagctgagttcttcagagggaagggggcttccatggggcttggagtcgttaaggagggctttgtagag

SEQ ID NO: 4371 - DNA, 259 bp, Homo sapiens
tgcttagtagattcttgctcaatgtttatttttaggaaacaatcaaatccccttgtggttattaaattaatttagtatcaggccgggcgccagtgacctcaggagtttgagaccagcctggccaacatggtgaaaaccctgtctctacaaaaatcccagctacttgggaggctgagacacaagaatcgcttgaacccagaaggcagaggttgtagtgagctgaaatggcaccattgcactccagtttgggtgacagagc

SEQ ID NO: 4372 - DNA, 441 bp, Homo sapiens
gagtgctgccatgaccatctctgttgaatttccctattctctttcatctgtcatcataatcccaccaggaacttgagtgaaattggaggttaagggagagaaaggagggagcaagagagttaaaatcaaactaatttttaaagagaactggaatattgttcattcagtgaacatatgatttgttccctgttgtaaatgaaaacttatcaattccacaaggacaaaactatgacctaatgaggtccaaagaagaagaaaatatctggaaagaaaaagaaaacatttcaagcactgggaagttgagcatgggcttaagccaaccaatcatgtcttgcactggcttctggaagggaactatggaataatctgggaactggagcccttactcagttatgtacaagaaactatccaaatctaacttccaaattttggcacacctga

SEQ ID NO: 4373 - DNA, 449 bp, Homo sapiens
tattagctagagtagaatgtgaggaatggttgattataattaaaatgcagctaatgaaagagctgtactaaatatgtatgctgtaaatcttcctttgccctcttcaattcttgatgtttttatatcttatactaatgcttttcaaacttgaatcgtctatgtaaagcacatttatttaggtttccattcctgtaccatgtgtagaataatgactcagttctcccatcttttttgtctattaaaaggactgtgaacctttcattcgtctggtgttttttgacataatttggttttcacttcatacacatgcattatgtaataagtgcacttatgttggttcctcatttgtgcatactagagtgggtgttactgggattgtaaacaaaaagtaaattcagatgcagaaattttattgtttttctctgtcatctagatgattgagaatatgc

SEQ ID NO: 4374 - DNA, 568 bp, Homo sapiens
gaaaacattaaacacagcccagttggtagctagattgcataaaaactcatactgaaagcctgttgctttgatgcctattgtcagatacatcatgtcctgctttcaacaaaaaaaatcacaagacatgccaaactacaagaagaaatacaacctaaagaaaaaaagttaatattgaaactaggctcacatgtgacacagattttggaatgtttagataaaaaatttaaaatatttacgactaatacattaggagttctagtggaaaaagtggacagcatgcaaaagcagataggtgagataaacagagatggaaactcaaagaaagaatcaagggaaatctagaaatcaaaaacactgcaacagaaatgaagaatgcctctcctgagcttatcagtagactatatatgacctaaggaaaagactcagcaaacatgaagatttgtccataataactttgcaaactaaaatgcaaagagaaaaaaagaatttaaaaaagaacagaatatccaagaatgtgagacgattacaaaaagcgtaacataagcctagtgggaatttcagaaggaga

SEQ ID NO: 4375 - DNA, 625 bp, Homo sapiens
gaggataaggtgcagaaaattaaaaaaactgagccatttgagataaggaattttaatgtcttcacacagtattcaattctaggaatagactaaggtgaaacaaattactgtgaacatgcttctcattgcaaagatttagaaatacataaatactttatatgtacattatctagtagggaagaaatgtagctccttggcattagacaagaattgggagttgaaagccaatgtggtagacttgagaaggtgatactgtggcagtcctgtacatttagagaatcgagaaataggccctttgtgttaaggggcttgggagtttaacattcacaaaaaggcagaaaaaaagacctcagcccatcatgagagacagttagaattaggacatttaatatatgtaccctaagaagctggctcagtgctctctggagaagaggactgtgaaaacttccatccaccaccatggaaagcatgaaccttatttcttctgataccttagatgagaaaaaaaaagtcttctgtaagcgatacaaactccaagctagcaatgagcaagggattatatctgaatttacaatacacaagttgcaaataaatctctaaactgaaactttaacataaaactgat

SEQ ID NO: 4376 - DNA, 605 bp, Homo sapiens
tgggtatgggatgacctcaaggatacagaaattccctgatttgggagtttgaggaggctaatgatactctttttccctgcctaagtttgaaaccaattaaaaggagtcagataaagataatcaaatatcagttttattactaattaatgctaggtggatatgatttgggtgtatagcagtgttcaataccacactcttccatcatgagaccactatcccaattccaaccacagctcctttgggaattctcctgggactgctagtgggcagtttcaaatctgcccccctcctaaaagctctgaaataacttagaataacacattgattcaatcaacttctagacgacactgacccatagctgaaaaatcattccctattccgtttcccatcccaaagtatttctcaccatttcagccagtataggtcaccaggcattttgcagtgagtttacataacaatattaacatgcttcaataatgtcagctataaagatttgctccaaaaattgaatatatgtcctctccccattataaaattcctgaaggaaaactaaagtcctaatagtaaatccttttgtaagtttattatttattcataggtaatat

SEQ ID NO: 4377 - DNA, 584 bp, Homo sapiens
cagtcagagacagtgtagagtctgagacacaaaaccggaccgaaatcctctcccataatgatgctttttgttgctgtcaccagacacattatttcctgtgagagtgacgatgagcgctgtggttaaagccagtactgctctgaatcttattctaggttagggaagaatatctaacatagtgaatatttttatccatgaaagttatacactgctacaccagcacaatcacaagctccaccctcgtctctcacatgccccgcagaaccatggtttcctccctctgtgggtgttgcagctgagctggacactccttccaccctgaaagctgggctgatctgctggtccttatggtccaagctctcagggccagttgtgaccagaaagctctacattccagggtcagcctccagccatccttgctatcggtgaactcctatccactactgtctacattttgacaggtgaattttattttagtttctgtttcagagtctttattaactgctcacaattcttcatggtccctcattttctcctgctgtggatttcagccccatgcttatttccacgtccatggctggagc

SEQ ID NO: 4378 - DNA, 599 bp, Homo sapiens
tggcacaaacatagctcactgtaaccttgaactcctagcctcaagtgatcctcccacctcagtctctcaagtagctaagactacagacgcacaccacaccacatatgtaattttttaatttttattttgtagagacaggctcttcctatgttgcccaggctggtctcaaacttctgacctcaagcaaccctctcacctcagcctcacaaaatgttgggattacaggcaagagcccccatgcctagccttttaaaaatacacattctatagttagttctctgcattatgaaaatgtaaagggttactaaactgagaaactaaatgcaaaccaataacaaccgcacacagcctactgacatttccatttcctttttctagccttggtcatgtaatgctagttactgttccacttagagggacaatctcatttgcagctgtccttaaatgaaactgtgtatgtctgattccctggacagcactagttcctcctggctagctatttaaattgcattagtatgcactttgttcattaaggcctaaaagccttcaaatgccacactttatgagtaaagaaaatattactcctgcaattcaacagt

SEQ ID NO: 4379 - DNA, 578 bp, Homo sapiens
ctatgcccagctgcatagccacactaccctacctggtcttccactctcccagtggataaagtaatatttcttccaatgagatgcatgtaatttttcattatatggtttcaaatcaagctctagtcttagaaacagaaaatcaacattgtgaagtattatagattttgcatgtctaaacagctgtgatgaattagtcacagttacaatgaactgtaggaaaaatccacaggcaatacattgcttttgcaagttttatactaaagtaaaagaaaaccctcaagtaatattatataataaattattgtaacagtggttggtagtaggagcaatttaaataagattaatttaacaacctttaaatatcaataagtaataaatatcttcatgcatgggggtccacgtttcactttagttagaaataatgaataatgccagttgcctaatataaccctaataacagaataagaatacttggcactttaacaattttcattagacgagctcaagtatcacttccattggacaaaaactgcatctgttccatattaggcacacaaaaaataagttatataaagaag

SEQ ID NO: 4380 - DNA, 632 bp, Homo sapiens
acatggtacctaagatactagaatacatttataaatatttgttgaggaactaattataaagactattccaggtgctttagggttcagccacaacctattataagtaatacctattataagtgggtgcttgtaatagatattaccatattatctaagcactcactttaatactcattgttctgggctccacctgatgttatgatatgaatctttttagctatactctgatccagaagatcacatgattagcatcaatttctaaggacagtaataaacttgatagttctgagcaaatacatacactacagaatagtcattcaacaaatatttattgcctgcctactatgtagtctatatatacctatatgtaacacacatgcaaagaacagtctagttagtagtttagaaggaaggaattggatgttaaacgggcctgggttcaagcactggtgccaccctttaaaagcagtgaaacattgaacaagtcttagattccttatcagtaaaatgggaataaaagtacctatctggaagaattgttgtgaggattacatacaataacactgatgaaatactagcccaggacctggcataattgccaatttaaaaagagcaacttggtaaagtgctag

SEQ ID NO: 4381 - DNA, 650 bp, Homo sapiens
tgatgggtcaaaaaagaaatatgaaatgactgccaaggagcaatgatctaattaaacccagaattaagttgataaaactataataaggaagtaaaaacactaattctcattagactgaaaagttaaggatagatattataatcgttacaggcatgattcttacattttagagtgtatcagaattagataaaacttgctaaactacagattgctataccccacacacagagtttttgattgagttagtggaggttgagggctgagaatcttcgtttctaataaattcacaggtggtgctgctagtctcaagacgacattttgagcatcattgcactatagcacccactggaagcataatataaaaaggtacaacaagccagcagataaaataaaatggaattataaaaaatattcaaacatcccaaaagaagatagagatgagcaaatattttttaatgagaaatattaaagagaaaacaatagtagactcaactcaaattatataaataattaaatattaatgaactccttattcagttaaaaggcagaacttataggaatcaacaaaatgaaagacacaattatatgctgtttatagaaacctcacattacatataagaatacattaataatacagataaagaaagatg

SEQ ID NO: 4382 - DNA, 627 bp, Homo sapiens
taagctgtaccatccaggtctgtgtgagtattgtatactctgatgcacgcatggcaacagaatggcctgaagacgcatttctcagaatgtatccctgtccttaggggacacatgactatagtttgttctggtgcattgttttcaaaaagagcctgtgtgtagaacactgcattttgtatattttcaaaggaacaggtggtggggtagtgtgcagatgtggaaatgggcctggcaacggccagatcccttcctttgtcccaggtattgtttggaagcatcatttgtagtgaatgactaatagtgttctgaagcattttctattgttctaagttgtttccatcattctatattattaaaagtattacatagttggctgggcgcggtggctaacgctgtaatcccagcactttgggaggctgaggagggcagatcatatgaggtcaggagttagagaccagcttggccaacaaggtgaaaccccgtctctactaaaaatacaaaaattagctgggcatggtggtacacgcctctaatctcagctacttaggaggctgaggcaggagaatctcttgaacctggaaggtggaggttgcagtgagctgaaatcaggccactgtactctagcct

SEQ ID NO: 4383 - DNA, 632 bp, Homo sapiens
aaccttttaagtgtccaagccaggtaccttgcaaagcactccatggattccagtcactgtttcctggtaagattgcatttctgagccagcttttctatctatggtgctgtgggtcatggggttggctttgatgctgtggcctgaggatcttcctaggtatttggggttagacttagagaacaaagagcaaattttgtataggtttgaagactcaaacttattaatacgtctctgaaggactctaggtttattcagtccttactcaccaccaccttaacttatacaaaatcagtcagactcgctacagaatgacctctgagatcatttctaaaattcacagcagaaaaggaactgaagtgtttgattcatttttcttctgcactgatgatgtgggctaactctcaaggcaccaaaagtaaaatagaggttgattgtagacttggaagaagaggatttgttgtttctgtcttgagtatttatgaagaaatctcctcagcctccagcttccccataacagactgaccaggctataaattgggctaagactttgaagtgtgaaatgttggggggtgggtagacagaaaaatgggctatcattgccacaagccacccagcactcagacagctcctct

SEQ ID NO: 4384 - DNA, 511 bp, Homo sapiens
gattcacaagcactttatattattgatcatcagtttccacatttattcctttgaaagaaatacatccttggatttttctgtacatattttgacatttgttactgacaaactatttttatcatcattaaaaataataataacaatgatatattttttacctgaaagcctccatttcttttaggtatttttcttcattttggagcttcaggtcgacattttaaatgtgaaatggatttattttttccttcggttcatcctctaattttactcctgcctgtttatgtcttaaaacttgatagagttaggccgggcacagtggctcatgcctgtaatcccagcactttgggaggccgagacgggcagatcacctgaggtcgggagttcaagaccagtctgaccaacatggagaaaccccatccctactaaatatacaaaattagccaggcgtggtggcacatgcctgtaattccagctactcaggagactgaggcaagagaatcacttgaacccg

SEQ ID NO: 4385 - DNA, 560 bp, Homo sapiens
tacccagccccatttaacttgtaaataagtattattataaactccacaatttggctctgaacttttttgtcaccaaggcaaaaaaagaaaaacctgataaattgtgaagtttttattgccaaaaaattttgttttaagtcatttttaattagatatttctgggtttctgttgaaagtactttctcaaattaagagaaagtataacatagtatactactgaaatttccagagcgaataaaatgataagtcagagattttccttttaatgtttttttacaatgtaggctttattaagcccaaaatataatgttccagtatttcaataattaaataacaaatgataaattaatatctattaaattacagtttatcgaagctattctattgttcgtgtgtggtggctcccggatcatttatggatacagaatgttgccaaccgatgctctggcttgagctaagaatagaggataatttgaatataaaattcaaacatggccaggtgcggtggctcacacctgtaatctcagcacttcagtaggccgaggtgggcggattatgtc

SEQ ID NO: 4386 - DNA, 587 bp, Homo sapiens
tattaaacaatatccaattcaaaagttacatttgtttttgttactgtacgtttgtagagaaatatttgctggggttatcacgtgtttatccatttgtgatacatcaaaaaaccttcatataaaagaaatagtacatctgctcctaatttctcatgtttgtttcctctccttacatctttattttcataactgtatttggaatatttatgaataattccatcttttaagcctgacagcattaattttatcagaccagagagcctccccatgtatctctggcacattctagagtcaaggtgattagcccagcaggggtctgaagaagtactcataagacgctttttcagaaaccctcactgctggagtatcattttagtccctgcacaactgtaacccaaacttgcaaggcttgtacataacattttgtcatatatacagtaaatgtatataatgaattgaatttcttaaacagatattacaaagccgtagtagcaaatactttactaaaatgctaaacagcattcaactagataagtttatcccctttagaatagttaccatgacaggctgggcttggtggctcatgc

SEQ ID NO: 4387 - DNA, 473 bp, Homo sapiens
ggtaagctagagtaggcattgtttcaaacagttaggtattttaaattagaaagttattaatagttcaggtggaacataagtttgacaaaaccatgaaaatgataggcaaataactgaagcttcaggaacacagacctataggataaagctcagagtgattagtgtgacacactggaccttctgaaatgtacctacagttctagactcatttctgctgctgcatacttcacactctgaattgctacaactgagctgcttgtaggggctattttgcacagctgagcatttatccattctttctcttgtgcctacaatgccttctcccctttctttgcctggctaactcctacctttaagactcagctcagtcttaaagtctgcctctaccagaatatcttcctaacatcacaggcataacatttaaacatttgtgccttcttctgtaccaccatagtactttgtacatatctttt

SEQ ID NO: 4388 - DNA, 618 bp, Homo sapiens
atgccccctcctctcactctttccaacctgctcttcacttcacttaaatgtagactggattttctcatgactcggtggcaagatcccacattaagtcaggtgctacttggggaagttgcttcgttttcttgtgctctaagatctctcacccacacgcctggttttggggagaaggataaggacggtgtttctaaacatgctgtgtttcctatgcagagaggcaggtgactgtgtatggctcaacttgcagactctaaagccaactactttagagttcagagttcagacaccagctttgcctcttgtccttgtaacatggcacaggttacttcaactctgtaatgcctcagtttcctcatctgtgaaatgggggtaataactgtgtatacctcataagtgtgcttggaataatgcccactaccacgttcaaagtcagctgctggggccaggcatggtgtctgacccctgtaatcccagcactttgggaggccaaggcaggcagatgaccggaggttgggagttcgagaccagcctgaccaacatgacaaaaccccatctctactaaaaatacaaaaattagcagggtatggtgacaagcacctgtaatcccagctactc

SEQ ID NO: 4389 - DNA, 531 bp, Homo sapiens
attaaaacaagtcctgcctgccacccatttgtgctgattgggggtgtcgtatgttagatagaaaaatggcaagattctctcttgtggtctgttcccaaggccaccaccttttaggtaaatactgaaaggttcttctcagatcaaattctttacaatgttgatcccccaacagctaatcgcttatggtgtcatttctaataaattctgtatccaaaatgacttagccagtagcccatgtagtcaactgagccaagcagttctgaattatttcctttcttgccaagtctgtcagaaataaatcataagctttcagtagtctgacgtttcccatttgttgtttgtggccaatacctagaatagaagtaattatcccaataacatagtaggcactcaataaattatgatgactaattaaaatcatggatggtctgaggcatgccaggaaaggtagttatctactctatgaattactctatgagttactgtgaacaagcagatatgagatgcagatctagagaaattattttttct

SEQ ID NO: 4390 - DNA, 131 bp, Homo sapiens
agtttattaaaatatgcttaaaattttttagaaggtctccaaatgataaggcataacactgttgattgctgctttggagagctttgtcctgagaggcagctaaacagtagagccattcagtgacatggacg

SEQ ID NO: 4391 - DNA, 584 bp, Homo sapiens
aatataatgagctaatgatgtgcaaatataaagggtcaggctggacagatttctttttttgccctggtatttagtatttcagactacataaattagtcaatacttctttgttgagtgaaaggatgaaagacacaagttctagcctgttgaattgttgttttctcttgggatgatctctcagttttccacttatttattttctctttctcacgatttgattctagttctgactatccaaatattatgttatgatttttgcaatggtcttttccattagttttctcactgagagagccaagtagtacccagctctagtcccattaagccatctttttaaaaaccccatttttaatatgttgccttcaaaaatacttacaaggtatgccagccttgagcttggcttccaggggtggcatcatgaggatgaaagagcagaattatctacacataggccaggcccggtggctcccgcctgtaatcccagcactttgggaggccaaggcaggcggatcacgaggttgggagatcgagaccatcctggctaacacggtgaaacccggtctctactaaaaatacaaaaaatt

SEQ ID NO: 4392 - DNA, 473 bp, Homo sapiens
tctcattgagaagaacagcaactagcattaataacctgaaaccagagagaaaacaatctattcaactagataaaatgagaggtgctgctaagaggtgacccataagaaaactagcagttattctctcaagaagtttagtcagacctgggaattattaggaaaaacctttaaaatcattctaaaaaataccgaaatttatattggtttttccatttttcttaaattacagtatattaaaagtccttgcttatgctgttaagctcactgcttctaatttgtctttataataaaatcaaatgctagtagttaacttagaactgcattttactataaaaattatctaacttgtaatcatcttattccctaagaacaagaaaagttcaagcaaaatacccatgaacatggataactcctctaaaaacaatatgtacctctgtaaaacttggtctaaattcagccattaagatagacat

SEQ ID NO: 4393 - DNA, 555 bp, Homo sapiens
gagcggcacctggagggaggggcagtggacagccatgtcaacaggaccaatccctagggatggatctgggaggctccagcacagagctgagaacaggagatcagtagcacccggagggctggaagacagtgatatgggattcccactgctgggacagggatgaaaggggcagctacctgagggcaagaggagcaggagcagagctgctggcccagcgggggaaggcttgcatgcatgggagctataagccctgagacctgattcatacccctcagccccccaggcatctgaagccacacagggccctgctactggtttgctggtgtgcctaggccttccctctgccttttcccaagcaggagaaagccatcactacaggaactcatactgaaccaccagaccacattcgcgcaggtccctgtactaaaggccagtccatctgagctcccagggtaggagagcagagctcagaggctgtgtcattcacatacccacccacctgcagagggcctctctgggtcatcagtggtcctccatcctatgaggggcaatgag

SEQ ID NO: 4394 - DNA, 470 bp, Homo sapiens
agagggcaacgccatggggctgagctgctcaatgccctcccagtgcatcctgctgcaaggatgccccccaggatgctgcctcacctaaccagccgctccaggagtggcccccagcccccaccccatggagcttcgacttcctggtgaccagtgctccagtaacctctaagtgcttgaaccacgcctgtcagccagttatggctttggctctgagagcccccctgaccaacttaaccaatgctttttttctgtaagaaattgccacttactgttggtttctgtcctacccggtgagatacttgaggcttcccctacctgtgcacacaacgaaatgaagacaataaaaagccagagtttgctctttctagtaataaccacttattgcaactgctatttccttaaaaatgtcatctcttgccagtgttcgttactttgcactcaaaggccaagtatcctctcacggtgaccct

SEQ ID NO: 4395 - DNA, 545 bp, Homo sapiens
tgtcaataccatcaatttactttgatttggttttttttttcttttcatgactagtgggtttgtacttggccaaaatgctctcttgagttgcagtcaaggccactggatttacatgtgctatctatgttagaagtatcacatgtgatcatgaagcagagagcaaggggcattatttaccatgcataccagacaaagcatcatttcttgttcactgtaagacagtaacgggaaaggtatgacctgtgaacactgcttataaagtcaattctttatatcatgattagcataatcacatttctcccctttcagaactcatttatctgctaatatatatctatacagacatacgataaatacagaaagactggatagactatctcaaagaatatagaactactgataaacaatacattgcaaagcaagtatgcaaatattttaaaaagtaactgtgtgtctataggatgctaaaaagaagcttctgagaaaaaaagagaaatattttagcaaccaagctaaattttagcacagaatttttcaagttacaa

SEQ ID NO: 4396 - DNA, 606 bp, Homo sapiens
atgctcctctaagtaactgaatactacagagtgattttggatcaatgtggccttattttgaatataacatacaaaatcattgagtgttttatgatttatcttcattttaactcaagctttgggatacatgaagacagaagataaatcaaaatgtgtcatgtattatattttctgaagttattaatatatatttagcaaaaggtaaaatagcacagatataccaaccaaattttcatgtgaagaaaacattttatataaataatgtttcttcttttatatgaaatcacttcaaaaatgagaaagctactttttatattccccaatgaatattccccagtcctgtgattccaagttcagtaaaatttagaaaattatggccaagaaatttagtagaccgaatgtaccttcactttctggaatgtacttgtaaccctacattcacagttagaaatttgcttgaatgaaaaagtgttcaaagtaattattatcttgtatttggcttctctgggtacctgtttggcttttatttctaaataaaaaaacaaaacatgcacaatgtaaatatttttagtttgtaaaattttctttccaattacatattttgag

SEQ ID NO: 4397 - DNA, 566 bp, Homo sapiens
aatggaaatgagaactctaagctctaatccatagctctgaaagtaccttgctctgtgactttgattgaggataatattactgtttcatcacagatataaaatgccatgtgacaaatatgtggaattggactaatccactagaatagcattaagtttataagtgcatgctcataaatgacttttccagttgagatattaagactattccccaaagaactacttaatcttctggtgaatatccatagcatagaaaagaccaattcactctaaacatgagagatcacatataataaataatctttcatcttatgttagacatgtctattactattatatattttaaatatatacacctctataagcaataactcacatctttatatatgatcttgaggcaagactcccatttataaagaaaagaataaactctgttcactatagttgcaagtcaagtatattttcttggttacatatttcttaagaaaagccctggccgggcacagtggctcacgcctgtaatcccagcactttgggaggctgaggcgggcggatcacgaggtcaggag

SEQ ID NO: 4398 - DNA, 579 bp, Homo sapiens
gcaggagtggggctagaggagtagggccagctgggatcagcctggcgcacaggcgtgtgggggtcctggaaatgttctattttgtgacctgggtggttgtgtacacatttttcctgtggttttgtaaacacttctactatgctttcacatgcttctgtatgtatgctgtatttcaccaatgtcccatttttattaaaataatcaagaaatccctgccaggccccaggcaggctcttggcctgggctcactggaggttcattatgcacagggaccactctcccagatctgctcaggggtctccacacagccttgactcagagagggcccctccctggcctcccctaggaggacagaagttgcctccaggtcactgcatggcttgtgtctatgcccagcattctggaacaagctccagtagggggatatacacgaggtcacctctctcccttcctgtcacactagtaggcttcaccaaacagcagcagcacagatgtggggagtggcctgggcctgcaggggtcctggtgtcagctcgtttgggcccctcaaggctggggcttcagtctgggagccacctt

SEQ ID NO: 4399 - DNA, 463 bp, Homo sapiens
tttgtaaaatcctaaagatgttgaattccaaatcattatctggtcagatgagggaccacagacaatagatcagtggttgtacctgaataacttggtattccggttttcaacactgggcctacagcttggtcatacacatatgtggaagaacctctcttactgcgctgacaaaattaggattctgagccagaaaggctggtagtcaagccacccaggcagtaaataaccctcggggaggcctgtgaaaatccgccatccgatatgctatctagatggttcgattggccatgagcaccagtgagactttttcccattaaagttcctccaagaactcagatggtctctcctgtaggagattgaaggctcttgtgttggagctggtgacctgtgaaggccacatattccaggagatacaagaatatcaatgggaagccagtgtagccacgtgcacattacagggcta

SEQ ID NO: 4400 - DNA, 388 bp, Homo sapiens
aacagcgaagagaggcgaccaggctgcccctgagagtcaagggagtgctacgttggcttccccaactctgggtctggtatctcagcctacttagaatcctatcttgcttgtcaggaagattgcctgctgtgtcctcagcctcctacggtcctaaatgcaattgggaaatggctggcaggttctagcagggaactggcatgatcttttgatctatgcttttaccacttttcttttgagacgaagtcttactttattgcccaggatggaggacagtggcgcgatcttggctcactgcaacctctgcctcctgggttcaagtgattctcccacctccgccctccgagcagctgggattacaggcacatgagaccatgcctggctaattttt

SEQ ID NO: 4401 - DNA, 403 bp, Homo sapiens
  misc_feature 94, 95: n = A,T,C or G
tgtaccacacattttacatgggcacattatgcaacacagttttctacgtacttctgaagtagaagcttatgaacatgatctgtagccaatgagnnaatcattttgaaatgtcataagtctcatatttttctttgatttctctatctgctgaggtattagtctgttagccacagcaggtcgagactcacattatctatctaacattatctatttctttgatttctgtatctggctaagccttagtctgttagctacctcaaatagagactagaagtctttgctctgagttcatgaactttacaatgactttttcagaggcaacagctggctataaggacttcacagatagctgccgtggatgctgtgcaagtgacagcaggttatcatgagttcaggctgctgt

SEQ ID NO: 4402 - DNA, 467 bp, Homo sapiens
ttaggactgccccccaacctccttattcttggagcctgggcacacgcacagctgggtggcccttcagctgatactgccttaactgctttaactctgcctgctgtgctgtccaggcttctgcaaatagcccaggtgtggccatcctccagaggcctccaacattaactgtgaagggcccggaataaaacctagtattagtaggccaggcgcagtggctcacgcctgtaatcccagtactttgagaatcacctgaggtcgggagttcaagaccagcctgaccaacatggagaaaccccgtctctactaaaaatacaaaattagccgggcgtggtggcgcatacctgtaatcccagatactggggaggctgaggcaggagaatcgcttgaacttgggaggcggaggttgcggtgagccgagatggtgccactgcactgcagcccagggaacaagagcgaaactctatctc

SEQ ID NO: 4403 - DNA, 407 bp, Homo sapiens
caaaaatcaaaagatgccttaattcccccatgggtgggccccatgctcttgaagtaagtgctgtgctacttgaagcagtagtaggaagaacccatttacaccatctccccactacaacttttatgccttcagaaagtgttaaaaaactgttacaaatagccatgttgtgtcttggaaaataagttctccagaaaacacctctctgagctaggcaatgtgtgtttctttctgtggttggcagaaataagcccaaatacagattctgatgcttaggaggaagaatgtggtagaaacataacagatttgcaaagtctatcttgtagcatgatttacacttcctcacaagcatgcttcctctgaccttagcctctcagaatgtggggatgataaagggatgcctcatcagc

SEQ ID NO: 4404 - DNA, 531 bp, Homo sapiens
tagagtcctgcccctactgttctaagatcctgacattttatttgaaatagtaaaacaatgattaggaatagactttggtcatcttaatggactcttttttaaaaaatatcaaggcatagtattaagaaaattctattaaaatgtctaaacatttgtctcattgctaaaatatacaagaaaattaccattttcacacagattggcattggtgtgagttgccatatctatggtaacttgcagtgttaacctaactgcaaacaaactgtgagctctaagagcctttggtacatttcaatcaattaaaatgatttattcgtcatataaagctatatttgtaagtagtataattgagttccttatagtttataactttggaatttcaagcctagtatgcaagatttgttcattttcttcatatagtttgcatatttaatcaacttatttcccaaactaatggacattggtgtttttattctggccttgtgatccaaacagggttcccaaaatagagacttagaggagggtgcaaat

SEQ ID NO: 4405 - DNA, 680 bp, Homo sapiens
gaatgtagcccatgcatttgttagctcagtggtacttgtggtcacagataaaccccacaataccagtgttttaaaacagataaaattcatttcttattcttacgaagttgaaaatatagttatgtgcttgagctgattcacaccagatcacaaaaactgactagttaattttcagtaattgtgtgagccaattgttagtcatagtcattattttaaaataaacacataattaaattatattaaaaacaaatctaattaataatcaaaatccatcacatcctaataatgctactaatatctctgctgtagtggttattaacttctattgtatttgtataatagaaattttatgaaatggcgtgatatgcacatctcttcctaactctgtattcagtgctgagaccttagcatgaacacggtccaatttaaaagtcatcaaaggcatcctacttactaaatattttgtcacataacataggtctccatcttcccatcctccaacatcaatttccttgtaatctgcaccccagtgcctaggtcaatattaatcatttttaggttttggccggcaatatcacattctaactcatttccatattagttaggataacaacatctacagcaactccaagacatcagtgaactaataaatttgcactttatttctggctcacataaat

SEQ ID NO: 4406 - DNA, 426 bp, Homo sapiens
gagacaggttggttgggaactctttgttcttaaatatatctagttcttaaaaaattcaatcatgtctttccaacactcagtattaataatactttatactttcatagcaccttttcttttcctactgccttcgaaatacattaattcatcctctaaaaacatctctttctagtgaaaagggcactgcacacaaaatcgaaagaggtagtatcaaggcctggcactgagccatactggtatgactttgggcaaaccatttaatccccatgaatatgctttcccattttaccactctgagaaattaaatttaaaaataaatattaaggaccctcttccatcataaaattaattcgttaatctattcaaaagtattttagcattaatatgtgccagccatgtgataagtgtcggagataccccataaac

SEQ ID NO: 4407 - DNA, 490 bp, Homo sapiens
taagtcatacagagagtagggatgtcaagcaaaagatgatgtgtgaaaaccctgattgcacatttactcagcatgaaactggggcacatgtttgtagtaattcaaatctctgcaagtaaggtatgtgtggcaacaaatcaatgaggcaattgaatttattttgcagaaaacagaaaatactgctgacagacggcaataattccatgttaagtaggtgtcagatgtttcctctctcctttctcttcttcttttccacctcagcagtggcacagtggcctcagaaagggaactggatccctcatgccactaactagctgtgtcactcagtccttctgggcctcaattttatatctataagggagtccttctgttatggtctaggtgtctttgccaaaactcatgttggaaccttaattcccagtacaacaatgttgggaggtcatcctttaagagatcattaggtcattaaaatagattaatatctttctca

SEQ ID NO: 4408 - DNA, 590 bp, Homo sapiens
ataatatgcctaggagagtatatgctaccttgggtgaatagtacatattgatagtaacatattgatcatgggtagctattttgcaagtgacaacaagggcttcagatttgttagatatttgacgtcaaaattcaaggttatcaggaagcattaggccaattatcagttcctaaagtgcgtctcagtaccaagaacatcaaaagccatgaggcagtttcagcagctactgcaaatggtctcctgggttctgtaagaataatttcattccagttagcacatttaacaggtaagttccaaatatacggttttccccaaatttgggggaagagaaaattgagaagaacttgctcattttcttcctgctcagtatatcatttggcttcctcttccagttcaccaggaataaatacaaaataaatatattggttaaatgtaagtcgagattaagaataaggggaatgtagaagcgatctttcctttactttaaaacttcaaatttaagcaagtgtcactttctaagaaacctctatcgtgtggtgacatcatttgaaagccctcttccttcataacaaattccttatgctctctct

SEQ ID NO: 4409 - DNA, 582 bp, Homo sapiens
aatctaaataccttttgtttatttatttattttagacagagtcttactctgtcacccaggctggattgcagtggcatgatttcagctcattgcaaactctgcctccagggttcaagtgattctcctgcctcagcctcctgagtagctgggattgcaggtgcccgccaccatgctggctaatttttgtatttttagtagagctggagtttcaccatgttggccaggctggtctctaactcctgacctcaagtgatccacccccttcagcctcccaaagtgctgggattacaggagtgcgccactgtccccagccctaaataccttttacctttgttaaagagaaccacacaaaagtgctaaccctaattactgtcaattatttcaatttcttgaactctgtaagtctatatagatattttcacccaaagcttctcaagtaaattatgtcagatgttgaagactttagagtggagattggaaataagactaagattactaaaggttcataataaagactaaaactgggtagggcaagaaaaaagactaaaactttcaatgtaacacatctgatactcatcactg

SEQ ID NO: 4410 - DNA, 563 bp, Homo sapiens
gatagtcaaggtggaaggatcccttgaggctaggagttcaagaccagcctggacaaaagagcgagatcctttctccattaattgattaattaattaatttttaaaaaacaattcatagtgacaagctagtacaagagaaggaaacagaaatttggttagatgactatgagttgaagcagaagaaaatataagaatatcaatctccatatagtaccaaatataaaatgcaatattcttagactttctgtaaacatcagtctgtgagatccaaattatttttcttcttttatagtgtaaagtgatcaatttggtctgattatattaaagatcctaataaagcttcaaacaacaacattattttagatcctatatgctatattatctcctgctaaattttttcttttaaatagatatagtatgtatattagtaacataatacagtatttgatatagataaacattatttgtgtatatttcactaggataaccaatttctactcaatagacaataggggaaaaagaacagatttgcaatcaagtagatatgtctaaacgtaggatct

SEQ ID NO: 4411 - DNA, 233 bp, Homo sapiens
tatgaacccaggaggtggaggttgcagtgagctgagattgtgccattgcactccagcctgggcaacaagagtgaaactctgtctcaaaaaaaaaagaaaaagagggagacgttaataacattaagcatgaaaagaaagagtttacacgaatacaacgaatacatacagatactgacaaaattagcattgaaagaacacctgggtaaaggtgaatttttttttttttttttttt

SEQ ID NO: 4412 - DNA, 479 bp, Homo sapiens
aatgaggaggctgagattcagagggattatggcctggctcagagtcagaggtacagaaaagatttcactcaagtcttttgatttcagttcagctgtgtacctctcagactatagctgtctcctgtctatgtgtatatagcactgaactaagtctttaggaaagtaatatgaaatttagtattcaggtaatcatcttaatgaagattccagttttattgggaccactagttaccaatggaacaagatgttgaatatgtgcatgaatatatagatattaaatatgattacaaacaagagggcatatccctcaggtgttggctccctcttctcatatgcagccctgaagacaccacagggtacaaatatcaaatatagcatgaatttataaaattatatataaagatataatttactgaagcaacaagagtgtctggtattatagtaataaagaatgtatgaatttttactgagaaaaacat

SEQ ID NO: 4413 - DNA, 495 bp, Homo sapiens
gtttcaccatgttggccaggctggtcttgaactcctgacctcaggtgatccacctgcctgggcctcccaaagtgctgggattacaggcgtaagccaccgcgcccagccaagtaaaattaaatattcttgtattctttttatatctctggaaaagtattaaatacattcttccagaaaaaccttcgctgaagggcttggctggactagtttcccacagcttatcctagggcctctgggtagaattgtttttctttattgtgtggatagatcagactcagtacggagaccaacaggctctctgtcttctcctcagaagcaactgggattctccagagcagtcataaggtgacagaaaggccccagaacagatgtttcgtgtgtgacagagcctccagggagacgactctgttgctttaacagtgctaatgaggccaggttgccagtgggtcctcacctgagccagttacttatttatatgactccatcttattcctc

SEQ ID NO: 4414 - DNA, 471 bp, Homo sapiens
catctctgcccatgatgggcaggcgtcatcgtccctactgtatttgcagaagctactaggttcttggtatatgtcatctctctttcacaacaacgatgctgaaatatattttacttgccattcttatctcacatttgaggaaaatgaacctcacagaggcttgtggaattatccaaagccgcctcacttctaagtggtgaaaccagcattggacttctatatcgggctgcaataaccggttccgtctcatgcgccactttgcctctttctcagctcccatggtgttgagtggaagcctttattacagcactctttacagtgattgcatttagctgtgtagaaacatgttctgtgccccacacttttgctagaccttggacttattgggaacagggcacgtgctttttccatcactatcccatgctccatggtggctgaatatatgacaagtgcttgtcatccctgagaacc

SEQ ID NO: 4415 - DNA, 413 bp, Homo sapiens
agtgtccttcctaaaacataatctccatgagagcagggaccattctaggtacaggggatatgcaaggagcccctaagatatacctttgcatatcccctatacctagaatgatgtctggtacataataggtattcagcaaacattcattgtaatgaattagtgagttttactcaaaatgcaagaaagatgaattgaaactacaagatagtattttttttaacctaggaaattaggaaaactaaaagaaaaatggataacacactagatgaggaagattgtggtcaaataggtgttttcatgcattgctggtggcagtgtaaattgcttaaccatccatggagggcagtttggaaatattaatcaagattacaaatgctggcagggcatggtggctcacacctgtaatcccagca

SEQ ID NO: 4416 - DNA, 597 bp, Homo sapiens
gtatcctaggaaaagcagctatgcttcaagataaagggcagaactaaataaatctgccctgaaaagcctgaagcaagtttctaaggaaacaggccaatctgaaggaatttaacagcctcagcttcagaggaagaaaacaattcagagtatccgtaatgtattttcaccaatgacaagtgtataaattttaaggttactattaatttaaaaaattactacacaaccaaaaaggtaagaacatattaaccataatatgagagaaaaacaagaaacaaaaagaagttactaggaacaaaatgacagtgaaaagatattagaataagacagagggacaaaaatggctgttataaatattttaaataatctacaaaaaataagataaatagaaatggtgaagaaatgggtcatttcaacagacacatagaaattctgaaagagagtgagataatattctgaaacaaaaaaataaatacctaaaataaaagattcattgaatacaactacttccgattataaaggagtcactggtatcagacttagattcctaccatacatatatgctcacacacacacacacacacacacacacacacacac

SEQ ID NO: 4417 - DNA, 543 bp, Homo sapiens
tcgacttagtatttgtactctgaaatcgaatggcatgaacacatgtgttgtataagtgagaagaagtattctcttgtgtgatggactatagccttcagaaagcacctactattaaacagaatagagattggattttgaaatatgtaggccacatcagtaggaaagttgacacttcaaattgctcacaaggactttaaactctacaataggtaaaatgtggagtaccttatgttttcagaccaaatgattttgtaatttgaattcaaaatttttttagtcttcacagtagtcttagcattaaaagcatagttatttttaatattttgataaaatattctatttcattaattttgtataagggcatgtgtgagaagcattgatatttttaaaatataaaaatacagcctctttctaataagcaagagcaattgttgatttttaaattttgtgtttttggaggcttccattcacaaatctgattgtttaaataaatctgtctccagtaaatatgttggcacttagactacgacttcagtttctcat

SEQ ID NO: 4418 - DNA, 157 bp, Homo sapiens
tactctgtgtggcctctgtattatgacccaagacaatagcacctatgttcaaacagcagaattgatgaagggatgaaaagaagaggcaaattgtgtgtgccacttgtctcttaagaatgttttccagctgggtgcagtggctcacgcctgtaatcct

SEQ ID NO: 4419 - DNA, 502 bp, Homo sapiens
aaaattgtattgtttatctatatatattgtcacacagatagttaacagtgatcccacccaatacagtgaaagccatctccaacttaataatttttatccatatgtgacaaagttataagttcagctaaaaacctatttttctaatcataataatcttcatattcatggtattattgcaatatctaggaatattcaaattatgacaaagtcaaataagttaaattttcatctctaataaaccatgtagttattacatctaagaaaacattttaaaattctagcaataaaatcaagacagcacctaattctatagtcttacttcttataattcaaaacattaaaaataattctgtcaagacaagcaccataaaaattgtcaatagatacattataatttattcatatagcaatcctatttgcatagtattttgcatttattaattgtaaataggaatcaagttattttaatcttaattgtgtgtggctagggaagataccactc

SEQ ID NO: 4420 - DNA, 449 bp, Homo sapiens
gctgaacctcattttccattttaaacatctgtgacaagggtaatgagagcgcactcattgaacatctagtgcctgtgccaggaactgtgctcagcactttatatgaattctctcatttaatccccaagactgtcattacccccattttatctgaacccacatctgtctggctttattatcctggcagcactcgctggtggaggctgcaggaggatgttttgcaaagcacccacattcaagctttcccatctgtcaccagaaatattctgcaagcatgctgaggccaaacagccttcccccttcctccttccctgccggcaggcagccccgcctttaccaatctggcagagtaggcccctgggacaagaatcccagccccatctcactcacggctcttagaaaagacagtggctggccaggcgtggtggctcacacctataatcccagca

SEQ ID NO: 4421 - DNA, 585 bp, Homo sapiens
tttgttgctgacacatgactaagtggtctaattttgaatgtagtttagaattcttgtatcttaaacatattattctatagccacaagtatttttgttttgcctactcaaatatgtacagatttgtaccaaacaatctcttcacacagatgagaaacaggtgaacattggaaaggtttcaaaatgttactggcaacttcaatttaatattaaagtgcagttcggctcagtggcttacgcctgtaatcccagcactttgggaggccaaggcaggcagatcacctgaggtaaggagttcaagaccagcctggccaacatggtgaaatcctgtctctactaaaaatacaaaaattagcctggtgtggtggcaggcacctgtaatcccagctagttgggaggctgaggtagaataattgcttgaacccgggaggcagaggttgtagtgagctgagagtgtgccactgcactccaccctaggtgacaaagtaagactgtgtatcaaataataataataataataatattaaaggtgtggtataaatttctagtctggccaggcgcagtggctcacacctgtaatcctagca

SEQ ID NO: 4422 - DNA, 558 bp, Homo sapiens
atacattcctctgtccttctctttcctccctgaggtgattttggaagccttgtgagagatggtgctgttgcaaaatggaggaagactggatctctgcatcaccgcttggaggcgagcccctgctaactagcttacaggaataagaaacaaacttgtgctgtataaagctaccgaagtttctgatttgtttgttattggtactgaatatagccttatgctgtctagcaagcatcatttctggaaaaaggatgaattctcagggaatcttgcaaacattacatgtcattatccccagctacaatttgcataattcattttctgaggggaactcacagaacttagcaaagaactaccaaagataggtaggcagcactttgctgatcccatttgtttgagaagaaaaacaattttgagacagagtctcactcttttgcccaggctggagtgcgatggtgcaatcacagctcactgcagccccaatctcctgggctcaagcaatcctcctgcttcagcctcctgaggtagctgggactacaggcacacaccaccacacccagc

SEQ ID NO: 4423 - DNA, 457 bp, Homo sapiens
gactaccaaagaaaaagagctaagattccattagtttgaatccacataaagcttaaagccaaatttgggctaattaaagtcaggctctgggaaaacaaaagcataaaagcaggaatcatgtctgagtaagatgaagtaacctgtgggtatgaagaaaacaaagaccaacaacagccagaaggaaggcagaaaaagcactttgggaggataggagtagatacaggcatcatatcaagttgcctggacgagtgttgtcatccagtttctccattttgaggtttgagtgtgtgggattgaagttggggccatcagctgttgtttgtctgaatttaaatgttctttggtcctggaaacgttcatgtggtctaactcttcttttcatgtcatcatttgagatgtgttctatttcattgattcatttatttagcaactttaattcaacattaactatgtgcca

SEQ ID NO: 4424 - DNA, 532 bp, Homo sapiens
atgatacattcacacaatggaatactgtgcagtagtaaaaaagaatgaggaagttctttctgcatgtatataggatgatcttagagttacattgttatttaagaaaagcaagatgcttaacaggatgtactgatgctactatgtgaaaaaaagaggaaaacagcacatgcatattgtacatttgaatgtgtatatatacagacgtacaatatgtaggcatatgcatatacatatataaaatgtctctggaaggagcacagttgctttcaggagaggctggggtaaaaagggacttttcacagaatatcctttggtatctttgagttttaaatgacatgaatgtgtgtatatatattgatgagggaatctagagatccactgcacggagtaagaaatatgaagataagtgcagtgaagtgacttagaagggagagtcagagagaggaggcagtggtggttgaccctgttgtttggagtgataaacgctgtagaaagatcaagcatggggatgatgaaggaaaggtcatggtga

SEQ ID NO: 4425 - DNA, 574 bp, Homo sapiens
tagtaaactacgttcatataggcatatatgggctaatatgctgtaggtgcctatgtgatttagaagtcttaatgttatatatcatggccattgaataggctaatgtgtttgaaaatcagaattatgtcatgcaaacaaatgcaatgaaactgcattttcattaaattcaatttttgccccaaagaatgttggaagagtgtatcagaaattactctaatgtatataaagctctatgcatgaaatctcctttgatctttgctacatttttagttaacagaattgttaacctttgtaggcattgactacctattttattcatcactttttagctgaaaggttaagaaagcttttgtgggatcatgtattatgcagtagagagtattctaatgaaggctacgtaaatattgattagaatcaaaaatcaaaacttccttgaattggccgggcacagtggctcacacctgtaatcctagcactttgggaggccaaggcgggtggattgcctgggttcaggagttcgaggccagcctgggcaacacagtgaaaccccgtctctattaaaatacaaaaaatt

SEQ ID NO: 4426 - DNA, 484 bp, Homo sapiens
taatttagaagccagtcttgcaaataaggaggtgacatatgggatttatcatgagggggacagcagttacactgtgtgtccagaagttgcaggggttctatcaagaggatccagtgctcagtgaccgaggtgagagaggcaattttgcgtggctggaccctgtggtggaggcagtggtgtagccaggaaaagatttctgctggtcatttggactttgtttctgtctgcatgcactccacatctaatcatctggccctcctggagggtctacaaactgtctaatatcatttcatttaataggatcgtttcttattaaactagctaaagtcagttacatatagattttcattcaagaaccctgactaatacactcttctgtagcatcacaaccatgttagcttttgtactgtaaccaaccaaatccaagacttattgtcttcagaaaataataatttcttagctaattattctgtgaatcacattt

SEQ ID NO: 4427 - DNA, 605 bp, Homo sapiens
gtaaacacctgggaactagaaatctgagaaagaggacaacacccaacaccacctaactatggccctcgatacagtcatttaacttaataaccttccgtgagagtaaggtcattatgaaatatgctcggttttacacaaagctttaaaaaaagccacataaaatagtatatgaggtcacctctgattcctatgtaaagaagattcctcctcccttccctcattcattgttctccacactctactccacacctcccctcaccctgcaatccaacttatcaaaagtttaattttccctttccaaaagcaatgtacttgaaattcctattcttagttatgtgcattttggtttcctctttgattttcctttttttccaggtttcctgttgataccaacatgaatctcaagggcttccctttgcttcttttggaaaaaaataaagaaaagagactgatttagagcctatagggtggaaaatcacagccaggaaaaggcaggcatagcatgcagcagttcagagacagggctcacccgcccatctcttccatcagccacctccctggtagggcatcccttggaacagaagccagcaatggtcctgcaggga

SEQ ID NO: 4428 - DNA, 487 bp, Homo sapiens
accacagctataatctcaactatcttcaagaacagaaaaagttaagtaaaagagcaaagcatgctgatgtaaaagcaaataactatgcaagcctgctgatgaactaacttgtaaaactcctcctaatgtcaaggagaaaagggaggaagaaatagcctgacgctggtgagctggagggctctcttgggccagttggatagcataggcattagtcagctcctagtaatggttttgcaagtatgttgaccatattcccaaaccttcagataatttacaagaatacaggcatctgggccgggctcggtggctcacggctgtaatcccagtactttgggaggccgaggtaggcagatcacctgaggtcaggagttcaagaccagcctgaccaacacggagaaaccctatctctgctaaaaatacaaaattagctgggcatgatggtgcacgcctgtaatcccagctactcaagagactgaggtaggagaat

SEQ ID NO: 4429 - DNA, 444 bp, Homo sapiens
agcgcaaatcaccacctggagtacaggtgtgcccctcgacctcctgcggtttgttggcatgaagtctgtagaggtgccaagagagctgcagatgcacagtcacctgctgaagacacatgttcaggtgggcagcctccaaatggctggttattgcttctgcttcctgctcagcaaaggagctgacgttggtctggtgttttcagttgtctgattcatttgacaaatatttattgtgtgtcgttaggttctagaaactgatcctagtgttgttttggtactgatagtcagttacctcagattttcccttcttttctttttcctccatgtatttatttatttatgcatgttcatacattacatgtacctggaatacatgcacactataaaaaatacagagatacaagaatgtctgtttttatttttccaaccagtgagtagaaaaca

SEQ ID NO: 4430 - DNA, 622 bp, Homo sapiens
ttataccttaataaaaggcagaaagagagggagggaggcaaggaaggaaggaaagaaaagtgggtacagtgatccttgcctggcctggcctccaggacaaagtgaagaggctggtacccaggcctctctacaaatagtgggcagaatggcaccaagatatagtgttgacagcagacagaagagggagaggctggtgtcgggcctgcctgtctttctttagcccccatcctaggcgtctcccaatgggacattccctccatagtggaaggcagatagtactacctgatggaagacagaaagtgggactttggaatcacacctactggctgtgtgaccttggccatgttgctcgccttcgctgggcctcaggctcctcatctggaaaatgggaacagtactctcaaagaacttcagttgactgggcatggtgtctcacgcctgtaatcccagcactttgggaggccaaggcaggcagatcacctgaggtcaggagtttgagaccagcctggccaacatggcaaaatgccatctctactaaaaatacaaaaattagccgggcatggtggcacgtgcctgtaatcccagctactcaggaggctgaggcaggagaatggcttgaacc

SEQ ID NO: 4431 - DNA, 598 bp, Homo sapiens
ttaccagttgtcattaatgcaaagttcaatgatctctaaatttttctttccatttccatagccatccttgcttgtctcccctttcaccacactattttctacaccacatatttattgctgaatctccagaaatcctcacaagacctgacataaagtaggtatgtaataaatgttactgcatgaaattgaactaatataaataaaaacatggagaaaaaaaatgaatgaaccattcctgccctcatcttcttctcccttggcttcgatgacactacattgctcagcttcttctcaacccatgcttgctgtcttctccaaagtcttcgcctcctccctctaaatgcacttcctccacaagtcagatattttctcttctccctctcacacctttggataactcaatcttatgacatcaaccatcacatctactcaaagaacccacagatttcatcacgagtatgaattttctcctgagagtcaaggtcaaaactatgcctacctgtgtccacttgcatattccaccaacaattcagttggtctaaagctaaagagtatcactccccacagaaacactgtagctctgcactccttaccatgt

SEQ ID NO: 4432 - DNA, 75 bp, Homo sapiens
aacagatcgggagagtttaagctcttggccgaggacagagccagtaatggctctgtcattacaacatacaagggc

SEQ ID NO: 4433 - DNA, 612 bp, Homo sapiens
ctgtctgaaactgatggaaaaataagtaaagttatattaaagaccaggagaatacactgatttaattataattaatttgttagtgaacattaattagctgattctaaaatttatagaacataaaaagggctgagaagaaccaaaacaattaaaaagaatacttagaagacttacattgtcagagatcaagattgagtatagagttacagttaattgagtcagtgtacaaataaacaaaccaataaaattaaaagtagtatacagaaacagacatatatgtggttactcaatgcataacaaaggcaagactagttcaatagagaatgaatggtctttttagtaaatggtgccatgaaaatcctgactccttattttataatacacacaaaattcccaatgtaccataaatctatatgaaaatagcaaaacacagtagagcttctacaagaaagcctagaaaaatatcttcatattttgattagacaaaaatttctgaaacagaacatacctgcaaaaaactaaccatatagaaaaagaatgacaaattaaaatttaaaatacttgcatcaaaagaaacgatgaagagcatgaaggtgagccactgtgtgcaag

SEQ ID NO: 4434 - DNA, 142 bp, Homo sapiens
agacagggagaaagaaaatgaaaaacatggaagcagcttcccaaagcagggaggtgttgaagtgaatgataaaatctgaaatgatgagcagttaggagtggctagcatgtagggtatgtggtaggagaatggcagtcgagga

SEQ ID NO: 4435 - DNA, 442 bp, Homo sapiens
gaatactcgtgaataaactttgcaaaactatttgtaaagtactataaggaattctgagaagttactataagatagaaaagaatataggagcatgcccaagccatatatatgatgtttcacgtaatatgcttggtagacttgtaaaatattttagatgtggtgtaggaataaatctttgatgtaatttgtttttttgtatttgtttttgtttttgtattttgagacagaatctcgccctgtcgccaggctggaatgcaatggcacgatcttggctcactgcaacctgcaactccctggttcaagtgattctccttccttggcctcccaagtagctgagattacaggcacatgccaccacgcccagctcatttttgtatttttaatagagacagggtttcaccatgctggccaggatggtcttgatcttctgacctcatgatct

SEQ ID NO: 4436 - DNA, 628 bp, Homo sapiens
atgagtactttctatctatttgtctgaagaagcagggtatggtagagaagcctcaggcttcagagactatcagacttggattgcatccagccacctggaaactctcagaatgtcagttcagttactccagactcccatagaagaggaacagaatccctttacctgtaatacagatgcctcctcattactctctggcatctcctcccccagggctagattgaaaggcaagtagacctcagaaacagcatctcactgtccagggacacagatacaggacaaaacatcagaacctcactgcggccctctgctcctctcctactcaacacttcatcagccctgatgacaaagcagccacaggaactgttctttgtccttcctcagcccagtgtttctggaggtgctaatgagccctgggataaactcccctgacatagacagctggaaggagatgggaaggcaggagaggaaagcggcaggataatttataaattaaacagagaagcagaagcaacaccgcagttatagcccaaacagccttagagacacaaactacttaagatatagatacctatatgcaggttcacaaagctttttattttcttaccatcaagtttatttaccctgggct

SEQ ID NO: 4437 - DNA, 116 bp, Homo sapiens
aattcttttgaaaagatgtatgtgtggacaacctatagaagaaatgacctttctatttctcttctcaattccactagctaaaaccctgcagtgatattacttatcaatgctatgat

SEQ ID NO: 4438 - DNA, 609 bp, Homo sapiens
gacagaagggtgaattattttcctcttcgtttaacctctggacacttgtatgccagcatacagggataccctcggttaaatgacatccagaaatgtctccaagttccaagttccaggttcaaggtcatgaccgcttgaagacttgttacatgctgtagcacctcattacacctgatgggaatgtcaccatccaagctcaggctgctgtgtattctcatgggggtgttttctccctttgcttcaggtgaagccacaaacactgccccatctaagtcccctgagtgactgtacttcctgtgaagaaaagaggaggctcattaggaatatggatgaaatgttcaccaagaactacacctacctggagtctctagggtcacaggaaaatcctctattcccatccagcagatcttatattcaccaaatgggagaaggttgatggatttgtaaacgtgctatggtgcaaaactcacatgtagtccataacactgcaatagttatttcagatacaataggctatctattgcacatcttgatgcaacctggatgggtaattcccacaatcatgctccagtgagagaggacacagaatcagaagtggagacagggagg

SEQ ID NO: 4439 - DNA, 533 bp, Homo sapiens
gcatgtgcacatgtgtgtatttaatagagtagcatcaaactatataaactattgtcctactataagctgcattgtttttaatggaacaaaactattttgggcatctttctatgtcaaatacacaaacttacttcattctcttagtagcaacacaccattccactgcgttcttaaatatatcaacgttctctttaactctgtaaaagcttcattaaaattttaattataattgacttaaattgataaattaatataggggagaatttacactttaaaaatacttagtatttctttttttttttaaatttttttaagacaaattctcactctgtcatccaggctagagtgcaatggcacaatctcggctcactgcaacctctgcctcctgggtttgagtgattctcccacctcagcctcccgagtagctgggactacaggcacatgccaccacgcctggctaattgtttgtaaaaatatttatttttcctatcaaggaacatggcatatctttccatttatttaagtcttctctt

SEQ ID NO: 4440 - DNA, 552 bp, Homo sapiens
gtgatttagtagacttcagtttctataacttaatcaagatagcaagtcaactgatactttcattaggatttaattttgagaggtattcccatcattatactactcttctgctggagtgacactaatcagtcatagcgttggaatcctgtttcttcctggcagagtttaggttttaaaatgataaacccctacattttatgaccctcaattcccatggtggcagcaaaaccatggaagtcctggttaagagagattaatggacttcctaaatgtctgcatctggttttccagaatgacttttttctctagatcaattttaaggtcacagcatgaaaatcacacatgtatacatgtaatccatgaaccaagaaaacaagggacaagagagaagatatgggtcatcccaaatcaactgtattagttaggaatcttcattgcaagtgacagaaactcaactccaaacagcttaagttagagtttattgacttatacagctgaaaaagaatggatgaacaagcatgtctgcacccagggacccaaatgatagtacca

SEQ ID NO: 4441 - DNA, 561 bp, Homo sapiens
tggactctacgcatatcatcccatttaatcctcacaatagcactgtgaggaaggtactgttattctctctgatttacatacaaacgaggaagtagattttgaggtaaggaaaagagccaggctcaaactggccagcccgctgcagagtctgggtcagagccactgggctgacatgtgccccatccactaggcttaaaggatactttgttgcttcctaaccaagacaggctacgtcaaaggtcagtaagaccttggccacttaaggataaaactggatgactaaggccgggcacggtggctcacacctgtaatcctagcactttgggaggccaaggcgggcagatcacgaggtcaggagatggagaccatcctggctaacacggtgaaatcccgtctctactaaaaatacaaaaaattagccgggcttggtggtgggcgcctgtagtcccagctactcaggaggctgaggcaggagaatggcttgaacctgggaggcagagcttgcagtgagccaagatcaggccactgcactccagcctgggcgacagagctagactccgt

SEQ ID NO: 4442 - DNA, 571 bp, Homo sapiens
gaagtaccagtccttgtcttccacagaaacactgatttaacaatatatgcaccaaaatatctttatgagaaatccagaatccagttaagaagttgcaccaccataggtgagcacaaagccaaaaatagatgcactcaaatggtcaagaagaagaatttcattttatatgcatcagcctttgccacaagccaacacaactcagaacccccagaagagaacacactggctcgcaatttcttcatcaaggggaaaaggaaaagtggaatgtgagtccaacaatctggctctttggaggctgcccaaatgattggtttctgtctcatctcacctagagtgttaacagaactggccttgtttgagtgtcttgggcaactgagaacacagaagcatggaaagaggcagcttgctacagcttttgtagtcaggaaagagaacacaatttgaggcttctcttttaagagagagtaacagagtgtgtgttcagtgttcaagttttcagagggtttcctgaggaattgataggtataatgcctcactcacagtgctggcagaaagtcagcatactttggat

SEQ ID NO: 4443 - DNA, 647 bp, Homo sapiens
accttaagcctattcttcctatagtccattttttatttgcacagtagacataacattaatagttctattagctttttgatggctaaatgaggtaaaagagagtgcttagaaaaatatctggcacttgataagctctcagtaagtgtttgctataattatttctttatttgagttgttatatgaggaataattaaaagattacaaaaatagcaaatgaagatgattaaagccccatttttaaaatgcagctggatatttgaaatgaacagaattatcctgcctagagtaaatcattctcttaattctctcttgacaatagtcccactgaaaatgtgcccatttactatgctttaattcaatttttttcattaattcaaacaaataaacatgtactgaacacccactaagttccagagcagatgcagtctaatgtggagatgcaaagaaaaataaggcagagtctctgtcttcaagaaattaatgatgaaaagggaaattgatattggcacagaaccagcccactccctgattcacaggcttacttaaaaaatgttagtgaacatttcatagcaactgataatgcaggtaaaactaagagcaaagaactgtagcttgcatgcatttgtatatgaagaactccttttatg

SEQ ID NO: 4444 - DNA, 602 bp, Homo sapiens
gaataacctcggtggaccctgggacaaagggctgtccctagctgcttggtggctggacctggggtgacgagagcaggtgcacagtggatgaaacacagagggggccgagggtgtggacgttggattgggtggcttgcacacgtaaggcatgctgcagcaatgctgtttgctatctctaggaattatctagccctgggagggcctgtccctccggaggcagcaaggctccagatgtcaaagcaccacacaagagaaaataaaaagacatccttagtacatgactgaataagcaggaactgagtttagatgtcactgcatgcagtagttgggaacagagccaagaattacagacaccaccctccctccttctacgccttctccaagtcccaagggcgcattatgaaggaattcccattaagtctggccagacgctttacagaggaattaacacaggatagtaaactgaaatgagaaaaagagaaaagaccagaaacggaggaatttaaccgtgatcaaggaggagcacggcgcagctgcaggactgagctcaactctggctctcacctccatgccagagagaacctgagggtctctgtcagcat

SEQ ID NO: 4445 - DNA, 442 bp, Homo sapiens
aaactatctgaactgtctttattcactcttcagcatatttaagttggttttcaacctctgtcattccactgaaatcactcttgtcaacaaccttcatgttgtcaaattcaaaacacagtcttctgtcctccgtgctcattttttcaacagtccctgcttgccctttaaaggacttcttttgcttcagttacccttttaggtattgtcatagtcctttctcttgtctttctacttattttaaatgatgttatctacacattttttttaaagaaaatgatgtttaacatttttataatatgtatatatgcctatggttccctgatatctctgaatttcaattatgttcaactaatcacttaacatatctgcctagaaatctctaaatcttctaaaatgtacaacttcaaaactgaactctcaattattctccagaaatctctgg

SEQ ID NO: 4446 - DNA, 445 bp, Homo sapiens
cttcctctttcatatgcaaccaattccagaataaagagaattctgaggtcttagagaatagaagagccacctaaatgcctgcaccgatatgcatcagactgttaggtaagcgcacacacacacacacacacacacactcacacacacacaaagacgaagaagattatgttaaacttctaaaactctgtagttttatttaactaattaaccattaaactaattaaccagctgcctaatacagacattggaataaggagtgagaggctgctgtaatataactaaaatatgtggttgcttagcgattatcagcaggctagaattctagggattcatattatgcagtgcctaagacaactcaacaattaggaaggcaaatcccattccaatggaggctgcagctgtagagaatggggtaaaaaacagattatcatcagtgtaattggat

SEQ ID NO: 4447 - DNA, 552 bp, Homo sapiens
tatctcagagagtactgggattctgaaagtgaaaggtttatacccagtaaaagtatgggagtgctggaccaagctaacatgtacaagaagaaatatggtatatatttatggaaatagataatgaaaatgctgaattgaagagcaaagtttggacaatggagaatttttcagtttatcaatattggtgcactcttccatgaaggagtatttaactctgtgataagtaccctggaagaatgaagttatattacgactatgttggagcttgggcactagaagcatgctgaaagtgttttccactttaagtgaagtagaaatgctaagaggtggccggggatcacgaggtcaggagatcgagaccatcccggctaaaacggtgaaaccccgtctctactacaaatacaaaaaattagccgggcgtagtggcgggcgcctgtagtcccagctacttgggaggctgaggcaggagaatggcgtgaacccgggaggcggagcttgcagtgagccgagatcccgccactgcactccagcctgggcgacagagcgagactc

SEQ ID NO: 4448 - DNA, 558 bp, Homo sapiens
aaaccatactcctttacaaattatagaggtgctctgtgaaataggtgctactcagctttcacaatagcactgtcaccaccagctatgctaagcacctttttttttttaagcagctgcatccttctagggatgagccgtttttgtttctaaattttctgtcctaaataataatccagtctgactggatataagaaatatggtaaataatagtacctagcatacagtaggggtcctataaatatttgttgaaagaaatttaaaaaagaatggctttcctttcttttctttttttgagacagggtctcactctgtcacccaggctcactgcagacctggggtcaagcaaccctcccacctaagtctcccaagtagctggcactacaggtgtgtgccaccatgacctggctaatttttaaaactttttgtagagatgaagtctcaccatgttgcccaggctgatcttgaactcctgggctcaagtgatcctcccacctcagcttcccaaagtgctgagattatagcatgagccactgcacccagcctgctttaactttttat

SEQ ID NO: 4449 - DNA, 586 bp, Homo sapiens
gcaatacaaagaattcagaggaatctaaatccagttaaaataatataaactcgtatagtttcaccaaggaattatttctatgaagtcttggaaattgtccaaggtccaaactagaaagtctgagtctgaaacattactatcaaaagtgtaacattctcaactaacatgcaaataggtcatgcagagaaaatttgcctaaaatgtttgattagtgtaacctcaaaatccctaaaaaactttgttcttgggttttcttgacacaggcaaaagacattttgggggatgacaatagagttgttaagatcagattagaggggaaaaaaaggaaaaaaatagtgcttattaaaaggtcagtaatcacagtgtttattatttacatatgattttaacaattgtattaaaatcaagtatctattcaatggtgctggggaactgaattctcatatgcatatccacatggatattcagctggacactgacctcatactgtacacaaaaatggattcataatggatcatggataaaaaataagaggttaaactatatggttctttattaaaaagcataagactaaatctttatgatc

SEQ ID NO: 4450 - DNA, 573 bp, Homo sapiens
ggaagggtgagattttctactgcattagttgaggcaatattagctataacaaaacagatcaaatagtgtataatgactcattccaaataaacatttgtttttcatttatgtaactattgcaggttggtaggggactttctcctccttgcagatattttggaatccacctttgaagatgggaatacaacatgtgacttataagatttagtaaatagggaatacagagggcaaatggaaattcagtaggcaacaaatggtgtccaatgttataatcattcatgtgaagtttggtaaatatcccactccattgttttatagtctgaacacttgattttacatatttgtggtggctgtcaaagtgtgacactcagatatccttcaagatagaacatgaagggaaaataaaaaagacttatgcgtgtaatgattttatgggtgaggcttagaaatggcatgtctccacgttccaaggacctcttcaaggagaactacaaaccactgctcaatgaaataaaagaggatacaaacaaatggaagaacattgcatgcttatgggtaggaagaatcaatatt

SEQ ID NO: 4451 - DNA, 576 bp, Homo sapiens
gaaactaatgagcttcaattagtttattttgaggaaatggtgtcattgttattggcctgagtttccttactgaaaagggcagtagctggcaaagataaggtctagagctaatagagagaaatgaatagaaattctagatttcatagctattattaaaaagtcaaaaaataacagatgctttcaagattgttgagaaaagttgacatatatactgttggtagtagtgtaaattaattaaactattgtgaaaagcagtatgatgattcctcaaacagctaaaaacagaatgaccattcaaccccaaaatcccattagtggttatatacccagaggaatagaaatgatcctaccataaagacatgcacaagaaggttcattacaacactattcacaaaagacactcttcgacaaagacatggaattcgccagttcgctattcaccaaagacatggaatcagcctaaatgcccatgaatggtagactgaataaagaaaatgtggtacatatacaccatggaatatatacagccataaaaaatgagatcatgacctttcaagggacatggatggagctgga

SEQ ID NO: 4452 - DNA, 349 bp, Homo sapiens
acttggatcaaactactgagcctagggaagtgaccactaccccattttaaggatcaggaaaaggaactgtatgtgggacacgatggctcatgcctgtaatctcagcactttgagaggccgaggacaggtggatcactagaggtcaggagtttgagaccagcccggccaacatggtgaaaccccgtctttactaaaaacataaaaattatctgggcatggtggtggctgcctgtaattccagctacttaggaggctgaggcatgagaaacacttgaacccagaatgtgggggttgcagtgagccgagatcgtgccactgcactccagcctgggcaacaaagagagagtct

SEQ ID NO: 4453 - DNA, 619 bp, Homo sapiens
aggcaagaaacatagaccagtaatttacaaatgggtaaaccacatggttaatcaactcagggagatgcacatcttcacagtaaccagggaaatacaaagaagaactacaatgaggttttattttatgtttgtcaggttggcaaatacttaaaaatgtggctgtatccagagttcttgaggatatgaacacctataccctgattcttggagctattttggaaaataatttggaataaaaagtaaatatgaagatgagaatatcccataataataattatttctagttatatatcctaaaggaattcttgaacattaaatattttgtaaatattgtttgcaatagtaaataaaaacaacataaaaggccagccgacaagagtggaaaataagttgagctatggttatacaattgttataaaatatttgaaaataaaacaattagaagtatatttatgaaacatgagtgaatttcaaaatcagaacattgagtagaaaatgcaagtaagaggagcatttaatgcatgatgtcacttttgtaaagtttaagaacacagatatcaataaaatattctaagagttgagaaaggagagtagaattagaaaatgacataagcttgac

SEQ ID NO: 4454 - DNA, 569 bp, Homo sapiens
ctcagcctcctttgcagctatctgttgcaaagcgaacaagtgggagtggtgctggtggctttgcagttagcctaggattgagcaattgctgcaattgttgctctctgcatcttcggtgttacttcttactggttgtgacagtggtttcctccctggatgagttctacagcatggtttggggtacatttcctggctgcctagctttgatctggctctctagccttctcaacagttctacaagttccccactatttctgtgataaacctatttattgttaatgtcagccataattggcttctgtggtttatattttttaaaattccaagatataccaacgtaacagatagctcaacaaacatatgtctttttaaattaagatatattctgtgtcacatgaagtacaatggacaaaatgcaacaaattgaattgagctaaagaccaaatatatattaagcctggctggtcttaaaaatgtaactggatacagccaggcatggtggctcacgcctataatcccagcactttgggatcctgaggtgggcagatcacctgaagtcaggagtttga

SEQ ID NO: 4455 - DNA, 552 bp, Homo sapiens
aggtcaaacagctgacagtgatgaagccagacttggagctcagctctgccagattctggaatgcatctctttccatagtccttgtctgaggcctgcttaaaatatggcattcccatgtattctccaattcaattgtcataataaccttagaaattcaggtattgttgttagtgcctccatttcacagagagaaatttcatcaaggaggttaaatgctttgactgagacctcacaacttttgagtgcatggtagaacttgcacctgaatttcatagacttgaacttccgatattttttattatactatatttaaagagcataatccttcatctttccatctgcccatccatccatccatccatccttccatccatccatccatccatccatccatccatccatccatccatctttccttccatccatccacccatcaggccattcactcctcagcgctttagtacaatctgactctatctcatagtttttgccttcctcttctccattccaccctcttccctaccactagccaaaaaaaaaaaaaaaaaaaaa

SEQ ID NO: 4456 - DNA, 508 bp, Homo sapiens
agtgctccctcccaagcaagcccttgagcccctcatctctggaggcttctcctccatgctgcctgcacccccaccagccaccagaaccccttcaggtatagacagaaacagattcagtcaaattccttggtgtcccaggtgacgtctggccaggggagccagcccctttaagttacactattgcatggctcacacccggaatcctagcactttgagaggctcaggcagaaggattacttgaccccaggagttccagaccagctggggcaacaacatagtgagactctatctctactaaaaatgaaaaaaaagattagccaggggtggtggtgtgcacctctagtcccagctactcgggaggctgaggcaggaggatcacctgagcccaggagtttaaggctgcagtgagccgtgatcgtgccaccgcactccagcctggacaatagagtgagaccctgtcttgaacgaacaggccaggcgcagtggctcacacctgtaatcccaggac

SEQ ID NO: 4457 - DNA, 450 bp, Homo sapiens
tatttagactactgaacctacacaggaattgggtatttacttttagaaatcagtgtccatctagtcagagcccaagtggaaatctcttcagattacctatcgaatagatatgaagagatatcgaataggtatgaatacatgtcaaatcctgtcttgacatgtattattgcaaataaaacttagagagctagtgccttactcattccaagcttagatatcctgatctacaaagtgtggttaatacgaaggttaaatgtgataatgcatgtggagtacttatcatgatgtctgctgaagacagtagtgggagttttatttgtttaccactgtattttcttcttctgttctactaccaagtgttgagagaatccctgtggaaacttacataatattttttcctctagacagacagacatgcacacctacccacacacacactcacacatacat

SEQ ID NO: 4458 - DNA, 400 bp, Homo sapiens
tttgcttcttggtctcatttcttatttttggtgctcatatttattttcctggagttcaacaactctaagtatcttcttcaaaaagggttccagagcagcaacattttaagatgttgtctttctgaaaagaacttcattttgccctcacaatcaatttaaaaattggccaggtttagaattttaggttctaaattatttttacctccaaaatttgaggcatagaatcactttttagtgtatactgattctgattttaaaaaaaatctgatggcaatctgatttacatttctggagatcccattcttgaagaattcctttgctttcatatctgctgacttctttattctggctcctttcactcttagggttgctactatgagtttagggggaaaaaggagac

SEQ ID NO: 4459 - DNA, 91 bp, Homo sapiens
aaattatcgcaagaacatacaacaggaatataatacagtctagcctggacgcattaaggaaaagaacagataaggtagggaagagacatct

SEQ ID NO: 4460 - DNA, 117 bp, Homo sapiens
ttggggtatttgatctaagtttaacatattctttacaagttaaaaacaaaattaaacatttaatttgattagggtaggaaagtagaggaaaattatagaaggcataatttctacata

SEQ ID NO: 4461 - DNA, 609 bp, Homo sapiens
atttaaagaaatgaagatatgtccctatttctgtactgtataatttcaattgtttttcgtttgctctaaagttcttatcatcaataattatgtaacactattatatactcactatgacacttttaagaatggaaaaactattcttaggcatattttatttttaaaaacttcttaactatataataaaagagcagagatttttgtttcttttttaaacatttactggctgaatattttgaaatgaaacttactatttgtataagtttcaaaccagagttgtttccaggccaccagaaagaaatctttacctgattcaacagtattacagaaaggcactaccacagcagggagtttttgggtaagataaggaagaattcaggctctgcaaaaataatcatcttggctagagtagtaaggtttttttcgtgtgtgtgtgtgtgtgtgtgtgtgtgtttgagacggagtcttgctccgtcacccaggatggagtgcagtggtgcgatctcagctcactgcaacctctgcctcgcgggttcaagcaatactcctgcctcagcctcccaagtagctgggaccacaggcatgcaccaccatgcctggctaattttt

SEQ ID NO: 4462 - DNA, 606 bp, Homo sapiens
gctccgaatcatatagcaagctagtgacaaaaatgaaataattctaatccaattatttccagtttacttcagtttctactatctcacactgtgtttcattatgggaatggatgtcctgtctttgaacataaataatttgaaggctatctaaatgttgttatttttagttttaaaggcattctatatatgtctgtctgtatttatccacacattataaatctcatgtgtgtgaatatatttatgtctttgtttatgtgcttattcatgtctccatgagtcttacatgtgtgtatgaacctgaatacttgtgtttatttatttacactctaattataattgaagaaaaagcagtggtaagaggatcattttaaacattctatattttgatgttgtctagcagggaaaatacacagctctactgggtacagaaatagcttctctggaataaactgcattatatcattaaaacatttagggcaaatctcaatttggcaaaattgattcattcagtgtctcagacattaattctattaagtataaacataaaagattgggaggtggaattaatgagcaagtcacatagctaaggagatggcatttcttttc

SEQ ID NO: 4463 - DNA, 511 bp, Homo sapiens
tgcaaaatgacccagaggcaggggtcagggggagaggtagagatgagacaagaggtagaggggagaggtagaggtagccacgagctgataattacagacaagagatgcggagtatgtgggggctcattatcctgcatagtctatctttgtatatctttgaacttttcaagaataaaaaagcttaaaaagtatacatggcctggtcctaccagagactcacccaatgccagcctccagccagggagagccaagtttgcattttcacacgcatctcacactcctctgcactctcaacttggagcgctccaaacagggaaaccccaagccttgctggcttctgccaaccccctgagcagaagcatgggtccccctgatcaccacctcaccaccctcatcctgatctcactgtacactccctttcctggtctgctaagtagcgggtgtttttccttgacactaacgctacagctagaccacggtgggcttggcaacaggtgtcttcccagatgct

SEQ ID NO: 4464 - DNA, 541 bp, Homo sapiens
tgaccatgtttttgccaacaaatgcaacactccattacttgcagaattcctttgctaggtcctggactacccaggtctccctgcttttgaccccttgtcgtttattggctgttctataatttcactgatggaggtggaggggatttagaatctatcacattagaacatggtgaaatatttactggagggggaaaattaaaggccttggtaagcagacgtttaaaggttgcctggaaattttgtttctgcatgtattataggaaaacaaaacaaaataaaaactctgcctagtaaggattttgcctttgcctaatagttattgggccttaacatacatatctggccaatgggtgagggcttgaactgaaaagagtttgattggtttacaatgggaagggtcgagagtacgtaacttcaaggaagagaaaagagattgaaaagaaatggggctttcctcataacgcaatagttgtgatgatgaagttatgatgaaaggtgagtgaagaggaatttggctgagtgctatgaatggaattccctc

SEQ ID NO: 4465 - DNA, 559 bp, Homo sapiens
atcatagatgacatcaacaatggcatagtggaatgtccagctagttaacaactacaaaggaaaatatttaaatgaatgatcatttgacaacaacaacaaacaaaaaaacagtaaaaggatgaaacaagatacaccaatgtaacactgaccaaaagaaagctggagtagctatattaatatcaaacaaacaatccagagcaaagaagagagagataaagagggacattacacatgataaaaggtcaattcactaagaacacaaaacagtcctaaatgcgtatgaacctaataacaaagcttcaaaacgcatggaccaaaacctgacagaactaaaaagagaaacagacaaaaccacaattatagttggaaacttcaatacttctctctctttaattgactgttagggcaaacagaaaattcaggaatattaacattttagactggataattatggtgagagttgtggggtaaggctcttctgtgtattgtaggatgcttagcagcatctctggtttctacctaccaggtgccagcagcatcccctcctaagctgtgatta

SEQ ID NO: 4466 - DNA, 587 bp, Homo sapiens
cataaattggatggtaattagcttctctaagctgaagtctaaattcaagagcatttagaaatgagtctgcaggtaaatacgacacaagagactagactccaagcagagaactccatgtttgctctccttcagtgagaattctgttgatgtcagagggttaacagaacttttaacagttgactggggccctggagttttcatgatttggtccacattcaaaaatataaaagtcagtgaagcaaatgctgtacaacagaggtttttcagggaaaagggataagcttgatccaaaaatattttggagggtggagacattccaagcataccattccgtgcctgtgccaatggaacgtgggcacagcacgggaacaatgttcaaggctggagagctttagagtaccggggcaattttgagtgaaaaacacaaagaagtgaggaatatccatctctgcccccatcacacacacacacacacacactcaaacacacacatacacacgcacacacacatacacacacacaaacacacacactcaacgcatacacatttccctatttacagtagaattataaattctgagtaaatt

SEQ ID NO: 4467 - DNA, 468 bp, Homo sapiens
ccgtttctcacaattctttgcaaactgtatattcatgtgttgaaaaatttaatatcttttctgacttctttggaatacactaggctaatcttcaaggattgtaaactccatgtaggttactggttttactctaagggtctccaggctaaacatgtagtatttgcttaaaaagtgcatgaaaataaagtgtggagactccataagataacattctgcttcggtgaagtaaccaaaacagaaattaagaaaacaattttatctgcggtcgtgtcaaaaataatatacttaggaataaaattaaccaaggatgtgaaagattattgcaccaaaaactgtaaaacattgatgagagatattgaagacacaaataaatggaaagatatctcatgatcatggatcagaaaaatgaatattgtcaaaatattcacactacctatggtgatctacagattcgttgcaattcctatc

SEQ ID NO: 4468 - DNA, 558 bp, Homo sapiens
gaactcccactgcctaattgaggggggcaatttgagcattaaaataaataacagtgttaatagattataatccatggaatggtatggaaaatgattagttgacagaaatatttaaaaagttttatgaagaatatgatctatacagaatttcaaagtatttctctacaaaatacttcttaaatacaaatggaaaaagtgcaactttactgtggagaaggctgaataataacacctcagtcaaatgagtaaagataatcagtaataaggaaaatagaaattgtgaaccacctgatagagtgcaatgagttgtccataatatttctgctctcccactatagctaaacatggacctcatgggagacagtaagggggaaaaaatattaaaaccagagcctaaaataaggtgacagacaaccaagctaatcagctatgagaataaatgcaagtaggttaaacttccctatcaaaagatacacacacacacacacacacacacacacacagagagagagagagagagagagacaacatatactctatgctatgctcaaaagtgac

SEQ ID NO: 4469 - DNA, 552 bp, Homo sapiens
ggaggatgcgtaagagaaatgggagggtgtgaagatgaagtaagattgatcacgagtaggccgagtgtgatggctcatgcctataatcccagaactttgggaggctgaggtgggaggataactcgaggtcaggagtttgagaccagcttggccaacattgtgaaaccctgtctctactaaaaatacaaaaattaaaaattagccaggattggtggtacgtgcctgtagccccagctacttgggaggctgagtcaggagaatcacttgaacccgggaggtggaggttgccgtaagccgacatcataccactacactccagccttggcaacagagtcagcctccatctcaaaaaaaaagaagtgtcagagctgggacccaaacctgggtctcattctggagtctatttggttctgcctttcacataaggtgggtgggcttgtcagatgcccataaaggaatcaatcctgtaaggcacctggcacagtacctgacacattacaaacacccaaaataggactcgaatcaggtgaagtaaactacagctccacacca

SEQ ID NO: 4470 - DNA, 573 bp, Homo sapiens
gtgtgcctgtttgggtctcagagaggttagtgctgagttgaggagtagggacagaccttagataaaatccttcactagtagcttggctgcaggagtgtggtgtatgggagctatgccctagagggctccctgaattcctttgtctatagggtggtgccacatggtgtttacaaaacatggattctgggatcagagtgcctgggttgaaatcctcactctgcttttagctttggcaggtcacttgaacctctctgtgtctttagatgtttcttcatctgtaagatggggacaatgactgtacctatcaacttagaacggtatctggcaaattgtacatgctatataggaattagccattatcactactactcctatgaaggaagccccttcctaaggtgaaatgtggcctggttggcagaggagctgtggttggttctctttggggagatctcctaaggtcaggctagccagagggagaaagaattgtgcttccttgttgagactagtctttaaaaggaagctgggcagtaagtgattggtgccaaatgtcaaagaaactatttctcatctcag

SEQ ID NO: 4471 - DNA, 541 bp, Homo sapiens
agcttgtccagagtggcatctctgatgcataaccagtactcaaaccagtatttttctgacaccaaggcctgtgtgtaaactgtaaaagggctgtttggtacctgctttcctaaagttgtctgatcccttctcagtccaggtcttcctgaagcttggcacttctgaagtcacctttctgaaaacattctggtaactgttagatcccttgttgtagctattcatatgttctgtgtggttaaacaaggttcacagtgggccacctggcctttggaacttggctgaagaggctgccttcagttcatcctccccacccccattttcaaaacatgggtttccatgtgttagttgtaaattaggaaacataaccatgttttgaggcttcatagaaaacaaacgtctggggtcacacaggttaaaggaggaaccaaattcagcactatcactgttctattcagcaggcaattctggggccttcctgtgtctcaggttctgtactagttgtttcaggactttgggataaacacaaactatccctgccctc

SEQ ID NO: 4472 - DNA, 540 bp, Homo sapiens
tgcgcccagtcccagccctggatttgaaccagtgttcactgaagcatttccaagcctgttgttgtgccttcaggtatatgaaattcaacacatattctaaaaaggaccttgccaatgttcagtagaatggaaggccatcccatgagtttcagaaacactgatgctgctttaaaacaaaaaactcccggtgattataaggcttacctggagtatctcaaatatttcagtagcgaaaattcaaagacaaggaccagcaggaatgccaattccatgttgcaatcacgcctccccacccacaagcatgttattagtgtgtgcttccaatgcataattacctttcattttcccatagaatttcaggaaaaaagagcacagggctcagatggtttgtgaaatcaataggtgatttcatctcttacatgcaaaaataatcagttctattgagaaggaaatgtatacacacacacacacatacacacacacactacacacacacacactggaaagcccacattcaacagtcaaggtcacacacacagg

SEQ ID NO: 4473 - DNA, 409 bp, Homo sapiens
tgttgcccaggctggagtgcagtgtcatgtctcagctcaccgcaacctctgcctcctgggttcaagcaattctccctgcctcagcctcccaagtagctgggattacaggtgcccgccaccacgcctgggcatacatgcacacataagaagaaagcaaaaagcaagcgcagcaaaagtttaacagttggtgtatttaagaggctaattgtactttttaaaaaacctttctggaggtttagaccttacaaattaagaaattggggcagccggcagtggctcatgcctgtaatcctagcactttgggaggcaaaggcgggtggatcaccagaggtcaggagttcaagaccagcctggccaacatggttaaaccctgtctctactaaaaatacaaaaattagctgggcatggt

SEQ ID NO: 4474 - DNA, 465 bp, Homo sapiens
cccgggattaagttgacagccgtttatttcctaaatataaggtctccttgaaagagtggccaatgagctgagactaaatatggcagccaaggggagtcatggaaggcttttgagcaggagaggatcccaagctcagattccagcctggtcttgagggtaaagcacactggataagacttaggagaccatggagtctcttgaaaactaggctattgcctctgggctctgtttcccttgcagggagttcataagaaggcaaccacttcatgtccgttttcttccttcttggtcttcttcctctttcctctattttcttcccatccctccccagcttctctcccaccttatttttattttccaatctgaattcttcctcctccaaataccttgtgtgagttctcctctgtcctcccacttctttcttcagctcctcatgggcctgtcttccagggagaccttatattt

SEQ ID NO: 4475 - DNA, 526 bp, Homo sapiens
tctcatttgtaataagtcgtaggggctcacgagaaaaggaaagataattcaattttgaatgtatgtttacatttcctaaacagctcacttagcatctgaacccgaatgcacacaaaaaaataaaacattgtctttaaggaaataaaatgcagtgggcctaacatggcccccaattggccaagtcctcttctcaactaggaaactggccactgtccactctgggcctgtgactaacacagaggaggatctcttgtccttaaccttttccgactcccctcccagaagatggcagggctcaagaggcctgaacgggaaagccccgtgtgggctccatggcgacctcagcaggcgagcccacccctctcccgggaggactaacagtgggaagacttctgtgggtgggagatgaggaccccagtctctcagcctggtgtctgtaaaactaggagaacgggcccatctgcgggtgctggggagcctgtgggacacacaggaagcacttgtgtgtccaggcccagcggtcctg

SEQ ID NO: 4476 - DNA, 505 bp, Homo sapiens
gttaacagatactcaaggtagaaaggtcaaaattctgtagtcttctgaaagacttgaaaatagaatgactttatgtggctttaaaatatcaattaaggggaaggaaaattagtgataagattttcaagggggctgaattgtgcacatgccatttttacatttatttttaatttacatagaagttaaatggactagattggatttattttttcatgtatttgttttttttgttttggttatattagtagctttctttttgttttttaagcatattatcaggcccgtccccatcttgcaagatggttgtggaaacaactgagaagctggatactaaggaaaattatttttatagaccaatatctttatttaaaagaagctaaaaacactttcttatttacattaatgaaagtctgtgaaagtagggggaaaagaagcatgccattaattttagttcatgttcctttatattttgctcttctgtcctgtgactaccagcctttaatct

SEQ ID NO: 4477 - DNA, 598 bp, Homo sapiens
atgctaactgagttaattagatgagattctgtagagaaaatggacactataagaaataatagtgtccagaactgagttataatgacctctaatatttaatgataaatgaaagaagaggaactgatgactgaatctgagaagaaaccaataaacttgtaataacagaagaacaaacccaggtggtgctaaagaaatcacagttcatcaaaaaggagggacaagtggacttgccttgttaaagatggactgccttaccaaatatgacaaatattaaaatatgtttagatttcaatgatgaccaaatatgtaaataagacactggaatttattcgtcaaattcctgataatattaaatgttacatgagcaattggatgttaaagcacaacttttcggctgggtgcggtggctcacgcctgtaatcccagcactctgggaggccgaggtgggcggatcacaaggtcaggagatggagaccattctggctaatacagtgaaaccccgtctctactaaaaatacaaaaaattagccgggcgtggtggtgggcacctgtagtcccagctacttaggaggctgaggcaggagaatagtatgaaccc

SEQ ID NO: 4478 - DNA, 601 bp, Homo sapiens
cacagagaaagacagagacagagagaaagacagagatggagagatagaaacagagagacaaatgggaaagaacaaagtataccccaaagtacagtctgctagcagtagcctgaagtctttctgaccacttggcagcagcttggaaaatgttcctcactaccttcatggaacctatcatagcataagaaccagcccaaagtaaatggatgggactttgaatttttgtttaaaaatgatggcttgtgcctggtcaaaatggtgtgtgaatggcttatgcattgatatatatcgattggcataagtcagagcgcttcagacctggtctcggtctaagagatcctcagtggagacgtggcgtctttggtcatctaaggtccctgcagcatcacaaagggaaagggcggcatcttctagtgtttacacagcccaacagaaatcctgtgttcttgtaaggaggtgaccaaggtggacctgaacctggattttgtctggttttatctgaaactaggcaatgctgttatgtaggttgtcagaccagcagctctgcagctggctatatgtgtctttgagtaataagagaatcactagaggaattaaatga

SEQ ID NO: 4479 - DNA, 603 bp, Homo sapiens
agatgacctctatatgcaatggtcacctcaataacgctatttgaatgtcccataacagtcatcttaaacttaacacatttaaaacgaaatccaccatctttcccatccaaaaccactcttgtggtctcttagtgaatggtattatcattcatgccattgaccaaatcagaaacctaggcattagttttgcatcctctttggttctttcatctcttttgactccacccaaaccaccactccatcatccaatcaatcaccaagtgatgctggtagaattgtaaatctgatgtcacttgttaaaaaagaaaaattaaggaaaaacccatcacagccgagtttcatctttttctactttttatctcctttccctattctctccttagacctctaaattctacctataatgtacttctttcagttttgtgactataattccttattgctctgaagtatttgcacatgttattccttcagcctccaagtgtcttcctccactcccaactccatttgacttggttcactcactactctcttccaggccatttacattctctaactacccatcttatttccttgctaattctctaagcgcatctttctcta

SEQ ID NO: 4480 - DNA, 452 bp, Homo sapiens
gaaaagaccatcctttcctcaatgatttccaatgcgttcttgaccctataattagaattaacttctgtaagcactcattagatcgttccactttcctgcctgtctttaacggcagaccattgctcttatggacaataatcagataatggtcagttccttgcgtaacaatacgcagcttgatctggccacctcctgtctctcctgccaaatcttgccttgtgtctgcctttccactctgaacatagagttctttggacaggtcacaccctcatcctcaagcccttcccatatagagtgttttcatgcccttagactagttactcaaacttcaggtctcatctcttccaggagccttctcaatagcacagtccctgtcccttaaatataggttgtgtgacttctatatatgcattcatggtcaggcacagtggctcatgcctgtaatcccagca

SEQ ID NO: 4481 - DNA, 485 bp, Homo sapiens
ctgaatgggaaagaactcagagtctaacataagatctaaaaatcaacttaagtacttttataattctaccatatttttcttattttaggcaaaggaatttttgtccattcttcagctccagttttaaggagagtagtaggaactctgaagacagaggcagcagtaatcaggggagaacgatacaaagaaatgaagctcaaaaagacagcaccagagtcctctctggccagccgcaggcctggtctatgaaaaccctgagtggttttaggcatcatttcaccatcctaagattcaaaacaaatcaagcaatcaaaggcagggctgctaagtaagcagctgcacaagcagagcagtgggagaggtgaatgggaccagggcctcgctggggtgggagactagatgggggtagcaaggggacccaagggaagtccaattaaaaagttttattggccaggcacagtggctcacacctgtaatcccagcat

SEQ ID NO: 4482 - DNA, 599 bp, Homo sapiens
gaaaagtgtatcaagtagaatgtgataagaaaccaaacagttaccttgccagataagagaagtactgagaagtatcctcctagatttagcaacaaggttactgttgactttggtgagaaatttcagcaggggtagtgagggtcaattccataactggaatgtattattggaaggaagagggaaaaaataaagaaagtcattagctaatatttttaaggaatcagcctatgatgagaagcaagcacagatggtcataaggaaagttttattaaaatagaaatatcttgagtacgtttacaatttgttggtaaggagggagatactggtcgggtgcggtggctcacgcctgtaataccagcactgtgggaggctgaggtgggtgagtcatctaaggtcaggagtttgagaccagcctgttccaaactgcgaaaccctgtttccactaaaaatacaaaaattagccaggtatggtggcacatgcctgtaatcccagctacaagagaggctgaggcaggagaatcgtttgaacccgggaggcggaggttacagtgagcggagatcgtgccattgcactcagcctgggcaacaagagagaaact

SEQ ID NO: 4483 - DNA, 511 bp, Homo sapiens
tgcatccggaaggtggaggttgcagtgagctgaaatcacaccattgcactccagcctgggtgacagagtgagactctatctaaaaaaaaaaagaaaagaaaaagaaaatatcttttcctagtttattgtaaattattttattaaaagtggatggagaattaattgtatcatcagaaaaatatcttttaaaagaaaaggtatcacaggagccatccatctcagaaaagcaaggaaaaaaaatatgagactttcaatattaaaaatgaccaaatatttaaattggcttctctctctttcttttcattaactgacgcttaccattagaggagaggtgactctagggcctagcatattgctgaaaacacagaagggaataaataaattatgtatcgtcggaggttttttactggggagagagctgtaggtaattgttgcaccacacagatgctccctccaggactgaaggacttacccctccagctgctgggattatagttggctgacactctcc

SEQ ID NO: 4484 - DNA, 595 bp, Homo sapiens
atgagcacattttagaacttggatagcttctctcctgtgaatgcagatattctccctttggttatggaatagcaaacccttagagaataagaaaactcagatagctaacagatgaaagctgagttgctttcctgatattatagagtatactgcagttgatgaaaatacaaagtttttgtaattcagaacaagtgtttgaggaaggtggttcatttcctttaaacattttttttaaattgataagtggaccctaatcaagctgaagagcttctatagagaaagagagctatcaaagatgtaaacagacaacctaaagattgggagaaaatattcacaaactatgcatccaactaaggtctaatatccagaatctataaggaacttaaacaaatcaggaagcaaaaaccaagtaatcccattaaaaattgggcaaagaacatgaacagagacttctcaaaaaaagatgtgtaagtggtcaacaaacatgaaaaagtgctcatcatcgctagtcctcagagaaaggcaaatcgaaaccacgagatacatctcatgccagtaagaatagctgttatttaaaagtcacaaaataatagat

SEQ ID NO: 4485 - DNA, 103 bp, Homo sapiens
ggaaaaaaaaacagctactgaagacaaatttcattctggaaaaaatatcccatggaaacatatactttccagcaaaaaaacactggaaaacatatacatcgga

SEQ ID NO: 4486 - DNA, 581 bp, Homo sapiens
ccttatctttataattaaggtcttcaatcaatcccttttctggaaactactatagtttcccagagaaagcaatagttgtttagcaaaaacctctgtccatgaggacatttgaattaataagtgcctgagtgttttaatttgctgagagagaaaaaaaaaaatcgggactaggaaccaaaacttagttccatccaattaggatccttccatgacagcacaaaacccttaaaatttgtgagacaatttcaagatttcttcttccacgataccgaagtctgacaatatatgctgtacatgatcaaatacacaataatgaatatgtgacttatgtttaatactagattgaattttaacatacatgttctttcttccaaattccaaaagcttattccactttcccccttctctcccctagccatcccctgcgtaaatatacaaatcttagaaatattggagagaaaaaaatgggaataagtaggaagaaatgcattttgtaaatgcagccaggcatggtggctcatgcctgtaatcccagcactctgggaggtcgaggctggtgaatcacttgaggccaggtgttc

SEQ ID NO: 4487 - DNA, 624 bp, Homo sapiens
taataatttacattgtaaagcacaagacaagtcttcccattaacccttacctcagcatttccaattcttacaacacccacttcatatcaaatttggaattacaaacacatgtcaagactaataatcattaaaactatctgaagttaatgattttacctttttactcttattataatgtccaggtcacaattccaatagacacatattctaaaattttgttgtgccacacattatggctacctgatttttgtcaagggtcaaacaattcaataggaaaaagagagtcttttcaacaaatggagcagaaacaaccagatatccacatgcaaaaaaatgaagttgaagacaaaaattgactcaaaatggaccagagacctacacataagagctagaactacaaaactcataaacgaaaacagctgtaaatctttatgaccttgaattagtcagtggtttcttagataagccaacaaaagcacaaacggcagcaaaaaaaaattgaacttcattaatactaaaaattttgtgcttcaaaggataccttcaaggaagtgaaaagacaactcatagaatggaagaaataaatatttgcaaatcatgtatctaataagggacatgtagcta

SEQ ID NO: 4488 - DNA, 557 bp, Homo sapiens
tttgggggatgccttctctggaggggttaaatctagggcactctgcttgccctactcaagattgagcaagttctcttggaaccaaggggagaccctgggcacttgagggtggagactgtcagcaggcacagggaatggcgggtgaccttgaaggtgagccaggggaatatggggcgtgtttgatcaaggtcatacctgcccagggtcttgctgagaggagaaggagccaaactgggattcaaatgcaggtctaggccgggtgcggtggcttacgcctgtttttccagcactttgggaggccaaggcagatggagcgcttgagcccagcagtttgagaccagcctgggcaacatggtaaaacactgtctctacaaaaatacaaaaattggccaagcatggtggctcctgcctgtagtcccagctacttgggcggctgaggtgggagggtcactgaggcctgggaggttgaggctgcggtaagctgcaatcacgctactgcactccagtctgggtgacagagggagaccctatttcaaataaagaaataaaagcaaaac

SEQ ID NO: 4489 - DNA, 429 bp, Homo sapiens
attgagctctgtgaggtaggatcccagatcatccaagtaggagggggaaggtgaatgggtagggtttttgagaaaaagaacattattgtgaaaaatgagaggaaaaactgacaaggaaacaagtgctgagtggcagcgagggtccagttaaggctggaaactgtgaatttacagcagcagcgttctgtctagttgtgggattttcctctaggaatacggttataggaaccaagatgctggctatttggaagggtccagaatcgcctggtaagacacaacagtggggcaagggatctaagcctgtgggctgggcagagtttgctgtgctacgctagggttctggtctgagaagggaatggaagggtggagttctgatagggagaaaactgtcaagggctttttgaaagtgaagacgtgggaggaagtgac

SEQ ID NO: 4490 - DNA, 352 bp, Homo sapiens
attatctcctttttctcctcagttttctgcgtctcctccttacatggacatgaaacatcgtggaatcaattcttcatggccattatcttttctcctctattatttttgatctccttgttcttcaaatctgttattagagatttacttgacttttactatcaaagtactggcttgactattagcctcatgtaaccaatacattatctttttctttggtttcttcatgtttcttttaagaaaggaggctttcccaattctttctgttagattgctcttttttttaaccacaacaaaaaggtgtctacaaaagaaaaaaggggcccttttttcccaaaaccccccccggaaaaaa

SEQ ID NO: 4491 - DNA, 559 bp, Homo sapiens
cagtacaagatagagatttgccacaggcctttcaaccaagcatactgaaaaaacaatttatttgttttaaactttctctcttcttgcaaatacaatattttgctattattgggaaacagaaattgataaaccactagaagtcaagtgatagtccttgatggctaggtgttatgacattatttgcttgtgtttgatggaagatggagtttctggtattcctacacacgctgtctatcaaaacacagagatggcgctagtgaaaaatcagaaaactaaaacaagaaacaaatttaccaaaggtgaaaaaaatcaccacgctttaaaactgcatttatttaaggaacataaatttaaatttaccgattcaatttatgttagaaagtgagatttaaaataactgctaaagggaaaacagtgatatataaaatgacaagcaatataggctagaatgttgaaaataaaactaaaacccaagatactaaaagaatcgaactggccaggcatggtgctcatgcctggaatcccagcactttgggaggccgagtcgggcggatcatta

SEQ ID NO: 4492 - DNA, 414 bp, Homo sapiens
ctatagttgtactttaggtacatgcaccttaaagcaatgtaaacagtgattaatatttaagaatcaatgaattttattctttttttaatttatttatttttcttctgagacagggtctcgctctatttcccgggctggagtgcagtggcatgatcatagctcactacagcctcaaccttccagactcaagcgatcctcccacctcagcctcctgagtagctgggactcaggcatgcaccaccgcacccagctaatttttgtattttttgtagagacagtattttgccctgttgcccaggctggtctcaaaccctggggctcaagcaatccacctgcattgacctcccaaagtgctgggattacaggtttgagccactgtgttgggctaaattttatacttatacttgctttcat

SEQ ID NO: 4493 - DNA, 454 bp, Homo sapiens
tgtccctgaattgcacctggagaacccctgctacagcttaataaaatctctaccaattaaatgtgatagccattttgtttcagtttgaattgttttcatgtttggctatttatacttcttttgtggtaaattgcttgttttttcttatgtgttgatttgtacagacgtttcttacgttgttattattaataatcctttttatgggttacctttaaatagtttttactattatgtatgtgttggttttaatttttacacatttatcagttatgtcctttatgaagtttctgcctttgtaacatattgggaattctcttctatagctagattatacagtgctttcctctttcactgataataccaactattaagcatccacagtgtgccaggaactgtattaggtagtgagcacaaattggtaaacaatggataaaggtccctgcccttatttgac

SEQ ID NO: 4494 - DNA, 578 bp, Homo sapiens
cacacaaaatgacctttatacttttattcttgtgagctatggagcttaaaagcaaaccacttcaaccagatgttgatccaataaatttatcaatatttggggtttttagagtttcagtatatattcttaggtagagggaactttcatggcccatcaaaatctgctcaagctgtgctgggtgaaacagcactcatctataatactcatgtaacatgagccaatctgcagtcggttgttctgaattctacatcactcacagcgcaggttgatgtgtgaacactgtatttacaggaccaaaactgcacatttgctttgcagctgtgtttaacagttatcagtttggcacacagcatgactgctttggagggagaatagacacttctcatcccttttggcatttatgaagtaaccaaagtacctactgctgaagtgattcacttgagcttaattaggtttgctacataattagcatttgaagaaacctaaagaaaatccttgggggttggttatttgttatgtcaattgtaagcatgctcatttgggggggactaggaattgaaaatgatgaaatttaatgc

SEQ ID NO: 4495 - DNA, 627 bp, Homo sapiens
ctttaccaccgccaggacaactctcactcatccatcaggtcttactaagtgccttctcttcctgcctcctaatactcttcccaagaataagtgagatgcctccaatttcaccagtgagaggaaccagtcagttccttgagggaagaatagcatctagtaattcaccactatcttgtcaaaaaataacaatggcttcactgagtattaactatgctgagcactgcactaagcagttaactcgaatgacctctttcagccctcccacagcattaagggtaagtattatttagtcacccacattttacagaggaagaatgtagagtcgagagagatcaagtacctgcctatgatgacatgactagcaagtggctgagcaggaattccaacccaggccttaggactccagagactgggctcctcaccttccttccctccctggtgtccccatgcctgggacaaaataatatggaaacatagcatgtgctcagcaaatattttttgagtaaatatttatgcggatagctaagctgtcgtggcttgtggtattcccaattttataaatcaaaacaaattgattacatctagtatatcataaaacagtctgtgaattacttgcagtactagtct

SEQ ID NO: 4496 - DNA, 570 bp, Homo sapiens
tagatattggagttctttctctacagaacttcctcttatcaatattctgccccacaaactccagccacctcaacctccccaaaccctgttcctcttctttgtgctgtggttcagatagaaaccagggaaattgcagggcttacctcattattttctttctctcaaggatgaaagtcttgcactacctgttgtttaatatgtgaaaacttgttccatacatttaatctagctttctagttgcttatagagatggggcaaatttgcttccatgcattccatcatggccagaaggtggaaatctctggagattttattggaatcatactaaatatgcatatcaaatcttccatcccaaagatattttctgtctgtccacacacttggtatttctttagtgttgtttatttaagagctaatgcataaagccaagcgtggtggctcatgcctgtaatcccagcactttgggaggccaaagcgggcagatcacctgagctcaggagttcgagatcagcctggcaaacatggcaaaaccccatctccactaaaaatacaaaaaattgatcaggcatg

SEQ ID NO: 4497 - DNA, 440 bp, Homo sapiens
ttttccaatattgttggacatgttcttaaataaacatgagggctatgagatcgtggggcaatggaaattattgtgatgttcacgaaaatacatccatcaggaaagtggttacagaatgaatcatcacatctccttggctacaaggattgggttagatatgggcatatagttatattagcatcaatactcctcaaatcaagcactttggagaactattcagaagaaagggttcctgatttttccgtaactgtaggaagttcagatacaaacatagggctctttggtatcaccccttgtaatgtgaccaaaaagaaaaaaaagcataacaggagaagatagaaataatgactgcatggagaagtggacttctctgaaatatcatatgggcatatacataagtcatgcctgaatctgctcttggataatcagtcatctttaat

SEQ ID NO: 4498 - DNA, 490 bp, Homo sapiens
ggattcactgagggcttcactgccttcctctgtgtcctgaaagactaactttcatggtcttccttacttaggctcccataacctctgacttctggttggatttgcagttggagaccatgaaaagagatagataagaggagtgagatcagtgtatcgctcactactactatgagtgatggtctctctcccatggctctattgctttgtctagtaataatgcttcctcccatgccttatcagtcttcatgtaagtcatctaggtaggttctggtgattcaacactccttgttgattcctttaacactatttacatcttcgtcaataatacctctatttaactcttcaatgaaatgtttgagagcaccacttatttgcccatgggatcacaaacagtagagtgctgaattgtgtagtttaaaataaatatgaagttatttctttcaagtcaataaaatatcaacagtcataagaatgggaatttcaaaatttt

SEQ ID NO: 4499 - DNA, 528 bp, Homo sapiens
ggtggaagtaatgctgtgtctgttttgagcatagccttagctgtcttggcagcttcatgtttctcccccttggaagccagcaatctgatatgaatcatgtctatcttgaggctcccatgctgtgaaaggcctgagctagtgtggagatgcaatgtagtgagaaagagagagacagaagtccaggtgcaccaatgtgtcagagtgtgagtaaagagtccttgacagtgaattcttcagccccagccaccccagctgatgccacgtgattcaaattcaaacagcttagctgagaccttgttgaattcctggcgcaaagattctgagcaagataaacgtgaacaaattaaatcacaacgtttagaatagttgtgcaggaatagctaacaggaatgggctctgggcaattcttttgagcttgtgtattctgtctgcaatgctgtgctcactgcctaatgacctttataaaaatacaagtttcgaatctccaatgattgaccatatggccacagtatttctggagtcacagag

SEQ ID NO: 4500 - DNA, 602 bp, Homo sapiens
tgaggacatgccctccattcttgctgatgtattctgcatattagacattgagacaaattgtttagaagaaaaaagcaagagagactattttacacagttggtattagcatgtttgtatttagtttcagacacagttctaaaggaacgcctggatccagaaacactggaatcattagggcttatcaaacaatcacagcaattcaatcaaaagtcagttaaaatcaagacaaaactcttttataagcagcaaaaattcaatttgttaagagaagagaatgaaggttatgccaagctgattgctgaattggggcaagatttatctggaagtattactagtgatttaatcttagaaaatatcaaatctttaataggatgctttaatctggatcccaatagagttttggatgtcattttagaagtgtttgaatgcaggccagaacacgatgacttctttatatctttgttagaatcttacatgagtatgtgtgaaccgcaaacactgtgtcatattcttgggttcaaattcaagttttaccaggaaccaaatggcgagacaccatcatctttatacagagttgcagcagtacttctacaatttaatc

SEQ ID NO: 4501 - DNA, 506 bp, Homo sapiens
actccatctgctggaaattgtaagatgtctacaatgtgactaccatgcgctgggattataaagagaatcctggtcagagatgctaagaggcacgtggtggcaatagtgaggttcttgttagaagaacctaccagggtggttccctagttcaaagctggtcccctagtcctctcagaaatgcattagcaggctgggcgtggtggctcacatctgtaatgccagcactttgggaggcagaggcaggcagatcacttgaggtcaggagttcgagaccagcctggccaacatggtgaaacccgtttctactaaaaatacaaaaattagccgggtgtggtggcacacacctgtaatcccagctattgaggaggcggatgcagatgaattgcttgaacccaggaggcagaggttgcagtgagtcaagattatgccactgtactccagcctgtgcagtgagtcaagattatgccactgtactccagcctgggcaacagagcgatactccgtct

SEQ ID NO: 4502 - DNA, 504 bp, Homo sapiens
aattgtaaactgaaaataattttttttctgtttataggaatggacacattttttccttgaattttcactttagtttgaataaatttgtgacaattgcagggttttttctaacagatatcagtgttacagtttttattcttgcagttggtatgttaaaatgtaatcatccacaattacattttaatttatcagcagtacaccctagtaagaagggtagaagatcattgtttagggatcacagactcacaaccagtaagctaaatggtaattgacattgggcttcagtgtttagaagacaacagggagtagtggacatcatggcaaataagaacaacaagtatgttagtggctgcctagcttcaagccattgttgcagtgctggtgtgcctagcatttttagaactccatttttttttttggaagccagaaatccagattgctagacaaaacctctctctacaggtatttgtaaacgttggcaagtcggtagctaccgttgacaac

SEQ ID NO: 4503 - DNA, 89 bp, Homo sapiens
tgtagcagtttggggagaattaacagctatactatgttgcatcttatagtccataatcatgggatatctctctcttagaacttctttga

SEQ ID NO: 4504 - DNA, 556 bp, Homo sapiens
gcagtgtagtgaggtattttcaaagagctcaaggaacgacatagagggtgaatggttacaggatatgtgacaaactagtcaggagtttgtgacaagagcacagagttcgttgtgataaggaaaagggggtatagtttgtggtgtggaacaaagttagtcaaaaacctcaaagttgagaactgatatttcatccactgttggtggaagtagctgacattccagttcccctaacaatgtagtgttggtgttaccaagcagagagctgatcttccatgcttcatctgacagaaaacaggcagtgtttttattcccctggaagacaaatactggtgatgctgaacaaagagctgatctactacctctctggcagaagcaaatggtactctgattcccctgccaggatagtgtcagcaaggtcaaatggtaagttgctccaccacattcatctggtagtgtgaggtagtgctagtaattgttatgatacactcacaccccatataaacctgacagcaatgagattgaatacagtagagcaagtcagggctagtcagcactc

SEQ ID NO: 4505 - DNA, 596 bp, Homo sapiens
tttcttttgtttcatgattttgatttttaaaattattagcacacaactattttcagccctttaataatggagcatcaaaaacatcacctgtaaccccaagcaaatatagaagactgtattttttactatgatatccattttccagaattgtgattacaatatgcaaagagtcataaatatgccatttacaataaggaggaggcaaggcaaatgcatagatgtacaaatatatgtacaacagattttgctttttatttatttataatgtaattttatagaataattctgggatttgagaggatctaaaactatttttctgtataaatattatttgccaaaagtttgtttatattcagaagtctgactatgatgaataaatcttaaatgctttgtttaattaaaaaacaaaaatcaccaatatccaagacatgaagatatcagttcaacaaatactgtagttaagagactaactctccacttgtatgggaactacatttcactcttggttttcaggatataacagcacttcaccgaaatattctttcagccataccactggtaacatttctactaaatcttttctgtaacacttaaag

SEQ ID NO: 4506 - DNA, 583 bp, Homo sapiens
cggctgcgagagacgacagagggacttattttatcagaatacattagtagtgcttaattgtctcattcaactataaaattttaacccatgttgggagttaatatctgggagtgatagaacccatctgataaagcactggagaggtgtggccagtgaaacaggaggggacccatcagggaagaggggcagcttggtcagtggaaagcacagggcgccacggcaaactgcccgccaaatccagacaaaggcttggcaagcaggaggggaaactcagataaagcccaggtgcatttcattcaaagcgtgggcagacgataacaatgacaaatgcagggcaggcggaccacacttgaaaatgtaaagcatgtaggccaggcatggtggctcacacctgtaatcccagcactttgggaggcagacgtgggtggatcacttaaagtcaggagtttgagaccagcctggccaacatggcgaaacctggtctttactaaaaatacaaaaattagccgggcatggtggtacacacctataatcccagctacttgggaggctgaggcaggagaatcacttgaagctgggaggc

SEQ ID NO: 4507 - DNA, 636 bp, Homo sapiens
actaccacctagacgcggagaccagtagtgcccgcgaatgcctggctgtgctgttatttactggatacaaagcaagagggcagggtaaggagtgtgagccatctccaatgataagtaagatcacacgagtcacgtgtccaccggacccgggggtgggggggtgtgccttccctgtttagtagccaaggcagagaaagagaggggacggcttatgtcattatttcttccacgcatttcaaagactttagtactttcactaattctgctactgctatctagaaggcagagccaggtgtacaaggcggaacatgaaagtggaccaggagcgtgaccgctgaaccacagcatcacagggaaacggttaggactccggatggctgagggtgagactgactgttgtcaggccttccacaagaggtggtgcagcagagtctttctctaatccctgggaagaactgcaaatatcctgccagggaaagtgtatcatggtattgtgtctaaaaatgaatgttgtctcagagcctcattcagaagggtagctatagctagggactcattcactcaataatgtgaggagcacacaggtctagaaattctcttatcctgcccaaaaaaaaaaaaaaaaaaaaaaaaaaa

SEQ ID NO: 4508 - DNA, 316 bp, Homo sapiens
gcctacaaggtgcctgcagttctggtatcaacctggctttctcacgcctctgtgcctttgatgctctgttctctatcaggcagagccatcccttcgagtaacttctatcttaatgtggagaacaggcactgaaactagtcattttaatataatacggcacatgataaaaagggatagacaaggtcccatgggagtccagacagatgctcagtgccatggagggtctaggaaggttttcagaaggcagtgcctgggtaatcctcagtgatgagtgaggcagggcaagtgggtgaaggcgggatgagcattcctgaca

SEQ ID NO: 4509 - DNA, 522 bp, Homo sapiens
ggcgcaatctcagctcactgcaacctctgcctcccgggttcaagtgatcctcccacctcagtctcccaagtatctgggattacaggcctgtgctactaggcctggctaatttttgtatttttagtagggatagggtttcgccatgttgcccaggctgatatcaaactcctgacctcaagcgatctacctgcctcggcctcctaaagtgtgggattacaggcgtgagccattgtgccccacctcagttcatctatttctctgtgatatttattctatagttgcagaagaatatttctcatatgatacgtatattaagcttactggccagccagtttgggtttctggatagtgaaactgtcctggaagtgtttgctgagcttttcttgctggagaagattcttggcaaagcctggatggaggatggagatgagaaaggtagtgtgagggtggcacacctgttttgtgctaattccagtcttggcagccctggacctgccgggagagggatgacagtgacatgtg

SEQ ID NO: 4510 - DNA, 560 bp, Homo sapiens
gtgatcacagcttactgcagcatcgaactcctgggatcaagtgatcctcccacctcagcctctccagtagctgggactacagtctcatgccaccacacctggataattttgtatttttaaaatttttgtagatacagggtctagctatgtttcccaggctggtctcgaacttctgtgcttaagccatcctcctaccttggcctctcaaagtgctgggattacaggtgtgagccatcatgactagcctaaatatactttatttttaccccagacctataaatgataactaacgaaaaattaaaccatgatatagaaacataatatttactctttgattaagctaatatactttaaattcacactgtgtttgtaaatgagtcttaatatatacctgtgatagttattattttcctctctgtggatagcactcagtagaaagagaaacgtggaaagtgctaccatgggaattctgaagcatcgctctactgagagccagattggggaagtggagtattccaaggggtgatagccattagcactcttcacaaacattctaattc

SEQ ID NO: 4511 - DNA, 484 bp, Homo sapiens
cttggggaacaactgaagactacagttcaggtttctgaacccaagggcaccactgctgtaaaccgcagcaatattcaggagagagacggctgtcagacaccaaataattgactcttaggtggttttattcattgttgagaaatatggtagattgggtttcatttaccgaatgagaattcttcattttcactttgtaatttttcttagtatatagtcagcccactgtatttgtgtgttccacatctgtggattcaaccaactgcagatcaaaaatattgaagaaaaaatcgcatctgtaccaaacatgtacagacttttttcttgttattattctctaaataatacagtatgacaactatttccacagcatttacattgtattgggtaatataagtaatctagtgatgatttaaactgtgcaggaggatgtgggtaggttatatgcaaatactgcaccattttttatcaggggcttgagcatctg

SEQ ID NO: 4512 - DNA, 509 bp, Homo sapiens
tgatgaaccatcattttcagcagaggagtgatacagtcaagtttgtatttttgatgagtcactggctttttagataatggatttgaaaacaaaaaaatttggagaccggaagatagattaggaagtggtatcaatcatataggcaataggccagacactgtggctcacgcctgtaatcccagcactgggagaagccaaggcgggtatattgcttgaacccagtttaagaccagcccgagcagcatggtgaagcactgtctctacaaaaaacacaaaaattagcctggcttggtggcacccgcctatagtcccagctacttaggaggccaaagtgggaggattgcttgagctcgggaggtagaggttgcagttacctgagatcatgctactgcgcttcagcctgggtgacagagtgagaccctgtctcaaataatgataggccgggtgcggtggcttacacctgtaatcccagcactttgggaggccgaggcgagtggatcaccaggtca

SEQ ID NO: 4513 - DNA, 470 bp, Homo sapiens
aggggttcctgttcattaccaccctaactcattagagcagcaccaggcccaggaggatgaagaaagagagctgtgcaaattaatgagtgaccaaattaaacatgttccctcagccagcaagaggttccagttgatcagctgaggactagggatttgaaagtgggaagtccctgccccatgggccagagaccctgaggcagccatctctcactgttccttaaggcagcccatcaggagcagggttgccaaatttagcaaaccaaaatacagggcacccaattacaatctgaatttcaatacttgtactgttagtacaagtatatcccatgcaatatttgggacatacttatacgaaaaattattcattgcttatctcacattcaaatttaactgagagatcacctgaggtcgggagttctagaccagcctgaccaacacagagaaactccatctctactaaaaatacaaaa

SEQ ID NO: 4514 - DNA, 121 bp, Homo sapiens
  misc_feature 1, 2: n = A,T,C or G
nnagcatgtagctaaaatgaagaagatggagatggagatggagcaggtgtttgagatgaaggtcaaagaaaaagttcaaaaactgaaggactctgaagctgagctccagcggcgccatgag

SEQ ID NO: 4515 - DNA, 518 bp, Homo sapiens
ttttgcagtatgtgcatgcattttctattcacaaaaatgaaattttttaaaaaagggggcagtacttagcacaatgcctagcagtggtggcggtggtggtgatagcctttctgcagctctgggcagatgattcactgcagaaatgcagcccagagatatctagaggctggccatagcctccagactgtcctcctagcctctcggtctcccttcttcattctatatgatccatgtttccccatcggagaatctttgcattttagagatgtaaaggggcttcagattttctagtgcaactgttttaacggtgaagaaactaagcccccaaaagatgccataaccagtccaaggttatcaacagggttcaatctagggcctcttttacaccatcctaagttttctaaaattctgctgtcattccatcactgctctgcccgtgaatcctcaacctggctattaagactagctgtggtctaggccaagcacagtggcttatgcctgtaaccccaacactctga

SEQ ID NO: 4516 - DNA, 573 bp, Homo sapiens
ttcttctctcagacattctttctggttctttaaaacaaaggccaaggaaagtaaacgctatcagcatgctggatcttagaccaacatggctctaagaagattatcaattttatcaagagagttttaatttcatgtcctgatgtcaagattggtaagagtccagaatgtggccattttccacaggtatggaaaggtagcctccatttctcaattacctaatggttctggtactggtctgtggcctgggggttggggacccctggtgtaagaggatgcccttattcttaggagatacatttcaaagtacttagggatgaagtattaaaattacctatccttggaaaaggaaatatttgtctagataccaattggtcaaagataactcgttcatttcaaagaagtaccaaaattggatagccacacatagaagaatgaaactctgtctctcaccgtacacaaaaattaacttaagatggattaaagacttaaatctaagacctgaaaccataacaattccagaagaaaatgtactctttggatactggcataggcaaagaatttatgactaagact

SEQ ID NO: 4517 - DNA, 115 bp, Homo sapiens
taaagcataaatctcacaggacctataacaccacacacacacacacacaaaaaaaggtactcagataacaactagcacaatgaatagaatagtacctcacatttcaatactaaca

SEQ ID NO: 4518 - DNA, 585 bp, Homo sapiens
cttaccatgggccagtcactcttttaaatgccacagcaaatttatgaagtaggatatattattatcctcatttgcacatgaggaaactgtgcacaaagacgttaaatggactgccaaaaatcctaaagctagtaagtgccagtaccagtattcaaacctaggcagtctagctcttaaccgctatactatatcttccattgaaatggacagctggttattttgactaaatatcctaagatatgtttggaagggaattaccatcactgacctcttaaatctcctttttctgtacttccaagctgatcaactctttttttgtgaaagactcaaattgttgtgttgtattacatgaatcgatatatgggataattgctaaacattatagacctgagagtcattctatctcttttagaaatctttttctttattccataatggataatgacaaattcaaaagctttaggaagtaggcagataacataagtgagggagatggcttggtataagacaatttgaaatggcgagaactgtggcaaaccactactcactcgtcacttggctccagctgctctgtgcaaatgtgga

SEQ ID NO: 4519 - DNA, 614 bp, Homo sapiens
gggatgggaggataggtggataaatttgggaaaagctaccttgggacaggtcagccaggtgtcatctcaaagcaggtctactgagctgaagtttcctgtgcaagtaactaccactttttagttgtgattagttggatactataagtatacattttagtttttattgtcaagaatggaattgctgtccaaattcaagtattaattaagtttgaaacaaatattttttttccatagaaatctgttactctgatatcatcatcagaaattcctgagacaaatggtggtggtggggacagaggatgactcagtattaaagctatggaggaattacctcattagcctatatatatactgcatcttggttatgagcttaatcctattgcttatactgtggtaagaagctaaaaccaaatgaagtgaaatacacacatacatacatacatacacacatacatacaaatacataaatctctaactttgtggaacttctaaagctggataagaacataggacataaactactaaagatgaaataaattctaaattaaatgttaacatgagagcagatttctagaggcaggagataccatgtagattgagctcatggagaaact

SEQ ID NO: 4520 - DNA, 503 bp, Homo sapiens
  misc_feature 155: n = A,T,C or G
taattacatggtgagtaccatatatttacgattatttatgttttctagattggagtacaggataattatttttggtcttattaagtgcaaattaccaagtagtcttcaggaacatgtaattactatgtactgtagtcacatgccacttaccaagnacaagcaaaatgatgcatatggttttatgaagcaaagcacagaggcctactttcctgccttgggagaggaaacagaagcagtccttcttaacatagggcatttcctcaattaactacatcaactctttgcaaagcttggttctcattaagaatacagatttctggctgggcgtggtggctcacacctgtaatcccagcactttgggaggcctaggtgggtgggtcacctgaggtcaggagttcgagaccagcctggctaacatggagaaaccccgtctctactaaaaatacaaaaattagctgggcgtggtggtaggtgcctgtaatcccagctccttgggaggctga

SEQ ID NO: 4521 - DNA, 442 bp, Homo sapiens
gctcagagagtgtttgcatctcatgacagtagcataatgcccatgtgcttaagcgtagccaaaaatatgacaaaaggcctctcagagattcctgtgaccccagcagaccatgagactggcagaattttgctcagagatgcaagagggggcctggaaaggaagagaaaaagaaaaaaccaccagtcctgaaccgttttgccaggcaggatccagaagcagcccgtgtggactagtgggtgaagaccaggacaccagacatctcagaggttcccattcaggctgtgaccttgacacttgatgtccttgcctgaagccttggctctgcgtgagacccggtgctttgacatatcctgttttgggtgactgttgccccactttccctctcccttacacattttcaatgtttattttccaactttctgtacacctccccaggctgaga

SEQ ID NO: 4522 - DNA, 554 bp, Homo sapiens
ccattaattgagcatgtgtatgctaagcactaggcaaacactatcttatttaatttagacctgcgaagtcagtaatgttctctagactatatgggtagtgggattttatttatttaatttttaaattttatttttccataagttattggggtacaggtggtattcggttacatgggtaagttcttcagtggagatttgtgagagcctggtgcatccatcacctgagcagtatacattgcatcatatttgttctcttttatccctcaccccctctcactcttcccaactagcccccaaagtccattgtatcattcttatgcctttgcatccatttgcttctgccagtggccttcagtcactaccagtctaggatcatttgtgtttaagaattagttggaggaatcacatcacctaacttcaaaatatattacaaggtgatagtagccaaaatggcatgatattaatataaaaatagaaacatagaccaatggaacagaatgaaggacccagatataaattcacatatttacagccaactgatctttgacaaagga

SEQ ID NO: 4523 - DNA, 563 bp, Homo sapiens
caaatacctggagtacactgcctcactatccttagtcatgctagctttctcttccctgcagtatagatctgccaattcaaatctgtatggcaccagggctggcaaacgcagaatgattcaattagtaatatggtattgttaaattattataaagcgggccaggcacggtggctcacgcctataatcccagcactttgggaggccgaggcaggcggatcacttaaggtcaggagttcgagaccaacctggccaacagggcgaaacctcatctcttctaaaaatacaaaaagtagccaggcgtgctggcggatgcctgtaatcctagctactcaggagggtgagacagaaggatcgcttgaacctgggagacggaggtggcagtgagccaagatcataccactgcactccagcctggggaacagagcaagactctgtctcaaaaaaaaataaaattataaagtgaatgaatgactatgggatgcaatgaccgactttacggtgaatagaaaattcaaaacggctctgaaatcaactccaaagaatgttgagatcagtgctgaaat

SEQ ID NO: 4524 - DNA, 589 bp, Homo sapiens
cggctgcgagagaaacagaagggaagttgagtaatgttaacactaaagtaattctgttctggaactgtaaaccaaagcttaaaagtaggaataaagctgtttctgtgtaacttacagaattacctacagctaacatacttgctaatgaatgactaaatgcttcatctcaaaaaagaaaaaaaggagtaaggcaatgacatctattttcacccatttctgttatcattgtacaggaggtactagtcaaaatagtaaggcaagaaaacaaaataaaaggtattcaggttggaagagaagaagtaaaactgtctttattcacagaggccatattcaccaatctagaaaatctgatgagaattacaataaaactattggaactattaagcaaaattaccaaggttgcaggatacaagattgatatacaaaaatcagccatatttctatatgctgaaaacgagcaatcagagattcaaatttaaaaaaatcaattgaaatagcatacaaatatacagtacttagggataaatctgacaaaatatatgcaaaccctatagtctgaaaactataaaacattgcaggaatataaatc

SEQ ID NO: 4525 - DNA, 596 bp, Homo sapiens
tagcttttgcgaacagctctctctctccatgaacagaagcaaaaaatgactttttaaaacacaatcaacataactacttccagcggtgatggcataagagagaccagatttatgctcctaccttaaacaactaaaaatctagggaaaatgggaaagaatggttttctgacactggacaacaggtagtatagcattgtaatctccaaaaaaggggaaacaaataagatgattcccgtgattgccttgattactgacttgagagagttcccaggccacagagtaggaggggaaacacaggtagagcccggtagactctttgaaataagaagataaagttgggagttgggaagaacaaggcagatagagttgaaagattagtactgaataagagagtactgcagacagaatatgattaagacatcagttcttcttcaagcaaatccatagattcaatgtgattcaagttaaaaaaacattaacctaattctaaaaatttatatcgaaaggcaaaggaactaaaatagccaaattacttttgaaaaggaacaacattggagtatgtcaagacttgctattaagctacaattatcaagaca

SEQ ID NO: 4526 - DNA, 585 bp, Homo sapiens
gttgccgtgagccgagatcatgccattgcactccagcctgggcaaaaagagcaaaactccatctcaagcaaaacaaaaaaagcccagcgagttagggacagaatccagttattaaataacataattaaacctattttatacggagcacttattatgtactaagtgctttaccagatttgatggtcacaattctaggggtgggtgatgttatcacctccatttcaggaaggaaggaggctcagaggaagtcacaggtcaaggttccggagtgggtaactaaacccagtccttgctagccctgtatctctatcacctactcccatgcatacaggtccacaagcatgcctgtgcacacgtgcaatcaatattgcactaacatctccaaacactctagttgaaatacccagagctcccgccttatatcttttctcttcctcaagaaggctaacccagcctccaatcccctaaaccttcatgagccagggaaggaaccctcttctttccctctaacacctcagttccgccacgcggccggccgaggtcggcgctgtaaaatgctcctgctcctctaagagaatgaacagt

SEQ ID NO: 4527 - DNA, 109 bp, Homo sapiens
tttaagggatatatttttaaaacagaaagggaaaaattgtaagtgtaaattgcttcccatataatctcttgagttcatatttaataaagataagttaataaacaattat

SEQ ID NO: 4528 - DNA, 546 bp, Homo sapiens
atgggagataatgtggaacatgatctaacatttctcattatgtcaaattcagcacaaccaaacataaactcaagccagcaaaaatatggaattacatcttcattattttccggaaatgcattttggagagactgctcaaccagtatgagacaatgtacactgaatcctaaattaaactcatattctggaaaattgaagccaatggctcagtgtgctcagtgaaatggtgaagcacacaaaggcacacttctggggtgctagagcatttcaaaagtgggacattcatcattacttgcttaagcaatatttacaaatgcagatggccttctttttataaaaatagattactcagccacttatggattattatttgaggtgctataaactgtctatatgtccctgatatcgatcccacactcctctgtcaccatgccacatttctaggaattttcaccattttagatgactctactgttccttccctgggtaactgtgtcactcaataatagtagcatatcagccattaaaggaaattaaggcatagca

SEQ ID NO: 4529 - DNA, 629 bp, Homo sapiens
cctttctattggttaataacttttttcaaccaattgccaatcagaaaatttttaaatctacctataaactggaagcccctgtttcaagttgccacacttttctgaaccagagcaatgtatatcttaaatgtatttgactgaaatctcctgtctccctaaaatgtataaaaccaagctgtgccctgaccaccttaggcacatgttctcagactctcctgaaggctatgccatgggccaaggtcactcatagctggctcagaataaatctcttcaaatattttacagagtttaaatctttgtcgacagttgcataaaagttacttagttccacctaggtccttcaccacaatatccattatgaaacaaaagtcttaaactattgggcaaaaaagaacgcataatttttttttgttagaacacagctgaagactcattgtagcttgtggaaagcaacaacaacaaaacttctctacttgtggaggagaaacagagttacactcagaccctgaccgttagaggtcttctgtagaatcactacggaggctcaaaccatgagattcaaggacacaaggctgcctaatactgaggcagaatgacaatagtaagaattccgtaccttttatgcaaca

SEQ ID NO: 4530 - DNA, 258 bp, Homo sapiens
ctttccttgataatagagcacttgatgctgttgccttagtgactgagaaatgctgcctcatgctggctcatgcaggccattggcaggctgcaggctgtgggtagtgctgccctgcagggtgttagcatcatctggcaattgcttttatttggggcagccagtcagttcttcacattctgggcctctggctcatagtgtgtttgatgacaaccctgagaggacatctctggttgctgtagtcaccaaagatgccacttc

SEQ ID NO: 4531 - DNA, 527 bp, Homo sapiens
tgctgcagagtcagtgaccctgaatgactgttcattgttccatctcgctctgagcagttcttacctccccttccttccttccctctccatgtcctcccctcaccttccaacttttatagagtgttttctttctcaagtgtatggtgctttttatggccccctcatctggcctgccactctttgccttccccacaccctgtctcatgccgagtcttacttcaaacctccccttgcatctcatgaccttagctgtggttcctcactcccaccccctgcacacacactgcagagatgacctgccttgtgctgtcaaacggccctgtgctcctcccctttctagggcttggatctcttcctcactgggaaacagcagcgaagacaaagtctttcttcaccttgcaatttccagcatctcccaccaggctgggcaattcagggtaattattcaatgggtgagtggatttcttttcaccttttctttggttttccttctgcctcctttccatccctcccacctaacatactct

SEQ ID NO: 4532 - DNA, 490 bp, Homo sapiens
ctctgtacaatcttcataaattgacaaaaatgcacagtatatctcaccacctaacacaggcctaaacaatgtgacatacggtatagtaccagtaggtacttaggactatggagaaacaatggaagacattaattctgcttgtcttgatggtaagggtggggatgaaaatacagatcgaatttgggggagcatgttaaggttaggggaatagagatagcttatatttagaacaagttagtagagactgtatgattttccaaatagagaagggtaaaaagacattccatagaggaagaaaattacatgcaaaaccatagagaccttagtttataaagagtaactgggtatggccgggtgcggtggctcacgcctgtaatcccggcactttgagaggctgaggagggttgatcatgaggtcaggagatcgagaccatcctggctaacacggtgaaacccgtctctactaaaaatacaaaaaattagcttgggt

SEQ ID NO: 4533 - DNA, 419 bp, Homo sapiens
aatcccagtgctttgggaggctgaggtgagagaatcactcgagtccaggacttcgagaccatcctgggcaacacagacatcatctctaccaaaatatacttagctgggcatgacatatcatgcccaactaattattaataacatcccagctacttgggaagctgaagtggaaggattgctggagtccaggaggttgagtgagctatgactgcaccactgcactcgagtctaggcaacagaggaagacctcgtttccaaaacgaaacaaaaacaaaaaaacaaatacctttataacatttccacaaatgataacagtagacataaagcaactgataaaactaattgaactagagaactagacagaactagttagcacagatagaactagaacactgtcaattaccttgatctaattgata

SEQ ID NO: 4534 - DNA, 480 bp, Homo sapiens
aaagcgctgggattacaggtgtgagccacctcgcccggccagtccctactttcaaacctggttttcccatgctgtaactcgttaatccatgtgtctgagaaaatagcagttcctctcctctctgaggctaagctctctgctacccgggcatggcgcgtgaatcccttctgcttcatttgccacagccactgcctcctatgctaactgtgagagccctcttttctgaatattctattgtttcctctcctttagctccctccttggagctgacaaacatgtccatgtctccttaaacctaaaatcatctacatgcccgtactgtcccatctcaagatactactctgtctcctttctatgttgggaagtttcttgagcaaggaattcctttctcttttcgtccttgggtcatttaatgcacttatgtggctttgaccaacattgaaatctcagttgtgacctctccctgtcatctgctcctga

SEQ ID NO: 4535 - DNA, 542 bp, Homo sapiens
catcagtgaacagaatacatctagtgctgcatgagggagcttcttttttagtgaaggaggacattagacacagatgtataaatgagtcattgaacaagataattgcaggcagagatggattctatgaaagaaataaatcagggtgatgagagggaaagtgacagagagacagctttaggttggaggctaaagtgaggcctttgaagaaatgataattcatgtgtgacttgaatgacaagataaaatgtagagagttagaggctgaggattacaggccaaggaaatagccctgtgcatatgttgtgagacatagctccaagacatagacatgcatagtttaattcaacttgactcttccagaaatgaattgaaggtcgctaggcctggagtgtcaggaagcagaggagaagttgtgagagaagagtttgaagtgagatgcctgtgtcatttaatgaagcaaatcacatgaaaaatatcactggcattttttattatacgacttatttaaaaatagcaataaaatttacttcctactttatcct

SEQ ID NO: 4536 - DNA, 605 bp, Homo sapiens
tgtcataatgctctcctttcccttgcccccaacccctggatagaacctggtgtgtgatgttcccctccctgtgtctacgtgttctcattgttcagctcccacttatgagtgagaacatgaggtacaaactgcagatatttatacattactttaaagtaattaagttaaactaaactaaatgtaagccaactacatgtaaataaataaaaccaataattaataacaagataaaaataattaatacttaaataattactaatttatttctcagctaaaaattaaaaatttagaaaatgtggaaatgtgtttcataataggaggatatttaaaatgaaagggcatttctgtagtcaaaggggtaggagactcacccaaacaagacacaacctcaaaaccaaaaggaaaactatcaggtttgattatacgaatactgaaaacctctgaatacatgaaaggcaaattctatatcccatgaaactacccttcagaaatgaagagagaaataaagacattctcagaggaagagaatataggaatttgtcactggtcaatttagaaatgctaaaaagtggctacggaaatatgttctgtcttttccacaatac

SEQ ID NO: 4537 - DNA, 567 bp, Homo sapiens
agaacactgaacattaaagagtgaagataaaattcagtttactactgtcttgtccatacaaccacagaatgctagctatgattgaaagatcttgtatctgcgagaatcaatatttatgagacctaacaattgtcttagatagatggacttaatgaactgcatgcagtaacttaaattgaccaaatattttgatagatttgtcggagtccaaaatcaagtaaaataatgtcatagagttttatattaacttgtaaaatggattagtttcaatccttttatgacattgcattaaaaaataataacccatactcatctaaaatttctgttcatctgatcacagtgagcctcatcccctaccacactcttccatctctgtgtgctgttctagaagggaattctctctgtgattttcacttggcaggaagtcataattaagataattagtcttatctaatttttatttgacttcaaatacttatttttcccttcaaactcttaaaataattgcagtattgaactccatctgaaagaattattgggaaggtcatgcagtgtctcgatttgtca

SEQ ID NO: 4538 - DNA, 641 bp, Homo sapiens
gtctcatttcaccaaggaatcacactgaacacttccgtgtggtcacagagctcaggcagacttcctcagcaagtaagtacccttcataaagcagtaaatgatattggcctagaagcatgaaaaatgaaatgcaaggttctaactgaccagggcaccaatgaagcttgctaacagagtgtctgggcccacagttaccctgttcactgggcagactctgcttcttctgtgttcccactctgggccccaccccactggagaatcctaatgcctggatgtgcctgcagagaacacagccagctgtcagtgctgtcatggctcaggacctcgccaggctgctcgactctctcactctccagggaggctgaagccacgcctgaaagatgggcctgctggaaacctactcgcctgaaaaccacggccagctatgggcctggaagtgactctggagaaagaatactccctaacggctaggcgtggtagctcacgcctgtaatcccagcactttgggaggctgaggcaggcggatcatgaggtcaggagatcgagaccatccttgctagcacagtgaaatcctgtctctactaaaaatacaaaaaattagccagcatggtggcgggcacctgtagtcccagctatgtggg

SEQ ID NO: 4539 - DNA, 556 bp, Homo sapiens
tacttgtagggcttccaatccagggcagtgtggacctttgtgggatcctccatctgctttggggcttgatgtactctaagaattttgcaaacttaaggtaaagacatatcttaagttttcctggctttgcaagtaatctttgcttgaagatgggccagctagaaatggatggtaggttcaatggggtctcaggggaaagtggactatggtctaattaatgactgtcaaatatttttactctgacccacagcccaaaatacattctgcatggtgacctagcatatatacacatacacacacacacctgaaacaaaagttttattaggcagtacctatacttaacatatgtgatgcattctggtcttttattttctattttattctatttcattaagttgatttcatgatatgctaatggattgcaacatgtattttgagaaacattggtctaatagatgacaacttgtccttgaaggtgattgaggaagatgttgtccatgaataatgaaattcagatgagcagtgccaaaagctgagcaacctgactgtgtacttt

SEQ ID NO: 4540 - DNA, 593 bp, Homo sapiens
taggcaatgcatctccttgagaatgaaaacttagcctttaagaagcatcttgttataaattactctgttaggtcaagtcctggacattttcattcttagtacataaatataaaggacaaaactgttagcatgcaattgtcctttcctttttccgggattcccatgctgtgagtacaatgcaataaaatattaagaaattaacatattaataaactaagccataagaaatgctatgtgaattagaataatagtctactcaaaagaaaattttgtcttcgacagtgatagagaccatattaagacagtttgtggtatacgtatgcattacaaaagaaaattgacttttaaacttaactgctgcagtaaagaaaatgtcttggctgggcctggtgcctcacgcctataatcccagcactttgggagggtgaggcaggtggatcacttaagctcaggagttctagagcagcctggccaacacggtgaaaccctggctctactaaaaatacaaaaattagccgggcattgaggcccgcacctgtaattgcagctactcgggaggctgaggcacaagaatcgcttgaacccaaaaggca

SEQ ID NO: 4541 - DNA, 547 bp, Homo sapiens
aagctctccctctgggatgatgagggacagcacacactaaggacatctggagaaggaggtttcaattctgaagacctttgtctactgcagaattcatggtccacagttacaaaaattagctcctggttgtagctactaactccacaatagaaaagctcttcctgcagatgcctaaaagtgttttctctttcctcctgggcttccaacagatcaactcaaatgtctaaaccagtcctggaggagtgggtggctttttttattttaaatttccctaaattctcttgagtaggttcttctcctctctaaatttagtatccagcaataaagatccatcatagggaaaaccttggcttgtaacttaaaatggtttaaaatttctgatatataatttctactactggcaatttgaatacttatcttatttaatgtgcacaaaagaagaaattgtttttttttcagatgaggaatctaagtcttagtgaatttaagtaaatttcctaaggccaaatagctctcagcagaagctcagtgattcaattgaatatct

SEQ ID NO: 4542 - DNA, 102 bp, Homo sapiens
cagatcctcatctctgctgtagaggagatagagcctgcactcagggctctcttcctaggtatcacagcatgttgtgaactagaagagagccaaagagtcagt

SEQ ID NO: 4543 - DNA, 545 bp, Homo sapiens
aaagcttatctagtccaggattggcaaactacctcctgcctcctattttcgtctaactcacagataagaatgatttgtaatcactgaattgttgttgaaaaaaaaaccaaaaagataataataatattttgtgatgcatgaaaattatatagaattcaaatttcaatgtttataaataaacttccattggaacacagccacattcattcatttacatattcatctaggctgcttttacagtaaaacagcagagctgaggaggtaagacagaggccatatggcccaaagcctaatgtatttactccttattcctttaagaaagagtctgctgatccctgacttggtccaaaggtattattgtgcaaatgagaaaaccgaagcccagggacagggaataaacatggaaatcaggcaggctttgtgacctcagcaaattgaattatatcttcgagccttattatcctcatttgtaaaatcctaaaacctacctcaaatcccagcactttgggaggctgaggaaggcagatcacaaggtcaggagttca

SEQ ID NO: 4544 - DNA, 566 bp, Homo sapiens
cagggatgattccctcttacaacattttgttttgttcattttgcttttccaagaggtagaaactgaatttacatctaaattcttggtaagaaaaattcctgaataagatttgagggtgtcaggtcttagaacagagatgctcatctcaggcaaaatggatcctaagggggagcaagccacactagacattcaacaaaaagcagcatcatgaacattttcaacagctcattgttaatgttcctcataaaaaggacaggttcacttgcactgaggattcttttagggtaagagccattgaatagcccttcttggggccaggcgcggtggctcacacctgtaatcccagcactttgggaggctgaggcaggcagatcacttgaggccaggagttcgagaccagcctggccaacaaagtgaaaccccatccctactaaaaatacaaaaattagccaggaaccggtggtgaacgcctgtaatcccagctactcgggaggctgaggcaggagaatagcttgaacccaggaagcagaggttccagtgagctgagatcacaccactgcacgcca

SEQ ID NO: 4545 - DNA, 599 bp, Homo sapiens
gtttggggccccttgatcttttattaaagtcccctctgtcagcactgtgtgtagttttacagactggattttttttttttaatgcagtggtgatttgccacatgatctcacagagaaacatggctttggagtgacagaaactgggtttgactcctgtttctttcactcactatatccttgagaaagttgtttaactgttctgaggctcagaatccatatcagtaaaaaaggtttgatactcacttaaaagcattttcaggattaagcacagtgcctaacaggtagcagtaactcccttttctaaaatgatttagattttctcaacaaatttgcctattgaagcaaagatagaagacgctaatgcatttgcaggtatcacaaaagtttcctcacccttccaggttctccccattcaaatctgtccaatgaaatgttcatgatacaacacattcatcttctactcagatgctcaatgttctttccttgcctaagtcagtgattctgaaccataaatgcacattaaaattgcctgagaagcatttaaaaaatcgtttactggaccccatcccagattaaatgaatcataacctctggcatta

SEQ ID NO: 4546 - DNA, 405 bp, Homo sapiens
gctgtagcccatgtacacacactgcggtcttttctttgaggttaccagaaatcgtcaattctagtggtttgaacattgaaagtcacaacaggaagtatctttatcttggcacagggggtgaggagatttctatgaagagaaaaaggaatatctttttaattgtttatgactggatatctgaaaacagtaagcatcagctagtactgagtttagagtaaaaaggggatttggtatcttggcagtgacaagctcaggtgctgtacattaaagtatttagccaagtcctacttgcccaagtatggaatttccacaatgtttcattatcttggaagtccaatacttaagaacaaatttaaccaagaaggtgaaagatctatacactgaaaactataatacactgataca

SEQ ID NO: 4547 - DNA, 543 bp, Homo sapiens
gtgtttgggcaagcaatacagaaataaacaaaagtgcaaaattatagtaactgttaaaatttgatggctttatctataactctactttcttatgataatagaaagtgaggaaaagctagtcaggtagactctgcagttagccagagttcaaaatctagctgtctcttacaatctctgtcaccctgaacaagtttttaaagctctctatgtctcaattccttaaatataaaaagtaagaataataatagtgctttgagcagtacctcagtaaatgctagccattattattgctttatccttataatggccatctacttcaagtactgggtctaggccgggtgcagtggctcatgcctgtaatcccagcactttgggaggccgagacaggcagattgcctgagctcaggagtttgagagcagactgtgcaacatggcaaaaccctgtctctacaaaaaatacaaaagttagccaggtgtgtttgcttgcacctgtagtcccagctacttggggaggctgaggtgggaggattgcttgagcccggg

SEQ ID NO: 4548 - DNA, 568 bp, Homo sapiens
cagctgtgttttactcagtagcttaggaaataatcacttttccatgccaacagatgtttttattcaaatatttaactggttcatcagtttctccacctgaaaaatagtgatgataataatattcgcaatggacctatagcgacagggttggaagtaacattagagatgatctctgccaacccactcactgtagagatgaggatattgaggcccagtgttctgggtgggaccaggaccagcccccaatgctgctaaatcccagtgtgccactgagaattccagaaggagaggtgagacccttattaccaagacatggttatttgtaacagtcaagctataacctaatgtttctacatttaaaaaaatttttggagatagggtcctgctacgttgcctaggccagtcttgaactcctggctcaagtcatcctcttgccccaacctcccacatagctgggattacaggcatgtgccactatgaccagctaaaattctttttttttgagactgagtctcactctgtcacccaggctggagtccaatggcacaatctcggctcactgaaacct

SEQ ID NO: 4549 - DNA, 120 bp, Homo sapiens
aaggcatcaacataaaaaaagagatatcatatttagatgcaaattattaattatggaagggaaaaatccaaactagtctgttgtggtagacacgtgccatgagatatatgactaatttga

SEQ ID NO: 4550 - DNA, 615 bp, Homo sapiens
tgggattagaggcgtgtgccaccatgcctggctaatttttgcatttttagtagagacaggatttcatcatgtttgctaggctggtctcaaactcctgccctcaggtgatccatctaccatggcctcccagagtgttgggattacaggtgtgagacaccgcacctggataacagtctgttgttgatcaccagtttttatataatttttcttttgaacacaagtatattataaaaatacttgaaaggagtattcaaaaattgattttgaataccgggttaaagattcaggtatggtcgttttcctacttcgaaatgcaaaggaggtaaactcacagaagaaaacgatgtccacagaacaccaagagattggggattgtggcatatctctgggtgaaaggaagcagatgggaggatgtttactgacgaaatagtatgagaagttgtagttaaaaacacaaattaggccgggcgcggtggctcacgcctgtaatcccagtactttgggaggccgagtcgggcggatcacgaggtcagcagatcgagaccatcctggctaacactgtgaaacccctccggctaactcagtgaaaccccgtctctactaaaaatacaaaaa

SEQ ID NO: 4551 - DNA, 548 bp, Homo sapiens
aaaatgaaatctctcagaacctgatggtatttggatagcatatacccaccagaggaacaggcttttatctagcataccacaggtctcccctttagcacatctgtgctcattttgaaactgtatagggaaggacattagatggctgggagaactctgaaggacagacctggatctcctgccatcttccaaaggtgaaacaacaaaaatccgccaggctttcagtcagaagcccggaagggccactcccaaggaacagaggcaagagcagaagtagatggagtcttactgaaactgaaacccagctcaattcctaataggttgaagatatgattacctcaatgcagtctgcttatcagaaaggcatatcatatcatccggatgttttatatacaatgtttggcatacaacaaaagactgttagatatggaaggaagcaagaaaatgtgaccaaatcaagagaaaacaaaaccaaagaaagaatatccagataattgagttagcaaatgagaaccttaaaataactgattaacaagtttaagatgataaaa

SEQ ID NO: 4552 - DNA, 136 bp, Homo sapiens
cagtcattctaggtgtgaatctgattgctctaataatgcaccacagtgactggtttagggaagcaggttgaagccaaatagtacaaaaccttcccttggccagtagagattttgaccctgaggacttctgaacaag

SEQ ID NO: 4553 - DNA, 558 bp, Homo sapiens
aggtttcagtgagccgagatcacgccactgcactccatccagcctgggcgacagagcaagattccatctcaaaaaagtaaaaataaaaataataaaataaatagaatgcacacctaaaatgttgatgcataattccagctctctctcttgaccttccctagttgggaaaaactgtactgatttaacacccttaaaagcagaatggatgtgatggctcacaactgtaatcccagcagtttgggaggccaagatgggaggatcacttaagcccgggagttcaagaccagcctgggcaacgtagcaagacccagtctctacaaaaaaaaaattaaaaattagccaggtgtgctggcacacccctatagtcccagttacttgggaggctgaggcaggaggatcacttgagcccaggaggttgaggatgcagtgagccataatcacaccactgcactccagaccaggcgacagagtaatttaaaattttgatgcacagttctaacttattctttctattcccccaaggggagaaaactctactgatttaacacccttaaaagc

SEQ ID NO: 4554 - DNA, 636 bp, Homo sapiens
accctatctactaacccatagtttggtttttcatgaaatcatgaatgtctacttagaaaatataagagaaaacctcattcattagaaaattatacccaaaatgcaactaagaagacatacatagaaagtaggaagtttctatgaagagagtaccaaatgtgattaaaatatacttaaaaatgaatagagagatatgtcaaaaatttgaatatgacccagttatgagaaaatgtcaagttctaaccaaataaattaaaagtcttactgcagttgtaactaaactcctaatgtaattttattttataatttaataaaataactaatcaaggtaattttaaaatgactatttatggggacaaatagccctatggaatatttaaatgtgaaaaagattatataaccattaaactctgtggtattgttcaaggttgagatagctagaaaacagaaatatcagtagatagcaacagcaatcagaaataaaattgaaaagatatctcttacaatataattttgaaacatcaaatccacaaaatgaatctagcaagaaggtgtctgataatactacccagaagaccacataatattgttgaagcaaattaaagaagatgtaaatcaatagaggggggcatacct

SEQ ID NO: 4555 - DNA, 597 bp, Homo sapiens
tactcacatgcagccgcgaaacctactcaggtcgttgtttggcttctcgcattcgatcacgctggtgaacgtcaaaggattgaattcggagacctaaaataacagcacgtagacattagagaaatccgggctcaggctgcgccgttctaaaaggcactcgcttttctgtcttgcatccgcggcaggcacatttcacgggggaagaactctgcctatgaatctctctggaaagccaaagcaccgccttctccactgtataataaataacagttaatcattttataacgagtgacaattgggggaccggtactggttactggttagtaagtgagcagaaatgactgcagctctattgcaaaatgagagaacaggcgataaagcaaaggaggccatcaatgaagcaaagggatgaatgagttttttaagacacacggcacttgcccatttctacagacttagggaagcaaattccacctggaaaacaggagcttataataaattctattttttcaacgtacactacatgatcttcatggatctttgatgaaaaagatttacatagccaatgagtgagccaacaacttctttagtattctg

SEQ ID NO: 4556 - DNA, 621 bp, Homo sapiens
agagagaggaggaggcaagataatgaaaaggtaagccacagactgggaggaagtatttacgatacacatatctgacaaatgacttgaatccaggaggctggccagagaaggaaagcagaccaaggagaaagaagtctcatataatacagccagtttatactctctccagaaagtatatggcataaagcattagaaagaactcattttcaaggctgggtgcagtggctcatattcccacccatattcccaacactttgggaggccgaggcaggagaattgcttaagaacaggagttgaagaccagcctggacaacataggaagaccctgtccacaaacaaatttaaaattaggccaggttggtggctcatgcctgtaatcctagaactctgcgaggctgagatggaagaattgcctgagcccaggagttcaagaccagcctgggcaacacagggagattagctgggcatggaggcttgtacctgtagtctcagctatttgggaggctgatgtggaaggatcgtatgagcccaggaggtcgaggctgcagtgagccatgatcacaccagtgcattccagcctgggcgacagagcaagaccctgtctcaaaaaaaaaaaaaaaa

SEQ ID NO: 4557 - DNA, 443 bp, Homo sapiens
tggcccatcttttaccacaaggcacctcccgagtagctggggttacaggcgtctgccaccacgcccagctaattttttgtatttttagtagagacaaggtttcaccagattggtcaggctggtctcaaactcctcgcctcaggttatccacctgcctcagcctcccaaagtgctgggattataggcgtcaaagtgacttttaataataaattttaaaatcaacaataacagcgctaatgaaatgcttcctctgtgccaggctctgtgccaagccctctatgtgtattgtcttattccatcctcataaccactctatgagggaggtatcattattagttaagttacttattcatggttgcacagtggagagctagaattaaaactcattaaaagtcagctatgggctgggcaccatgggtggatcacgaggtcaggagatcgag

SEQ ID NO: 4558 - DNA, 486 bp, Homo sapiens
ccctaaggctgcttagagcataaatttaaatggagtatgaccacagtgcaaatatgtgccactgaaagctctctatatgaacgcatcatttgaagattaatgttgatagagaattgttttatttaaatagaagctttttcattagaaagcaaagatataggcagcaaactctaggattgatttcccagagtggcaattgtttgtttttccttcaaagctattgtcagttgcaatctgtacagatttttgtgttaacttttagagattatattagatggcatatttttgctggaaatgtcaaataattctaccgaatatatcatatttaaggcagaattggatttgttagcagtataagatataatctgagactggttaagaaatctaatctagaaataaaagaaaaagaacagagaaagaaagaaacaaacagaaatgcctgaaatgcctaaaatgaaaatttcatggaatgggattaactgcagt

SEQ ID NO: 4559 - DNA, 561 bp, Homo sapiens
ggagtgcaggaggccagatcccagggaggtggcagtgctttgcttcgtaggtgcccatttggcttaagatcctaaggtctctgttgccagaagggtcgggcggaggcccgttaaaatcagagcaggaggatcatctgcttttttcttttttctaaaagcagtcggagtaaaccaatctgagacaagaggcttttgtttgtgataattggtttctcctgcaaacaagttggcatgcaacattagctgtttgcaattctaatgaccttttggttgagtacagacaaaattgccaaatggctctaaaataactatgtattctgacctcttcatcaattctctcctgggcaatatttccataagaaaatgggaagaatggtgctcatgcctaggagacctttttatttctccaagttatttgctctcactgtaccttgcaaaggcaaggccctgttttactgacttcaccttcctgtcttcaattttcacatcagatctaagggatacctggttcacacatgttaaaatcccagctcatttttcacgtcagtttattgacatcag

SEQ ID NO: 4560 - DNA, 523 bp, Homo sapiens
taccagggcacttcccagcctttggagagacggggatctctctccactttggtgtggatgcagaagcacagagactagagttgaggcagaaacaagtaagaggctctcccagcccagggcctgtttgggaaggaggaagctgagctgccagggccatcttccaggcccagtacaggcggcacctcccttcctgattgctgccaacatagactctctctgcagttccactctctgatcccatcctgcacaactggatgcacttttggaccacgcactgggacaaaactgaatttaaaaatttaaattaggccaggcgcagtggctcatgcctgtcatcccagcactttgggaggctgaggtgggcagatcacctgaggttgggagtttgagaccagcctggccaacccagagaagccccatctctactaaaaatacaaaattagctgggcttggtggtgcatgactgtaatcccagctactcaggaggctgaggcaggagaattgcttcaacccggtaggtgga

SEQ ID NO: 4561 - DNA, 650 bp, Homo sapiens
gggaggaggtattacaaggtgtgtccaagctctcactccatcttggccaggaactcatttttaagctttctctggggtccccttggctgagaggggagtctagtcattggggggaacaggattttttccttctcagaacctaactgaattacacattatgacataacctcagtgaagtgactgtggtgataaggaagctaactaactttggaaatcagtgaaatgactgaaaactgtatggatgataaaggaactgtacatcgacagtgtactctatcaacatggcttttcatggtagcgaggagcaggtaacaattctgcaactgctttgcatatatactaggtttaaattagtaagtaatggagcctggctctcactgtcaggagtagagttacagatagaacaagaagggaaagacagaatgaaccctgacctatggtactggattaaagacaaagacatcactatgaactcatgtttagtttaatacacatatacagaaaaagtacagaaacaattagagatatgcatgaatacatgggtaagtacatagtgtatatgcattctattacagatacatacattaccctagctctatcctctgagagaaagccatgacactcagcagcaaagagcactcccagagtct

SEQ ID NO: 4562 - DNA, 413 bp, Homo sapiens
ataacattttaaagtactaaattcatattagtatattatcaaatggatatattatcaaatgggtttaagcatcctacacattttaattcaattgattcattttctttttgctttggatttctatcatgatttaaatatttacatatgggttactttttagatttttcatactatgaaatataagaaaaacctttaaggctagttttatgaccaagacgaaggacttcattgaatacacaaaacaataaatatactgcaacattttgtctttccttttgtagctgcaatttggtttgcttatactttctctttgtctctttgaaaactgagtcagtttcactttctcaggacaggatttaataaccataatataatttagtataattccttgatttaggcaaattatgcaattt

SEQ ID NO: 4563 - DNA, 569 bp, Homo sapiens
ggagtacagatgagggtcttttgaaaaatggcagtagtgaaagcaacatttctggttttcttcttggaaggaggagaaaggatagcttattctgaaattaagcaacaacaacaaactgttatgtaaatggagataaaactgttgttgaaaaatattggcttatattctagataaatacatacgcccacataatcccatacagggcaaataagtatgtgtgtctctgtgtgtgtgatgtgtgcatgcatgcatgcatgcttggtagactttatctgctcactgaatactttttccaacccaatgtatggaaagtgacagatggatcagcaatggctgagaagcagttacacatatctggccagcatggttttgattgtatgttgggttgtcagccagctacacaccagaactattattttaggcggctggaagagaattattcaatgtcaatgggaagagagagatacagaaaatgaaatagacactctgtgttttcaataaggcatcagtttgtttgaagccacatctaactgtctgaattcatatgagaacttactaaaagcaatgca

SEQ ID NO: 4564 - DNA, 300 bp, Homo sapiens
ataatactgcggactcttaatcatttgttagatactattagctcatatttcactgataaaaactatataatcacactactacgtatttggttgaataaacattttgcattatgactgtttattatagagactgatggatcctcatatttcataaatcattatccgttttttaaatgtattaattatatagaactagctgaaatttccttctgaattatgacttgactggaggaacttaggtagtatcccgctgggtgacctaaatttgaaatgacagttctgactcaatcaatgacatct

SEQ ID NO: 4565 - DNA, 101 bp, Homo sapiens
tgacagatactaagatctaacatagtctaccaaatgaagagtgacagttaaagacagcttctgttattacctgaagtatcaaatatttagtgatacctttt

SEQ ID NO: 4566 - DNA, 610 bp, Homo sapiens
aaaattcttcttgtgagatttaaggtaatgatacgtggccaaagttgatgtgtattcatattactaaaaactttttttttcacactgttgtcagatgcttatgtatatctttttggctactcattgttatatttcaaatacataaaatgtagattttattcaatttacattgatacttttagaagactttgagaataggatgtaagggacttgcttttctgtttcatcattaataatgtgacccatgactggatgacattaataaatgatgttccatactaaaggcaattcttgataagagacattatattgctctagtacacatgaaccatgaaccaataatttccaatttccaaaagaattcttctccacaaagaccacaatgaatttcaagtgagatttaggatctgatttaaatgaacttagaaaaacatttacttgtattttgtcttatttctcgtttcccaactactctctaaatcatagaattcataggaaatattaactgctttttaatttctccttgggaaattcaccaattttatacgttctgaactaggaatttaactagctcctatacatttacagaaagaaattgactgccacatat

SEQ ID NO: 4567 - DNA, 517 bp, Homo sapiens
agagagtgagacccaaatgtcatagacagacttctgttcactgatgtgtggttcaatatccacttccaggcatagaggggattatgacccatcctcttgagggttggcaaagccatgagtcttgctatttattggcaaataaaatatcagtatttaaaaccttgtgtgtttctccatctgtccttcccccagctcaggcaaatgaagacattgcaaatggtgaaccctgggcccctgagcaaagaggggctgacacagaccccatgccatgccattatggactactgcatgagtaagaaataaaactttgggccgggcccggtggttacgtctgtaatcccacccctttgggaggctgaagtgggtggatcacctgaggtcaggagtttgagaccagcctgatcaacatggtgaaaccctgtctctactaaaaatacaaaaattagccgggcttggtggtgtgcacctgtaatcccagctactcaggaggctgagggaggagaatcacttgaacccg

SEQ ID NO: 4568 - DNA, 544 bp, Homo sapiens
gccagtgtggtaatacccaatttgaattccagactatcagaagatgtgcaattacatttcagaaaggaaggagcccttctattttaacttgcattgtattcctcctagcagtcatgcatcggaatgatgatgatgttcaatctaattagacacagacttactactttctctactgcctttccatattgctaatattataaatagtatctactttaaaaactataataagctcattgcatctaccaaatttaaaatgctggaaatctatttgttggggcaaaactgcttctaatcatttgaagaactggaagagatacttttactgttaataaaaagccaccacaggccgaggcaggtggatcacgaggtcaggagattgagaccatcctggctaacacggtgaaaccccgtctctactaaaaatacaaaaaattagccgggcgtggtggtgggcgcctgtagtcccagctactcaggaggctgaggcaggagaatggcgtgaacccggaaggcggagcttgcagtgaggcgagatcatgccact

SEQ ID NO: 4569 - DNA, 586 bp, Homo sapiens
ggtactggagattatgagaataatataacaaagggaatctccccctctttgatcttaggctaatactgtaactagctcaccctaatataatgtacaaactggtaaatcctgtatgtacatgtctataaaatgggggaaaatataatgatatattttatgttttgtgaccccaacatttttgtaaagtctatgtagatgccacaattttattagtattaattaggcaatttgacgtaaatagagaaagcagttttcttacaattacacaaaggcaagggaacaacgttttgtacaacaaaaacaaaatggttttcagagatttttagtgaatccagattttctctaacgctgccttatgagcaaggcttgcagtcagactctggaaggctattccaataggtaattaaattcaatctgtgcagtgactggcacagaaggtgagaagacaagaagttttacctgccagagatgctcacagttgctgtgacaaccagacttgagaaactggatgtaatctaacacaaagatttcccactccagagcttcccactttcccagtaagagatatatatgaatgactcttgct

SEQ ID NO: 4570 - DNA, 136 bp, Homo sapiens
ttttgagataccaatatggggcacttaaagaataaaaatttcaccactttctactaaacccagagcatatccctatcaataactagccttctattacacatgttctcatttctaaactcggagcaacagcaacaag

SEQ ID NO: 4571 - DNA, 551 bp, Homo sapiens
aggtgtgagccactgtgtctggtccatgcctggcctttttaacagttaaatgtcatttcgttcatctagtaaacaactatgtagtaagcacctactgtgtgtccccgtggtgtgtaggtgctgggcttacagcagtgactcagcagaacaaaggcctccatctccctttgtagagtattttaatcaggacctactgatggacactagggttttgtgttgtttttttttccaacaaatgaagcaactaatagctttaaatgtatattttattacataggtatatttatgtaataaatgggccacctccctaggagtagaagtgttctatttaatcctagagcatgacagtgttatatgtatgtaattcacaagccagagcaggagattcaaactgcccctgatgacagcattcaccagtgggccattttcttagttaacacaggatcagttaactctcaacagctgctttaggtctgcttctccctgccttagattaacatctgtgcttgcctgccctggattctttaagacacatcgaagagttatgctaa

SEQ ID NO: 4572 - DNA, 121 bp, Homo sapiens
aataaatcggaagcaaattttctgtttattaacagtggttgcagaattagaggaaacagaattagagaaaactaggtcaataacaaacaaatagaaacattaaagcacttttaactgatga

SEQ ID NO: 4573 - DNA, 493 bp, Homo sapiens
ggagaccaaataaacactgtcaaatgcaacagacaagaggaaaaattgaactaggataaaaagtcaaaatttcaagtgaagctaacacctacatagcagttgtgtgccaggtacagttcgaagtgccatatatatatgttaataactcaccacagatctataagtggatactattattacacctgtgttacaaatgatgaaataagaggccgggcttggtggctcacacctgtaatcccagcactttgggaggacaaggcgggtggatcacctgaggtcaggagtttgagaccagcctaaccaatatggtgaaaccctgtctctactaaaaatgcaaaaaaaattaggcgggcgtggtggcatgtgcctgtagtcccagctactcgggaggctgagaccaggagaattgcttgaacccaggaggtggaggttgcagtgagacaaggtcacgccactgcactccagcctgggcgacaaagcgggactccatctc

SEQ ID NO: 4574 - DNA, 563 bp, Homo sapiens
cttgagcctgggaggtggaggctacagtgagcctgattgcacgactgcactccagcctgggtgacagaatgagaccctgtctcaggggggaaaaaaagtcagggagtggcaccctgtggtggtggaactgatgttagcttctaaattacacaatctggaaactgctatagggctgagaaggaacttccccttgcctctcacatacctggggaggcaaaggattgccttgttcctccacacatggtgcatggtaaagccccagcattgagaattatccagaaaccctgggtagctcttgggtttcctgaatccattctaggctttcaggtaaatgtgttgtttaagaaaaaacttgcagctgggcatagtggctcacacctctaatcccagcattttgggaggccgagtcaggaagatcactggagcccaggagtttgagaccagtctgggaaacatagtgagacccatttctacaaaaatatttaaaaattaaccaggcattggtggtgtgtgcctgtagtcccagctacttgggaggctgaggtgggagaatcgcttgagcc

SEQ ID NO: 4575 - DNA, 412 bp, Homo sapiens
tctgtctcaaaaaaacaaacaacaacaacaacaaaaacacaactcccaccaaacgtggcttctgcatggtggttcatgcctataatcctagtgctttgggtcaaggtaggaagattgcttgagcccaggagttcatgagaagcctgggcaacacagcaactcacctaaagtttcaggtgactgaaaaacagcagtttccttgccatcactcacggcaccgaattcaaagtcaagaaatcctgattccagaccgtgtcaggtaccatccaatgccttacagtttattttccatctcaaggaggaaaaaaggccttttcatgcttgcctcatgacagatgtgggaaaatgatgtatgtgtatgtaacgttcttggctgtctaggcatggtggctcacacctgtaatctgagcat

SEQ ID NO: 4576 - DNA, 433 bp, Homo sapiens
tgaggcaggagaattgcttgaacccaggagatggaagttgcagtgagctgagattgagccagccttgccccagccatgcagaccagggctcctcagctagtctcagctcttggtccatctttaccttggccttccccattccagctccaccccactcacccccactctgcccagctaccctccctttgttgccccagatctctttccctaaaaccctgcaagttctgctgccaacacagctggtgttgatccccgtattcaagagccacacattcactttcagaatccacctctcacaaaagagttcacaaccagtgagtgagtattttaggggaagccagaacctctcaccaacccttaggctttatttgcacaacaacatgaaatagagttgagtatccttagggtagatgaacattgacggtcacactga

SEQ ID NO: 4577 - DNA, 565 bp, Homo sapiens
ctattccttggtaacatgacttacagtttaattaaggagactaattcaactgtgacataatttacatgataaaagttgtcaggaggattaaatgactcaataccttagaacagtccctgtcacataaaaagtactcaatacatttcacatgaaactcagtaagtttcagctattgtcataattattactgttattaatcatatcgttacagaaaaagcaaaagtgtggatcaaacacagctagattctaactcaaagtctacacttagagcatttcacgtaacttaactgatccttatttccctcatgtgtttaaaaacaaatggtaacctacaggtgtggtaaaatcgcatagcacggccaggcataatggctcacgcccataatcccagcactttgggaggccgaggtgggcagatcacttaaggtcagaagttcaagatcagcctggccaacatggtgaaaccccatctctactaaaaatacaaaaattagcccagtgtggtggcacacacctgtaatttcagctactcgggaggctgaggcaggagaatcacttgaacccc

SEQ ID NO: 4578 - DNA, 568 bp, Homo sapiens
taaaacattatgattataaattttctctgaataagttgataggagattattcctgttcttataatgaggtttttccattagcacttttcaagtgtgcctttcaaccaatgatatgtttttaaaaaataatgtaacttaagtaccttatgattaaccatcatggagtctagaaaatgtggagattctaaaacagtattgtctgaaaacatagaatagttggacttaatgttctcttcagaaaatctaactgtaaacttggtactttcctacagttcacttgtgaaaaataatatctatgaagatggagagattcctaaaggaattccactattttaccatagagcccaaagtttccttgacccaagcaagaccatcaaggagctatctggattgtatgatactggacctcagtagaactacttttactgaattgctggagccaaaactaggctgcagcaagagaaggcaattagggtacaaaatctaaggaagctgtcattctgaggatcatatgatagatgctgggttaagacatatggctgggcatggtggctcatgcctgtaatcc

SEQ ID NO: 4579 - DNA, 325 bp, Homo sapiens
ttgggaatctacttaagtaaaaactacatttctaaggtatttttatataagtggtttcttgctaattagtagaagatattctttccaaagagaggccttctttactcttcatctctgcatgttaagctgtttatgaaaaatacttaatatttcaaagatttctcaaagtctcagaaataaaggtcatcatgaaaatcaacaaaagtaattatggtccttatcaaacacatcaaatgtccgtgcttgcttttttgtccatgttctggaatattaaaaatgttagtcggctgggtgcggtggctcacgcctgtaatcccagcacttt

SEQ ID NO: 4580 - DNA, 97 bp, Homo sapiens
tagcttgtttcatatacattcagatgatgatccttctaaaatttcacatttatatgaagcacatccaagagtaaaattctatagttctgtacctaat

SEQ ID NO: 4581 - DNA, 492 bp, Homo sapiens
cctggaggttataacacaccccaaactatagcaagtagaaaatcaagacttttgtcatggaataaacaggtcagcatctacatttccaacactaggtctttgactactgtctggttatgaaacatttactcagcatagtgaaaatagatctctttacaattttgatgacggtactggtattgactttatgaagtccagattgcagggagcaatgatatactggtatgctggtttcagtggaagaagggatctaactacatatatggatttagagtaaggaagatgttggttgggctcagtggctcatgcctataatcccagcactttgggaggctgaggcgggtagatcacctgaggtcaggagttcgagaccagcctggccaacatggtgaaaccccatttctactaaaaatattaacaaaattagccaggcatggtggtgggcacctgtaatcctagctactcgggaggctgagacaggagaatcacttg

SEQ ID NO: 4582 - DNA, 625 bp, Homo sapiens
ttttacaatatggaaaataataataattattatttttttaagacagtcttgtgtcttgcttgttgcccaggcttggagtgccatggtgcaatgtcagctcactgcaacctccgcctcctgggttcaagcaattctcatgtcttagcctcccaagaagctgggattacaggcatgtgccaccatgccaggctaatttttgtatttttagtagagacatggttttaccatgttggccaggctggtctcaaacgcctagcctcatgtgatctgcccacttcagcctcccaaagtgctacaattacaggcgtgagccaccaatgcccagctggaaaataattattcttaacttttaaaaactaaatagaggtaatgaggagaaataaactaaattaaaaatgcagaactttgaatcctagcttcacaaaatatctggtttaataattctgttaaattcttttattcagtaaatactgacttggtacctacagagtacaatctatttcagaataaagtgtttcaattgttgactcatctataaaatgtgaactagaaacagattgttttttcaaagagccaatttcaaacagtactggaaactgtatggatcacgtactacacatactta

SEQ ID NO: 4583 - DNA, 646 bp, Homo sapiens
gaacctttaaagaagcacctacacatgtgtagagcgttattttacttcacttcagcaacctctaactaaccaattatattaatgataatcatgaatcaaggatctcagcagtgcttacctgtctcataatgaaggatgtctgcttattcttcatccccaaagaggtctgcagctcagaagggctgaggcatatagaaaactgaagccagcttgccttgatgactctgaggaatatgccaggctaagagataaaaatgatcaaagaaatacatgattattctaattcatattagcatgagaaagaaagtaaattaattcatatattgtgaatgaaagaatgttattgaccatgattagtctgcaaacagtatctcatgctgtttattcattaatggctctttttagcacttttttctgccacatttagtaagcacttcatgtaaaagggtgtgcctctgagtattcataacacacattcgtgaaccatctagtcagattcacgttgtacacttttccaagttgaagtctccggcagccaatttcacaattctttgtcctataaaattcttactttatccctacactgtggtatgaagtatcatttccttaatctttattttggcttatctctcatatgctctatact

SEQ ID NO: 4584 - DNA, 580 bp, Homo sapiens
catccctgatccaacagcttctacatgatgtagcagcttctacgtttcagtgaaaatgagctttgtaaaggatagcctcatggtatcaagtaggctatatctaaaatcaaagtatggcaagactgaaagagtagtatggagtactccaggtatagtaggtctttgcctagtaagagaagtcttctacttgttcaaagagctgtgatagtcctatgccatttcagagcctcactggaaaatgttattaaaggccactgtttgccctcaacctggtatatttcgctcttcatttataaaatatatctgattattagaaagctgggatagggaatgcacaaattaataataaattatgagaaaagatcatcaaaattgtggtttttaaaagagtatctgaagccacgtgcagtggcataggcctgtagtcccagctacttgggaggctgaggtgggagggatgcttgtgattaggagttcaagactagcctaagcaacatagcaagatcctgtgtctataaaatgtaatttaatttaatttaaaaacagagtaaataccacacagatactaataaatgataca

SEQ ID NO: 4585 - DNA, 580 bp, Homo sapiens
atgttaaatgttcttactacaataaaaataaaattagaaaacacatttaggatgatgatgaggaagatttttgaacattgtctgtcatcaaattatgggataatttcccaagggaaatgtgaaaaaatgccatcattgaagacatttgaaaccagactgaagaaaaacacatgaacacataaagttggccttgttcttctgcctacatggatgacaagacccaaacatgacctaagacaccattagattttacagccgatgagcaccttctgaccacccactactgtgagggatgaaaggggaaaattgggctggaactgatgactcacatcaggaagacttgctcagtgtgttcctggctctgttacaacttcccgagggtgctaggaaaggagcagtttgcaccaagtcatcatactcccagttcatagaagtttccagggaatacaggaggctcttctctactgcaccccacttttttaattggtctgtgttttgttttcttttttttaagtcataaataacccctgtagaagaccagaacatacaatctatacagaacaaacaatctatacagaac

SEQ ID NO: 4586 - DNA, 560 bp, Homo sapiens
gaatgtcaggaagttcagtaaggctagaggatatgatgcaattaaggtggaggaggaaaaaggaggagaaagaagtctgagaaaaggcaaaatgttaaactattcttacactttcaaatataacacatatacaagataattctaggagaaaccccaataaacccaaaatagatttattttaatacaaaaagcaattaacataatttttgaggagtttttaatgcttattttggggctaaaagtgtatgtaaactttaaatgatgaggtgatgtaaagaaaactatcaaatgtataataatgctcaagtatggcacacaaaatttggaaaaacattgggaaattaaatttatgtacaaaataaggagcttaacctttatctgaagaatagttaagagcagttgaaagattaaaaacatttttgtgttagagtttttatcttggaaatattcgcttagcctgagtctaaggaaaatttggttcctagtaaagtgttggaaggtaggcaaaagatactgctgaggatggctgggcacggtggctgacgcctgtaatcccagca

SEQ ID NO: 4587 - DNA, 444 bp, Homo sapiens
catttttttaatggctgtattcctggaagagccacttattccttttcttttaccttgtattcaataactattgagtgttattgaatgtgccgtgtttggttgagtgcaaaagatccaatgagaatgagttctagttctttcaaagaatttataggcttgggacttgggtggactaatacacaggaaattatcaaaagggaaagagagagaagtgctatgattggctgatttaaaaacccatagaaaggacactcaacctactcttgatggcatagcagatacaatcttgatggtatagcagattaacaagactaatcttgttcatcctcaccaaatattctatattgccccctatattttccacctttctctgcagttacaatggagtcatgtgactaattctgaccaagagaccgtgagcagaagtaacacatgtcacttcct

SEQ ID NO: 4588 - DNA, 540 bp, Homo sapiens
tttcaaggcagaaatgggatatgtgtgggcgatgcttttgcattgacggatggtttctttgctggaggctggcagatgggtggcaatgtggaaagctatagattggaatgaaacagcatggtgctcttccctgccttaaattcctgcatagctttgttcactcacttgaagaaaaccccccagaggacgtgaccaatagtataaacaactaccgtgttaactctggcacctggttgaaattcaacccttgtacgatacacattgaaaagcacaaaatgggctgggcatggtggcatatgcctgtaatcccagccctttcggaggctgaggctggtgaatcacgaggtcaggagttcgagatcagcctgaccaacatggtgaaaccccgtctctactaaaaataccacaattagtcgggtgtggtggcagatgcctgtagtcccagctactccggaggctgaggcaggagaatggcttgaacccgggaggcagaggttgcagtgagccgagatcgcgccactgcactccagcctgggtgac

SEQ ID NO: 4589 - DNA, 560 bp, Homo sapiens
catccatgagcctacctactttatcatagtgctataattctccagatgtctattttaacggtgccaaaggtaagcaactgggatcagacctatacagatacagtttacttctgccaggtttctgttcaggttcacaagctcaaaattagaggtttaattcaattgcaaaaatagagtttgacattgaaatttgtaccctaggacaaatttgctgttttcctttaagagcttattgctctgtttgaagaatgctcaaacaggtttagcctagaacaaaatgcgggaaagataaaggagccacaaaggtttaggatgctgcccttggagaaacttatcatgagctgataacttctaagcaaatagaggtagtaattggatgagttctcttaattgaatgcaatagagaaagcgcaaattctggtcttgcttctgatatgcattaatactacataatttttgaacaaccttgagacaagaagtgacagacgtaagactggaaagctcccagatcatcctcaaaaagagaatagtgtattcaaatactgctttcagaatagcat

SEQ ID NO: 4590 - DNA, 499 bp, Homo sapiens
attgcctgttgccttggaggtgggctgcggtccctctgcccaggcaggaaggggctccgaggcctctggaacctcattttaccttttccctgctgccctcagtcccgtccccagcctcaaggggctcagctttttccaggctcaccccttccatttataatttggagacaagcaaggtccactgacgctaactccatttggttctttaaaagatgttaggccgggcgcggtggctcacgcctgtcatcccagcactttgggaggccaaggcgggtggatcatgaggtcaggagttcgagaccagcctgaccaacatggtgaaacaccatctctactaaaaatagaaaaattagctgggtgtggtggcggacaccggtaatcccatctactggggaggctgaggcaggagaatcgcttgaacgtgggaggtggaggttgcagtgaaccaagatcgcgccactgcactccggcctggacaacaagagtgagactccatctc

SEQ ID NO: 4591 - DNA, 500 bp, Homo sapiens
ttaaacttttggttagaattaaaccacaatatccacataagataagacaataatactcctaaattgcactctaaagagctctcaattacaatctcagaaaaaaggagctccaacttcccattcatgagaggagtccattcaggaagcagacctacttacatagcagccaaggaaaaccacagcagctagtcaaataaaccaagtcttttttccttcaatctgactcaaaaaacaaacaagaaaaagctaatagaatgaagtagagagatcaatttaaacagttagattaaaacaaaaataatcaaggagaataaaaatgaattgttaaaggaagaaaatatgcattcataaaaagcatgaaaaaggatacgataataaggaagagtcaaataagataattgtcaaggaaaaacaaaagacttctaaagataaaaactgacataagccttcagaataaaatgctttgtattattagtatatgaatttgaaaaagacaccct

SEQ ID NO: 4592 - DNA, 613 bp, Homo sapiens
atacactaaaagccttacatgaagttacatctacaaggttttttccagtatgaattatctgataaaccttatggcaggatgctcattgcaggcctttctaccaaatgacagtgttttataaagttaaaagtaaaacacagaagtagaaaaaaaaacagaaaacgcaaaaaagctaaccagcttcataaagagtttgtaaaaaaaaagaggctatcatatttttaataattaatccatttgaatagtttgctaatattaaaatttagaggtaacaaaaaattatgtaaaatttatatacaagactttagccttaaatcttttttttcttttttttcttttgagacagtctcactttgttgcccaggctagagtgcagtggcacgatctcagctcactgcaacctctgcctcctgggttcaagtgtttctcctgtctcagcctcctgagtagctgggactataggcatgtgacaccacacctggctaattttgtattttttgtagagatggggtttcgccatgttggccaggctgctctcaaactcctgacctcaagtgacctgcccaccttggcctcccaaagtgctgggattacaggcatggaccaccatgcc

SEQ ID NO: 4593 - DNA, 625 bp, Homo sapiens
gttgaccatgtgcctcacccctggctgccctcaggaaaaggcatgaggatatgtccctgccagggaaggggcagagcctatcagggttccagtggtaaaacacgcctgaattttaactcaagtccatctgccctctgtccccatggctgtctagggcaaccctgaggacaggtgcctcttcaggccccacccttcaccctggccccatcttcacctggctcccaagcaccagctccgcccagcacagctggcagccgccaagcccctcgggtggtttccactctactctctggcagatgcctgtctgtcctgggctaggcctgggctggagctaccaggcctttgtctggaaggtgctcggtagccccgtctctcctgcctggctgaactcaggtatgaagcctaaaaccccttaggccctgtcttgagcctcaacaccttggctttgcctcccagactctgatctctcagccattaagaagggaggaggaggccaggagcagtggctcacacctgtaatcccagaattttgggaggctgaggcgggtggatcacgagatcaggagttcgagaccccgtctctactaaaaatacaaaaattagctgggcatggtggcgcacacct

SEQ ID NO: 4594 - DNA, 613 bp, Homo sapiens
gtgcaaaaaccagatagccaggattatagcctgtgcttgattttaaggtcttgtttctttggatgttgttgattatgataactctgttgtaaaaaaataatgaatacgttttaggctatttgcagaaaggcgagagaattaattttgaatctgtgagtgataacagtgggttatcaagaaaaaaatctggagcaagtcctactaggcttctaagaagtaattcactcatatgctatgttaaaatttttctgttcttatctttctttctttacctttcctttgttctttaccatgtgctcccaattctctattctctctcttagcagtaactttatgcacctgccattttttttttgtacccattgcttccttgtattctccatccatcaatcaataagccttgggcttccaggactctgcttctttggatctaagcctggcctgctctctctgttatttgtggtgcatccaacctctaattttaactttgcttggccctatcatgtaaaaatgactatttagaacaaatcattttagcctactcaaactataggattagcacatattgaaaataggtctgtattaggacaatataaaatcattctggcttgag

SEQ ID NO: 4595 - DNA, 544 bp, Homo sapiens
atgttgcccaggttggtcttaaactcttgggctaaagcaagccttccatctcagctttccaagtagctgggacgacttgtacgtgccactatgccctgtgatttttatcttcttacctcacctgtagaaaccttaagtctgcctttcattagatattctttttgaagaaaaaacttagccacattctacaattaattttataaaaagaatttgagttttgatgatatagtatatgccaccatagttcggtgtcaggtgagtttacttactgttggttttgtttcagaaaagtaaaattatgcttttgggtatagagattgttaatggccaggcactgtggctcacacatatagttccagctacttgggagactgaggcaggaggttcacttgagctcaggagtttgagtctagcctgggtaccctagcaagaccctgtctcgaataaataaatatattttttaaaaaagatggttaaggctgggcatggtggctcacacctgtaatcccagcattttggaaggccgaggcggatggatcacctg

SEQ ID NO: 4596 - DNA, 605 bp, Homo sapiens
ctgactcaggtgatctgcccgccttcgactcacaaagtgctgggattacaggtgtgagccaccacacctggccagcctgtgagagctttaaaccatgaaatagacatatggttttgcaaaagtttctacataaatcagaatggttcccagaacagaaaggctcctctgtcactttttttatctggttgcttaaccataagatgccaacccaattaacagtcacacccatatttgcattatatctgtttcatatgttccgtgtaactgcctcctttcaaagtgttggtatatttttcaagtcaactggaaccaaaagtatagagaaactgaatgcaagccagtttctgcatatgtaacagtgtaagaatccaggttgtatagatgggtttttgtttgacacagatgtttctcccagtaaagagaggataaggagctggaactcgtgtcacagttccctacaaaataattaattgatcatgtctactaattaaaatttctttttctgtactattgcagatacctggttttggctgggcaaggtggctcacacctataatcccaacattttgggaggctcacttgaggtgggaggctcacttgagccc

SEQ ID NO: 4597 - DNA, 533 bp, Homo sapiens
caagtaggaacagagatatggagaatccaataaaccaaatcactgagaaaacataaatactttgtagtgtgttcatacaatggaatattaccaaaaataaaacagcaataaaaaataatgaactgctgacatagtcacaacatagatgaagctcaagaacattatgttgaatgaaaaagccacatacaagagtacatactatatataaaatccaagaacaggcaaaactaaattatgctgacagaattcagaaagatgattacttcaggggaaaaggctattagactggaagcggggaaagcacaaggaactttccaaagtaatgaaatgttctatatcttgatctagatggtggttacacatatgaatgtgtatgtgaaaagtcattcagctctatacctcaaattttatgttaccatatatatgtaaactataccataataaaaaagaaaaaaactacatatataagcatggtgaaaaataaggtcagaataagttaaaccagtgtcatcccacaagcaatatcaaacata

SEQ ID NO: 4598 - DNA, 555 bp, Homo sapiens
aagtaagatgaagaagtataatgcgtactcatgaaagggaataacacttgcctgtaatgacaaagataacaaaggaggaaatccacaaaatttaatagtatatcctcctctttcttacaaatatttgcatgacctaatatctcatttttaaaaatgctaggacatcatactccctacataagtcctgcttcatgatatcagcactattaatgcaatatatatgtcaagctttattaaaactccttttgatgtgtaaaaataaggtagaaggaagaattaatgaaaggaaaatgataaacaatatatacaattataaatatacacaattggccggggatcacgaggtcaggagatcgagaccatcctggctaacacggtgaaaccccgtctctactaaaaatacaaaaaattagccgggcgtggtggcgggtgcctgtagtcccagatactcgggaggctgaggcaggtgaatggtgtgaacccggtaggcggagcttgcagtgagccgagatcgcgccactgcactccagcctgggcgacagagcgagactccgt

SEQ ID NO: 4599 - DNA, 578 bp, Homo sapiens
gaaactcagagccaaattcacacttcacctttagtaattttgtgagaacctgtaatgtgcatgtttgtgacccagtttccccttagtctcttctctggccttggcttttactcaacatttttcctattttagtatttgtaattttggaagttacttccgatccacctttgtagagaacaagaggatactgccatgcggaatcacagtgtaaaataaaaaatgcttttgcaagcagacggaagtgaggttgactaagcaggagtgaggttattggggtcaagggtgtggagagggaaggtgaatgtgaggggtttttggtttttttgtttgtttgtttggttatggaaacaaacttgccaaggactaggagggtggtgccccagggctggaaataatccctcctgtctagaagaactggggctcctttggggatatccgcagaggccagaggcagtggcagtgctgacctgggtctgattcccctgccagaaacaggaaggaatgccaccctttctcctcaactggagaaagttcgttggattgcaagtaaatgagaatagtggttctatggaactagc

SEQ ID NO: 4600 - DNA, 590 bp, Homo sapiens
cagttactttcaaggctgaggcagaaggatcgcttgagcccaggaggtcaaggctgcagtaaactatgatcacaccactgcactccagtctggggtacagagtgggagcgcatctctaaataataatgacaatactaagaaattcagcaaatggatgtttcatatgtgtgcatttcattgcatgcaaatttataaaatctcaaagataactgcaaacattgaactccagttggtgatatgaatcctgaaatgtttaagggtaaagagtactgatgtctgctttaaaattctttaaccttctttaaaaatacatttttaaaaaatcagatgacttgatagaggaatggactgatagatgtgtaataaagtaaatacagaaaaatgttaacaattgtagaatctagatgatggggccaggtgcggtggctcatgcctgtaatcccagcactttgggaagctgaggcaggtggatcgatcacctgaggtcaggagtttgagaccagcctggccaacatggtgaaacaccatctctaccaaaaatacaaaaattagccaggcgtgacagcgcatgcttgtaatcccagctactc

SEQ ID NO: 4601 - DNA, 435 bp, Homo sapiens
gactccctgtgagtcattttcctacccacttaggcggtatatcctggagaaatccttccaagtagtagtccaatcgcaattccccagaatatctagaagaaaaggccagaatttctttctcaaatgcagagataatccctcacagttcctcctttcttctgcctccatgcaaaaattagcaatttaaagtgacccaggtggctgcttctctcacctcatctcaccttgagacctggcagtgagaaaaaccacaaatgataatttccatgttgaaccaagactgataccaacatggagaaaacttcctagtctcccacccgctaggaagaaatcaggcttgaaccatatatgttcttagtggtcctaggactctgatggttttttccaagcaccttaggtgtgcagtacccagatcacatatacctgtacctctta

SEQ ID NO: 4602 - DNA, 545 bp, Homo sapiens
ctgatcctctccatcctcccaccctccaccctctggtaagccctagtgtccatcattcctctctatgtgtccatgtgttaagaatggtttttatctttgacacactcaagttttctggaattaaaatgggtttgattaaataattttcagtaaattaaaaatattaccaagataagacagacattacatttgcttccttaaaaaaaatcaaggtctactcaggcttgaatgctcagttgtttctgtgatgaagacaattgtactaagaagtacacttccagaaaaatactgcgtgaaatatattttagttacaaaatattaaaaatttaaagaaagaaaatgtttacaggctatcttgacctcagatacatatacaaacatatacatcctatgtatagtggttaaaacctcacaatccaggctgggcatggtggctcacacctgtaatcccaacacttcaggaggctgaggcaggcagatcacttgacgtcgggagttcaagaccagcctggccaacatggcgaaatcccgtctctactaaaagt

SEQ ID NO: 4603 - DNA, 630 bp, Homo sapiens
tccaatattaatcccctggaccaaatcttcattatctcttttctgtaggatttaaataatttggtaacattttccccagactcctgacacaatccctctctaatttatgcacaaaacagagtttataggacaactctgattatattattctgctcttcaaaactcttcagtaacttcttcatttttactaacacgaatacaatctacttagcccatcacttaaggtattatctaattggattcaatctaactttttaggcttttttccctctagtcttcctcagaaatttataatttcacccaacttgactacctatggtcaatccaattaccccagctagaactctgaatatcaaagataatttttttccttcttttattatcatcccatctccatccagttcatcaattaggatttttatctttaaatgcatcacaaatacatccacttacctccattttcattgctaccatgcgtgctactacttcagtagtcttccaatctgttctccacataggaatcataataagcttccaaaatataaatagcacaatcctactacttttaaaagaaaaactttacacaaattaaacttagcagagtttatttgagcaaaaaaaaaaaaaaaa

SEQ ID NO: 4604 - DNA, 583 bp, Homo sapiens
gatgcattctaatacagccttgctactccacgtgcagcctgtgggcctgcagctttgacgtctcttggagtttgttaggaatgcagaatctcaggctccactccagacctactaaatctgcatcttaactagaccccagatggcccatgtgcatgatcaaagttgagaagcactaccacagcactgttgaagtgactgtgtagcgtgtccatagaccccttcctgctggtatgaacatcctgcccacccaccaggaagtggacagtttcccctccccttttatctgggctctcgccctatggcttagttagcccggtagaaggtgataaaaatggtgctgccagttctgggcctggcagcctctgcttcctctctcagaagccagctggggacagtggttcacacctgtaatcccagcactttgtgaggccgaggcagaggcctgaggtcaggagtttgagatcagcctggccaacatggtgaaatcccatctctactaaaaacacaaaaattagctgggcattgtggcaggcacctgcaatcccagctactcaggaggctgaggcaggagaatcgcttgaac

SEQ ID NO: 4605 - DNA, 548 bp, Homo sapiens
agcgattctcctgcctcagtctcctgagtaggtggaattacaggcatgcaacatcatgcgtggctactttttgtatttttagtagagatggggtttcaccatgttggccaggctggtcttgaactcctggcctcaagtgatttgcctacctcagcctcccaaagtgctgggactacaggtgtgagccactgtgcccagccaacaccatttgtaatatctttactgtccaaacaatggaaaccatgggtgacaccatttgaccacaagacgaatgagaacaagatatgtgagaattggtagcaatatgggggcagggcagttaacatgaatgattcaaagtgaggaacaaagataaacaccagtgatggactaacaaaacatgtgaacacattatgctgttcgacagaaaaactcgatatgcaagacataaactctccctacgataagccagaaacagtgacttcaagaaaaatattgagtggattaatttttcttctacaaaactaaaaaataagaataggacaactctgaaaaagaataatagggca

SEQ ID NO: 4606 - DNA, 638 bp, Homo sapiens
agttattcaaattgagttcttaatgaattacttaaacagcagattagatattgttaaaaagaggaatagggaattaaatgatatatgtgatgatattacctagtgtaaccatcaaagatgtattgcaaatgataaagaaaaaaatgctgccatggcaatattaatatcataaaaatatactttaagaagtaaataaatgcaactaggaatagagaaagctaatgaataataatatttaaaaaaaagtataacaagtatacataagatgtaatatcctaaaccggtgacacatactgttataagaccaaagtatatgaaatgaaattcacaaatttatcccccagaaccaactaatgcacaacataattaggaattttaacatcttctatttataataaccctttttcaaaatgttttaaaacaagtgatccacacagacatgaaaagaattaaagaatataaaaatataattagcaaggtgaaagagagattgttacatcacatataaaaacatgaatataattttgaagtgtagatagataattccaatcaccaacataggacacaaaaaaagtctcaacaaatacaaagacagatgacatatcatgcacacaccataaaatgctgaattcatattt

SEQ ID NO: 4607 - DNA, 628 bp, Homo sapiens
gacagcctgctagaaatgggaaagcagagcatgcatagcacctgctgtagcagaccctagaaagctgactctttggccagcatagaacaaacacagccggagttgcccctaggcggcctcagagactcaggaacaaccggcagcagtgatgcttggcagtgagggtaaagcgaggctaagtggctcaaagtctgcctaagagtcagttaggccccagctttcctttccactccacacaaccaggtgcctgtcccccactactctagcagaaaactatcattcagttatctgaagaggtcaatgctgggggtttctgaactgggggcatcaggcacagtttagggcaggagtattatactgaaaacaagaggtttaaataaacatttatacatgtgaaagatgagacccagcctactcctcaaccttcctcccaaactggctccaagaatggggcagccaagcctatatactccaggtgggaggctgcagcaaccttctctggggaacatgggcagcctaggagggcagagtgaaagacctgacatcagtgatgcctgcagggaaactgtccagccggatggctccatggtgaaccccatcatctccagtatctccagtaacaactgat

SEQ ID NO: 4608 - DNA, 591 bp, Homo sapiens
aagtcctccaaaactccttcccctcagcatttgcatagccagaggggactccagcagaatgagaataggacttttaggaaataaggtagttctctaaccaggaccatctctagctccctgagctctagccgaagaaggggagtaagtaaggaggtctctctcacagtctcacacaaagcagattgctcacaaattgactgaaggtaaagcacccaggaagcaactgcctacaaaagctgctccggctgggcgaggtggctcacgcgtgtaattccagcacttcaggaggccaaggtgggcggatcacttggggcctggagttcgacaccagcctgcccaacatggcaaaacctcgactattaaaaaaatacaaaaactgggggccaggggcatggctcacgcctgtaatctcagcactttgggaggccgaggcgggtggatcatctgaggtcaggagttcgaaaccagcctggccaacatggtgaaaccctgtctccactaaaaatataaaaattagccgggcgtggtggcacgcccctgtaatcccagctactccggaggctgaggcaggagaatcacttgaacccggga

SEQ ID NO: 4609 - DNA, 451 bp, Homo sapiens
gctggtcattgttcaatgctcttataaaccaaagttatctacattccttaaattaacatttggatagaaactgagcaaataaaaggaattactgtcattgtcatcaatttcacattttaaaaaagaaatttgacaattactatattctctatatttttcaagaataatgaatttggagccgggcatggtggctcatgcctgtaatcccaacactttgggaggctgaggcgggtggatcctgaggtcaggagtacaagaccagcttggccaacatagtgaaaccctgtctctactaaaaatacaaaaacttagctgggcatggtggcgggcacctataacaccagctactagggaggctgaggcaggaaaattgcttgaacccaggaggcagaggttgcagtgagccaagatcgtgccattgcactccagcctgggcaaaaagagtgaaact

SEQ ID NO: 4610 - DNA, 630 bp, Homo sapiens
agagtctggctcaggaaggctgagtgactggcctgacaagcagggcctggatttcatccaggactacaggcctcgtcccaacagggccccgccaccacccctggggctcaggaatcacatccctcacactctgggtgtctccccagagaggtccacagccagtctagcactggggtactatgcccccagaaaataactctcctaattacttgccaggaagtgtgctaagagctttcaagcgctgcctgatttaactcccacagcgatcctatgaggcagatatcatcaccccaagtgaaaagatgaaaaaactggtgcacagaagtgaagcatctggggagcctgggtctgaacctaggtggtctaactcctgggatcaagcctagcgatcaagccgcccctacagcactggttcaagtttggccacaagtccggcatggtggctcacgcctgtaatcccagcactttgggaggctgaggcaggaggatcacttgaggccaggagttcgagaccagcctggtcaacatgggaaaaccagtctctactaaaatacaaaatgttagttgggcatgatggtgcatgcctataatcccagctacctgggaggctgaggcatgagaatcacttga

SEQ ID NO: 4611 - DNA, 593 bp, Homo sapiens
acatttgccacacggttgggagtccttccttccttgctctgacactaacacggctcttatactcgacctttgtcccctctgtcttttttctctctcttttttttaactaatggagacacaggcataggttaaaatcagagatatcttgctcaggttttcagagcaaacactgtgttccagcccacagcatacaatagtatatgcagaatttagacactatcttcccaaactaaagagtgaacacctttcagtactttctagaacaactctagaaagaaatatatagaaacagcaaccaagtatttagcagtttttctaatttgtaagaccctttgggaaaaaaagaaaaacaactatatatgttaagaaaaataggtaaaaatcggctgggtgcagtggctcacgcttgtaatcccaccactttgggaggccgaggcaggtggatcacctgaggtcaggagttcgagaccagcctggccaacatggtgaaaccccatctctacttaaaatacaaaaaaattaagctgggtggtggaggtggacacctctattctcagctactcgggaggctgaggcaggaggatcgcttgaac

SEQ ID NO: 4612 - DNA, 575 bp, Homo sapiens
acagttgggattgctggagcctttggtgggggcagacctctctgccttcccttccctgtggccccaggagacacagtgggctcagaggatgggctgaaagtatatagacagtaactctcattcttgaagggctctcaataccaggaatcatccagataatatcagataaaaaggaatctcaaaagcagtaggaaagcatagctcagtttcctttaaatattgcttcttggccatgtgctaactcggggctgcacatggggcagcaggcagacagatcacagagttggctgtttcttggcattcctggacatcagggtccagaaacactgctgggcacctggagccagggaccactggcctggggatgagaattcctgagctgaatccatcctgccttgtactgagtaaccctggagaaggccctttggggcttcagttcctcactaagctactcaggatcaagggaaacctgcaaagagccaggcttaaaaagcagcaaaaccagggaggcaaatgttgcggtttaagtctagacaagttaactacctaccagaacaacaacaacaacaaaagac

SEQ ID NO: 4613 - DNA, 602 bp, Homo sapiens
tcacgcctgtaatcccagcactttggaaggccaaggcaggcggatcacaacgtcaggagatcgagaccatcctggctaacatggtgaaaccccatctctactaaaaaaatacaaaaaattagtcgggcgtggtggcgggtgcgtgaagtcccagctacttggtaggctgaggcaggagaaaggcgtgaacccgggaggcggagcttgcagtgagccgagatcgcgccactgtactccagcctgggggacagagcgagactctgtctcaaaaaacaaaacaaaacaaaacaaaaaactattagagatccgtacatatgtgttttgcccaatttatgacaaaaatgacaatacagtacaccttcatttcctgctccatcaaccgcagactgtatcccttaacttcctactttgtaaaaatgaggacatttgcccttcaatcttttctctctccatggctacttccccacctctatcagctgtaccttttctttcatattgtctggctgagaacattcacattctattttgtaattacagataagtgttctgtaatagcactatgggttgattctaaaattgaaaagtaagtgcattcacaaata

SEQ ID NO: 4614 - DNA, 573 bp, Homo sapiens
taaagatttagattgatgtcaaagactggtggactgtgggttgataagaacccaccaacatattttgtttaatctgcagtgtttaaataaaattgatattttgtgaagttaaaagtggggaaacttcaccaaaaaatttcacacacaaaagtaagaatatctggcaagtacgcccatgttgccacttcacaagaatctactggagcttcacaacagctgctccctttggccaagctcatttgctgtgtacactcacatcactccagtgtattatctacctggctgtggcaggcactttagtttgcaacccttgcattaaggcatcaccctattaaggaagaggcagtgggcagacacacttcactttaggtgcgtaaaagagggaagggtctcaatatctcacataggtctgctaaccttccagaaataggattagtcaacaaatagggtcttagaaacaaacaaacagaaaacaacccagatgagcactgaaggttacaataggaaatgtaagtagaaaaacacaattaaacatgacatgtgtactcatataagtcattcagttcgagagca

SEQ ID NO: 4615 - DNA, 576 bp, Homo sapiens
ccagcagtaaataagggagtgtgatgtgacctaatgccagcaggtaaccttcatttgctgttgctagactatttaacatattctaatttatatctgtaatttacttcggcttcgctctagagagtttttggctcctcattagtcctggagtgactgaagcaatatacttgttccctgaagaagggtcctacctagttcttttccatcactctatctccttggctatcttctgtctacagtaccctgtttctgtggctcctttacaaactttctcttaagttaaaatctcctatgtacttaaacacaattaccacatccctcccttccatccagaaattgcttatgaactaatgagcacactaaaaattgcaggcaaatgactagctataggaagcagctcaaaatattttaattattcttggttataataatatcaacattcattggcaccttacttgtttccaaccatcagatatttgttatctcattttattttcacacctgaatgaagtagggcacatattccacactccatagatggaaaagatgaggcagttgctacctggaaaatgaaag

SEQ ID NO: 4616 - DNA, 568 bp, Homo sapiens
gtttcagtttatatctattttctttttttccaatctgttgcagtgcaatagaagtggtggtttgttgtgttgttgttttaagatgttgttttaagatctgttcaacagtactctgaacagcaggcactgtatgctttattgaacagaaaagctttaacaagccttatcgtgtacacatgttcattgtgcctgtgtctgcttatgttctcaaacttcctgaaaatgtgggtacaacaacaaagcagtgtttagctaccctacttaacttggccaggtggttgattatatggtttggcatattttttgcaggtggtatacaaaatcatatgtacgagctgttcagcccactgaaacagtttttttgtaacattttttttgctaaatgacacagccccagccacacataacaacataaaatgatgccagagtgatatcttctctggattcatttagctttgcaaagaattctctaagaaagacattttcctgctttcgtttctgtttcatgctgggtaatgttggcaagaattattcatggcacatgtgagcaattcaaaaaaaaaaaaaa

SEQ ID NO: 4617 - DNA, 522 bp, Homo sapiens
gtgcaatctcagctcactgcaacctctgcctcccaggttcaagcaattctcctgcctcagccccctgagtagctaggattacaggcgtgcgccaccatgcccagctaatttttttgtatttttagtagagaccgggtttcaccatgttggccaggctgatctcaaactcctgatctcgtgatccacccgcctcagcctcccaaagtgctgggattacagacgtgagccaccgtgcctggcctgttttgcattttatcataattttagtagactcatgggtttattatgattaatttttaaatgactttctagaggcaggaaaggtataaataatatatgggccaagaatacaatcaagcgtggcactcgttttgtgctgccagatcaaccttttaaaggatcaatcaagtggctgtctgtaatagatcagctcatgtctgtctagcaatagattttatgcagtattttgctaaatagataggtataaaggggttatttgcggccgggcgcagtagctcacac

SEQ ID NO: 4618 - DNA, 609 bp, Homo sapiens
gacagaagggaattgtaactcaggggctgaggggtctaaagaaagaatacagcagagcctgtcaaatcctttgtctatttcattgactgatagaaagactgaactcttatcaggtgaaaatatggatttgactgaaagtcacacaagtaacttaggaagtcaggttcctcttgcagctgataatctagcaccggagagtaccagtgaatctcactctcagagcaaaagctcttcagatgaatgtgaagaaattaccaaaagtcgtaatgaaccatttcagcgatcagacataatagccaaaaacagcttaaccgacacctggaacaaagacaaagattgggttttgaagattttgccctaccttgataaagattctcctcagtcagctgattgtaatcaggagatagcaacaagccataatatagtctactgtggtggagttcttgataaacaaataactaatagaaatacagtatcatgggaacaatctttgttttctaccacaaagccattattttcatcaggacagttctctatgaaaaatcatgatactgctataagtagtcatacagtgaaatctgtactaggccagaattctaaactggctga

SEQ ID NO: 4619 - DNA, 597 bp, Homo sapiens
cttttagtttaaatactagattccaattatccaaaataactaaaacaatacgtgaggtgcttaacgtatcaaagtaagaaatggtttagtgtacccagaaacaagattcctgaaaattttatctctgtaaagtacaatatttttaattgaatacattaactttttaaaataaccacaagggactgaaacatatattttgaagatatactctcaggtaaaatagatgtcaaaatttgttatggttttacatttaacattttttacaatttatttgctattctttccatcataacttgttaattcttgaagatatctcagggctgggtgtggcagctcacgcctgtaatcccaggactttgggaggctgaggcaggcagatcacttgaggtcaggagttccagatgagcctggccaacatggtgaaaccccatctctactaaaaatgcaaaaattagccaggtgtggtggcgtgtgcctgtaatcccagctacttggagggctgaggcgtgagccttgcttgaacctgggaagcggaggttgcagtgagctgcaccccagcctgggagaaaaagcgagactccaaaaaaaaaaaaaaaa

SEQ ID NO: 4620 - DNA, 565 bp, Homo sapiens
taatgtaggccagggtcagaatttgaactgttgaaagagggcaactttgaagaaatttttaagggataaaattgatcacaatttcttgaacaatggatactttttatagaactgaaaaccaaagaactcccagcttccactaagaggactacacaaatctgggggcatacgctaggaaaataaatgggatagagaaaaattacgaaggcactagaaatggaacgtctgggacagtaaagaggtccatattaaaaagtaagttgaaggccgagtgcggtggctcatgcctgtaatcccagcactttgggaggccgaggcgggtggatcacgaggtcaggagatagagaccaacctggctaacacggtgaaaacctgtctctactaaaaatacaaaaaaattagcagggcctggtggcacacacctgtagtcccagctactcggcaggttgaggcaggcgaatcacttgaacccgggaggcagaggttgcagtgagctgagattgctccactgcactccagcctgggaaacagagctagattctgtctccaaaaaaaaaaaaaaaaa

SEQ ID NO: 4621 - DNA, 562 bp, Homo sapiens
attgtatttgaaagaatgaacctgtattttgaatatacatattattcagacattactccacagtacggtctgtgtcaaagcttgaaactgtaggtaatataggttaaggcctcaagtgtctacaatttaaagtgagaatatgtaaaatgtgaagatataatatatgacaatttacacatgccaaatataagattatagcatgtccacaattttctgggctagatgtgatttcaaatattctgccccacttgcactgaaagtatacttgctattattgtcttccacatttcattaatagaggattaagaaattatattcatggcatcccagaagaggtcacatgtggttgaaaatgcttaatagagtagctcaccttcaaggacgggctacaaacacaaagagaattttaaccgtaatgcatgaatgagatagccagtacaggcatgaagcgaagatttccataacattgaggtaatgacagaccgaggagatctgctagagtggccacatacatatcttgcttattgtacacaagtaacgtttatggattttataaaaactt

SEQ ID NO: 4622 - DNA, 615 bp, Homo sapiens
caacctccccctccagggttcaaacaattcttgtgcctcagcctcccgagtagctgggattacaggtgtgtgccactgtgcctggataacttttgtattttttgtagagatagggtttcaccatgttgctcagactggcctcaagctcctggcctccgataatccaccctgctcagcctcccaaagtgctgggattacaggtgtgagccaccatgcccagcctcttgctatttcttacatcaagtgaatttatttgtctgcttaataattattatccgtaatataagtgttcttacatttctaagtatatatacatttttaaaccaccaactcacttctcacccctattggaaatctgtaaaataatcactctctgcatttaaaaataataataacttcagggaaaaatgttcataagttaatgaaaatattaattttgacaacaaaaatgacagaatcgttacaaatatgtttgtacttatggccttcccaaataaatgtcaaattgttacaagctcttcactatatgagctatgtttatttattgttgcattcatcgcatgtaagagaataacatcaaaatattgtttctgatgttaagactatataaaagga

SEQ ID NO: 4623 - DNA, 566 bp, Homo sapiens
ctgagatttcaccattgcactccagcccaggtgacagtgccagactccatctcaaaataaataaataaataaataaataaataataaaataaactggggaggacagagagtggcctaggtagttaaatccttaccatccaatggtaggagtaaatacaggactaaaattgatgcatggagaaatattaacataggaggctgggtgtggtggctcacagttataatcccagtgctttgggaggctgagccaggaggatgactcgaggccaggagtttgaaaccagactgggtaacatagtaagattccatttttacaaaaaaaaaaattgtaattagccagatgtgatggcacgcatctatagttctggctacggggaaggctgaggtgggaggctctcttgagcccaggagttcgaggcttcagtgagccatgatcacactactgcaacagagtgaagagttagagaccttgtctccaaaacaaaacaaaacaaaacaaaacaaattaacatagaaatattactcagagttataaagtgactacctgcaaataaaaataaaatgac

SEQ ID NO: 4624 - DNA, 557 bp, Homo sapiens
aagcaacccagtggcttcatatcacggctttttttctacttctgcatcaaatatatctttccatgtatctgactttagccaccaactcccacatttactttgaggagtgtttttcacccttcacctgtgttagtgacattaataaaaatctttgttaatgattaaataaacagaaaggattcctgactgcttgaggagcttttaaaatattttgtaactttcttatcattgacatttttctcttgaggaattcaccagtatctaaaatgaatctctaaagatgaaatagtgagtgtacttttaaaatagctctatttgggggttatcgtttgggggggttttgttttgtttgatagagagtctcactctgtcacctaggctggagcgcagtggcactatcttggctcactgcaacatccgtctcccggctcaggcagtcctcccacctcagcctcctgggtagctgggattataggcacatactaccgtgcccggctagaggattatagtttaataatggatttatttctaagtgtaaaaccagatgaaaagcaaag

SEQ ID NO: 4625 - DNA, 586 bp, Homo sapiens
tttccccctttatattaccaattcatcatagaccaatacttaagtaaaacaaaataaatatgagttccaaggaaagtaaaataaaaaaatgaagacacccaaaacagaagccctagcttttcatgattagtttcgacatacataaaattacttggtgaagttttcctaacagtttctagattcataatctccatttctatacttacgtcatgatggccaagtttcagaatccacagactgccacagacatggagcctcctgagagtctcagtagttgaaaggagggcagaggagagctcagatttgcatttttgaaaagtgtacctggccagtggctggtgaagcctgaaagaatggatacaggtgaggagggagttgaagtaacccaggtgagagtgtgtgaggcctcagcttcagcagcggtggtggggatgggaaggggatatcaggatatgcgctctggagagccattttcccagtgtagacacaaatgggtgtggtgatttattgggtagggatgtgtgggtgaaggaccacaggggtattgtgatggttcttcattttcaggcttatacaacttaatgga

SEQ ID NO: 4626 - DNA, 592 bp, Homo sapiens
tgtgtggttaaagaggccaaaacataagactgatgaagggttaatttagagatgtgtagtgaataattaactttacccaaagggaagtttggcctttgttctttgctgctgttgggtaacctctaggctctgagtgtcctgcctgagaggaatatctttattctagaatttgtccacaggaaatctaacaatgtgacatgcaatggaagctttgaaccatgccctataagttcagagttccagatgaagtagagacaaaatgcattagtcttatctcttggctgaggatgggaactggagactaaagtttagccacagagacagtatgtgatcaataaaaattctgaacactgggctgagcgcggtggcctgtgatcccaacactttgggaggccgaggtgggcggatcacgaggtcaggagatcgagaccatcctggctaacacggtgaaaccccgtctctactaaaaatacaaaaaattagccgggcgtggtggcgggcacctgtggtcccagatactcggaaggctgaggcaggagaatggcgtgaacctgggaggcggagcttgcagtgagccgagatcgcgccactg

SEQ ID NO: 4627 - DNA, 526 bp, Homo sapiens
ttttatatcacagatgcctctgtaaaaataaatttacatgatgagaccctgtctctaaaaaataaaaataaataaaataaaaataagctattttaaaagttagttatttaaattgaagaatgtggacaagatatactaacagtttctctaggactgatcacccattattccatgaataatagaaatttctgataaggatgttgcttaatggagattttcctatgttatctctgcggttctagtgggtggcaaaggcagctatccgggtagggcactgtaaaggtgtggccttagtcatttacactaggacaataagagaccctccacaagtgtgtaactggataaagtgtaacggcttcccttgatgccttctccactcacactttattgcaaaagatcacgaggtcaggagatcgagaccacggtgaaaacccttctctactaaaaatacaaaaaatcagccgggcgtggtggtgggcgcctgtagtcccagctactcgggaggctgaggcaggagaatggcatg

SEQ ID NO: 4628 - DNA, 616 bp, Homo sapiens
aagctctctgagatcacaagatgaaaggcctgatggcagttcaaagccttccttttgattattattctagtcaacatattttggggggagaaaataggcttaagatcacagtggagtaaatttcataaagagcagagtacaagcaaaccacagaaatggacccaaacagagagtcatgttgccctgctaatggaagcactcaggtcttacgggggtagggagtgcgggtgtgttaagaatcaggccacctggagagtgatatttgctgtcttggattagtaaaataaaaatgcccattagtcttccacagctaccaaaagccagtgtgagtccaccttggccagttagttagggccagtgaccaagcacacctgcagcaggggttcagggccaaaggagacattgtgacgctcatggatgagtcaggaggtgcttgcttgggatgctgaaatcatgtctggaaaggtgaaaatgcagtgagtgacctggaactatcaaattctgagagatacaggttctgaagaggaggcatcagctgtcacatggcctttgttataggactttggtcatgaattatgagtcactagtacctgcatagatgtggtagctcaactga

SEQ ID NO: 4629 - DNA, 505 bp, Homo sapiens
ctctctatacaaggggggtgggggggaagggtgcgtggaagaaagcctgggtcaagagctctgagaacgctgctgccctggcatcattacagcaatgacaaaggagcagaaccttcataaagcaaattagaaaacttcccatgctaccaggtagttcttttatttgtaaatgaggagtggaataattaaagaaaaatcacaactgcattcttagaatgtgaatttgctgatttaccaatagatacttattgattatgcaatatgtaccaggcattattccaaggacaagttgtaagcaggacagataagctactttctcttatgagtcttgcattccaatatagaaacagagataataaagaaataatgggctgggtgcagtggctcatgcctgtaatcccagcactttgggaggccaaggtgtgtgggtcacctgaggtcaggagtttgagaccagcctgaccaatatgatgaaaccctgtctctactaaaaatacaaaaatca

SEQ ID NO: 4630 - DNA, 500 bp, Homo sapiens
accttacatcttgatatacccaatggtcaagaataaaaggtcaaattctaaatggcttccaaattgctgttaacatcaactgtatcaaagcacaatgttttaaatattaaaaacataatcttcatacaaatacacagcacaaactaaagttttgtataactcgtaaatgtgagaaaaagatacttgaccaagagagttcagaaaagaatttgagttaggcaaagccttcttagatatagaagatatgtatcttagaaacaacaaaaataaattggacttcatcaaaataaaaaacttacatgcttcaaaggacatcatcaagtaagtgaaatgacaatatacagaaagaaagaaaatgtgtttataaatcataagtcagataagggacttgtatctagaatatattaagaaaaatgttacaacttggaaataaaaagacaaacaacccaattaaaaagtgaacaaaggatctccatcaacgtagttccaaagaagacagc

SEQ ID NO: 4631 - DNA, 435 bp, Homo sapiens
ggctcacactggtggctttctagggtcacttcctcttacaggaggttgtcgtgaccgctgggaatgcagccaatgcatctcaaagggcagggcatcaccagggcccttggagaccctgtgtatctgtccccatcagcacggcactggtgtcacccacacacgggggctgcctgggctgggcccctctgaagccacagggacgtgagccggggggtgggtgacaccgggaggggacccctcagccctggtgagggcgtggcctgcagggtcggcttcccctggcctgtgggaccctcccatgagccctgactggggtaactcgactggccgcttgccagggtggccttcagctccaggcttttcatcctggacttctgcctttggtcactgttgctatagtgaatgttgaatggaaacaccatgtgaatgtacttt

SEQ ID NO: 4632 - DNA, 582 bp, Homo sapiens
gctggtcatgaactcctgggcttaagcaatcctctagcttcagcttcccaagtagctgggactacaggcacgtgctactgtgcctggccaattttttaattttttgtagagatgagatcttgctatgtttccccggcttgtctctaactcctggcctcaagtaatcctcctgccacagcctccccaaatgctggcattacaggtgtgagccacccatgcctggccttatgcacccttaagcacaacacaacactggccttgagatatatgcaggtttcttggtatggatacatacccaagctccatgtactgagctactgataaagaaattatggccaggtgcggggctcacacctgtaatcccagcactttgggaggccgaggcaggcagatcacgcggtcaggagatcaagaccatcctggctaacatggtgaaaccccgtctctactaaaaatacaaaaaaattagccgggcatggtggcgggcacctgtagtcccagctactcaggaggctgaggcaggagaatggcgtgaacctgggaggcggagcttgcagtgagccgagaccgcgccactgcact

SEQ ID NO: 4633 - DNA, 470 bp, Homo sapiens
acttgtgagggtggggtgagggactgagaagatgagctaccaggagtacaccagactatgagtaaagtgtgtataagttgaactaaaagcaaaagcaagagaagaaaaaaatggaaggttaaaacaagtggacaattagaggcaacctcatttctactaaagcaaagacctttggcaataaaaaggattttcacctcaggtataccaaattggctcatttataaattaaacatctttatttcattctcaagtatgcctcaaccttgcctgaccacaattgataaagaaaatatatggcaaaaggagacatctggtcaagagtcctaggcttccacaaagggatccttcagttacttagagacacttctgtcacatagagagggaaacactctaaaccagtattttataactatcaactgttgctacagaatggtgtgtgtatgtgtgtgtatgcacatgtgaacatgtga

SEQ ID NO: 4634 - DNA, 561 bp, Homo sapiens
cctctcttcagactgcctccttagctctcttctggatcactataacagcctaacaattgtatcaccttcagttttgctcttccttccatatgactaaataaatgaaaaatttgatcagacattaacgagtagggagagtgaattggtaataaaaggtccacttattttgtcttacagtgagagtggcttgctattatctcccattattgatgcatttctatctttgtcttcctgcatcccctgcagtttttgcttcataagaatgtttgcagtgttatttggtaccatacatattcatgttaggtctttattgtgaattacagattttagaattaaaaaggagatttgggccgggcacagtggctcacgcctgtaatcccaacactttgggaggccgaggtgggcagatcacctgaagtcaggagtttgagaccagcctgcccagcatggtgaaaccctgtctctactaaaaaaaaaataccaaaaattagccaagtgtggtgtcaggcgccataaccccagctactcaggaggttaaggcaggagaatcacttgaacctg

SEQ ID NO: 4635 - DNA, 483 bp, Homo sapiens
tacaatgactaatcttagacactcttttaactggtgacactcataacaaattgtcatcaacatcctcattgtcatggcaaattgtgagtttatctttgccagtgtcagatagttcatcaacttccttttagccagattgcaaaaagtcccatgactctatttccaactccaatgccatctgacatgagacaaaatcagagtagattaagatagtggtcttaactgaatgtagttaaagtatgctacttgtgcaaatttttcagaaatatatgaccatatgaacatgttgctgaggccttgccaggccttgaaaggggcctgtgcaagtgaggggcacagagattaagttttattagcttctcagaaattctacctctgaataagatttttgagtactttgcatgccaggatgaggagagtgaatctaagagatgtattgaatgaagaaggataaaggatgtaaagtaaagaatatagagtgct

SEQ ID NO: 4636 - DNA, 509 bp, Homo sapiens
ggatgttcatgcctcaactgtgtataatacataaaataatctcataatggttagtgagcctgacaatcttatggtttatgctagctcagtgaagcaaatcctatcctatggtttcattttctccaaaaatggccagccagctatatatagttattttggtacttttctgagcttaaacactaaatttgacttggtatactttctctctctctctttttaagaatgctaagtggttaaaattgaaaaatatgttgatatcaagttgaatgatatgtaatttcagcactactcaataatgttttgaaaaacagagcaaggagataatggttaggcctgacctagattaacatatggaaattggaggttgccattgtttctgttacaaaatgttgccagcataatttgtagtaatacaagttaggctacaaattaagaatggctaacaccaactacagtgtctttgcattgtctcagttcaattttgagtgtgacctataactataaaatct

SEQ ID NO: 4637 - DNA, 416 bp, Homo sapiens
gacattaccattgacaggaccaggtgttgcatcaagaaatctgggggttaaagtaaattttgattttaatgtgtgtgtgtgtgtgtgtgtgtgtgtgtgtaagaaaaattactttcatctccttaaaaaataataaagtggtaagtagagatgatctgtgcatgtgtgttatgtatatcaagtattaatcatagcatatataccagagtgcatgtgcttagtaaatgcttatacaaaagctgagtcatatatgatagcacctcaatcctagctttgttctttcaacaacgaaataacactatttctttgcttcattagctttctgagatgagtagtcttatacattaaatccctctaatagtccgaatggttttcaacagtttaatcactcattctattaaatgttaagcatacat

SEQ ID NO: 4638 - DNA, 536 bp, Homo sapiens
gacagcttccctgtgatttcgggtccaacccaaccaatcatcatttccccactcccaggtcccctaccttccaaattatccttgaaaaactctagtttccaaattttcaaggagactgatttgagtaataataaaactccagtctctttttagctagctctgagtgaattactctttctctattgcaattcccctgtcttaataaatgggctctgtctgggcagcaagcaaaatgaacccactgggtggttacatcttcattagcttagtcctggagattcttttcagcttgtaaccaagatctacctttcagtttaacttcctgctccatgttgcctgccctacagataggcacaaaagataccccatacatgggctcctggttcctttttgtctttctttttttccaggaattttaattgtacacactggctcctcctgatttgatctccttctgcttgggactagcaacttggatccagctcagctgccagaaatagcctcctctggtaaagttctgcaatgtttattgacat

SEQ ID NO: 4639 - DNA, 603 bp, Homo sapiens
tattgatcactgtgtcatccgagagtacatgtacagttggttctgcagtatgtgttagtggtcaaggagcatgtcccaccatcaagcactgtaacatcagtgactgtgaaaatgttggactatatataacagatcatgcacagggaatatatgaggataatgaaatttccaataatgcgttagctgggatttgggttaaaaatcatggaaacccaattattagacggaatcatattcatcatggacgtgatgttggtgtgttcacatttgatcatggcatgggttactttgaaagttgcaatatacacagaaataggatagcaggctttgaagtaaaagcctatgctaaccctacagtgtttcgatgtgaaattcaccatgggcagactggaggaatatatgtccatgaaaaaggaagaggacaattcatagagaataaaatctatgcaaacaactttgcaggtgtatggattacctcaaatagtgacccaacaataaggggaaattctatatttaatggaaatcaaggaggagtttacatctttggtgatggacgaggccttattgaaggaaatgacatttatggcaatgcattagcaggaa

SEQ ID NO: 4640 - DNA, 568 bp, Homo sapiens
cacccatcctgtgtactgctcatgggaatcacttacaccgctctgccctgggaccatgttccaataagccctgtcagcggttctcaaacttagtgccttgcaatccctggagggcttcttaaacacagattgctgggtcctacccaagagtttcatctgcatttttaccaagttcccaggtgacactgatgctacaggctgaggagccacactttgagaactactggtccaaagaaggctgctcagagctgcttctagtcagattcagtggcctgcaggtgaaggggtaggtgtatctggagccccacctgaagtctggcctggttttcagtgctctaaaagggatgatcaagactaaggattttaaagttaagaggaggctggactcagtggctcacaccagtaaacccagtgctttgggaggcccaggcaggaagatccttagaggccaggagttagaggttacagtgagttatgattgcaccacggcactccagcctgggcaaacagaacaagccccatctggccggatatggtggctcacgcctgtaaccccagaactttggga

SEQ ID NO: 4641 - DNA, 526 bp, Homo sapiens
agcattcgagataatggaagcgaagtgcctctctatagctattattgttcttcttaatattttcatgcatttggcaccaggcttcccaaaatgacaaagacaaagtctcggctcttagaaagctcaaatcagtcaggcagatgctaagataaaaaaaggaaagcaacagttgtcatttggtgtaaagggtacattgctaaaagtaagaagagggtgccatggaaaaaatgataagcagtacccaactcaaccaggtcactcttatatcacatggcagcatctcatgtctggtgtgcagttgtagggtccaagaaataagcaaccttatagctgaatcaaaaagaattcagggccaggcatggtgactcacatctataatcccagcactttgggaggctgaggcaggtggatcagttgaggtcaggagttagagaccagcctggctaatatggtaaaacctcgtctctactaaaaatacaaaaattatctgggtgtggtggcacacacttgttatcccagctactga

SEQ ID NO: 4642 - DNA, 545 bp, Homo sapiens
acgactaagggggagctgcattcctaccctaggagggtatagaagccgcacccaaagcacaggctcctgccttcagattttgctcagatcaccccaatggctccggtggctctaatttgtcctttcacatccctgagtccttgaacagaacttaactcctttctagcaccacttgcagaaggagaggttggttcttacaattgaaaggcactatcaacatttacagcattcaggccacagatgcaaaaaaatcatatggggctggggcacggtggctcatgcctgtaaccccagcactttgggaggccatggtggatggattgcttgaggtcaggagttcaaaaccagcctgcccaacgtggtgaaaccctgtcactactaaatatacaaaaattggttgggtgtgatggcgcacgcccgtagtcccagctacttgggaggctagggcacgagaactgcttgaatccggggggcagaggttgcagtgagctgagatggtgccactgcagtccaggctgggtgacagatcgtgctattgcacactg

SEQ ID NO: 4643 - DNA, 614 bp, Homo sapiens
aagtaagtagtcaagtgacaccttagcattctgatgaaaagagctttgacctcacagagcttctggaagggtctcagagacatccctgagggtcccttgactgcactttgacaaccacaggtctacatgatctgtatagccttttccagttttcacatcctatgattccaagagggaaaacaatcttccttgtaaagagagttaagtgacattgtgtccttgtctacactcagctgctaatatgctatgggacctcaggtatgtcacttaaaccttgtgttggagtttcctccttgttacatggaggtcacaagaataacaaactatgcatagatcacctaatttagtcattccaactgtgtggagagatagaggattaggatggactttatttcctaagtgagaaacgttggctttagtaaaagtgtagtggtttgtagggtcatccccctaaagatatcccgccccaccaaagatatccctaaagacatcctgctggtttcagtggctcatgcctgcaatcccagcattttgggaggctgaggcaggcggatcacttgagctcaggaattcgagaccagcctggccaacatggtgaaaccttatccgtaaaa

SEQ ID NO: 4644 - DNA, 568 bp, Homo sapiens
aagtaaacctaggctgggtcctggtgatcactatgttttattcttctttaatttttttttcctagctgggatttgaactatattcttctttttaaaatgatatataccattccttttctgctgtctttgttaatgccgttaaattggaagaattttcagtgatcagtgaaaagtctcagttaggaattattaaattaacacaggcttcttgcctacttgctgttggctgaaaatagtttaaaatacttaagtgaaaacttttctctaccacaggaaatttgctttctgagtgaatgaaggttttctataggaagataaatgttcaaccttctcttctgactcattataatcgtggaatggtaaaattcaagtaactgctgttttgtaatattgagtcaaacattcactttaaaaaaatgtaacaatactgtcttaataaaagcttagctgtatatgatcacgaggtcaggagatcgagaccatcccggctaaacggtgaaaccccgtctctactaaaaatacaaaaaattagccgggcgtggtggcgggcgcctgtagtcccagctac

SEQ ID NO: 4645 - DNA, 588 bp, Homo sapiens
gggctcagaggagagaactcccagagggtctgggccctccccattcagagcattgagccagaccaggcctgtcgtggtcacctgcatggaatcttctccctacttaggcactgccaggcggaccatcttctggatgagaagggcagggcacaatgtctcctccagagagagatggtacagtctctggagcagcaggtaatgccagggcggtggagggtaagggatagggatagtgcgcaaaaccttctgtccaccatgtgccagaaaccaagttcacctgggacgagggctggtataaaggaaggaagaggagcgggcactcccagggaagaccgtagcctgggcaaagatgtggcagagaagggccaggctgaggcctcatgtttgtgccatttcacagctggtgctggagaaggagaagctgagtgccatgcaggcccacctggctgggaaaatggcactgaccacggcttcatctgtggtgagcgaccccaggactggtggtggcagactcagactgctggggggcagggaggaggtctgcacggtgcagggaacctaacctcacattcaggtcctgagagctag

SEQ ID NO: 4646 - DNA, 604 bp, Homo sapiens
aatactcccatcaggggactgtgtcaggtatcaaaatatcccttcctgtatgtatcaaaactcatgctgaacaatgagttctgggttgcaaaagaggatttatttgttgcacctatccataagtctttgtccacaagttaaacaaaaacatacataagtgcagcgtgtgctgtttttaagtacattagtagacatactactgagaggccacactgcacggggttaggtaagtggactctggagccagattgctagttcaaagatgtgcccttccatttactaagtgactttaggcaaactccttctcttggtgtctcagtatcctcagctgtgaaatggggatgacattaagaccgatttcggccgggcatggtggctcaagcctgtagtcccagcactttgggaggccgaggcgggtggatcacgaggtcgggagattgagaccatcctgccgaacacggtgaaaccctgtctctactaaaaaacaagaacttagccgggcgtggtggcgggcacctgtagtcccaactacttgggaggctgaggcaggagaatgacgtgaacccgggaggcggagcttgcagtgagccgagatcacgccact

SEQ ID NO: 4647 - DNA, 604 bp, Homo sapiens
agaaggggagaactggcagaggagtgggagggagagaggggtcgaggcagaggagagagtcaaggtgaacgctaagatcctgccggacgactgggtgggtggtagtgctattaacagagacagggaatacaaagtaggcagcaggtttggcaggggaaacacatgcttacttcaaacctgtttaatgtagctgggtgttctccagaagacacccaggaggtaggggactttaaaataagaggtagaggctagggacatttagcacaggtggggacacacctatagatggagaatcaaaatggaccctatcggccaggtgaggtggctcacgcctgtaatcccatcaccttgggaggctgaggcaggtggatcatctggggtcaggagttcgagaccagcctggccaacatggcgaagcccgtctccactaaaaatacaaaaattagccagatgtggtggtgtgtacctgtaatcccatctactcagcaggctgaggcaggagaattgcttgaacccaggagatggaggttgcagtgagccaagatggcactgctgcactatagcctgggcaatagagtgagactcagtctcaaaaaaaaaaaaa

SEQ ID NO: 4648 - DNA, 563 bp, Homo sapiens
aacgtgtcatactctaggacccagctagtaccaaggccagcagaaatttgggtgtagtcctggctaaccccaaagcccatgatacttctcttattcttgcctcccactgcctctggaaggcagaatgcagtgtgtgaatgactcctgaaacccactcttctcactcaatattgggaacctaatttgttattctatcaggactatgcaaggaggtaaggcttcaaagaatcagtccaaaaacaaatttccaacatctcctatacatatgcagataattgaagactagaaggtaggcagtttgttgcacatctataaataacgttgaccctggtcaaccattttccacagacaactcttttggtgctgacttcaagtagtggttttgtgtagtcccatgttggtttctggatagttcaagatgagatggacaattttacagttaaggaggtaggggcagcggggggtggatatcactgtcttcctccttcctcagggcttgtcagaccagttggaaggggatgaacttgtcagttgctggaagcaattttcaggccctgtggact

SEQ ID NO: 4649 - DNA, 551 bp, Homo sapiens
gtagcttcttagaggttgagggggattcaaacttctaagagtttgatggagacttctttaagtacaggataggaaggcatcatacaatgggaatggtacacggatgcttgtgtggaggtggtggacaagtccagcggtcttggagcaatggccaagttcctctgtggacgaccctacaaccaatgcagagtgacatcactcacaaggggttgtagagtgcagtgattagagcagggactctggagtcaggctgatgggtcaaatcccagacttaccagcaccctggtggttacttaatctctgtgccttggctttcccacattcaaaaaggggctggtgggaatagtagcagagaaggaaaaacaattttccccttatccttctaagttctcgactggggtctctgcaacaaaagatagattagtaagagaaaaacaaacatgtttattaacatgttgcattgtgcatgtgacatatgagaatgcccaaaaatgagtacttcaaagaggtgatttagaactttggctaacacagcatcttctgcacagaac

SEQ ID NO: 4650 - DNA, 572 bp, Homo sapiens
ggctaagctctgagtaggggggggggctgtcattacatcttgataaaggaggaattgctctgctcccatttgacagatgcacaaattgacacgctccccacaggaccctataaaggagatacattatcactgacattttacagatgaagaaactgaagcccagcagagagatgaggcagcttgcaaaactagtaagaggtcataaaaccagtaaggagtggaggtggaattctaacccagatccccatggcccagtctgttaccagaaggagggcctggggtctaagttgtctattttgaacaaagaattggacaaaacgcacaaagtaacaaaggaacgaaacacaggaacgaagcagcgaaagcagggatctattaaagcaagaacgcactccacagggtgggagtggccccagcaagtggctcaagggcccagttacaaagttttctgggttttaagtactccttttggggttcctattggttactccttatctgaataaaggattcggtctgtggctaattacaggctgaggcgaactggtgccctatgcagatgaagggatagtccc

SEQ ID NO: 4651 - DNA, 587 bp, Homo sapiens
tcgttgttctgtgtgtgtgagacctccttgcgtcattttaccttggtcacttcaaatcctataaacaaacatttactgagatctcatgtgcagcgggcacggtgctgggggcttggtctcaaggctaaggaggtggaggagattgggcttccaaggaacaggtgaataaatagattcattgagttgtggtggttctatttcctcttcccaccaaaaccacatgcgggaaacatatttcctcaaagtctgtggtgtgggttttaagttttttcgtgttcttagatctaaaagaatcaggccgggcacagtggctcatgcctgtaatcccagcactttgggaggatgaggcgggcggatcacgaggtcaggagatagagagtatccttgctaacacggtgaaaccccgtctctactaaaaatacaaaaaacaaaaacaaaaatagccgggcgtggtgatgggcgcctgtagtcccagctactcaggaggctgaggcaggagaatggcgtgaactcgggaggcggagcttgcagtgagccgagatggcgccactgcactccagcctgggccacagagcgagactccgtct

SEQ ID NO: 4652 - DNA, 398 bp, Homo sapiens
caattaacaattattaattgttaacaacattaacaatactaataaccatccattaaaagaaagcaaaaacgaatttatttattcatgttacgataaagcccaagcattacatgttcattgctaaagaaattgtcctggctaggagcactcagtgttctcaatggacaggtcaggttcacgtcctgtatgcacatcctctgggaagaaaatagggtcagataccttgcagatgaatacttaaaataactaattaataaataaaaattgcagtggtcatatttctctggttcacaatgattaatttaacttattctccactaattaatgatgtccaaattgaaatgatgtcaatttaatttttttctatgaaaaatgaacaagttttcattgagtcagtc

SEQ ID NO: 4653 - DNA, 536 bp, Homo sapiens
ctaatatcagaaaccggggggagagccttcattctcagccacatcaagaagaaaatttgtgttttgaaaattccttttctcttataaaccttttgcctattaatgctgtagagcctacttcttcacagcaaatacccaacagagaaacatctgaagccaataaagagagaaggggaatgacatcaaagtcaagtgaatcaaatatatattcacctttaacctcttttatcactgctgattcagaactccatgacattattaaagatttggaggattgtttgatggtgggtctccacacttgtggtgatctggctccaaatactttgcgaatatttacctccaactctgaaatcaagggagtttgcagtgtgggttgttgctaccacctcttatctgaagaatttgaaaaccagcataaagaacgtactcaggaaaagtggggatttccaatgtgccactatttaaaggaagagagatggtgctgtggtcgtaatgccagaatgtcagcatgtttggcattggagcgggttgcagct

SEQ ID NO: 4654 - DNA, 559 bp, Homo sapiens
tgtggctttgtcattgactgggaggaagaatgctacagtgattttgataggaaattgggagattcagaggatattcctggttctgattgtgtctgtttggctcctcaggaagagggagagcctcacctgcccatgtggaatcagtccaggcctctgtttaccttgagcagtgtcattggggcttcctctgtggtgcttaggaaagtgccttaagacctgggtttgtctcactgatctcataaagcactggtgctggtgacagatgtcttctggtggaaacacattttctggttataatcatccctatttgttaaggatttttgtttcttttgaaaataggctttaaggctgggcgcggtggctcacgcctataatcctagcactttgggaggccgaggtaggcggatcacctgaggtcaggagctcaagaccagcctggccaacatggtaaaaccctgtctcttctaaaatacaaaaattagctgggcatgatggcgggtgcctgtaatcccagctacttgggaggctgagacgggagaatcacctgaatccgagagac

SEQ ID NO: 4655 - DNA, 436 bp, Homo sapiens
tcatatccggataaaagagaatgttcaatgaattgcaaaatctttagaggcagaaggcacccaagagacaggtcaccatgcagaacaattctaggtggctccattcacatttagcctatgtacgtggtggcccctgggattgtgcagtgcgcaacttacacaactgtgtgcagggattctgctgaatccagtcattaccacccttgcccttcctcacacacagatttaggatccttttacagaggaggcaagtgaggcccagaggaggaaagcaagttgttcaaagccacccagctaaccacagagccagactaaaatccagattattgaattttagagcaatattctttcctctctacaatgatgactggaaaggatattgtcacccaaaacagccacctccaccacagcaataagttcattcttaaaagtattt

SEQ ID NO: 4656 - DNA, 617 bp, Homo sapiens
acctgccaccatgcccagctaatttttgtagatttcttttaatacctaattttgacacgggtatggggaaaaagcataaaaatactgtagatgggagtgtaaaattgttaaatctttccaaatggcagtcgggtaacaagcatcaaaatgttaaatgtgaggaacatttaacccgacatttctactcttggaatttatgctaaggaagcaattagacaagcaagactttgagtatacaatagaaaaattggcaggtacctatatgtcatacaccagaatcttgatttgaacaaatggtggttcatccacatgatggaattgtgtgcaaatattttaagtgatatattttatacccaccagatggtcaaaaatgtagaagtctgaaggctgggtgcagtggctcacgcctgtaatcctaagactttgggaggctgaggtgggcagattgcctgagctcaggagttgaagaccagcctgggcaacatgatgaaaccccatctctacgaaaatacaaaaattagctgggcatggtggtgcgcgcctgtagtcccagctgcttgggagactgtggtgggagaaccacttgaacctgggaggcaaaggttgcagtaagccga

SEQ ID NO: 4657 - DNA, 440 bp, Homo sapiens
gcttacattttagcggagtgtgagcaataagagtaatcagtaagtaaattaggtagtaaattaaaatgcaataaatattgtagtctgcttcattaataggatgttgttaattaatgtatcatttcatagcaaaaattaatatggggtaaggagctaaaattttatatgaggtgactgaggtaggcttgagaaggtaccctgaagacctaaaggacaggaaggagtaagcccagcacagattcgaaggacaagatttctaagcaaaaggaacgagtgcagaggccctgaggctggggtgtacctatgattgaaagaaaagcaagaaggcaaatgtggttggattgaagttgtggggggcagatatcaggggatgaagttaggaaggacatggggaatgttggacagataatgtaaagtcttgtagaccaggggtccccaac

SEQ ID NO: 4658 - DNA, 581 bp, Homo sapiens
ctttcctcagccatagcagccatgttagtatcattttcctactccatggcagtgactggaaatggtttattctctgaaaagtttgaaaccaagaggcctcaagttaaaggatactaaatgcagaaggtggcatgggagagatgggacactaaaagggaatataaatgaacctttaaaatctgaattaaaggacctcagctcttagtataccagagaccaggtgtgtttactattcaggagctcagagaaacaaattcagtggctccaaaggagagactttaaggttctaaaatctgtgggtatcctaaagaaaagcctggcttatagtctgatcacttcaagctcagcagtcaacaaaccctgtcaatgtacataataagatcccccctaccccagtaaactttcttaaacctcagccttaaatggaaattgacagacaaggattatcagacatctgagaagagcatcctccatgaaattataaaaataaatcagaaatatacagacagaggaaacagagacataatcaggatcagaataaaaggtacctgatgcaggcttattcatacatacaataagta

SEQ ID NO: 4659 - DNA, 542 bp, Homo sapiens
gtctggggttcaggggccggggcgccagtactggggctccttcttcattatgccaaacaacaggagtggctgaaccccacaaccccagtggcacagagcttgggcccaggatcagctgtgactgcggacctgcacagcaaggaaaccaactcccactactgcacttcgagattgcacagagcacccctggctccaggacttggagtggggatagactgcagtagaagtggttttgatgtctaagggatgggcacacatggtgtgatgtgcagcttaagtctgaagcttggacatgcatggagcagctgccactccagggtctggggcatgcataggtttaagaaggtgctggcttgggttctgggcagcacaaaagttgcccttttttgggaaaggaatacacagcatctccctctctgagggttttacggtagcaataactattggttacctcagtggtgaaagctatcaatatcctctgcagaagaggccactggggaccatggtggcatctgccacatggctgatcctgagagcccctg

SEQ ID NO: 4660 - DNA, 473 bp, Homo sapiens
ttcaaaagagcacaaacaatgcagcatgatctggtatattttgcaacactgagaaggcagtattctaccccccttcattctgaggtggctcacaataagagatcttttaatttaaaaagcagaacagggaaatatcgtgctatgtgggtagcacaggtaactatagttcacaggttagaacaactacattcccacctggcgatttcagcctgcaagaatgggcaccaggtctctcattccttcatagatcaacttgagctttgagcatacaagagattgtgctgatagtgtgtcagtgccagaacacactcacagtcagtcggtgctaaacggcaagtctctaaatgagggaagcattcccacacatgggatcagactgacctaaatctctatttagattgctggtaatgggtatttgactattcagtttagttactgatgcagtctttctcatagttatttttaccatttat

SEQ ID NO: 4661 - DNA, 520 bp, Homo sapiens
gcataactattgatttgtctattttcccttttagctctatctgtgtgtgtgtgtgtgtgtgtggaaactgttgtttggtgcatgtacatttaaaattactatgtcaccttggtagattcgttcttttatcactatgtgatgtctctttttcttgctggtaattttcttttctctgaagtccactttatctgatattaatatagctactcgagtatctatatttttaagagataaggtctcacatgatttcaaatggttaatttaaataaaggaactgctttaagttgattatgtgatctacttctacaccaccaacccacaccattgcgtaagagactgtttatggaaaattatgtcatcccgcagtcgggaatggctaattgacttaatgaacagcaggacagtaacatggcttctttctgtgtatcctaaggaaagaatgcagcaaaataaagatttaatcttctttatttatttttatctagctatagcctcataataaaaaagaagtacaagatat

SEQ ID NO: 4662 - DNA, 93 bp, Homo sapiens
ttggatggttaataaaattcattctactttccatttattacaagctatacttgaaaaaatttattgagcactgaaatacatacttgatctact

SEQ ID NO: 4663 - DNA, 623 bp, Homo sapiens
aggaaggtgaatgtgggttggaaaactacatattggttactatgcgtagtacctgctgtaatatatccatgtaacaaacccacatatgtaacccctgtatctaaaataaaagttgaaaaagaaaaaaagatagtatttttactgattaaaaagaataatctaaaaagttagattcaatgggatttactttattcaatgaaataaaggttaatattagagaagattttattaaggagaaatgtatgaaattacaatcagattttacagaatttatagagataaagataaccagcttaaaacaactgactgtgataaataaacttatatttaaaaaatagcatttttcctctagagactgaaaatatacctaatataaaattgatttccaaaaattaattacattcatagccactagtaaagttacaaaacattttaaagtagaaattgaaaggaatataaagcaaataaataacacatgaatgaacaaacataccaataggcaaacttctgatgacttaactggaaatcatttcacttagattgtgtttggatcatagagaaacttcaaagttagaattttcagaccacttagacaatatcgatagtgactcttgaggacaact

SEQ ID NO: 4664 - DNA, 609 bp, Homo sapiens
gtatttggctgtagtatattaatgcactgttctgttgagggctcctgagaagtttccagatacctccctgaattttctatcagaaggagggaaacaggagaagcatttatctatctgctttcttcccccaattagtcaaaagttttccttgggggtattaactcactcacacttctgagctgtgcatgggttcagaccaaccaagttattaccagcttccttggtgatggaggaaacatgaggcagaaagtgaagtgagacaaatttccattccagctgcatctcaaatcaaagataccagtctcttctgcaatcctcttataggacttgccacagcattcgtatcttccatagacactttaagcaacatgggagccaaacagtttagctgtttacactgcagcctgggccatcaggaaagccctcccttgttctgggccttaatggggaagctttttaggtcattcagttaataaattaggcagcacacacctatacatgggataagttgcctacaaaatctaaaagataccctaaacattgaaggatggacaaggttcagcaaatcattgctgtagagcatggtagctcacacctgtaatcccaaca

SEQ ID NO: 4665 - DNA, 414 bp, Homo sapiens
tcaataaaatactattatgtcattccttaactttggaaactttttccttgttaaataataacaacaatagcaataataatttcagcaataatctgtggctatttttacttagcacatgcaactataggttggtgcaaaaataattggggtttttgccattactttcaatggcaaaaaccacaattacttttacactaacctaatacattgaaaggatccatgttgttggctcaaactgtcatcactatcagttagtgagtaactgagctgcctttaaggagttgaagggcagagaaaagtggaatgtatgtaacccaatccttccagtgaagctgacccacagagcgcatgcagttgccgtagttgaggccatatgtccaagtcttgtaactcaataactttgtcaagctaatt

SEQ ID NO: 4666 - DNA, 617 bp, Homo sapiens
cacccccaaggtcttccactctctcacacggactagtataatgttcaaggctccaggttgaaaagccaaagcccctaagataaaaaccatgagaactctaagaattggagactatgtgattcaactgagcaaaagaaggcccttgactcagcccaagatagacatttttgggagatctgtcatcaagtatcgaatttagaagtatcacttgaggtaatcaatctttctgaggatgcaaatttctttgtataggttgaaagaagaaacatctccaatgcacacagatacatcagttaacaaattaaaaacccatataaaaccctcactccatctgaagagtcctgagactgtatctagaaaagtgatcacatcagaagaatcttcaaatatcaacagcactttgaagagaaatataaaaacaactgctgtaattccttagtaattatagttatggaggaactaaatcctgcatctgtgagcagagaagagcctcagcctggattcttggagattagtcagggggaaaggcaaatccctctgcactccttccatccagaaagcaagatccctcgggaagttccacaaagcaagtatattcagtattcctaattacaggg

SEQ ID NO: 4667 - DNA, 509 bp, Homo sapiens
  misc_feature 154, 155: n = A,T,C or G
atcaccatgcctctgtacgctcatcttgccttatgtttctctagtgttatcactcatatatgcatccttcaacaatacagtgtagtgttgcctattatttgggcttttgaaaatcatagtatatgtattttttcatatctttgttgtgctcaanntcctattgtgtgtagctatagttcttttgcattgctgtatttactccattgtttgaatacaccataccatttatccccttgactagatacagacatgtgggtggtttccagtgttattaggaacagcgattgctgctatggtcattcttgtctgtatttcatggtacccttgtgccagcatttctctggggctcatacttaggagttggatgactgaggcatgaggatcaatttcttcttttacccaagagttatctagaacaaaaaaatttaaaaagcattttcaggtggcttttgaggtatttttagtgcatcaatatggtcagagaatatggcctgtgacctttcagtgag

SEQ ID NO: 4668 - DNA, 631 bp, Homo sapiens
tgtgaatattcccccacatttgtgtgcacacacatccacccttgttgggcatgcacctagggacgaaattgctgggctcggggtgcagcatggatttagcttcagtacatactgccgaatggttgcccaaaatgattgtaccactctcaccccccagcttcaggctatgacagttttgcctctccacacctggatgcagaggcgctggctcttttggaccgaggccccaagtcttgtggtcaattgcacttatgcatactcaatggctcatttgaatatgttaatattaaaaaggagatgtggctggggaagagggtcataccagtaatgtatatacataagtgaattacttttcagaccatcagaaagaataatgtgttttcagccaggtgcagtggctcacgcttgtaatcccagcactttgggaggccgaggtgggcgatcacttgaggtcaggagttcgagaccagccttgccaacatggtgaaaactgtctctattactaacaaaaaattagccaggcatggtggtgggtgcctataatcccagctactcgggagggtaaggcaggagaatcactggaagctgggaggcagatgttgcagtgagccgagatcatgccactgcactc

SEQ ID NO: 4669 - DNA, 568 bp, Homo sapiens
caaggatccttaaaaatgtaagacaggctatgaaagacgatatggaagagacgcaaagagatgaaatgttactggctttgaagatggaagaagtgggccgtgaggcaaagaaccctagaagccagaaagggcaaggaaacagattctttcctagaacctccagaaaggaacacagccctactgacaccttgattttagcccagcaaaacccattggttgcagcagcaataaaaactaataggctgtcccacctcactcatttctccctagaagtaaaggtggcaaaaccaacagtatttcatgctaagttcttccagggtagtttttaaagactccatggaggcccatttatgatctgggtatagctcctgggatagatttactcctaattgtccttgtcctgttacattagtgtgatcacacaactccttagctctatcttgccttactatgaaatatactaattttccctcaaaaaatgagttatctcatcctccaagagccatgttaccttaccatttaatttggatttgacctctaaatacagttaagttttaacagtacctac

SEQ ID NO: 4670 - DNA, 574 bp, Homo sapiens
ggtctctcatgcctgtaatcccagcactctgggaagccaaggcaggcagatcatttgaggtcaggagttcgagaccagcctggccaacgtggtgaaactccatctctactaaaaacacaaaaattagctgggtgtggtggtgcatgcctgtagtcccagctacatgggaggctgaggcaggagaatcacttgaacccgggcagtggtggttgcagtgagccgagatcacgccattgcactccaggctgggtaacagagctagactctgtctcaacaacaacaaaaaaaagaatcgggtcaatcattaacttgagggatcaggcaaagcataaaactcaaagggagactcctgcttttgaagagaatgattaaacatttcatttgaggtttgtatattaatcctcaggctcaattacaaatgacacattctttgaaacctttgctgccaggcatggtggtagacacctgtaatccctgctactcaggaggctgaggcaggagaatcgcttgaatccaggaggcagaagttgtagtgagccgagatcgcgccactgcactccagcctgggtgacag

SEQ ID NO: 4671 - DNA, 575 bp, Homo sapiens
cctccgcgccccacctgctccatggaaccccaggccacagctcggttcctttcaagaaaaaaaaagtgggaaataaataatgtaagcctcagcaaagacaagagggcgacctccttccaggcaccccgctggtttcaggcgcctctacctgcaagtgttggtataaaactgaacatgtcgcgggcatgctgggtttcctagtgccccagctggttccatattatggtcttttggggcacattttaaactgatgggcaaattccatccaggaaaaattcagagcccaaaggtcagcctgcaactacagaaccatagagttcctggccaggcgcagtggctcacgcctgtaatcccagcacttttggaggccaaggcgggcggatcacctgaggtcaggagttcgagaccagcctgaccgacagagtgaaaccccatcactactaaaaatacaaaaatgagccgagcgtggtggcatgcacctgtaataccagctacttgggaggcttaggcaggagaatagcttgaatctagaaggcggaggttgcagtgagctgagatcgtgccattgcacccca

SEQ ID NO: 4672 - DNA, 503 bp, Homo sapiens
ctaagaaaagatgttgaaatgacacacaaggaagacagatttgccactaggctggagaacgtgggtgaagcgtaagatgacccactctccagaacgaggaggcaccagggacagtggttctgtcatgttgaatgtcttgctatttattaacactatcattcctaggactggtgaaatgtgcgctttttatatggatatttaagtgtattccaggggcagcttcatcctttctcagtttcatgatttttagaagtagcaagaaggttgggcgcggtgtggatcacttgaggtcaggagttcaagaccagcctggccaacatggtgaaaccccatctctacaaaaatacaaaaaaattagctgagcgtggtggcacacgcctttaatcccagctacttgggaggctgagacaggagaatcccttgaacccaggaggcagaggttgcagtgagctgagatcatgccattgcactccagcctgggctacaaagtgagacttcatctc

SEQ ID NO: 4673 - DNA, 487 bp, Homo sapiens
aaatcccaagttctttgccactcaattctggtcaaaagctgagttgaaatgaacatctccttatgtggaagaatttctaagagcagacatggtccctccactcttccaatacatccctggattcgagtatgtccgcagatagctaggcacatagatgtaatcatcctgcccatccagcagaatgtcttttcccaaattatgctttggaatgatactacacctttaacctctattaagagtcgtggtggccagcttctgtggctcaggcctgtaataccagcactttgagaggccaagacaggaggattacttgagtccaggagtttgagaccagtgaaaaaattactcaggcactgggcatagtggcatgcacctacagtcccagctacttgggaagctgaggtgggaggatcaattgagcctgggaggtagaagccacagtgagctacgatggtgccactgcactccagcctgggcaacaaagtga

SEQ ID NO: 4674 - DNA, 576 bp, Homo sapiens
agtggctgttattttgatagagataaaaaaatagcggctaccatttattgagccctttgattgttccatgtctcaaataagtaattcatatgctttcatttaatccacacattcattcaacaaatatttattatgtgcttacaatgctgcagatattgttctaaatgctggagatacggcagtaaaccaaaaaagtggtggtggttgagcagacgtggggtctctggtcttgctccattattctatcctccacagagggttccttctaaacattaaatcagatggtctctctttgcacaaatgcctctactggcttcttgtctcattcagagtaaagctttcctgacaatagtgctaaaggttctggaggatctttagtctccctgtcctaccccattttctaccactctctcttttgcctggcccacttctgccatcataaccaccttgctttcctttgaatatgtcaagaatattcttgcttcaaaatttttatacttgctacttccctaccagaaatgctctttcactgaaagattctcagtcaaggttttgggtctctcctccactgtcagt

SEQ ID NO: 4675 - DNA, 621 bp, Homo sapiens
tcttctgtttaatattcagtttgttttatattcagtttgttattaaatattcagtttcttttatattcagtttgttaagttccaagtaaaatattattgagcatttaagtagaattcctttgagtctattgatcagtgtgaatggaataggtatccccatgataataagttctctagcccattaacatatatcacttgatttatttgcagcatctttaatgcctttcaataaaatgttttaactttatcaataaagatcttacaaatatgtattagatatttccttagtactctgtatttctcaggttaatgtagatcaaatcttttatacctgtgtgctgccagaatataaaaatgcaattgagttttgtgtgctgatttagtaggcaagcttgttaaaaatactttttgattctgaaaaattatctgcaggttatgaataattacaagttttttgatggtaaataatgaaaacttttggctgaattattcatgcttttaatttcatttttcttgccttattacacaagctaggaattctagaacaatggtgattataagcagtaatcaactaagcagacatcactgaattgtatttttataggaaataatttcaatatt

SEQ ID NO: 4676 - DNA, 588 bp, Homo sapiens
ggcgcatttaaattccaaataaaatgttaattgcctgacaagcccgttttccttgtcatttataaaaatgtatacatcctgaataaaaagtgggagaatacttaaaagagtaggagaagaatcttgattttaacaacaaataattgtcacgctacggagttcttggctttaattgctgtttttgtgatttgttttggaagttgggctgatgacaatcacagagcccagtgttaaaaactaataatgatatagtatttcattcgaaacatttttggatcttgatagtattgatttgaaagaacaagtttaggccactcattgttagtattagttccaagagcaccctctagtgcccacagctttgaagaaccctgtggaaggcagaaaagtcatttgtatgcagctcaagctcattgacacttgctttataggccaatattaagaacctttaaaaagtatatctgtcatcaaaagtgacctaaatgtgctcttaaacttaaaaatgttttaatattattctgtgatcaagcatactgaagaaatttaaaatgatctaagattttctttaagttataatagtgcattaac

SEQ ID NO: 4677 - DNA, 595 bp, Homo sapiens
aaaaactaccatgcattatgtgccagatattctcctaagcgcctttacatattttatatcttttgacttcagatttattaatgccacattacagaacactatagttcaaagagtttaagttatgttcccaacacctccagactagtgatagctaagtaagagacctaagtgcagaaagtgaaacttgatctgattgtcatgttgactgttctgtacattgttctaagggggaaatgtaggacaaggtacaaagtattataaggcaaatattggggcccatttctctctagaaaaaacaaaacaaggccaggcgcggtggctcacgcctgtaatcccagcactttgggaggccgaggcgggtggatcacgaggtcaggagatcgagaccatcctggctaacatggtgaaaccccatctctactaaaaatacaaaaaaattagccgggtgtggtggcgggcgcctgtagtcccagctactcaggaggctgaggcaggagaatggcgggaacccagaaggcagaggttgcagtgagccgagattgtgccactgcactccagcctgggcggctgaccaagactctgtctccaaaaaaaa

SEQ ID NO: 4678 - DNA, 571 bp, Homo sapiens
ataaaagttgtattacaaaagaaacctgctggaataaaatgtaatctttataaatacaaaaataaattttaaaagaggcagagaaggcacatcaaatgaacgcagtaactataacatcatacagacagtaattataccacacaataatacaacagaattgagacaaaaacagtcatatcaataaatcaataggcctaacctatctgttaaaagaaaaagattttcaaattgacttataaagtgaaattccatgcaatgctgtatatgacaggcacacttcaaatgcagtggttcaaaggactaaaaataaaagggtggacaaagatttatcaggcaaacaggaaaaataagaaagcaggggccaggcacagtggctcacgcctgtaatcccagaactttgggaggcagaggtgggtggatcacttgaggtcaggagttccagaccagcctggccaacgtggcgaaaccctgtctctactaaaaatacaaaagccgggcatggtggtgcgtagctgtaatcccagctactcaggaggctgaggctggagaactgcttgaacctgggaggcgc

SEQ ID NO: 4679 - DNA, 599 bp, Homo sapiens
aggctgggagtggtggctcacccctgtaatcccagcactttgggaggctgaggtgggcagatcacttgagcccaggagttcaagatcagcctaggcagcatggtaaaaccctgtctctacaaaaaaatgcaaaaacagttggatgtggtggggtacacctgtagtctcagctatgcaggaggctggggtgggagggttgcttgagcccaggagattgaagctgcagggagcaatgattgtgccattgcactctagcctgggcaacagagagactccacctccaaaataaatacatagataagaaacgtaaacctaaagagtaattagaagatgcctttaaagtgaaaagcaaaggtttctcctctaattctggcagtacattttagaagaatttctttttattaacattcagagctttcaagtgaatctgagtgatattcaggtagtataaataggaaaagactagtgcatcatgctaattgctatataagcattaccatctgtgagaccttgtcgatcagtgttgcttcgtctataaaaagcatagtcatatattccttgagtgggatagataaccacaaaaaaaaaaaaaaaaaaaa

SEQ ID NO: 4680 - DNA, 565 bp, Homo sapiens
catttttggggccaaggctgcatccacctaccttttcccccagcccccagtggaacactaaagcgcaaatggtatttgaaaagtcaagaaacataaaatcgatttctttctaaacagtattagcatttttacataatatgctcaatatatttttttcagcctccagatgcctcttcagatgaaataccttgaaatttaaagcaatgagttcacttgttcacccgacaaaagtaaagcagatgcaccattttccctgtgtgtccgagtctggggacactatgatgtgtgtactgatctcatccacgatcatggcttttgctgcttttttcatgccggtgtctcactgctgccagccccacctcacctggtgttccaggcttcctgggcatctgcttctcaaactccacgtgttcagatggcattcattcctgcgcgtgcatgcacacacacctacacgtgtgcacacatatgcatacacatgcacacagagacacacgcacacacacacatgcacacacacacgcacacacaggcatacacacatacatgcatatcttcttcaccc

SEQ ID NO: 4681 - DNA, 579 bp, Homo sapiens
acacgcaggcaggactgttcttctggtgcaatccctgggccttgtggtctgggatcatttcctgtggcctaaagtacttatttgcaagttgtaaggactgcccggtttctggaagcctggctgaatgcttccagctgggaatttaaccttctcagacccagctgtggatcttgagagctctcttagttcccaaccattttcctggagccccctgagataaattagttgtgtctgggtggggacaatggaggagtactggactgggatccagaagacctggcctgggcctggctctgacacccacttgctctgtgaccttgggcaagtcccttcacctctctgatcgcaaatcaaggcttagaaagtgtgcttccctgcctgagtttgcaagcccagcctcttgttttcactggagcatgaatggaattgaccttcccttacgcagctcctccacagctcaaggtcttgtgagaaccttggaattgttgcacatgagagctgattaggtaggcccctgaagatagtggaaaccacttcccccatcctccagcatcggatagatgggcaaactgaggcaca

SEQ ID NO: 4682 - DNA, 578 bp, Homo sapiens
cacatattgtacgtgtccatttaatttaaaatgtcaagaataggcaaatccataaacacagaaagtagatgagagtttacaagaactggacaaaggaggaatggatagcaactgctaattaatgagagatcctgtgtgatggcttgaaatcattctggagttggtgatgattgcacaaatatgtgaataaactaaaagccactaaattgtacactttacaaaatggtgaattgtatggtatgtgaatcatattttgattttttaaaaagagaagaaaataatttttgattactggtacagtagttcccctctccttgctcttatttccgaggatttctgggctgttggtggacttctgatcttctgtttaatattcagtttgttttatattcagtttgttattaaatattcagtttcttttatattcagtttgttaagttccaagtaaaatattattgagcatttaagtagaattcctttgagtctattgatcagtgtgaatggaataggtatccccatgataataagttctctagcccattaacatatatcacttgatttatttacagcatctttaa

SEQ ID NO: 4683 - DNA, 605 bp, Homo sapiens
agagggatagtagatcaatcttgaaagtataatattattctagaatttatacaaactgtgggtaacaaatactggatggatgttttttgagaagaggatgtaaagagaacaatttttacaactctacaaaatattaaatgagcttaaggaaagcataggttttcacactgaaaagtctgctgaattaataaaaattataaataacgaaaaagctctctaacacacacttgtgcaatttccatgcctcaaaaagaagataaaatcataaaagcatagagggagaaataattgaaagatcaccaacaaagagactgaaaatagagaaggtataactttctaattagcgccataaaaaaggatgttggatcagtgctttaaattgctgggggaatgttttaaaattgcatattcagagatatttttcatcagtgaaagcaaaacaaatgcattatcaaaatgttcaattgctaaggtgtttttcctcccataaaactgccatggaaactacttaagaaaaacctgcagtgaaacaatggagagggccgggcgcggtggctcatgcctgtaatcccagcactttgggacgccgaggtgggcggatcacg

SEQ ID NO: 4684 - DNA, 544 bp, Homo sapiens
aatccctttctgaaatgttttccttcttaagtgaattcctcttgggtatatcctggttatttttcactatttgatattctttgaaatgtgtatccttgcattgttgccaaagcacctccctctggaacaactacagaataaataacagcagtatatatagtaaattctttccttgtgctcacataaagttttgcacaacttcagttaacatgaacaagatattagatgttctgttacatattaaaatctaggaagtaataagagaaaaaaaaagcttttaaggctttgctttcatagctatggtagggcatgtttaagaattactcagattctataatgtttgcttgtgttacttcaccaagccacttgtttagtgttaactgaatgatgcaagcatttgtgtgatgcttcctgtccttgaaaggattcatctgaatgacagctaagccatcatgagaaagacagtcatctttggagatagactcacaaatcccaggtgtgaagaagatagcacagaccacagagaaactacctcaggtccctg

SEQ ID NO: 4685 - DNA, 551 bp, Homo sapiens
tagcccttcgctgctgctttggaaaatgtagaggggctgagaaacgaagctctgcatagcctctcctgctggctcctcagggcccctctgcaggctgcggtttggcctcagggagcactgagggtgcagaacgggggctctggagggctccaggcctggtgggagccagggcagccaggccatcccaggaagacagagcaggcaccgtagcctcatagtgaggtgttaaaataagaaaaccatcaaaacttgggctgagtcaggaggaattcagttgtgccttatacactcatgttccatttttactctaagacatgtactttaccaaatttgaaggtgagaatacaaattctcccccactgaataaaatatcagtaaacacaagtgaggctctgtgctctcaactgctggaggccacaagggagagtgagacctggtcctaaaggtgacttcgctctaagtttatttactgaatataaaatgttaatgtagttttcacagttgtctggccaggtgcagtggctcatacctataattccagcacttttgga

SEQ ID NO: 4686 - DNA, 605 bp, Homo sapiens
tagctgagattacacgtgtgctctaccatgtctggctacctttttttaaaaacttttttttagagatagggtctcactgtgttgtccaggctggtctcaaactactggcctcaagcagtccttctgcctcagcctcccaaagtgctgagaatacagacatgagccactgcacctggcctcaaatattcttattactcgggagtaaagcatctaatactttatttgacctgaggatttaaaaatagcttttatttaaagaatatgatgtgactcattaggagtttgttggctcatcagatcttaagttttactttttgaaatagacaggtttggtcatctgcaaagaaatgatttcagtcttacatatttacttagaaatcatggagatgttggataatttattagtcataaaataatttgccaaatttttaaatggctaacttgtacatatatatcatttaaaacatacacaatgcctgaacgttatgtttgcaactgggttatatttaattttatttttagtatcttctttcactttttccaatcctttgatgaatttaatccatttgcatttaaatgagattttctttgtatcacatagaatg

SEQ ID NO: 4687 - DNA, 623 bp, Homo sapiens
ttgtaaagtggaacaaaaatgtacacaaaacacataaaatacaaaataaaattttcacatatcataggttaaataagagacaaatcattttcggcctaaagcaaaatgatgtgtctcttcatgaaaaagattttatatctcattcaaaggaaataggaagaaagcccattgactgataatggtaaacatcataaagagacattttgataagtcactttacccttccctcattgaaaaggatagataatggtgtgtttgtgatgtcagaaaaagacaaggaactatagaaatgagggaataactaaataatatattattcttaaagaatactaattatgccacttagaggctgcctaaatattgtgatgttgtgctttttcaaacttttttattatattttaaattgtctttatctcaaacacaaaaataattgagacaatattaatgtcaacgtgtattcagcaaacacatacacactcatacacaaacccacacacactctgtacttgtatgattggaagttaacttggacttaagaaaacttctgttgcagtgagctgagattgcgccactgcactccagcctgggtgacagagtgagattccgtctccaaaaaaaaaaaa

SEQ ID NO: 4688 - DNA, 585 bp, Homo sapiens
agagaaaccttataaatgtcatgaatgtggcaaagtcttcactcaagtttcacatcttgcacgacatcagaaaattcacactggagagaaaccttacaaatgtaatgagtgtggcaaagtcttcactcagaattcacaccttgcaaatcatcagagaatccacactggagagaaaccttacaaatgccatgtgtgtggtaaggcctttaggcacagttcatggtttgtacagcatcagagaagtgttcatgagagagtccttacaaactgagtttggcaaactctatcataagttctagcagtaatcaacatccgagagtctatactagaaagaaatcatttaaatgtactatatgtggcacaggctgtatcgagacctaccaaatcactagacatcgaaacattcatctttggtgaaaccacacaaatggattgtgtgtgccaaggccaacaagtcaaaatatgttgaacctaatgatatgatgtgtataaagggtgcaaggacacgtggaaatgatctgtaatattcgggttattaaaaatgtaattggctgggcgcagtggctcacacctgtaatcctagca

SEQ ID NO: 4689 - DNA, 635 bp, Homo sapiens
gacaccgctggaggaggagaatggaggggccgccggggctgcaggctttggggaccgaggcttgcataccgtgctgggaagcagagtgggagcctgggttcaggggtggggagtccaagcctcctcacctgagactcagttggcccccatgccctggtttccaggcccctcacctgtacaggtggtccttgtcccccgaggctcctgaagactccccagaccctgtctacagagcggagacgcacaggtgggatgacaggcctgcactctgccccactgaggctgagatccccatagaccaggccgagcctggccctagtggctgccccagtccccaacatccgatctcacctgtggctggtggccataggatgggggaggggtgagaggctccgcagggcgctctttgggagcccctgaccttggcatgtgcgaggtggtagtctccaggtcagagagcagggcatctgcaggaagaggccatcagggagagagacaagggtcacggttagatcagaagataaggttcccagtgggcagtactggagaaggacagaagccagtattaagagaagaggtcacagggccagagccaggcagagcactgctcgaagggtagcaaggaatatttatga

SEQ ID NO: 4690 - DNA, 585 bp, Homo sapiens
gaggtgggcggaccacctgaggtcaggagtttgagaccagcctggccaacatggtgaaaccccgtctctattaaaaaaacaaaaattagtcaggtgtggtggcaggcacctgtaattctagctactcgggaggctgagtcaggagaatcacttgaacccaggaggtggaggttgcagtaagccaagattgtgccactacactccagcatgggtgacaacgtgagactctgtctcaaaaagaaaagaaaaagaaaactcatggagaagactccagactaaaaacactgttggttatcgggcaatagctggattaataatgaaagggtttgatttgcttcagtagcagctgtggatggcatcacatcagggactctctgtccaaattttcattttatttttcaggtttcaatataatatatatatgtgctttattcaagcccacacctgaaaatgcctttgtgtcaaattatgaaatatatgtattaggttttaatttacaattatagttttttctattagagaggagtaataatttatttttaaaaaaatggaagaaaaggaggaagcaattctttcctatagcct

SEQ ID NO: 4691 - DNA, 543 bp, Homo sapiens
tttcccgtgccctggacacccagctatatttgaggatggtcctttgcctccaggtgtgttgagaacttacaagactgaagatgttagctgaggccttgagctttctttcccctagctgtgtgaccctaagaaaactgcttaacctctctgggcctgcatttcctcaagagataaaagtactgccctacctatctgctaaggatttgaggcttagaacactggagggatgtcagtgtgcttgggggtaacccttaaggcatgtaccctcagtcactgtcatgccccttcctaattaagtgactttcttccaaaagggaatgcaaccacataatgtccctgcttaagcccctgagaggcatttagagttaaatccaaacaccggccaggcgcggttgagatcacctgaggtcgggagttcgagaccagcctgaccaacatggagacaccccatctctactaaaaacacaaagttagctgggcgtggtggtgcatgcctgtaatcccagctacttgggaggctgaggcaggagaattgcttgaatc

SEQ ID NO: 4692 - DNA, 457 bp, Homo sapiens
gttaaacataggtgaatcatgaaaacagacttcccttaactagtgagttttcctaatacaaagaaccaccaattaccctgaattcattcaacatcacttcccacacccacacatttttttaaaatagcaagactacaaaatagtttgagtatatttacagactctgtagtcagtaactggcttatgaagctttctatagaagaacttgtctccaatattgtttgtttggatacaaattgggtttggcatgggaattgggttgcaagcagcaaaataaaagagattcatatacctttacccatggcaaacagtgacacagcacaccgaaaacagggatatgaaattctttacagcagggtgcagtggctcgcacctataatcccagcactttgggaggctgaggaaagattgcttgagcccagaagtgagaccccaaaaaaaaaaaaaaaaaaaaaaa

SEQ ID NO: 4693 - DNA, 610 bp, Homo sapiens
tcttcagaaagctgtaaagatctctccaaaatgatgctaactgtagttattcaggaagcttttcagaaggatacataactcattatttacatgtatttttaaatattattattgatatagtcatacccccatattttgggggtgcatgtaatatttttcttacatgtatacaatgtgttattattaaatcagggtaattggcatatctatcacctaaagtatttatcttttctttgtgctgggaacattacaatttgatgctttttcttacagaagtgacttagttagaaaaagtggtatgaaatttgtccctgactgtagctgacatcctcagtggcaccatctggaccctgaaaggcactcagatcatctttacctcactggctaggtttgttacagatgatagcacttaccaggcttcctccttgcaggccaaggtcgggtctgtgcaatcactgatgcatcctgctataagtggattaatgtctctgtccagttgagaaagtcaacacatgaacttagaaagaaatctacctggttttctaagctagattctgttggctcatggaatttattcagagtagatatgaagctgtagggggcatgactg

SEQ ID NO: 4694 - DNA, 578 bp, Homo sapiens
cagaaaaacaacagaagacttagagtgagaagtcttggttttaaagcctggctccaggaccttggttgatcaccttaagcttcaaattcgtcttctgtgaaatgggggtacataatgagatgagaatctgtgtaaaccataaagatatacagcagagtcgatggaactgagtagagttgttttgtggatgagggaggagtgggtgggtaggggtgaagttaatatcagcttttgatgaaaaataaagcacaatggaatattatttgtccgtacaaaggaatgaaacacggacatattctacaacatagatgaatcccaaaagcattatgctaaatgaaacaagccagacacaaaaggtcatgttttgtatgattacatttacataaaatatctagaaatacttaaatcatagagacaaaaaacccagattacttattgctggaggctgaggggaggattaagtcactgcttaatggttccagggtttccttttgagataatgaaaatattatggaactagacaaagatgatagttgcacaacacgtcgaatgtactaaatggcactaaaatgcacacc

SEQ ID NO: 4695 - DNA, 533 bp, Homo sapiens
gcataactatagatttgtctattttcccttttagctctatctgtgtgtgtgtgtgtgtggtgggaaactgttgtttggggcatgtacattgaaaattactatgtcaccttggtagattcgttcttttatcactatgtggtgtctctttttcttgctggtaattttcttttctctgaagtccactttatctgatattagtatagctactcgagtatctatatttttaagagataaggtctcacatgatttcaaatggttaatttaaataaaggaactgctttaagttgattatgtgatctacttctacaccaccaacccacaccattgcgtaagagactgtttatggaaaattatgtcatcccgcaggcgggaatggctaattgacttaatgaacagcaggacagtaacatggcttctttctgtgtatcctaaggaaagaatgcagcaaaataaagatttaatcttctttatttatttttatctagctatagcctcataataaaaaagaagtacaagatataggtgccatggag

SEQ ID NO: 4696 - DNA, 578 bp, Homo sapiens
ggacaaaggaggtatttggaagttcatgtagctgaatttgtttgttgaaagaatttaaagagataatcatgggggaaaagaagcacttcaaatcgtgcctgggacgtattattcaatgattcataactcttctccattgaaaatatctctttaacccagaagggttaaacaaaaccagaaatctaggaaagcaatctcctactctaaccaaaatcgattccataggagttgaagaaatgtagttcacacagacatttcacatccatgtcaaagtcctctgcctcatagcctctcctagcccaaacgtcacattttcagtcaaagcagaaaacctatttcctttcaatttccctattgttctcttttcctaagttggctgcaaactttctcttattggcctgggaacagctgagcagcagctggaaagaccatggtaatcagcaatgggcaaatgaaagtcaggatgaagaaggatacaagaggattctggcaagtcagtgtcccagagtagtggaattgaccttagacaagtctcttgctagtgtgttagctcaaactgccagcattggcagtgtagc

SEQ ID NO: 4697 - DNA, 590 bp, Homo sapiens
tctaatacacacgcacacacacacacacacacacacacacacacacaatctctctctggcagagtatcctgtaagaaagctgtcatgcaatagtatagaagaaaaagcataggaaaagatagatctagatttgggtccagactgctacttaaaagctgtgtggacttagacaaatctcttagcttctgtttcttcatgtgtccaattggaataataaagcctacctcatgaagttattgagaagattaaatgagattattttatcagctaagattgcgctgtctttgcgtaacagaaattctttcacctagagtggcttagataataagggctttatgtgtgtcactaaaaaaaaaggatggacttaaaccacagaggattggaacagtggttctaaagtctttaaatattaggttcttaggattcttggccccccaaatccttagcatgtatatttcttccttgcgctctcaaggtgcatcacattctaggcatgaaaggatgaagggcaaaaggcacaggatgagtgccagctcaatctatcattggccacagtgggtcacattatcacacctagttgcagggagttt

SEQ ID NO: 4698 - DNA, 554 bp, Homo sapiens
gatttgtctttggtttttgagaagtctcatgacaatctagtcatctttccatataagttatttaatctttttccctgaaggccctaaagattctttgtctactagtcttatgaggatataatattaaggtgatcattaagagttagttttcaatgataccagcgagcactttaaatgtgtagatttaagtatttacacccagaaaggttttttccataattacaaatattagttctattctagtttctgttgtttttctttggaactccaattatatagatgttactccttctttggttatcttccaaaccaattactatctctgatttttttacattttcctttatcccattttcattcccttagtttttctcctacctttttccaatgtctcttattatgttgttaacttttttctttgtagacaactatttttatttttttctattcttcccccaaatttaattattatttcatttcttccagttattcatccactatgttctgagtttttgaactttcgtttcaaggtattctctaatatccccaaatgc

SEQ ID NO: 4699 - DNA, 629 bp, Homo sapiens
agccttacaacctatgagggcggtgatttaaataataccctagaggacttacggaatcaataccaaatgctggttttaaaatcaactcaaagatcacagcaattagaatttaagttggaagaaagaagcaatttttttgctataataaggaagtttcaacttatggttcaagaaagtgaaacactgataattcccagggtggagacagctgccacggaagctgaactaaaacatcaccatgttactttggaggcatctcagaaggaattgcaagaaattgacagtggaatctcaacacatcttcaggagctaacaaacatctatgaggagctgaatgtgtttgaaagattatttctggaagatcagttgaaaaatcttaagattaggaccaacagaatacaaagattcattcagaatacatgtaatgaagtggaacacaaggtaaagttttgcagacaattccatgaaaaaacatcagcgcttcaggaggaggctgacagtatacagcgcaatgaactattacttaatcaagaagtaaataaaggtgttaaagaggagatctataatcttaaagacagactcaccgctattaagtgttgcatcttacaggtattgaaacttaaaaaagt

SEQ ID NO: 4700 - DNA, 610 bp, Homo sapiens
tctgatggcaaggagtcatcagatgcttaaggactgaacaacccagctacaggaagagcatatgcaaagggcctggggaaggaacatctctggcagtttccaggacccccagaaggtgatgctggtgtggctgaaatggagtgagtgcaggaagtgaaaggagatgaattcacagaggcaatgaaaacacattaaacatggcattgtaagccacaaacagtctttggtttttagggcgagtgacgtggaaagcgttggaaggttttgagctaagaagtatcatgatcacactagggctggtctgttgaaaatagactacagaaggtaagggcagaataagaaggagggcaccgcagtattccaggcgtgagtgatggtagcttgaggcagggtggtggctgtgccgactcagcatgacgggttagctttattcatcctggtccttcccatggtgactggtttgctacctctgggccttggccctggaagccattgaggtgtcagccaggtgtgagccagcatcactttctccatctgagttttctgagggagaaagcaggagagcaggtggctgaggagctcttcaagtgtgctcctaggggcactctta

SEQ ID NO: 4701 - DNA, 622 bp, Homo sapiens
ctataggagatgatcaggaatggtagaaagagcatgggttttggggtcagatgcttccaggtgtgaatctcccaaaccttagccctcttgcaagtcaatttctcagagcctccagttcccgatctgtgaaactagaccatagcatctcccttgtagagccatagtggggattagatgagctggtgcgtgactcacaaagttactggcatggcacaagcattacaaaaatggtatggtgcttcccctctttgcaattctccagcaagcatgtttgaccttcagtaacctacttttgctcaaaaactggttatcatttcacttcaccgccaggtggcagtatctgaggccattgggatttccttccagcagctaaagcaataatggaaaaacaacacaatattaaaacacagctagtaagtgataactggcttccaaaccagagctccaacataataaatattttctcatcaagcagaacctgccagcagtatttgatttgctttgtagctgggtgttacatgataaagtgactgagcagcctgctaattccggagccgcgctctcagtgaggaggagagaaatgatttatggagaaagcaaaaagcaatggtaggaatcatgc

SEQ ID NO: 4702 - DNA, 512 bp, Homo sapiens
gttaactcgttctttagaggtaaattttagatgcacgtggtccatccatgtaaagttgtcatgtcgttctgtatttttatattttttttttttaaatcttaaagcaaattattataaatcccttaagtaacctcacttgttacagatgtctcatgaatgtcagatccaaaacctagtatttgatcatgaaacttgatttaaaagcagcaatttcttcgccatttccggagaattacatgtttaggggaaaataaattaaactcagtgtattgcagaagcagaataattcttttcaaaaccttgtgtcagtcaagtagacaatcttcttgattggtaggcttttgtttggtccagctggactcaaaatatgaccatgaggctgggagtggtggcacacgcctgtaatcccagcactttgggaggccgaggtgggtagatcacgaggtcaggagatcaagactatcctggctaacacggtgaaaccctgactctactaaaaatacaaaaaaatt

SEQ ID NO: 4703 - DNA, 583 bp, Homo sapiens
atcacttgagggcaggagtttgagaccagcctggccaacatggtgaaatctcgtctctactaataatacaaaaattggccaggcatggtggcaggtgcctgtaatcccagctacttgagagtctgaggcatgagaatcacttgaacctgggaggcggaggttgcagtaagccaagattgcgccactgcacttcagcctgggtgatgaagtgagactccatatcaaaacaaaacaaaacaaaaaaaactcacaggtagcaagcctcagttgtcgccaactagactgacatccccataactggtttttccattgctggttactattacatgtatcttttgttgttacaactggcacacagagtttacaggaaacagtccttaagtccttaggggtggcccgagcttctgttgcctccttctagattgattataggctcagaaatgggagagacttgggccgggcatggtggcttatgcctgtaatcccagcactttgggaggctgaggaggacagatcacttgagctcaggagttcgagatcagcctgaccaacatggtaaaaccctgtctctactaaaaataca

SEQ ID NO: 4704 - DNA, 344 bp, Homo sapiens
gtatggtctcggctccctgcaacctccacctcccgggttcaagtaattctctgcctcagcctcccgagtagctgggattacaggcacccaccaccatgcccagctaatttttgtatttttagtagagacggggtttcaccatcttggccaggctggtcttcatctcctgacctcagatgatccacctgcctcggcctcccaaagtgctgggattacaggcgtgagccaccgcacctggccagggatgacagcaactttgtcaggtagcaagtgatgcagaaaagcagatgccatccacgctgaatggttgtgtggctactccattgtgtaggctggtgctacgc

SEQ ID NO: 4705 - DNA, 611 bp, Homo sapiens
acactgctggtgaggctgtgaggaaataagcactctactctcatacactgctggtaggaatgcaaaatagtataaccccacaggatgaggagtttgacagtacctaacaactctacatatgcatttatcctgaagatgtatctctccaacaatacaaagatacatgtacacaaagtttttcactgtaacatcatttgtaattgcaaaatattagatattacttaaatgttcaaacaggacattagtcgagaaaactatggtacatacacgatagcagttaagaatgaaagttactgattttagtttatgtaatttatcttttcacacagctactgacttgttaggagatacatacttattaagttgttcagacctaattacttaataaattaaactggccaggcatggttgctgacgcctgtaatcccagcactttgggaggctgaggcacatggctcacgaggtcaggagctcgagaccagcctggccagcatggtgaaaccccgtctctactaaaaatacaaaaaattagccaggcatggtgccgcgtgcctgtaatcccagctactcgggaggctgaggcaggagaattgcttgaacctgggaggtgg

SEQ ID NO: 4706 - DNA, 589 bp, Homo sapiens
attctccctgagcatcctttggaagcaaacaccttagatattgattttttaaagaaagaaagaaaagaaaaaagaatacattagccacaaccttttgtttcattttgagacaaggtcttgttctgtcacccaggctggagggcagtggcacaatcatagctcactacagcctcgaacttcttgcctcaagtgatcctcccacctcagcctctcaaagagttgggattacaggtgtaagccaccacacctggccaactataactattttggttacaataggggagaaaatattcaaactggcttaaccaaaaaacaaaacagagacatatattgaacattccagaggtaaagctggctagggtgcaactggatcctcatataataaaatcaggacttgagttcacaccgtctcttggctctgcctctttctctcttggctccattgtcaggcacactcttcaattgtgacaagatggctccaacagctccaggcccaaattctctgctctcagcaatcctctcaaaacacacaaacacacacacacacacacacacacacacacgctattcaccaacaattttttataaa

SEQ ID NO: 4707 - DNA, 622 bp, Homo sapiens
ggtgcttgcttccccttcactcttccaccatggttgtacatttcctgaggcctccccagccatgcttcttgaacaccctgtggaactttgagttatttaaacctcctttcctcataaattacctagtctcgggtagttctttataatagggtgagaatggactattacacttggaaaatagtgtgttatccagagagagaaactcatgttgtaaataaacgaaggaagggctgggagttaacatgatgagctttgataacaggttgttgctgacatagataaaattagtatacagagtagatctcttagaaagtcttcccagaagaaaaaacttctggccaggcacagtggctcacacctgtaatcccagcactttgggaggccgaggtgggtgaatcacctgaggtcaggagttcgagaccagtctggccaacatggtgaaaccccctctctactaaaaatgcaaaaattagctgggtgtggtggcaggcgcctgtaatcccagctacttgggaggctgaggcaggagaattgcttgaacccaggaggcagaggttgcagtgagctgagctcatgtcgttgcactccagcctgggcaacaagagtgaaactccatctcaaa

SEQ ID NO: 4708 - DNA, 538 bp, Homo sapiens
ttgtgccacgtgtactccagcttaggtgacagggtgagatgctgtctttaaaagaaaaaaaattaattaaaaaatagaaatacatacatatatagaaaaatgggaagtacaatcttagtccatatgactactttaaatgtatgatacatcacttgatgtactaagtatactatctaattaagtatgtctaattaataatagctgtctcaaagtaaactggaaaccaaaaggctactttgcccaatgtctgtttttaaaactactgacaaagaacatacagaaaggccgagcacgatggctcacacctgtgattacagcactttgggaggccaaggcgggtggatcccttgagctcaggaatttgagaccaggctgggcaatagggtgaaaccccgtctctactaaaattacaaaaattagccaggcgtagtggtgcatgtctgtaatctcagctactctggaggctgaggcacaagaatcacttgaacccaggaggcagaggttgcaatgagccgagactgcaccactgcactccagc

SEQ ID NO: 4709 - DNA, 478 bp, Homo sapiens
ttgttctctatgtccctccttgtgacaaatagagcaataaaattctaaaggcttttgatgttgaaagttgtttaagatttttttccccagtcttttggcttcatgtcacgtttgagtcctcattacaatcatagtcactagattagtcatcaagggtaccttgtatttttctccattaataaggtcatcatggtttattttaagaaccaaaggaaacctagtcagaggacataataataaacaatgtagttccctagcatcatttgattaaaagggccaatttgcattaaattaatgttttcatcttttctgccattcattttaattttaattttctcatgtttatgagaaaattatgtttactatgaattttatgatgtttatgtagttttcttttgttattttctcttttcattttcaagagtgttgaatttcatgaaagaggaaagaatcataaggaaaatgtggcaaaaaggat

SEQ ID NO: 4710 - DNA, 398 bp, Homo sapiens
accaaacagcaaaactgacaagtataaaattttgtagctgttacacactgtcacatgtttacaatgtgttcaatacatttgtttctaaattaatcatatttaaaatgtaggagaatataatcagattacttaatatattcaagatgaaattagtacacactaaaatagcacatctagtctcttgtctcggtccctcgatataatacaagcttcctgaaagggaagattattttgtctgctatgttcactattgaagctttagcacctagaacagtgtttggaaaattgcagtgttcaacaagtatttagtaaataaatgaatgcatgaaaagtagatgttcagtcaatgttcatcaaaagaaaaaagatattcagttgttattgagaacaacaacaac

SEQ ID NO: 4711 - DNA, 539 bp, Homo sapiens
acagaagggcttagtgattagcatgtatgtggtctttactttggagcctatgtcacaacattctgatgacacttaaaaacttcagtgatatgggatgctgctgaatttgtgttgtttggtggcatccagagaacttaccatttctgctcccagatcctcagccaacatgatggtaacaatattacagatcaatgtgactcccagaaaaatatccagataatcaagttcccttcagaatatattgtctaaagggtctaatatttagccataaaaatgaaggaagtttgaacatattctacaacatgaatgaatcttgaggacattgtcaaataaaataaaccaatcaccaaaaataaactattatatgattctacttatatgaggtaatcaaaatcatagaaacagaaagtagaatagtggttgccaagtgctggggataggagttaatcaggaattgttttgcaagacgaaacgttataaagattagttgcataaaaatgtgaatatatgtaacactactgaactatacatttatacat

SEQ ID NO: 4712 - DNA, 556 bp, Homo sapiens
ttgtgccacgtggctccagcttaagtgacagggtgagatgctgtctttaaaagaaaaaaaattaattaaaaaatagaaatacatacatatatagaaaaatgggaagtacaatcttagtccatatgactactttaaatgtatgatacatcacttgatgtactaagtatactatctaattaagtatgtctaattaataatagctgtctcaaagtaaactggaaaccaaaaggctactttgcccaatgtctgtttttaaaactactgacaaagaacatacagaaaggccgagcacgatggctcacacctgtgattacagcactttgggaggccaaggcgggtggatcccttgagctcaggaatttgagaccaggctgggcaatagggtgaaaccccgtctctactaaaattacaaaaattagccaggcgtagtggtgcatgtctgtaatctcagctactctggaggctgaggcacaagaatcacttgaacccaggaggcagaggttgcaatgagccgagactgcaccactgcactccagcctgggtaacagagaaagcc

SEQ ID NO: 4713 - DNA, 602 bp, Homo sapiens
tttactatcaggtgtggtactgtttggtgggaagtgtgaacttgaaggatgaaacccacatggaaatgaaatgattataacatattgagaaatcctgaaagcatttggttttaggaagataatgaacaacagcaaggagatactggaccttcactgctctcccactcccatccagcaatacccagttattactaaataatggagtacaagattgtatttctgcagtccatcaagttagaatctcattcttggttcagtattatggaatgggtcactgcgtcagatgagttgggacatccagtctacacacgtatctaagctagagatttcttcatagtattaaatgagataaaatgtttgataatcttgtatacactcagaacatagtaggatcccaatgtatgaatgtgatagtgagcaatatttcaataatatttgaagaaaaaagactgggtggattcaaacatgaatacaaagctgctgtttggaaaaatatacaacttcacagaaaacctcctatctcaaccaatacagctttatcatccctgtaatgcatgtcccaggaaaatgttgcaaggattttaagagtttccatgtggaaa

SEQ ID NO: 4714 - DNA, 631 bp, Homo sapiens
cctaaatcttggcattatttcctcatttttctgaaacacatatattcttataacatgatggttaaattatttagtccctgaatgcttaaaatatctctataatatttttttgttttggaaaaatttcaaatttatagaagagctgttaagaataagaatatacatgtaacacttgttaccctttacccagactcacttattaatattttactcaattttcttcagcattttctttttcttcctttctttctctcttgtggatgggtgaatgaatacgtgatagaagattagatagacaaataatcattttttctaaaatatttaaggataagttacataggccgggcgtggtggctcatgcctgtaatcccagcacttaggtaggctgaggtgggcagataacctgaggtcaggagtttgagaccagcctgaccaacatggtgaaactccatctctactaaaaatacaaaattagccaggtatggtggcgcatgcctgtaatctcagttactcgggaggctgaggcaggagaatcacttgaaccggggaggtggaggttgcggtgagccgagatcatgccattgcactccagcctgggcaaaaagagcgaaactctgtcccaaaaaaaaaa

SEQ ID NO: 4715 - DNA, 404 bp, Homo sapiens
ctggagtgcagtggcgtgatctcggctcactgcaacctccgcctccctggttcaagtgattctcctgcctcagcctcccgagtagctgggattacaggcatgtgccaccacgcccggctaattttgtatttttagtagagacggggtttctccatgttagtgatgctggtcttgaactcccaacctcagatgatccacctgcctcggcctcccagagtgctgagataacaggtgtgagccaccacacccggactaacacttgatatttttatcttttaaattttagcccttctgattggtccagggtaactctccaagtaaagaatcaacagggcatcatctcctttcttcatcttttataatctccaaggccactatgttcccacattctttccaaaactgac

SEQ ID NO: 4716 - DNA, 410 bp, Homo sapiens
cattactagtgctgaactattagagcatgggaatcaggggtgagatcttgcctcactaaactgcccaagatttctgcaatgttgttatacttcttttagatataaggaaatacaaagggcaccagaaaaaaaatcatagacttattacctcataaccttaagattttcattcatcaatctaagcatttgagaacttcatctcttttaatgtttatgagaatgttgtgttggaagtggggataagatagaattcatttaatgcttataaatcataaataataaacatcattaataagtgttttaagagtctaggaaaaaagactgcctcatatcactatgttatactaattatgctgtgaactggttgggcttttcctgtcaattttttctgtgaattttccaatgcattt

SEQ ID NO: 4717 - DNA, 617 bp, Homo sapiens
gacagactgactgcattgtgactgaactagagagggaaaaataaacttttctaactataaactatttttgtgccataaagaatcattcaactctaaaagggaaaaaccccaatttaaaaaatatcattattattttgaaaggtgttggactggatttaattcttttcattcccaaatattggcatcagttcagttttcatttcactgaatgcaattaaaaatgtggcaaatccttgatcaattttttacccttaaacagggtcagttctgaagttgttgtcacattttaatgggttcagactcagtttatgcaagagacaatcaaatgtttgcttttaaaagccctataaaaactaagagcttttaaccttttgaatgcgttaataaaatgctaatgacatcatggccaagaccacatttggaggtcccaaaaaattccaaatgactgttgtgaaaagaaaacagaattttaatcaaatgatctgttattttaatggccacttacaaaacaggagatttattgagaagcataaagtttgtttgcatgagtgaaggcaaagcttttaagaattaaccttctggttttccccctcagtttcttgcaacataatactacc

SEQ ID NO: 4718 - DNA, 572 bp, Homo sapiens
cagtctgatgggtactgattgtgaagtcaattgcttatcttctctcctctgttgctaggcttcatccacaccatgaaaagacaaagtttcaaactgtgtttaaaaacattccctgggccaggtgcggtggctcatgccagcaatttggaggccgaggcgggtggatcacttgagcccaggagttcgagaccagtctgggcaaatggtgaaaccccatccatacaaaaaaatacaaaaattagctgggcatggtgacacacacctgtagtcccagctactcaggaggctgaggtgggaggatcacttgagcctgggaggttgaggctgcagtgagtcaggatcatgtcactgcactctagcctggacgacagataagactctgtatcaaaaataaataaatagcccaggcgtggtggctcacacctgtaatcccagcactttgggaggccaaggcgggtacatcgcaaggtcaggagttcgagaccagcctggcccgatatggtgaaacctgtctactataaatacacaattagccaggtgtggtggtgtgcgcctgtagtcccagctacatg

SEQ ID NO: 4719 - DNA, 551 bp, Homo sapiens
ctcagtctccccttctgcagcaccaggggtaggcatgggagacctagagtgacctcagccagggcagagcacagactgatggtgaccaagtgcccagcaactgggagaggaggacctggcctctctggggggcactgccagaaggcctcggaggtgtgagctttggggtagtgtcgggacagccagcattccctgggctacaaagtcaatctggccgtggccaaggctttgtgactttgcatttattaattttccaacttgcttttgtagtcccaggctctaatagtcatatcctgaccgggcgcagtggctcacacatgtaatcccagcattttgggaggccgaggaaggcggatcacctgaggttgggagttcgagaccagcctgacaaacatggagaaactctgtgtctactaaaaatacaaaattagccgggcatggtggcgcatgcctgtaatcccagctacttcggaggctgaggcaggagaatcgcttgaacccgggaggcggaggttgcggtgagccaagatcgcaccattgcactctggcct

SEQ ID NO: 4720 - DNA, 548 bp, Homo sapiens
gactgccaaacatttgagatgtatgtttttaactctgctcaacacacttactctaaggaacagggccagacgtttaaagacatcattaaattatgttgagttgaatgaattataccatttgccatgccaacatggtgaggagatccacagtgtgtgctggtatactcaaagtaatacactattcttataaaacatatattttattcacacgtggatgtttgaaaagcaataaattatacagagactaggtgactgtttcttttgtccttttaaagtaacactataaagttatttttaaaaaaagaaaaagaagaggcagtgtggtacagaatgttcagtagaatctggaaaaaaattatttctagtccttgtttcattaactaacaacataaccttggacacacattattttctccctaaagcattgttctcctctatttctaataaggatatgtgacttatcaacatctttgatcactttcactttaaaatcatagtctaagaatgcatctttgacttagtaaaatattacagatacgttcactaat

SEQ ID NO: 4721 - DNA, 496 bp, Homo sapiens
ctaccaccttgggaagcagctgattcacaccttactctctgcaaatccctagccttccccgagcgactcctttctcaattggtggattcccttctattctactggggacaatagaatccaacagtggagagctttctcattcacccaccaccaaatccactaatctccttgaatctgtagtactgtatattcttagctttccttcttgtaactttgatgaactgtcaaaaaagtgacaaatacaaaagtgaaaaacgcttgagtgcatggatcccacttttctcctctacctatcattatatataactccctgtcattctgtttgtctttttggtctgagaatgagcacatgctgtcagattttttttttcttaaaacaaaacaggagacttctgcttctgggaagatgtaatagacatactttcccctattcctccagctaaatcaaatgaaaacctcttggcattacatataaaagaaatattgaaacattgaa

SEQ ID NO: 4722 - DNA, 568 bp, Homo sapiens
gcttcttacctctagccccacaagaaaactgccaatccagcctctcaaagaagctgctctgtatcccccgccctcagaggattacagattgacgtacggctgccgcctaggaaattcagaagcaaacggatcagctacttgcattagcaagtgagcactgctgctgggtaggaattggcctgtcccctccaaataaagaactcaggagtgttcccctgacagcaggatgggggcaagggagatctcagatcctgacccattggtcaagtagagcagacagcaggtgacagacttcaaaagagaagccagagggacagggcacagaggagggactaagcagccatcagtatacttcttggacaggtgcagtggctcatgcctggaatcccaacactttgggaggctcaggcaggaggatcgcctgaggtaaggagttcaagaccagcctggccaatatggtgaaactccatctctactaaaattacaaaaattagccgggcgtggtggtacgcacctgtaatcgcagctactcaggaggcttacacaggacaatcgcttgaacctggga

SEQ ID NO: 4723 - DNA, 473 bp, Homo sapiens
cactagaattaataagtcccaggagactccttctcctccctccagggagatggatccctgcctgggacccacttggcgtacagtggcctaagtcacatatggcaccttagccagaacaagtcccaaggtgccgttggactctgtcctcctgtgccatcacctgtggcaggaaagagtcatcccattcacatatgcacccagtcctcaagtgcctgtctaattggggacctgtggcaggaaagactcatcccattcacatatgcacccagtcctcaagtgcctgtctaattggggaaagggaatcaaaggcgtggagactaaaaaggtagaaaatttacatttggctttgaaaagagcacgtgaaattcctcccagatttgcttttctcactttagtattaaaaataaaagctggatgattgggtgcttatcagtgcacgggtgtaagtaagttacccattgtcacgaaaatac

SEQ ID NO: 4724 - DNA, 588 bp, Homo sapiens
tattttagtgcagatatggtttcctccaacagtttctcaaacacagcaagcatccttctttaataagtaacatgcaattacggttgtatcatttagaaaaaaatttctctatacgttctacattgttcacaccagcactctttaatggttttgttcaaacagcaccttttcagagacagcatccctgaccaccttagacgaataatattatttcttcaatgtctttattctaccctttttcccgcagttcttacaaccacttgaccttatttatttatttgctcaggtgtttattgtctttcttacccaataaaatgcaaagttcttgaggttaaggactattttactttcagatccatgtatattacataataggtactcagataatatttcatgaattaatggattaatccatctgaagttctgtctttacatgatcaaactccacttgcaaataaaaagtctgtcagaaagccaggaagcttctgctggcattggcttctgtaccatgcttctttgacagtgattagattcctgaaataaacattgacttagaaatattcttagtgtcagaaaatgaaaaaaaag

SEQ ID NO: 4725 - DNA, 620 bp, Homo sapiens
tatcttctttttacatattcacaaaaataaatgcaaaaaggtgcttctagtaagtttctgatttaaaataattagaatgctcataatttttaagttaaaacataaaaatgaagttgtttttccattccccagtctattccaaatcctcatctagaaaccctatactaatttgtatgagtgggttacttgaatctctttgataaatgtacgaaagaccattacttacgttttttgcttttgtaattgggttctttcctccttggtactgtcccagggaaataacccagaagaaatttccatgcttgctttctcaatgcatgactaagtccctgaagaaagcatacatattaaatacatgaatgaaaaagaatgtaatactgtaagttcacaaaacttgcatataaaaaggaaaactaatctttaagaggtagtttcatatatgtaaatagttcaattcagtgaatatcatcttgtttttttacttctagatccaaaagatgtaagcagctgccagaaagtttaaacagtgcacagaatacagtagactacagcagacagacagtgtgactggtgagtctaagcccaatcttacagaataaggcaaatgccactggaatgca

SEQ ID NO: 4726 - DNA, 128 bp, Homo sapiens
aacataaaataaaataaaacaaaataaaaagtaaaatttaaaaatgaaatttaaagattaaaagaatcaatggagacattaaagaataggattgacgatattgtgaaagttgggcagagagttatttt

SEQ ID NO: 4727 - DNA, 430 bp, Homo sapiens
  misc_feature 375: n = A,T,C or G
gacagaagggctgatccactccaagtgttctcagggcattgggtttttatcctatgacgatgttaatttgacaggcaatttgtctccacagcactcttctcttcctctcctatagtggggacagcatctagtgcttcaattaccttttcagtccagtcatttgcacagggcttcgatcactctgggccaagcactgtgctaagggttttacatgaattatctagttcagtccttacaaccactctatgagatgggttttatcttcatcattctcatcttacaaatgaggctcacagtagttaagtaagttatgcaaagatacccagccatcaagtatcagagcaagaattcaaacccaactttaactcacttcanaactcaagcttggctgggtgtgatggctcacacctgttaccccagcactttggga

SEQ ID NO: 4728 - DNA, 555 bp, Homo sapiens
catgaacattactaagcccctgaaaatgaagaacagttattgtttgcactgtgacaaagccaacattcctccttgcaaacagcactacttatttatgaacagcaactgacataagggtagcagttttctttttctgccctataaaatacttcatggatgattgcccttagaatatagtgaagtcccaggtcataatcatgagtccttctaaaaacagatttttggccaggcatggtggcttatgcctataatcccagcacttcggaagaccaaagtaggtggatgagttgagctcaggagttcaagaccagatggggcaacagggcaaaaccctatctctataaaatatcaaaaattagccaggcaaggtgtcatgagcctgtagtcctagctactcgggaggctgtagtaggagaaacactttagcctggcaagttgaggctgcagtgagccatgcgatcacaccattgcactttggactgggcaacagagtgagaccctgtctcataaattaaaaataataaaaaaaatgaaaataaataataaataaaagca

SEQ ID NO: 4729 - DNA, 545 bp, Homo sapiens
agtacacactcctcagttatgtagattaaacaagaaaacaccagtagtttagccacttgtcaagtttcaacttaacttattatcatcatgatatgaataggaatgtataaaattctcagtttggggtagatgacgctatggttaaaactggaattttgtaatataaagcaagggggaaacaggtataagataacaagtggcaaatgacacaggattaaagaaaaatgagaaaagaaggggagaataaatgaaaatcaaattgaagagggaggaactagaaaaactgtaggacaaagtgtaaatgaaagaaaatggagccgggcgcggcggctcacgcctgtaatcccagcactttggaaggccaaggcgtgcggatcacgaggtcaggagctcgagaccatcctggctaacacagtgaaaccccgtctctactaaaaatacaaaaaaattagccgggcgtggtggtgggcgcctgtagtcccagctactcaggaggctgaggcaggagaatggcgcgaacccgggaggcggagcttgcagtgagc

SEQ ID NO: 4730 - DNA, 594 bp, Homo sapiens
ccttaagagcgcacatttgccccttgcattcctcgaaagggcagagcatctgctaaaagaccaatctgtgaagcactaacttgacttctgcttatttaagctggactaatcttgtgactaattctatcactgtgctgtggctgcctaagcagggaaaatgtgctaatgtgaaggggttgaaatcccttattatggggaaaatatcccagcatgcctttcaactttacttttggcaaaagtgaagaagattcctttctaaatagcaaaaattcactttgctatacaagaactactgagggggataaacccttgactttaaacttgtcaaatatgtttcgcagctaacaaaggctaaacacacacacagacacgtacacagacacacacacacatagtcatgcctattgctgccattttatccttagaataacttaattataaagaccacaatacactaaacacttcctacaaaatgtcctagccagggactatgtgataaagatttccatatatgggcgtgtgactaaggactgagagaaaatatggcagagactgctggctacaaatcttggataattccctgagaaggaaaag

SEQ ID NO: 4731 - DNA, 642 bp, Homo sapiens
gaagatgtagcaaagctgttggacaaacattatccatgaaaacaggcatgggaggtgacactgaacctatttcttcagatcaataggaaagatctctggatgaagcctcaggaagagataagaaataagctaaacccatatagaaagcatatgaaagaaaaatttcaacttgtatgggaaaaggaaacctgtcttcatgtccctgagcatttctacaaagaaaccatgaaaaatgagtcaaagtattgaatgatgcatatactgctgaggctagactattcactgtggtcctggagggttctgatggaattggaaaaacagcccttttaagaaaagtgatgggccaggcgcagtggctcacgcctgtaatcccagcacttttggaggccaaggcaggcggatcacctgaggtcaggagttcaagaccagcctggccaacagggtgaaaccccgtctccactaaaaatacaaaaattagctgggcgtgctggtgcatgcctatatttccaactacttgggaggctgaggcaggagaatcactcgaacctgggaggtggaggttgcactgagctgagatcgcaccactgcactgcagcctgggcgacaaaacaagactcagtctctaaaaaaaaaaaaaaaaaa

SEQ ID NO: 4732 - DNA, 527 bp, Homo sapiens
ggaagtcagtcagacaggggtgggagcagagagtcctgcaaccaccatcaaccactaaccaccaaccaacttttacaaagctcgtacagtgtgtctagggctttatgggctgttaagggctgattcatgccttctccccaaattcacatgctgaagccctaatcccaagtacttaagaatgttactatgcttggagataggggctttaaataagtgactaacttaaaatgaggccattagggtgggccctaatccaatctgactggtgtctttgttagaagaggaaatttgaacacacaaaaagacaccagggatgcatacacccaggggggttggcggagggtaacaaaaaacaagaaaactagacagaaagtccaaacatcctgagagcatctataccatattatagcaatttgtaatattttatattcatagtatcagccaggaacatcaagcaaagtattgttttgttcagtataacttttcaaatgcaaataagtccatacaggttgagtatcactaatccg

SEQ ID NO: 4733 - DNA, 545 bp, Homo sapiens
atatcattgattttattttctttagaatttacattgtctagctgtaagaaagcacagcttaacttctgctggtttcaagttaggaaaaatatttaaaaagtgaaataattgaaaacgttattttggagacttgtgcaaagatacgctttaaaattcagtccaaattgtagaagataatataaattgaaaagcgagtggacaaggttaaaatctattaactgatgcactatagtttattttgaaataatatttctctctataattccccaattttattcgagacaaaatcatagtaggaccaatttatttgtaaaatcagttttaggcttatgagacttggcctggtttttttgtataagaggcagcaaaataatcatttaacatattagctctctttttttgttttctatttttttgtttgtacataggcaattttattcataaatggactttgctagaaattttttgtaaggagtcaaagggtagaatctttaaaatcttcaagcccagtcaatattttatctgtgccaccagatagctatgtg

SEQ ID NO: 4734 - DNA, 498 bp, Homo sapiens
gctccagcagagagcccgggcttgttgtcatggcaacggcacggttgcaagacagagggttctagtgcacagacttcctgagacttagactcccaatggggatgtcataacttctgctgcctcctattgaccaaagcaaatcacatgatcagcttagattcaagaggatggaaacagaccccatcccttggtgggagttgctacacagtcagaaagcaaatggtttagaaggcctggatttagaaagggggctagagaaacagggttaagtttgccatcagtctagaggattactgagcatttccttttgaatgtaagaatctgaacttaaaatgtttgagtaatctggctaaaatgtttgagtaatctgggccgagagtggtggctcacgcctcggcctcccaaagtgctgggattacaggcatgaaccaccacgcccggcctccttctttatttttttatcttttattttattttacttttttaaatagagatggg

SEQ ID NO: 4735 - DNA, 621 bp, Homo sapiens
ctatgtttccctattagctttttagtctcatgaaggcatttgtgttctaccttgagcacctggaacagtgtctttcatataagaagtgctccatacctgtttactggttgaataaaatagatgtagaagcagagaagatacttgggctatgattcttgactatccagataaatgctcaaaatttgcttctgcaggacactgtttttcagaggtagtgtaatattaggctctagtggtacatgctgggatgattgctagccacagagcctcttcctcaaaaattgccactgtttctcaaatatcacagaatcagaggcaattaaaaacaacagaagaaggccaggcatggtggctcatgcctgtaatcccactataatcccaacagtttgggaggccaaagtgggaggattacttcagcccaggagtttgagaccaacctgggcaacatagcaagacctcgtcttcacaaaaaatttaaaaattgtctgggaatggtggagtaggcctggagtctcagctattcagaaggctgaggtgggaggatcactttagcctgggaagtcgaggctatggttaagtcataatcatgccattgcactccagcctgtgtgatagagtaag

SEQ ID NO: 4736 - DNA, 555 bp, Homo sapiens
ggatagtaagcagggggactaaaagtcacatggccagctagaggggattagaaaaccaaggctaagaatggccaagtgactgtcccagggccacccaaataagaagcagcagagtgaggactgcccagattctctgtcagatctccgtgcctaacaaagtgcctggccaattacctctctgcactgagagaggtatgcattcaataaatactcctctgaatgaattaagtaaacaaacgagtgaatgacttactgaatgactattgaaactcaattctgccaaggttttgtcttagcaatgctaatttacaggtaagacctgttggcataattaagttggaaagtgctgtttgcaaagtaaccctggaagtgtcatctttcacagctctcatgagaacaaatcatcactggcagccatgtcaacacaaataagccaaaggaaccttgtcaacactgacggtccccattgttatatttaaaaaaaggcaccagagaggctggccaggctacactctgagctggagccaaaaagctattgcagtctcctgcattgag

SEQ ID NO: 4737 - DNA, 564 bp, Homo sapiens
ggaggcatcctgttcctgaggatctaagtggtctttattattcctcaggagcctcctgacatctatgaggcccagaacaagagtacagatggattctcacatgtcctagtcaagattatttaaataaaactgaaatctttaagttactttgaaaaatttagttaaattttatttaatatttatgagtctatttataattctataatgcccagttataattttatggagcctatccttgaaatttcagaatagatgaaatgagtatgcagatcactgaccatcatgtttatcatgataaaacatatgaataagtaaatactttgaaaaatatttcatgctaggaaaggtaaagtaggccaggtgtggtggctcatgcctataatcccagcactttgagaggccgagacaggcagatcacttgaagtcaggtactcaagatcagcctggaccatatggcgaagccccatctctactaaaaataaaaaaattagctgggcgtggtggcgaacacctgtaatcccagctacatgggagactgacacaagagaattgcttgaacccatg

SEQ ID NO: 4738 - DNA, 576 bp, Homo sapiens
aatatctgtgaaatcagttttgagatgttaagtttttctcctaatttaaattaaatgaacttgtttcattcaaatatgtatgtgtgtgaaaatttggggagaattttttaatgttcatttgcttatcaaattatcttgcatatgtgacagtaccaaagtttgggaaacaataccaatatggtacatattattttattaaaagtgcttgctgagggtgggggatagagtgggtgataaaggggatggaatttccgccattttgcctatgccttctacctcactagcagtgtttgacattcctattatgggtgcttgcactgcacagtatgtataagacctcaggcttcacaacagattttacccacatctaggacagggcccccaatacatgctcaaatgtgtcaatcccaacatttttatagtgccacatagttcacagttgggtaggtaaaaccaccattttacagatgaggaaactaaggctcactttctcaatgtcacactgctagtatatagcagaactggtacttcggtctaagtttctagtatctctacatcactatgcttcatcagtct

SEQ ID NO: 4739 - DNA, 627 bp, Homo sapiens
ataatttgcttacacttcatggtgtttattgtcaactttaatttttatttccagcatggttctcaatacttcatcttaattgctactgatgaagcaaatgacagagaggctaacttgactttgtgtcaccaacaggctctgtcagaattgtaaagcccactgacatggttagagagatcgttgaggcaggaaattaatgaagatattcaggacctaaattcaacacttgactaaatggacctaacagaaatctacagaatattccacccattaataacaaatacatatatattattctcatcagcacatggcacatactctaggatcaatcacttgcttggccataagaaaattctcaacaaacttcaagaaatgaaattacaccaatcacactcttggaccacagtgcaataaactagaaatgaataccaagaagatctctcaaaaccatacaattacgtgaatgttaaacaacctgctcttgaatgacttttgggtaaagaatgaaataaaggcagatatcaaaaaaatttttgaaactaataagaacaaagataaaatataccagaatctctggaacacagctaaaagaatgttaaacgggaagtttatagtgctaaacacctg

SEQ ID NO: 4740 - DNA, 548 bp, Homo sapiens
gatcatcattttaaagtatattaaacataagctaacttttttttggtgagtcagtcaccaatattatttgttggttattagtttttatactgtttattatagcatactgtgggaatattgagatacatgagtcactgtttgcagtaattgaactgttctttttcggtttgctgttgtctaatttttatctcctctctgctgtcaattgtgatttctcacttttgttagtcttgtaatacctcctcccttgttctaaaatttttgctataaataagatcccaagattgttataaatccccgtcgggcccagcgtggtggctcaggcctgtgatcccagcactttgggaggctgaggcgggcggatcacttcaggccaggagttccagaccaacgtgggcaacatggtgaaaccctgtctctactaaaaataccaaaattagctgggcatgatggtgtctgcctgtaatcgtagctactcgggaggctgaggcacaagaattgcttgaacctgggaggcagaggctgcagtgagccgagattgcaccact

SEQ ID NO: 4741 - DNA, 576 bp, Homo sapiens
gcagactctgcaggacagtccctgggtgactggcggagaaaagagagaaactgaagaaatgaagaaaacgttgcctttaacaatgacaaatgggaaggtgggcgaagtccactgggctgaggtctggccagggaagcaggacagttattttcagatcaactgttcccctttgccaacaaattcatcttgtaaatcaacacagcttcacaaaggacagcactgtcatcttgcaaagtgactctcaaattaatattcacaaaatgtgaatgctaccagaggtaaatgaagagcaaactggagggtgggtttgacagcccagttgaaattggtacgacaacattaatttatagtatcttaacttagctactgccaactctgccccataagtcattgccttagggggaaaaaaagacctgatgtgcttaaagcaattaaagcttaattgatattgaacctcctctccagataaagtcagaaattagacagatttttggcttctaggagaacaattatcatttaaacaaaataagaaaacaattttctcccaaaactatctctttaagtatctccatttag

SEQ ID NO: 4742 - DNA, 397 bp, Homo sapiens
catgttgaaaaaaaagggtttttacagatttcaaaatctttcagtgaaatcagtacttcataaagtattctagacatgcatactctcaagtaactgcattattcaataatgagtaagtgactattttgcaaaatatatagtactttttgaactctgcactaatatggcaaattattattctaagtttataaagcaacaatgccacttcatggctttattacacctttaagacaaaacgcttactctactcaaaatttacacagtattaacttcagaacagcatatttatatatttcaaaaacaatcttttggtctctgatttactacaaaatatagccccagatacagacataaaacagagcaaacctttaatttccaaaatttgagtatcagctag

SEQ ID NO: 4743 - DNA, 558 bp, Homo sapiens
cgagggccgctcctccacagtccccctgtggctgtggcaacagccaagactgctgctgctgctgctgctgtgaaggagcccttctttggccaaagctagggaaggaatttcaggggaacttagaaaagtagatcatacatgccagcgctgaagcagaacttaagatcagcaagtcaccacctgcctgattttgaatcctacctatgctatctttcacaagcagacatgcaagctgtgcttgaatagcctgcattagaccggatactctgaaaaacagatgtcaaggcaaaattaaatgtgcagagattttggctgggcacaatggctcacttctggatcacctgaggtcaggagtttgagaccagcctggccaacatggtgaaaccccgtctctactaaaaatacaaaaattagccaggcatggtggcaggtgcctgtattcccagctactcaggaggctgaggcaggagaattacttgaacccgggaggcagaagttgcagtgagccaagatcgtgccactgcactccagcttgggtgacagaacgagactccatgc

SEQ ID NO: 4744 - DNA, 552 bp, Homo sapiens
tatttcaaagtaaataatttcagctgtgtgagctgcaagtaggccaaagaaaacaagacagtttgttcttaaagttaaactaatggggaaaaaaaacaggacagggaggtatctcaagttcatttgagccatttttaaaattttggtagctggtttctgtttttcttctttttaaaatagtaacaacttaggattttgtgtgccaccagcttccattccatttcataaaagcttaatctagcaagaattggtgagccctagtagaagttagaaagaaatgttgaagtgtgtatgtgtgtgtgtgtgtgtgtgtgtgtgttggcatcagaatcaccttggacactttttaaaacaatgcccttggctgggcgcggtggctcagatcacgaggtcaggagatcgagaccatcctggctaatgctatgaaaccccgtctctactaaaaatacaaaaaaattagccaggcttggtagtgggctcctgtagtcccagctactggggaggctgaggtagaattgcatgaacccgggatgcggagcttgcagtgagctg

SEQ ID NO: 4745 - DNA, 597 bp, Homo sapiens
ataactcatgtgataaaggccactattagttattccattgaacagcaggagctggagcatgaaaagggtaacgatcagttcaagttcattcagaaatccttgactctactgtctcagcctcactctgaaatacatttttataggccaaggatcagcaaacttcaaccagcaatccaaatctacctccatgcctatctttataaataaagttttattagaacacagctatacccagttgtttacatattatctgtggctgctttccacactgtgtcagagtcgagtggctacaatagagactgtatgacccacaaaacctaaattatttgctctctggacctttacataaaataatttgtgacctctaatctagaccaccaatagttttgtttcttcctgcccttcttaaaattctgatcacaggccgggcgcggtggctcaagcctgtaatcccagcactttgggaggacgaggcgggcggatcacaaggtcaggagatggagaccatcctggctaacatggtgaaaccccgtctctactaaaaatacaaaaaattagccgggcttggtggcgggcgcctgtagtcccagctactcg

SEQ ID NO: 4746 - DNA, 451 bp, Homo sapiens
agggaagtagaaagaaaaaaaacgcccatcgccaaatgccatctgacctcatttccttctactccttcttttctatgcacatttagatacttgtgatcgtgttatacacctacgttttttgtaacttgtagcaaaagcatgtttttgagccagtatgtggaagctgtgagccccgtgtgggctggggaagagaagagggagaaacagatgtggcctagccagcctctagccaggctccctcagatcccagcctccagagccgccatgggtaccacgcgtctccaaaggccccaggcctccaggactgctgcccctccagcagattcctcgcacatttagctcaaagatttggtgcccatatccagctagcagaatgacaggaactggcttttccttctttttaggctttctagagtggcatggttaagggagggtgtaggagtaggggaaa

SEQ ID NO: 4747 - DNA, 580 bp, Homo sapiens
agaggtatataaaatgaataaaatacagactctgcccttaaggagtttaaaaactagtaggggagagacatgaaaataaatagccatgatacagaatgaaatgttaagtgcccccagagaggtgaaagcatactccaggaaaatgctgatagatgcaattgcttctacagaaggtaaccaggtaaattgacattggttgggactttaaatattgaatagtgttttattctttttcagaacagtcattgttttggcacttttaaaaataatgaaaggcaaatcatatttccatatatgataagtaacactaaaatactcacatttcttaaaatgtcaataatggaagggatctcaaagatcatctagtcctatatgttattaatatcaagacatgaataaaatattttggaaattgaagtatgcttacaacaaaacctcaactatccataatcatgtaataattctgtaagagttctaaccttgacaaatacatttgtctgcttcctagtctatttgttctgggcagcaacttgactttttacagttcatttggagagaaatctttagcaaactacttggg

SEQ ID NO: 4748 - DNA, 428 bp, Homo sapiens
tagactttttaggaaaataaagattgcacccgaatcagatgattcaagaaataggatttagtaaaatcaaaagtatattcaccaagaggtttttcttctaatatgacttatgttcacacatgttgaaaacagaaggactcgccaggcgcaggggatcacgcctgtaatcccagcactttaggaggccgaagcgggtggatcacgaggtcaggaaatcgagaccatcctggcaaacacggtgaaacccagtctctactaaaaaaatacaaaaaattagcccggcgtggtggcaggcgcctatagtcccagctacttgggaggctgaggcagaagaatggcgtgaacccaggaggcggagcttgcagtcagccgagatggcgccacggcactccagcctgggcgacagagagagactccgactccgtctc

SEQ ID NO: 4749 - DNA, 561 bp, Homo sapiens
agcctatttatatttcactggatagttttaaagctagtccttataatacataaatggcatttttacattgatttccatagtgatcatcttactcttgaacaccccactatgacttttctaaacaggaagtcagtgctatttgaaattatagatcagggtatatgaacattagaatcatgggttattgagaaagtttcaataatcccaaaagccttagctaatttacagatatattgtatttttatctgtttctaattcaaagggttagtttcccagtaatcatatgcatttttaaagctctgtggactgtgtaaaaagttgaagttgaggccaagtgtggtggctcatgcctgtaatcccagcactttgggaggccgaggtgggtggatcacttgaggtcaggatttcaagaccagcttggccatcatggcaaaaccctgactctactaaaaaatgcaaaaattagcctggtgtggtggtgcacacatgtaatcccagctattcaggaggctgaggcatgagagtaacttgaacctgggagtcggaagttgcagtgaacag

SEQ ID NO: 4750 - DNA, 644 bp, Homo sapiens
ccctcatgagctgttactgctgacccagactcgtgctaaactttgcttgaatgacaaaccaactttgttgacataaatccctagattgggggattaattgttacagcaattactctaggttatctggacaagtacgccatagataaagccctgccttgtaccagaacattaaacagagatacaaaatggcccaaggaaaaggcatatgcgtgtgtcccccagggaagccacaggctcaatctatcagtttttattaatctccaggttattatattagctgtcattttcttaattaagtctactttatcaagttctccctacatttatttaaatctatttattctgaaattaaaatacttgaaatccaatagtaagttttagtatactaattcaaaaattaaaggtctgagtggacttattactaaaacctatgtatttgtgagcgtcttataaaaatcaacagtaatttaatgtctgccagagcaaaagtcaacattctttagaagaagataacagaatccagagtgtctacaaaatataattcacagtgcctggtatacaaacagaaattactagacattctctaaagataaaaaagtgaatgacccggatgttgaattagcagacaaagacattaaaacagc

SEQ ID NO: 4751 - DNA, 332 bp, Homo sapiens
cacactgttttctcccatttcatcctcttggcaagagaactctcctagaaagaagactagcacctagcagaatgagatgttgcatagagattccaaacattaatttccttccttgccgaatgtaagcaaacacaaacagcaagtgctaatggtaaatgtggtaaagcactaatttctctgagttggtcaatatttagctgaggcatgtcagttcaaagcctcccacaatgtttctccttcattaagcaagtcatctctgagatattctgtaattttctgtatatcttctttattatatggttagtttttctgttaaagatcatgtgtgggct

SEQ ID NO: 4752 - DNA, 578 bp, Homo sapiens
gactataaaaaccaacaaatacaggtactacaggcaaaaacaaacatttttctttggattttatgcagatgatttagttcagaaacagggacaagcatggatattttaaaataactccattttactaccttcaggacttttatggaagtaacagaatttctcatgagggtatcaacgcctccacaacatgaaccaaagaaaagaacattttggcaaaggaaaaagtgactgcgttctccctctgcacttcatggttattactgtaccagggtacacctgaactcctaagtgccccaggaagaccactcctactccatggagacaaaagtggggaaaggggtgtcctcactgtattccaacactcctcttcagtgacaaattcctgaaacggaaaagtaaaaatggatgcacgtgtagaacttagggaaggtgtgttagctaattaacctaacaccataccactaaaatacaacagtacgcttgagcttttaaaaaaaatctttagagagaactactggtgaaaaggacatgtattggatacagatgatcagggtcaaattctggctctatcactgact

SEQ ID NO: 4753 - DNA, 515 bp, Homo sapiens
ggaaagtcttaaagggtctcccaatcacaggaacttccgtgactgtgatgttggggtgccccattctctcaggacgtcaacatgttcgccaaccgggaagcaatccaagccttatttttcagtttttattgaggcttcattatgcaggtaagattaattaaatcattagccacgtgatgaaacccaggccccagcccctctgccctccttggagttgagggtaaaggctaaaagtgtcaaccttttaatcagagcttcctttttctgctgcccacaccagcttatagaggtgcccctccataagtccctttgttaccatagcatctagtatggttggaaagtatgaataacaaaagacactcctatcacacagaaaattacaaggagtattgaagttctgagccagaaaccagggacaaagaccaagtatttatttttattataccagctagttatctcagattttcattattttgcttcttacatcaggtgtaattatcacatgattgtatatt

SEQ ID NO: 4754 - DNA, 627 bp, Homo sapiens
ggattccaagacctgcagcctatatgaggtatgtaaaagctattttcataaggaaacaagcaggttgcacatataagcccaacacagattaggtgctcagttgaatcacattttgcagaaagttgtggtctgcatgtatgactatacctttagtctagctttacaaagacataaaacatgtcataatcataaactaaggataaaaggaccttaaaatctagtcatcttaaggctgggcatgctggctcacgcctgtaatcccagcattttgggaggccgaggcaggcagatcacttaaggtcaggggtttgagactagcctggccaacattgtgagaccctcatatctactaaaaatacaaaaattggccaaacgcggtggctcacatctgtaatcctagcactttgggaggctaaggtgggtagatcaccagaggtcaggagtttgagaccaacctggccaacatggcaaaaccccatctctattaaaaatataaaaattagcctggtgtggtggtgcatgcctgtagtcccaaccactcgggaggcggaggcaggagaattgatttaacccgggaggaggaggttgcagcgagccaggatcgcaccactgcactccagcctgggc

SEQ ID NO: 4755 - DNA, 613 bp, Homo sapiens
cagtataagaattatgggactccctttacgctgtaaattattgtttttccattcttttattctaacagcactcagtagaggcagatggaaacaaattattttttccttttaattatcatctaaccttcattaagtgatactatgtacatgaaacagtgcaaagtgtttgggcaagcaatacagaaataaacaaaagtgcaaaattatagtaactgttaaaatttgatggctttatctataactctactttcttatgataatagaaagtgaggaaaagctagtcaggtagactctgcagttagccagagttcaaaatctagctgtctcttacaatctctgtcaccctgaacaagtttttaaagctctctatgtctcaattccttaaatataaaaagtaagaataataatagtgctttgagcagtacctcagtaaatgctagccattattattgctttatccttataatggctatctactttaagaactgggtctaggccgggtgcagtggctcatgcctgtaatcccagcactttgggaggccgagacaggcagattgcctgagctcaggagtttgagagcagactgtgcaacatggcaaaaccctgtctctac

SEQ ID NO: 4756 - DNA, 603 bp, Homo sapiens
tgccctttctagcccatcatttataatctttagaacaagagacccagggtggccattagtcctagtggcacagtccttgctgatcacagaagatgatcgtgatagcatcaagacgatcacttgaggaaagtggtcagcagctggagtgggggttggttgtttttgtttgtttgtttgtttgtttggtccttttctctgggataattagcctcccagccataataaccaaggaatgtaaggtttaaaaggacttaagggtatgtgtggttgatagtgtgatgagatggaaatagagaccctggacatagcatcccaggaggctcagagcatttttgaggagctagtcattgatgctttatttgctttctctctaatggaatgatttcacagttttcttaaatagctgggaaaaaagttggctgggtacagtagctcatgcctgtaatcctaacattttgggaggccaaggtgggaggattgcttgagcccagcagttcgagaccagcctgggcaacatggcaagacccccatctctgcaaaatctttaaaaattagccaggcgtggtagcacaagactgtggtcccagctacttgggaggctga

SEQ ID NO: 4757 - DNA, 589 bp, Homo sapiens
catccatcagattggcaaacttttaacagtctggaaagatcaggttggctggtgaaaatataaggaaatggtgattattaccacctgctgggacagccataaatttatagagtcacagttggatagcaatttctcaatgtttactgaagtttagtatgtgcatactgtctgcttagcactttcaattctagataaaaaccctgcagaaactcttgacccaaaaaggcatttatacctggatggccatgatagcaatgtctggtaatactgaaaaatggaaaacaacctattatcagtggaagattggttgaagaatttgtggtatattcacctattagaaatactttgagcagttaaaaaattaaaagaattgatctacatgtttcaacatgcataaatcctgaaaacatgtttagtggcaaaataagctaccaaaggaaatgtataacaggatatcacagactgtttatgactatgcacataatacagtaaaagcaaatgtggaaaagataaatacatattaattccatgacaagggtcatttctggaaagaaaaaggactgagtaggagtctccagctgaatcttta

SEQ ID NO: 4758 - DNA, 293 bp, Homo sapiens
cccaaagtgctgggattacaggcgtgagccaccgcgcccggcccaggtgaaatattattatcctccacctacaaactaagaaaaagaacctgaatgactgcccgggactccctgggtaggagagaggggagctaacaccagagcccaggtccccagctccccacccagggcttcactgcttggctccagtcaataaaatagcacaggtctaaagagtctaaaatctggaggtccccaccagaaagggatccttctttttttaaaaaggaaatatatccaaaggttagaatcag

SEQ ID NO: 4759 - DNA, 585 bp, Homo sapiens
gtacatgtaccatattatgtctccctccccatacatacacagagtagtgttttcctgatttatgctttactttgatgccatcctcctgtattgaagtgtgctctaagaaaaagcatttcaaatgtagtgttgtggctgctaggaagatattaagtgatgttgtattatgtcatataaaatccgtatgatgaccttctggagagatttctttccggttcagggaaaggtgtgattctcctgtgcagtcagattcttctcgtggacacagtgagcaatataacccatcaactttcttttttctgtcggctgttagaaagccagattcaaatgcatgttttgtagtagctggaacttttatattgaactgaaaacctcagtcaaagctggcctgcatcaaacagggaattttttggctcttgtaacaggtaacagagaaggccaaaggtgggcacgggattccaagtcttccttgctaagcatcttttctctctatgtgatgtttctaaggagttacaggctaaatccctctggctccaagcctagtggaaagagaaattctcttccctcatggtacaactcactcct

SEQ ID NO: 4760 - DNA, 554 bp, Homo sapiens
gaaagcttaggttttccctggagaaagaggaaaggtagaaacagacaggaccagacgaccggccagacaagaccacgtgtaagtgccaaaagaaccacacaggccacgcctttaattccagcactttgggaggccaaggcagaaaatcacttgaggccaggagcttgaggacagtttgagaacagcttgggcaacatagcaagaccccatctctacaaaaaattttttaaagtctgggtatagtggctcatacctataatgccaacactttgggaggctgaggtggaaaattgatcacttgagcccacaagttcaagaccagcctagcaacatagtgagaccctgtgtctataaaattttttttaaattaggcatggtggcctacatctgtagtcccagctacttaggaaactgaggcaggaggatcccttgaacccaggttgatgctgcagtgagctgtgttcatgccactgcactccagcctgggtgacaaagcgagaccctctctctcaagaaaaaaatgttttttttaattagctgggcatggtggcatg

SEQ ID NO: 4761 - DNA, 581 bp, Homo sapiens
gaaagactaaagatcaaattatatttacagactctgattctaataatactgaacacagcctactattttcatataatatccattcaaagaggtttcgtgagtacaggtaatctgtaaagatggtataaaatggttactctctccgtgaaatcctctcaaaactcaaatagtaaggagatcacagggtaaattataaccttgtgtcatctacttagtgactcctgtagaatgttacttacagactttgttttagcatttaaaagttaaaactcagttatctgggtctggtgcggtggctcacgcctgtaatcccagcactttgggaggccaaggcgggtcgatcacgaggccaggagttcaagaccagcctggccaagatggtgaaaccctgtctctactaaaaatacaaaaaaaattagccaggcgtggtgccaggcacctgtaatcccagctactcgggaggctgaagcagaaaattgcttgaacccgggaggcagaggttgcagtgaatcgcgatcgcgccactgcactcaagcctgggtgacagagtgagattccgtcaaaaaaaaaaaaaaaaaaaa

SEQ ID NO: 4762 - DNA, 606 bp, Homo sapiens
ttgggctatagccacaggcaaaatggcaaagtagaagcgaagcgaacttgggtcacatccactgtcttttttgcatcattcttccagcagttgaaaggaataatagagtgatcctcatatcaaagacttctttgatgggtctgacatggaggtgggtagatgatggcattatggaaagcaaggggtggtgtacaaagtgacatgtcttctagaggagtgacttttatgtaaaggagaagaagcattatagagtaagaactctcctgcaccattcttgactcagggatatggagtgatgagcagtgcttatccaagggttgctagagaagtgaaatcctcagtgcagagccaggagaaggaggcagagctccgagaagctgttcctgcttgactgctcaaagggaaggatgtctcaatgaggccacggcacacccactgccgggatggaggaagatggtgttaaggatggtcgctggtggtctgtccaccaccagagacatactctctggatatttgtttttgtcatctctgcggtggaggtgaaaatacttaccctgcaaggctgttgtgaggatcacgtataatcatcctccttgaacgcaccct

SEQ ID NO: 4763 - DNA, 628 bp, Homo sapiens
cactttgggagaccaaagtgggcagatcacttaaggtcaggagttcgagaccagcctggccaacatggtgaaaccccgcctctaccaaaaatacacaaaaaattagccaggtgtggtggcaggtgcctgtagtcccagctacttgggaggctgaggcaggagaatcacttgaacccggcaggtggaggttgcagtgagctgagatggcgccactgcactccagcctgggcaacagagcgagactccgtctcaaacaacaacaacaacaacaacaacaaagttcgttgttttaagagcaaaagaaacccatacaatttaattaatttgagtagcattatacatgttcatattacccagataacatatgttaccacagtacctaaactatgtcctgtagatatttgctgtcatttgggggtgcttccatctgtaggtctcgttccgttgagctgccccgagccactcccagcagctctgttctaggactgcacgtaaatgtcatcatataggctgggtgtggtggcttatgcctgtaatcccagcactttgggaggccgaggcaggtggatctcctgaggtcaggagttcgataccagcctgaccaacatggtgaaactccatctctact

SEQ ID NO: 4764 - DNA, 539 bp, Homo sapiens
ggttttgatttgcatttctctaatgatcagtgatgttgagctttctttcatatgctggttggacacatgtatgtcttcttttgagaagtatctgttcatgtcctttgcccactttttaatggggttgtgtgggtttggttttgttttgttttgtaaatttctttaggttccttatagatgctggatattagacctttgtcagatgcataatttgcaaaaattttgtcccattccataggttgctcatttactctgttgatagtttctttcactgtgcagaagctctttagtttagattccacttgtcaacttttgcttttgttccaactgtttttggtgtctgcatcatgaaatctttgctcacgcctgtgtccagaatggtattgcctaggttgccttccaggatttttatagttttagaatatccccctactgtcgacaagatgccatttctctgatcaactactttctagagaatggagcagctggtttaaccaagctacttttgacctgaacatgacataccttatctaaatctc

SEQ ID NO: 4765 - DNA, 535 bp, Homo sapiens
gggcatgttatttaactctgcttgatgctgcaattttctcatctataaaaaagagttaataattttatttatctcatagggttattgtagagaatgaaagtatttacaatagcactgagcatattgtaagtactggaaaaaatgttaattaccatcctactttttattattgggtaaaagcaagtaaatcaagtcctcctatgtttctgtttcctacatcccttcttgtgtgtgtatgtgtgtgggtgggtgtgtgtgtcttctcttcatactttccctcctatattgaatactgaatattgtctttattgaatattgtcttctccaatcctgaagtttttcctacagaaagtccttcagtactgctcttcacagagaacagagaaaagcccaaatagcccaaaagcccaaagtgaggtgaagtctgagcaaccatgtcctgtggaggaacaaagcagcaacgcccagaccattgttctcagtggctcagtgaggacagctacccactgagcagagtgtctatggtaaggagagc

SEQ ID NO: 4766 - DNA, 506 bp, Homo sapiens
acaaagcatggtgcattgatacaacatttttcccaatccaagcaaaagcaaaatcagctgcaatgtgttgcctcagttgatttctccctctgatttctcctgaataaacctgtacctttagcatacctcagaagaagtaagtaatcagggagttcaatgtgtaaaatcaatatatactataatattatttacttaagtctgtaaaaaataaaataacattgtctgtgtttccagactttacggccacctttttataaaggtaaactggtatttaactttctgttgaccttcagcattttattttcagcctacatataggtaaaagcccagtgaaatctgccattgtatttacttttaagttgttaacagattattcttctcacagatactatagatactgtaattgactctgtttatctctttctgttggctctcgaaagcctagagcaaaatgtgtggcccatctgtacagaatcttattgcttgcatttttagaagtaacctca

SEQ ID NO: 4767 - DNA, 585 bp, Homo sapiens
aaatatcagtgttaggagttcacctaggaaacagcccagttagaatatcattcagggaagcataatcactaaaacaattcatgtaccctgagcttctactctgccttttttgtgctgtacttttttatataaggcaattactaaaggctaccagaaaggacaaaagtcaatttcaaagaaacagaccatgcagggagaaaaacaaaacagaatttcaaaaaccattgagattttagtatttctagagaggtaaaagaagaaatgctcccatgaagcaagaataagacaataagaaagaaaagcaatgtacatacatgcaggaactctcaggtaacagaaatgatcactggaaattaaaaatttgattggagaaatgaaaaagacaaagagaaaggaagtttagagataaagatgaagaaattttttagaagataaaatatagtgataaaggaatagaaaacttgggggaggggaaaacaggtgaacattagaggtctaatccatgaaaggtccaatatctaaataagaggagttaatacacagacgaaaaggagtagaggaaatcaaagaaagaactaaaaaaaa

SEQ ID NO: 4768 - DNA, 518 bp, Homo sapiens
ggctggtcttaaactcctgacctcaagcagtcctcttgtcttggcctcccaaagtgttatgattacaggtgtgagtcaccacacccaacatgtgtctatatctgtagatacagatacacacaccatttctacctgaatatatagcaatatatatgtgcttccacattctttgtctacatgtttttttttcctccaggatgaatctgtgatgatgaataaaaaagtgaataaaaaagttatttttattcaggtgtagataaactacttctgtttctctcaagctgctataacatgggccatcttgtttggttagaatgtatagtcaattccttagaatccagaagaggagtcattaattcttgctggaagataagggccaagctgtaacttctggcatatggaggaagatcctgactcaggaacaagtacatcacacttggagtcatgagccctcatttggagttccaattctgttattacctcaataggtgaaacccatgcttctgcgtactctacca

SEQ ID NO: 4769 - DNA, 642 bp, Homo sapiens
gtttctatgggtaactcctgagcctatgtttctaaggagatgatctgttgattgttaatgagtcctgtgagtgctttaaaaaagaaaaatggcatcgtatttgagagatctagactaaaactaattgtcacacacttcaggaaatatgacagaagaaaaggcttttaattttttttattttctcattattgaaaaggtcactgatcagttgagtacagatgaaaggttcttagagtagatcaatgacctgttgttagtgaaattcttggggtctgaatcttagctatttagagttttacattatcatctctaaatgttttgtctattataataatgaataaccagctgggcgcggtggctcacgcctgtaatcccagcactttgggaggccgaggtgggcggatcacgaggtcaggagatcgagaccatcctggctaaaacggtgaaaccccgtctctactaaaaatacaaaaaattagccgggcgtggtggcgggcgcctgtagtcccagctactcgggagtctgaggcaggagaacggcgtgaacctgggaggcagtgcttgcagtgagctgagatcgagccactggactccagcctgggtgacagagggagactccatctcaaaaaaaaaaaaaaaaaa

SEQ ID NO: 4770 - DNA, 522 bp, Homo sapiens
ggtgttgccaggagaggtaaggtgtggtgtgtacagggagcccctgtcatcatcgggatgactttatgtccgtgagagtggcagcccacaccctagctctgagctgctggctttccccatctctgacaaccttctgtcccactgtgacttggccacccactcccatcaccactccctagacttagtcaccacccagaactccctcacctctgaaatcactaatcttgatggccttctctatactctcagcttctccactcaatcactttgtctactcttgacctctgaccccatcaggtaccccgtccatggatccctctgttttctttcaatccagcagccccctttttcctgcattctcttttctcacacctgagatgcacagctcagaattttattcattctctcctataacataaattcccccttgttgcaccgcctgccaaaattccaccggtggatgaagcagctgtccttttcctctgaactgcactggcatgacaggtgattctgcaggagaag

SEQ ID NO: 4771 - DNA, 521 bp, Homo sapiens
  misc_feature 437: n = A,T,C or G
tatataagatcttatggacttacatgcatagaaagtaaataaaatgtagtcgcttccttctcactcttctgtgctttcccacacgctgctccttcccttggaaacaccccttctctgcctcaccacagtaactctactcatctcaaaaactcactttaaacatttactgcttccaaggctctttgcttctaacccagcatttgatatggtattattggatggtaatatttttcccatctaaacaaagagctccttgagggcaggggctgtatcttttgtttctatatcctcaaccctaagataaattgcgtataaagcaagaatttgcagaaagttcaacctccaacatgcaacaaaaattgctattaaaactcacactgcccatctgaaaaaattttccaacatttatttatttaaaatctatttatatttaactntcccagattgttactaaataatcagttcataggactactgaaactaaattaacagaattcctatctgcattcttaataactcca

SEQ ID NO: 4772 - DNA, 523 bp, Homo sapiens
tataccattattatggtgccttattgctcaaatacgacagagacatctgataatgtaattacttcaccttatcacgctttaataaataatgtaggaaggacagcctctgtagtgagcctgtctaaagaggccaagcatacaaagggacagtatctgtgatacagctgatattaatttgcagagctgaaggtaagcaacagaaacattaagatcagatattttaccatgaatgattaggcaaatgcataagccagggtgtatcaaagcacagctccctctctagacacttggagaacagattgcctatccaagtgtgaacgtttgctacttacatgccttttgaggcatgaagaaatgcctgatatttattgtttttttatattcctggacttgcccctgccctgcctctagcataagtgtcataaaggtgaatcaatatgtgtttgaaacattggctattatacaaaaaaattgagctcactgtggatgttgatttaataatatctactgattattcctctca

SEQ ID NO: 4773 - DNA, 571 bp, Homo sapiens
gaaagtccagtctgtcaagagagcccagaagcaacccaggctaaagggggctagtgaaggcctcttagatataaaaatgtacccttccacgcaacagaaccttaaccaagaaaaagatgcttattgtatttacctactataccaatacaccaaaaggtgagcaggagttccctctgagacacgggattatcagtgattttaattttctggtttatagttttctgtattttctataatagacatgtattacttttataattagaaacaaaattgtaaatattataaactaaaaaggagataaaaagaataagagtaccattcagggcttaaaagttttaggtgagggaaagagaggatcgatttcaaaaatgtagcctgtgttaagggatcaagtaggcatcattaagaacatactatgtgctggccaggcgcagtggctcatgcctgtaatcccaagatcacgaggtcaggagatcgagaccatcatggctaacacggtgaaaccccgtcctactaaaaatacaaaaaattagccgggcgtggtggtaggcacctgtagtcccagctactc

SEQ ID NO: 4774 - DNA, 505 bp, Homo sapiens
gtcaccgccggactcccgtctcctcctgtgtccctgcagagacagggccactgggagccctcgttctacttttgtgtctgccccaccatgagaacggcccctcgccaagcctgagcactgtcctgggagatctttcttgctctttcttgtctattctctgtcatttgctgagaaatcagagttgatgctagaaacacaggggcgaggaggatactgcttgcatatcagtggtaacccagaccacgatggcagaaaacagccacccggcaaggggactggtggccacggggctcacacaagccgatgcccatcacctggcgatggtgtccaggacattgtcacgaaggtccctggcatgtgtggccccaggcacacctcacatcctcctcatctcaaaatggaagacccttttgggggaaattactcttagctggcatcaggttaaactctgcctcccctcagcagtcacctgggaggtagcaagcagccagcgacaccgtgtctc

SEQ ID NO: 4775 - DNA, 622 bp, Homo sapiens
tcagtgtgaaagtcatccagtaacacggtcacaagcaagagcgagctctggaaactgcccatatggtgaagggatatataaatatttaatatatttaatattttacctggtaccatagccattttaaattattctactaatattatctaataatatgtggtataccatttctctccaagaaattaaagttctgaaaaatacatccatacttacatcttattgcttcttcaaaccacacttgtgttcatgaagcaggaaagggtcaacgtgcaatgactcattatttcacatttacctgacaggctgcaaaagtgcacatgatattatagttcaagggcatttaggtcagagggtatgctgagggctatgacccaccgggttatgaaatgagctgaaatatcaagactgacatttcttaagtgaaatagaatagaatggaaaatgtcagagtacaacactccaaaatatgatagttgttgcttcatgaatattctgtttcagaaacataaatatgtgtaggtatgtcgtatgtgctagatctcaatgttattaaagctattaaacacattataaggtacctattctaggctgggcacggtggctcatgcctgtaatcccagca

SEQ ID NO: 4776 - DNA, 447 bp, Homo sapiens
tcatgatctgcccacttcggcctcccaaagtgctgggattacaggcatgagccactttgcccggcctgcaaatatattttaattaaatcatgcaaatgaaataatataaaatatagaaatagttctaactacctatggacatttcagagcagtgaggaaacatttaagtattcagtactaatggtggaaaaactgattagctatctgggggtgaggagggtgaggggagctaggtccttacctcatttcttacaacaaaaatactccagatgaatcaaagatctgaaggtaaaagatgaaactataaagataatataagggaaaatgttggctagatgcagtggctcacacctgtaatcccaacactttgggaggcccaggcacatggatcacttgaggccaggagttagagaccagccttgccaacatggcacaaccccgtctcta

SEQ ID NO: 4777 - DNA, 333 bp, Homo sapiens
tttgtatttttattagcccaaagtgctgggattacaggtgtgcgccaccacgcccggccccagggagggtttcctcagtgcccctacagctccattgcagcaggcccttcatgcctgaaccacagaggtggttttctccatgttcttgccccttcgttcattttacgcaacagatatctattgagcaactgccatgtgccagacactgagctcaagtatggtttattctagcgaggcaggaagagcagtgggtctatttatgtgattctggaaattcacaaaggatgaaacctatgactactcaagtattagctgcaaaagctggtaaagttc

SEQ ID NO: 4778 - DNA, 587 bp, Homo sapiens
ggacagcgacctggattgtccttctcccttctctgaaaaattaccccccatatctcccgtgtccacgtcaggggatgtctgcaggttggtttgccaggaagtgccattctagccatctctgctcgcatcaggaacctcctcttgctttagtatgtgaagtttcaggaaaatgaagtaataggaagttgtaaccagttgtgggttgatggttttctccagaagaatggagtatcaatatcgtttgaaaaacttaatttttatgatgtgagtcccaagatagttttacaaatgataaaagaggaagaagctggctgggcgcagtggctcacgcctgtaatcccagcactttgggaggctgaggcgggtggatcacctgaggtcaggagtttgagaccagcttggccaacgtggcgaaaccccgtctctactaaaaatacaaaaattagccgggcgtggtggcgggcgcctgtaatcccagctactcaggaggctgaggcaggagaattgcttgaacccgggaggcggaggttgcagtgagccaagattgcgccattgcactccagcctgggcaacaagagtgaaactct

SEQ ID NO: 4779 - DNA, 600 bp, Homo sapiens
cattctgtgatcccaaatcaacacatagctctttggcatatttttctacagcatttaacattctagccaactgaagttccagactcacacctttcaactctggcatgtgttatggcagattgacaacccaataaccacacaagatgcctataatgcaaaattagaatagagttctgctaaaattatgaatctttatgaagaagaaaagaaccttcactgacaatgttcaaattttttaattttctttttgtttgtttgtttgtttgtttttgctacggagtcttgctctgtcgcccaggcttgagtgcagtggcgcaatcttggctcactgcaagctccatctcccaggttcacaccattctcctgcctcagcctcccaagtagatgggactacaggcgcctgccaccacgcccagctaatttttttgcatttttagaagagacagggtttcaccgtgttagccaggatggtctcgatctcctgaccccgatccacccgccttggtctcctaaagtgctgggattacaggcgtgagccaccgcgcctggcttaattttcttatatattttggtacctattcacttgaactgagtcaatga

SEQ ID NO: 4780 - DNA, 505 bp, Homo sapiens
ttcccatgttactttcctgacataaaagaactaggcagcaaggataatgtaaaggccaactagctaccaagcttcctcagttttaacacgttagtcttaaaatattttttcatttataagggagtagtgtagtttgaagtacttgattcagaaagaaactccaggaaatactagagctatctccacctcccaaagccaactagcttgtggaggcactagaaggcattttttttcaagactcatgattttcacagataactgaaaccctgcgtggctaagctgctgaagttgggctttcctggccatcaccaacatgtttgcagcagggagcccaaccaagctttaagtcatgcagtctgtggtggttaaagaccactgctggctgggcgcagtgactcacgcttgtaatcccagcactgtgggaggctgaggcgggtggatcatgaggtcaggagatccagaccatcctgcctaacacggtgaagccccgtctctaccaaaaatg

SEQ ID NO: 4781 - DNA, 616 bp, Homo sapiens
gggctgggcgcggtggctcacgcctgtaatcccaacactttgggaggccgaggagggcagatcacgaggtcaggagatcgagaccatcctggctaacaaggtgacactccgtctctactaaaaatacaaaaaaattagccgagcgtggtggtgggcgcctgtagtcccagctactcaggaggctgaggcagaagaatggtgtgaacctgggaggttcacaaggcgggtaacaaagggcccatgagtcctgattaactgatctgacaaaccatctgtcacccacagccctaagccacactgtgaaactgcctagggtggcaccagctttttatcttcctcagggtcctcccctcaggcccccaagtaacccctcatggtccagattctcccgagtgactccattcccatggtcatctcccctcctgagcctccccctctgagggccaagggctgtcctcagggccctcctggggcttcctggtggggaacaacctgaggcaggaggataagctcttattcagagcattgagaggaaattgtgaagcttgcagtgagccgagattgcgccactgtactccaggctgggtgacagagcgagactctgtcccaaaaaaaa

SEQ ID NO: 4782 - DNA, 194 bp, Homo sapiens
gaggaagcctagacatcacacttaccagacaaaaaatttaaaacaactgtcttaaatgtgcccaaagagctaaagcaaaattacaaatctgttttaaaaaattgaagtgaaaaagggaaataggaggaaaataaatacacatcccaattcccttatctatagtagctgagactcaaatatttaatatatcatat

SEQ ID NO: 4783 - DNA, 626 bp, Homo sapiens
gaagttgttttggaaaagatgtacctgcccctcaaccaggcccaggcgcctgctgagcctacgacagaagttgctacccctaccccaggtgaaagtacagcaggacactctttccaagtttatcatgagtaactaagcaaaccaccatccgatacccaacccaggcccctgttctacatagaagacagataggaatattcactcagattgataagaaaagcatcctgcacatctcaggatggtcaaacctccatgattgctatgactcttgaatgacaccttcccccggagaaacagacaagaggaaatggattgaaattgatgataggccgggcatggtggctcacgcctgtaatcccagcactttgggaggcagaggcaggaggaggatcacttgaggtcaggagttcaagatcaccctggccaacattgcaaaaccccatctctactaaaaatacaaaaattagccgggcgtggtggcacatgcctataatcccagctactcaggaggctgaggcaggagaactgattgaacccatgaggtggaggttgcagtgagcccagatggagtcactggcactccagcttggatgacagagtgagacagtctccaaaaaaaaaaaaaa

SEQ ID NO: 4784 - DNA, 604 bp, Homo sapiens
aagggcagagtgacttggctggggctgcacagtgaattattctcagagctgggactctcacttaatcagctctgttttctccatttatccttgaacccagtactgcaccatcaccccgctagaccccaggagatactaagtagcatgctggaaggagcgctagtcttgcagggccaagtctggtcccgtttctctctcacacgtgttctgtgtccttatgccaatcacttctcttccgggaccttggtttcctcctcagctgggcagggctctaaccagagctgcctccttgggttgtggaggggaatccaaggccacagtgcacgccgagtggagccttctgttcctgcacgtggaaggcagtggctctcattaggagttaacctgaattgggctgggcgtggtggctcatgcctgtaatcccagcactttgggaggccaaggtgggcagattacctgaggtcaggagtttgagaccagcctggccaacatggtgaaatcctgtctctactaaaaatacaaaaattagctgggtgtagtggcacatgcctgtaatcccagctactggggaggctgaggcaggagaattgcttgagcctgggag

SEQ ID NO: 4785 - DNA, 630 bp, Homo sapiens
agtattattaatggagtctgttatacagatcaatgataataggctgaagagatgagcagatttcagatacacacagtccgaaggagaaattggaatttgattcctgccagagtagaaagtttttggagaatacctcaggctttcagttgaaatctcacaaaggtgaagaccttgaagtaagaccacatcctaagaatgttggcaaatttgaagaacacctatactaaggctaaagtcaaacctgaaaattatgaaagtcatatctaatccctgacatgtaaagagcttggaaactatcactcccatcctcacaataagaaaacagccaaagccaggcatggtggctcacgcctgtaattccagcactttgggaggctgaggtgggtggatcacctcaggtcagaagttcgagaccagcctggataacatggcgaaacccagtctctactaaaaatacaaaagttagctgggcatggtggcatgtgcctgcaatcccagttactagggggactgaggcaggaggatcgcttgaacctgggaggcagaggttgcagtgagccaagattgtgccattgcactccagcctgggcaacagagagatactccaaaaaaaaaaaaaaaaaaaaaaaa

SEQ ID NO: 4786 - DNA, 450 bp, Homo sapiens
tacttgacaacataatgggttagttgcttgaatcaactcttccactaaaaccagtaattattccttaatataatatagaaaataccttccgagatatgtcaattagttggtatgagagtaagagattatcagatttttttttttttaagcagggacctagggatgtaagcagagaactgcgacctgcagtcactccaaaagcatttggagtgactttgaaagacagtataatagtatgttctcttccactgaatttcaacaccaaggactgcactttcctgtaggagttacctggaaattctatcactgcctcaggaattgcagagaaaattgactcttcaaatctgggtacaaagttgaaggaaattatcaccattaataatttggaaacaaaatcttattaaaagcccaaactgaaatgattctcagtgattggggaaagctcaggta

SEQ ID NO: 4787 - DNA, 511 bp, Homo sapiens
aatagaattgttgtatattaaagaaaaagagacagaaccaatcactataatgatctctcctggattggatcctggataagaaaaactcatgtactttgcaataaaggatattgttaaagcagatgaaaagatttgaataagctctgtataccagaaactactattaaattaataatgatttctttattttgattattatactgtaattgtgttaaagaatatcctagttttaggaaatatatgcaaatatttagtggtaaagagatactatgtattcatctcaaattgaggctatctctcatataaatacatttttttaaattcctttagcagtctccttctttgtccatggatactactgtcttgaatggaatgggcactggaggcttgttaaatcactacgtatgcccatcaaaaagaaattgacaatgccatgtgttggccaagatatgaagcaggtcacattcttctaaattatggatttgagaatataaaataatacaatcacttc

SEQ ID NO: 4788 - DNA, 528 bp, Homo sapiens
gacgacagagggcattcatcactatttttagtttaacaagagcacacatctggaaggtattggcttttcaagtcaactgctggaaagacagctggggggtgtccatttcaggaggcttaccttggtatcctggggtcgtgccacgtgctaactccagtctgtgtatgcaaaaagtaaacttggccctggactgttgttctttgttctacacaagaaattagagatccaaatgagacaagttcaattccagggagagtttgtaaccaaccctcgatgccctcacgtctggtattatctaaatctagataacactcccctcttatcccagttcttctctctgaggtggccgaataatcccctcttctccatctcgccccatgctctcctttccagagcactacagacaccctcatctagcctacatgttaccttggtttgctttggtgttcgtttgcctaagattttcacttgatttctaaactgggagatttggagcaattgctgaaaattcatgattagctagattta

SEQ ID NO: 4789 - DNA, 488 bp, Homo sapiens
agaggaagccttggtcagcccatggctctctagtcccggtcattgactcagtaatatttcttgtttacctcctaagtggcaggaattatcacacctggaaggttctgtagaggagaagacactgattagagctgagttttgtgtgataaggtgctttccagcccagagagtagtggagactgacagctgggataaggtaacatcaggaagaggaaacggctgggctgaacttccaggagtgtgacctgggcctgtgagcgagtgaaggcagtccctgtggtgcagcagagggtctggagggggttgagacagtgaatgagtcagaggcagaagctggggtcggactgtgaaggtctttgaggccctgctaagggcattgctctttatcctttaggaaatgggaagccatgtgaggtgggaggaattttaagagggaaacaatgtggattcatgtttgagatagagaattataacactggcagcaatgt

SEQ ID NO: 4790 - DNA, 546 bp, Homo sapiens
tacattggtaggtagcaaaagccacatgaaacgtatacaggtgtaccaacagtttttccttgttaaatatcagctctgtggtatgacagaagtgaggggaaccgggttcctttgctgtgtcctgaaggtagtggttagagtcacttgcagggttaataaaggctgttgaaattgagcttccgttggtggttaaccctctgccttcttcaggttcctgtgagatacctgactggcacttcctttccagataaaagaccttgggggaagttggtgaggtagttaccaggggctactaggtgctaccaacctgttgaagctcagtgatgttggatagggtgtgtacactctgggacacacagatgagttgaaaaagaacaaaattcactgtaagtgggtcttgcagtcttgtacacttcagaactcaattatgcacatgactatggcctgcccctgcatatgaaatgctgcagatgtaaccaatgtaggaattcatgccaatcagggtaaggaacagtaaatgaagcagatgggaagatgagctcaggc

SEQ ID NO: 4791 - DNA, 608 bp, Homo sapiens
ttggcctcccaaagtgctgggattacaggtgtgagccgctagtgcccagcatccttaagataatttttatgtgaactgagacttagaaccactaacttagattcttggatgccttctagaacttctaggattagacaaatattgtggatagactgtaagagaagaacctggccatagtggagacaatcactgttatgttatccagaggagagggtcatcttgatcaataatattaacagtagtagtaagagtaatactgctactactgatggcaacattgaaggccaactttatgtcagtattcttccaagtgctttataagaattacttcatttaggccaggcacagtggctcacgcctgtaatcccaaaactttgggaggccgaggcaggtggatcatgaggtcaggagatcgagaccatcctggctcacacggtgaaaccacgtctctactaaaaacacaaaagattagccaggcgtggtggcgggcacctgtagtcccagctgctcgggaggctgaggcaggagaatggcatgaacccaggaggtggagcttgcagtgagccaagatcgcaccactgcactccagcctgggtgacagtgagact

SEQ ID NO: 4792 - DNA, 540 bp, Homo sapiens
ccctaaaaatactaggggaaatattcaaaaaatgacaatagtgccattattcctcctcctcaaagagactatcagaactaaaactctttgcttcatgttcctgtttacttctgtcactttcaagtcacagaggtattatcagactgtcatcattatatgactctgcttttccaacagaatcaattacctatcccttatctcacaacttgatagtgatagatattgaatgcttatgttctgattagcaaactctttttgcatttttaataacaacttgaactcctgatatgtctggaaaatataaccccttcaacagccctttcaatgggttgctactattttgctcaccccatcttcacctgcctaatcatgaggaggtggggtatatacaatttcagttaatttgtagttatcagtctattatagttctttccttctgaaaaccaacaagtaaataaaccagcaagcatcaccaataaactttgacagtttatggttcataacgtacgtctacaccaaactttccattcaaatgctttt

SEQ ID NO: 4793 - DNA, 562 bp, Homo sapiens
ctctgggattttcattcctcattaatgtgtcaaaatgactatgactataggagaagcttcaggggaactgaaaggttaccctgggattttccctgggtaaacttggacaagacatttccccttctcaagcggcagtttcttcatctgtgaaatgaaaggattatgctatataatctctaaagctccttctagcacatgagataactaacacttacatctctgacccttcaagaattttgataggccttccctggaaagaattcaatagctaaatgtagatgtttatgggaacagaagagcaagagtttctgcagacaaaacaaggatgaacgaagcctgcgttccgaccaagatctgaaaataaaccggtggcctaattttgcctcagcctctgctttgagaattaaaagacatttttgagtgtaaagaaattcctcaaaactatcaacagtggtcaaaaacgagccatcagaaactgcaaagatctgttgcaaaataccagaagagaaggcaggagtaggtctctgttttccttctgattcctctgctgacttcatcacac

SEQ ID NO: 4794 - DNA, 472 bp, Homo sapiens
taaggcatagagttaaggattctatccaaagtcaaacagatagtaaaagataaagctgagataaaaacaatttaaaaaactagttaatttattaactcatcagatattagcccaaagtgaataaacaggtgtataaacagtacagttttttactttcagaatatcaaaggaaatgcccatcgttgctgcatgtatgatgacagctatcgaaagttatttctctggttgtgtcacttaacagtcgctgcctagaggaaatggagtaacctctactggaggtcattctgatgaagggttttggaaatcagaactttagccaaactactgaagtgaggattgcagatagaaatgaatgtgttctggtagtttggtttcactctttgaagtaagttgataacacatttctttgacaggaaacctacatgttcataaagtatgaaggcaggatttcttttcaattcaactgctttca

SEQ ID NO: 4795 - DNA, 549 bp, Homo sapiens
acggaaagcaaactgttaaagaaatgtgggttgtgtgggcttagcagtctgacctagtagtcacaaaaggtcatgaaaatccacttagtatttagggacacaatgctgatatggcataggacagcttgaggaaaaacaaaaagaaacctaaaagtcttacattctgaaattgaggcacaaagtgtaacccagggtccttttgagatgataaagttcagtcctgcaggttgctgaattgtaaagtccattgagtttacagaatctcaatatcacttaggtgaaagttagagcattgctcaaaactctaagaattagattagggatctagaagagaagccgaagcatctagactactctcaaccccgcctccccttgcccccaggtcctccttaccagcccacatcctgccctcataatataaccagaatgactttcctggcataaagaccctgaaggcctcttgctcaagcaagttccattgcatggagaaatggctcctcactcaccagtccttgcatgttaccctgacgatctctgaattatctttga

SEQ ID NO: 4796 - DNA, 325 bp, Homo sapiens
gaggctggagtgcaatggcgtgatctcggctcactgcaacctccgcttcccaggttccagcgattctcctgcctcagcctcccaagtagctgggagcctgaacgctggtgccagttaggccaacagtcatgtggcaatggctatgaattgcaagcattgctgattgttatctgctgctactgcctttgagctggagcggaacagatcaacatgggccaaacaagagcctctttggagatttctctactgcttcaagcacacagattccaagtttagaagctcaagagaaggttgaaaataaaatacatttagtttttgtcatcta

SEQ ID NO: 4797 - DNA, 487 bp, Homo sapiens
caggtcttaaaagataacatgtaaatgtttttaaaatggtaaaaaaaaagaaatcacatgctcagatcaaagctgtagaggaaactgacataattagattcatgtggtggctgaattaggttacccacaaagtcagcatttaaatatttgatactaaagttctagtaagaagggattctcatcctagctttgctgttaactggccttgtgaccttggacatatcacaagcccatgtcggatctgtttcttcatctgtaaaatgtgcagcttgccctcaaaggccttgcagcccttggcacctcagattctgtgggaagcagtaggacagagagtgtggtggcccacagttaataatagaactatggttattcctgctttttaatattggagtattgatttttctcacttctgaaataaggacagaatttgattaaaaaatggaaacagaaatatctattttttatgtataaagaaacatgtttgaga

SEQ ID NO: 4798 - DNA, 323 bp, Homo sapiens
  misc_feature 96: n = A,T,C or G
taatcagatatttatggaataaataaaatctgtaaatgtgaaaaaagaatcatgggaatggtaaatttgatagtgaaaaactgtctcttaaaaagngtgggatcacaaggtcaggagatcgagaccatcctggctaacacggtgaaactccgtctctactgaaaatacaaaaaattagctgggcatggtgacgggcacctgtagtcccagatactcgggaggctgaggtaggagaatggtgtgaacccaggaggcggagcctgccgtgagccgagatcgtgccactgcactccaccctgggtgacagagggagactctgtctc

SEQ ID NO: 4799 - DNA, 541 bp, Homo sapiens
gtaccgccagccagcacccccaaggtctctccactctctcacacggactagtataatgttcaaggctccaggttgaaaagccaaagcccctaagataaaaaccatgagaactctaagaattggagactatgtgattcaactgagcaaaagaaggcccttgactcagcccaagatagacatttttgagagatctgtcatcaagtatcgaatttagaagtatcacttgaggtaatcaatctttctgaggatgcaaatttctttgtataggttgaaagaagaaacatctccaatgcacacagatacatcagttaacaaattaaaaacccatataaaaccctcactccatctgaagagtcctgagactgtatctagaaaagtgatcacatcagaagaatcttcaaatatcaacagcactttgaagagaaatataaaaacaactgctgtaattccttagtaattatagttatggaggaactaaatcctgcatctgtgagcagagaagagcctcagcctggattcttggagattagtcagggggaaa

SEQ ID NO: 4800 - DNA, 581 bp, Homo sapiens
tgctacaaaaatgaagaaaaagcaaagacctctaaagataaccaaacgtggaaaaattatatcaacactacatgtgccatacaaaaaatgctgagaagagtcctcctattaaaactatatgatgctaaaaaacaaaactatcatataaaaataggtagctttctaggaaagatataaagatatgcaaatattatagaaaaaatatcctgtagcattattataataccaaaaaatgttttatttaactattctctaaaatttaaagataaaagctaaaaataataatgaacatctgttaataaatacataacataaatagatatgtttagtgacatcaataactaagttgaggacagatgtaataagaaataatttgtgcatgaacccgaatttaaatttcaccacttcaaaatatattgttgaaattttaagaggtttttatataatcctgaaggcacccacaaagaaaatgtctgtacaggtacaaaaaaggaaataagaaagtagtgacagcctatccatacaaaaatcaaaaagacacaaaggaagatagaatgagaaacagacctacaagaatcatt

SEQ ID NO: 4801 - DNA, 532 bp, Homo sapiens
aactcagtcccacaagcattaacccagtcccacaagagtggtattaatccatctttcaacctaatcacctcaaaaaggccccatctcccaacaccacaccaggggccaaatttacaacacatgaattctgaaggatacactcaaactatagcagactttagcacatgaatttggaagagacacacttcaacccataacaatgctgaacctaggagccccatcctggacttcctgacacatttacacctggtagaaagaaaggaaaacacaaaagagtggttttctctctgcagcctactgatggtacaccatcctttctagtcactgggtgaggagaatacaggcttttcctcaggacaactttttacaattaaatagccatgtactccacacgttagcaagtccaacagcacagccagagccttcataaggcaagaattttttatctaagtcagcaaaagaaggagatcctcttttcccccaaaataacccactaaccaaataagtcacataaacacaaacccctttcaac

SEQ ID NO: 4802 - DNA, 594 bp, Homo sapiens
tagtattaatttgaagtacattgtgataaactaagatgcaaattactattcctggagaaactactaaaaaatataaaaatatttatagctgaaaaagacgaaagaaagtaatacactaaaaatagtcatttaatttaaaaggcagcaaaaaagggataaatacatgagacatatagcaaacaaaatagtataatcacagatgtaaatctacccattttgaagattctattgaaaggtgaattaaataaacaattcaatcaaatggcagattgttagacttaattaaaaacaaacaaacaaataggatccaaatagatgccttctgtaacagatacattttcgattttaagaagttgaaagcaacatccaacagtaagagatataaaatatttatataaataacagacaaaataggcttgaagactacaaatatgactagagacaatagggctatagcatatgaataaaaggatcaattcatcagaaatatataataattataagtgcatacacaactaaaacagaaccccaaaatacattaagcaaaagttgacagaactgaaaggagcaatagataatgcaacaataataaac

SEQ ID NO: 4803 - DNA, 511 bp, Homo sapiens
gtaatctagagatgatttaaagtatacaggaagatgtgcataggttatatgcaaatatgtcatttatatcagggacttaagttgtccatgaatttcggtacccaagggaggtcctgaaacctaatcccccagggatatacctacgtataacaatataccaaaagggcttgaaacaaaagttttgaagactgctattgtgcagcaaaatataatttgtaacagcttattttatgactacatattattaagcactgaatatggaaaagaagtgctaaaataaaagtgccatgaacaaaaatcttgaagctctttcagcacattgagaatgatatctgtagaataatttcctaggataattaatgagtgtaaaagaaaatacacattttggccgggcacggtggctcatgcctgtaatcccagcactttgggatgccgaggcgggcggatcacgaggtcaggagatggagaccacggtgaaaccccgcctctattaaaaactacacaaaaatta

SEQ ID NO: 4804 - DNA, 565 bp, Homo sapiens
tatattctttcataagatattctcacatatttttttcatgagaatcttacatattctttcactcatgctatcataagtgtgtttttttctctcctgttcacaaaacacagttgtcatttcagctaaaatgagtcaactcaaaatttattttctaattacaaatttaattgtcagaaaagatagaaaaggaccaggtgcagtggctcatgcctgtaatcccagcactctgggaggccaaggcaggaggattgcttgagcccagaagttgaagaccagcatgagcaacatagcgagatcccatctttacaaataataaaaaaattaattatgtgtggtggtgtgtgcctggggtcccagctacattgggaggctgaggtgggaggatcacttgagcttgagaggtggtggcatgagctgagattgtgccactgcactcactccagcctgggtaacagagaaagaccaatctcaaaaaggaaaagaaaacacagaaaagcacagcagaaataataaaatcacacgtaactgcattccctcaaaataaccactgtaatttttttcacat

SEQ ID NO: 4805 - DNA, 541 bp, Homo sapiens
ggtggaacagtgtcatccccaaaccattcctaccacctctggtctgtggaaaaactgtcttccatgaaacccatccctggtaccaaaaatgttggggaccgctgctataaggagtcgagtaggatgtacctctaattagaactgccttttagaatgctggttcctgtcacaaggtggtgggtggagggtgctgtgcacaccactgcctgtacacctgtactgaggggtctctccacacagacgccctgaaagccatcacagaggtgaccaccacactacagcacattctcatccggctggagaacctgcagaagctaacggagctgcagcgggacctggtgggcatagagaacctcattgctcctggcagggtgagtgaccttgctctgggaatgttttttgaactactttggtttttcaattgagatataatttacataccacaaaagtcaccattttaaaatgtataattttggccaggcacagtggctcatacctgtaatctgaatactttgggaggctgaggtgggaggatcgcttg

SEQ ID NO: 4806 - DNA, 431 bp, Homo sapiens
ggaagagagagagaccctgcctcaaatcacctggatgagaccctggttgcaaggggtagtcctatccaaactaacgctgaggccctgggcttcgtgacagcccgtggcacgttctcagttgtttctagcatgtctagcaaacctttggaggtcagagcctgtctactcaggggtgttcacttggagaagggcaaacacgttggggagagtaataatttgcagacctctggagaaccattcggtgctccagagctgacacatcccccacgctgtgactcgccaagccattctgtaatggatgcacgtggtgcacacctataagaagcattttcaggcctagggccaaaagaatatatcacaacgaagaaaaatggtggcaagatacatgggccaatagccggtaattcaccagcgttgaaatcatagccagc

SEQ ID NO: 4807 - DNA, 557 bp, Homo sapiens
gcatacgcacacctgttctggaaagaatcctttcctcctcccccgaccccccaacaagggataaaacttcatatcctgacagctgtctcataaaaggatggttatatgttaaaaagcacttgctacacacttgtattgccagagtccttcggggcgtttgtgtgtgaagagtcctaactgggaggtagtagctgttggcaaacacccaggcgacattggcatttccgtgatttcttcttttccaattagagcagtgtttcttatactttaatttgagttacaggcttacttatttattttattttattttttcagtttcttgagtttattgtgaagaatgaaatgcacatatagaaccagttccattagcaaaagtcgtatcagtcttctctttgtagatgtggcatgatttgtgaatctgaccattataagggcatcttttgctaatttaatacgtatctatatacctactgctacttatgcatccataacattttttattccataaagagaaatgtattctacaatgattaagtcattaattctcatagcatctc

SEQ ID NO: 4808 - DNA, 443 bp, Homo sapiens
tatttctatttaggcaaagtctacagcaagagaaaaatgtgtgatcaaccatcgggatgtacatatttacaaaatgcttctcttccaggaaaatattttaatttttcttgtatcactgtctgttctctcttatctccctaaacttatttccaacaaagcacctacctcagtaagttggacttaggttgtgtatcttatggactgagagcatttggtggccagtatgtttctcacatagcaaagccatgaacaatatctgattgatgattgtcaactagaactacttcttgaataaaattgcattttacttactattttatttgtagaatatacccatctactttatatatctgtattgcagagcaaaaaacttacctttgcattataaaatattgaaaaataaatagttttattatctataaaaatgtatagcagcacatata

SEQ ID NO: 4809 - DNA, 493 bp, Homo sapiens
caacacatgtaagaagataaggcagcatcagttcaggagcttgtcttggaaagatcatctcccaagcagactgaaccattcacatttcaaccacatcatcttcagaatgcgaaggcccattattggaagccatcacctcataccattatgcatttcctagagcttccatagcaaacaggtctccttaaagtcggggagtaccaggagatcatcaggatggggctgatggagacatcagaaaacagtgaagcaaggccagtagacctggagattgcagcaacagttcccaagagctggggcttcctcacagctgtgtgtgtttgcatcttctggtcccaagagcagccactgctcaggtaggctcatagcagattattcacctgccaagccattagccagacatgattttagaatggcaggcccattatcacccatgttatttgaattggaagacatggtatttggggttgggggtagtattgggcttgggctc

SEQ ID NO: 4810 - DNA, 562 bp, Homo sapiens
tgtgaatcaggccgggtgcagtggctcacgcctgtaatcctagcactttgggggtccagggctgtggatcaagaggtcaggagttcaagaccagcctgaccaacatggtgaaaccccatctctactaaaagtacaaagattaggtgggcgtggtggtacaaacctgtggttccagatactcgggaggctgaggcaggagaatcgcttgaacctgggaggcagaggttgcggtgagccaagaccatgccactgcactccagcctgggctacagagcaagactccatctcaaaaaaaaagaagaaaaaaaattgtaaatcaagaaatcaaggttgaagcgcaaaccaggtcactcttgtacatgtaattgccataaaagctagcagttttcaaatatataaaagcataagcttttttaaaaaacaattttacttaaaattccgatataaaaaaagcagatgaaaacaaaactacagtagtatagatttattttgtaaattcaaatgcaatcagttaataaaaacagttaagctgccttgataaatgtacatttgaaattggggg

SEQ ID NO: 4811 - DNA, 580 bp, Homo sapiens
aaagaaagctgctgggaaaggaaaacaggttttccaggagccactggtcattcttggttgatgatttgtgtgtaatggagagttaagccacctaagtgaaggactgcctgaatacatcctacaggcagcaatggcctacttcattaaacgcagcacaatgttcttggactagtgtgtcaaaatagaaaagtaattgctagtcttattatcctaagctgcatatggtatgatgtgaaagtcagtatgtaaaagaaatgtttccttaaaggggtgaacataatttcctggaaaattaacataagtcaaatgaataaattagcagtcagagtagaaacaaatattcttcattttttttaaacaaaacatttgctaagaagaacaaaataattcatatttattttcatgaactgggtttatatgtattaagataagcttcttatttcactctgaatctttcccctaaacaaaaactgtacaatgaatgtataaaaacttgagaggtcaatctatctaaaaataattcagaattatctctaattttctcaattaaaagaatatttgttgcacataaaatacattt

SEQ ID NO: 4812 - DNA, 544 bp, Homo sapiens
gaagccaacggaaattttgcaattatattagactgggtaaaagccatgttcttccaagactgtgtcagtctgtataaaaccgtaactccagcttcaagggctggggacattttgatacccaattttgacaatttagagaccgttttaacagtaaaaccttcctgctacaaaaagacaggcattcttttaaatgtatggataagttcacaaaaaagaaaatccaagtcatcaggtcacaaatgaagaaggaactgaaagccatatataaactgcagctgctgcagctgggaggctgacagatgatgttggtctcggtaactaaggggcttggattttaaaacccacagaaagccagaaagcaaggtcttgggccccatgtgaaacaggaaaatgaaatccatgctccatgcccaacctcacctgcacaaacctgggaccctcaaaggtctggtatcttaaacaaaaggtgaatcgggaaaaaagaccaagaatatctcagtggtgttttatcttccctgcgagatagcaggaagcttggtcatgt

SEQ ID NO: 4813 - DNA, 315 bp, Homo sapiens
gaaacaagaggctatgtagtctcgagatagatccagccctatgaggcacatgtcaatcacagagggaaagctatgcacgcacaaagcatgtgtgaatcagagagaaagctatgcacgcacgatgagtagaagacaaacacgtcctgcaaggagacggaggcgcagggagggggcggcagccgtcctcccaagacatgaggacttctagttcagtctgagaccttggtgcagggctgggcgagtaaacaaatgcaaaagaataaggacctcgaggtcgggcgcggtggctcaagcctgtaatcccagcactttggg

SEQ ID NO: 4814 - DNA, 531 bp, Homo sapiens
gggtgcaattaaagtcaaggaaaatgtatttgctgagctgtacaagcagacagcgtacggcatggaccatctgtccttcctggggcccgcagctgcggtgtgcacagcccccaattccatctctctgggaatatcacactcctgctcaactgttgagaaaatgcccaactcaaaaattgccagcctctggttgtcagtggcggggagttgggggtggcgtgttggattgtgaaagaggtgaaactcgttttcactcactttgtttcttcaagccccacagaaacttcacgtgtccattgttcagaggttcatggaagtgggacagagctgatcattcaccacctcactcagccactcacttggtgctgaccttgggaagtttagtgaacatttcggcgactgttgtctaatgtgttaatgatacaaaatttatgccaaagatttgaattgttacaataattaataaaataacagattgaaagcaactagcatagatcactgcacttgatatacactccataattgacatat

SEQ ID NO: 4815 - DNA, 473 bp, Homo sapiens
aggcagaacacagaagttcttcctgtgttcagaggaataacaccttcattacagtaacagagatgaagaagaagaatacagagacaggtataggaaggtgaagactgtgcttatgttatttaattcataatgcatgaagtgaggtcattcattaaggaaggaaatggacactttgagattttgaggtcaaagctttatagcaatgagggtaatgagcaaggaagtgctaataataggaaatagcttgcagtcagcatgatgtttaaaactggtatttcagctgtgatgacttttccacttctgacatgattagggatatgttgttacagttgctctttggaaattttgttaagtaatgatataatgtaaagtaggaagattgtcaagataactgaacaaggtacagtgtggctaaataaaccactagtttaatttactcaggtcctggactagactcacatactgtacttact

SEQ ID NO: 4816 - DNA, 475 bp, Homo sapiens
acttaatcttagtaaacctcaatttcttcatgtattttatgtgaataacagtgtatactccataggatccttgtgaggtttaagtaacctaattgtatatgaaatgcttaggacaattttggacacattttatactctctaaactggtagtattattcttagtagggaaaatatgtcttgaaagagaatgacacagtaatagccttttccaactgtagtgattaaattaattattggttgctgatatttccaggagagttgatttgcagggtatttttgttgaggcacagagctatagtccaagctcctttgatttctgttttgatttccaacctagggtcaaaataagtcaatttgtgaatcttgcaatgaatccattatccttaaggagggagcatttggaagacaaattataaaattaaaaagaattcagaatattgctgagtagaactataatcctatttccctatgtaat

SEQ ID NO: 4817 - DNA, 552 bp, Homo sapiens
ctgtgcctctgggtcctcctctgatcacagagaagtaggcatataggctgatgcctgtgaagtgctaggcacaaggcccagctcacgaggtacaatggtcatcatcacagttcttccaggaaggaagcctgggtccagcaaagcaggaattaaaaatcctgaagtggccgggggcagtggctcatgcctgtaatcccagcactttgggaggctgaggtgggcaggtcacgaggtcaggagttcgagaccagcctggccaacatagtgaaaccccatctctactaaaaatacaaaaattaactgggcaaagctgggcgtggtggctcacgcctgtaatcccagcactttgggaggccaaggtgggtggatcacgaggtcaggagatcgagaccatcctggctaacacagtgaaaccccgtctctactaaaaacacaaaatattagccgggcgtcgtggcaggcgcctgtagtcccagctactcgggaggctgaggcaggagaatggcgtgaacccgggaggcggagcttgcagtgagccgagtttgcaccact

SEQ ID NO: 4818 - DNA, 429 bp, Homo sapiens
cccattttctagttgttctcaaccattttccccctactcaacacacctgaggaaaacaaccaactcctaaaggtaaccactggagtggttcccaaaatggtggtagttcaaaattccagtgaaggattgggaggctacagagtgacataagtagtttgatgaagtcctctaaatcattctggtatccggccgggtgcagtggctcatgcctgtaatcccagcactttgggaggcctaggcaggtggatcacctgaggtcagcagtttgagaccagcctggccaacgtggcaaaatcccatctctactaaaaatacaaaatattagctgagcgtggtggtgggcgcctgtaacctcagctactcaggaggctgaggcaggagaattgcttgaaccggggaggtggaggttgcagtgagctgagatcgcac

SEQ ID NO: 4819 - DNA, 383 bp, Homo sapiens
aagatagggtggttgactgagtttacaggtatggaaactgagatgcaggcttagtgacctgctcaaggtcataggcttagtaaatggtgcaaatggaaaccctcatatgactccaaacccagttctgtttctcttataaaattgtctctatgtccaaatgaaggatatgaagactaaatgaaggaattcttttttttaacaaaagaaaaacatgttaatgtgtatctgtcagacatggtaataaggaagttctggagatatgggggagtttgtaatttttagaagctatgggtaagaatgtactcagactttacagagagttagagtgctttaaacaagtgcttctcaaacttcaatgtgcatggaaaacaaccagggatctt

SEQ ID NO: 4820 - DNA, 580 bp, Homo sapiens
gattataggtgtgagccactgcacctctgcctcccgggtaacctctgcctcccgggttcaagcgattctcctgtctcagcttcccaagtagctaggactagaggcgtgtgccaccatgcccagctaatttttgtatttttagtagagacggggtttcaccatgttggccaggatggtctcgatctcctgacctcgtgatccgcccgccttggcctcccaaagtgctgggattataggcgtgagccacaaaagttaaaaattttcaataaatgtgctgagtcctcaaaaagaaaacagaaaagtaccaagctaaaagatgcaagatcaggatctgacctcactctacaattttctgtctgtataagctggataacttacttaactcctcagagcctcagttttctcatctagaaaatgataacagcattttaaaaaaaaaattttttttaatttttttaaaattttattttttgaaaaatagagatggggtcttgctgtgttgcccaggctggtcttgaactcctgggctcaaatgacctgcccacctcagcctcctaaagtgctaggattatgggcatga

SEQ ID NO: 4821 - DNA, 461 bp, Homo sapiens
gataccaacctccagcatccttcaaacaatgactgatgtgggttggtgttcaaacatcccacaaactccattcactttctttccttcatgtcttccctcttctctaccagcacttcttgcactttctgagtaagctatttggactttatctagaggtttgcttttgaaggaagacagttatgctttacaagacaacttaaaatattgcttagctaaacacaaagcaaaacaagcaaacaaacaacaacaatcttctaaggctaataaaatgctaaaaattatacaatcatctttggccgttttgccaatgtagtattctgggagtcatgtgggatgtccaggtaagtcatgctaaagaagcaacacaagaatggtctagatcgctgcctaagatctctgccacactgtagagtggaacgaactacaaggagcaagcgagaaaccaggaaacagggcatcac

SEQ ID NO: 4822 - DNA, 189 bp, Homo sapiens
gtaattaatgtgcagtgccaattctgtgagtatgatgtgtgcatggagccagccaaaactctgattgaatttcagaactgggacactctcttgttttgcattcaggaaggagtgaaaatgtttttaaacaagagggattatttgtggaattatcaggtgaggatattaaggaatttagtgaagataatg

SEQ ID NO: 4823 - DNA, 300 bp, Homo sapiens
acaatacggccggaggtagggcacaggaagttaaaggtatttatcctggcatcagctgcgataatggttatgactaactcagtcagtaactttgaaagtctgtgataaccagcattgaagccaactgtgtttataacatgatggaaagtgtgtttgtgctaaaagcatatctgtgaggtgtgctaagaggtcatcctcaacagtttggggcttcttcctttaaaatatgtgattaacttgcttctggaattgaaaaagtaattctgcagtaagttattttgaagtgaggggtagttttga

SEQ ID NO: 4824 - DNA, 366 bp, Homo sapiens
cctctctgttgcccaggccggacttgaactcctaggcttgagcaatcgtcttacccattgtcccttgtgacagtgactttaagtgattcaaaaggcctttatagaaatgtcttttcttataaaacaagcatactaactagaaggggaaaagaatatttaaatattgacagtcattaacaggatcactcaaacactttgctctatgatgtttgactcttcttagaggagtgcagtggggtatcacacagcttctgctcaggtacaatcatgttttcaaaagaaaagggctgggcgtggtggcttatgcctgtaatcccagcactttgggaggccaaggcaggcggatcacgaggtcaggaattcaag

SEQ ID NO: 4825 - DNA, 431 bp, Homo sapiens
atgttaatatatgtcaatatataattttaaaaggaaagtattaactatggtgtttcagtgtcatttttggaaaaaatgagtttttcaaaaaacttcaaatgctactttgcatctaagcatgtgtgttgtgtatagctacagcaagacgtattactgctgttttatattttaaaccttgatgctggtaacatgtgtttcttccttattgtgaaagggtgttacaagtggtatcagcaaaaccatttgcttttgaactctgaggtatttatatggcccctatgtgaagagtgctttggaaatggtttaagcccagtcaactctcttttatctgtcggtgggttctgagccttcctgctgcagctgtccagtcctttcctggatgctgacactgaggttggagaaagtcaaggctgggcatgtactggtggggg

SEQ ID NO: 4826 - DNA, 343 bp, Homo sapiens
ttttagtataaactcttccatctgggaactttcacttttatgtccctgttcagtgttctgtgtacttcagcactctagtattaattatggacactggcattctaagtaacatgaagaacactaaaaataaaagtagactgaacaaagtggcaatgtccggagaatagtttgcatttggtgaataatcaatccatcatggctttgccattgctctttgtatgtgcgtgcgtgtgtgtgtgtgtgagtgtgtgtgcatgtgcgtgtttagcattacttaagagtgagatagttattcttcagggaaatttttacagatgatggtttcacaaaaatcagccttttt

SEQ ID NO: 4827 - DNA, 320 bp, Homo sapiens
acaagcacagagaaagggagaaagagagagagagagagagagaaataacagagtagattgagtttctgattttggagctgttcgccccctctctctccttgatatagacaatagtaatgaaagccctggatttcagtgcctagaatcagacacccattgaggttttatgggatttttagagctttattgtaaaaatcacattttaaacattggcagactcaaacagcttatattaaccacagggaaggaaggatgtataataatgaagcaattttattggacattcaggtaagagaaagaaggaaagagaagggataggg

SEQ ID NO: 4828 - DNA, 550 bp, Homo sapiens
gtggcgcgatgtcggctcactgcaacctctgcctcccatgttcaagcaattctcctgcctcagcctcccaagtagctgggattacaggcacctgccgccacacccggctaatttttgtatttttagtagagatggggtttcaccatgttggccaggctggtctcgaactcctgacttcaggtgatctgcctgccttggcctcccaaagtgctgggatcacaggtgtgagccactgaaactggcccctttctcttagtagactaatatgtattgagcacttccaatgtgtctggcactttgcatgggttatcatgttcaatcctcacaagtgccctgttaggatttccatttttcatatgatgaaactgaggcaaagggggttaaagaaattgctggatcatttgcctctggtgccttggctcacttccttgaggcctcacctctgctgcttccagctgtggccttggtggaccattccgtgagggctttgactcaactcacactgacagcgtctcacccaaagtgagtaccagtcatctctgcctttcat

SEQ ID NO: 4829 - DNA, 528 bp, Homo sapiens
cagtgtcctgaacttttcggggtcactctcaggtgagaacagtttcgtgggagcctctatgagccaagccttgtgctgggctcagggtaaaacagtgacaaagggggacgacatccctgttccagtgggtcctacagtcaggtggggcagacgaggcatgaatcaagcaatcttagagagaccgggtggcattcaaggctcaaagctcgccctgagggaaaggggtgagcattggtgacaacccaggatgaagcagcgtggaccggccccggggtcagggagggctggggttgacatccgatccccagggtgtccatagagagaggccagcagctgaggtaagggaggagagagcactgtgcagaaaggactgtgagtgcaaaggccctcggggttggaggcagagcacggagggctccgggaaccaggtcagagtggctccagacagggaggcatgagatgaggctatgatggaacgtggtgaggatggcgggcctgatcctaaaaacattggaatttattggcaat

SEQ ID NO: 4830 - DNA, 539 bp, Homo sapiens
tcactctgtcacccaggctggagtgcagtggtacgatctcagctcactgcaacctctgcctcctgggttcaagcgattctcctgcctcagcctcctgagtagctgggattacaggtgtgacacctcgcccagctaatttttgtacttttagtagagatggggtttcaccatgttggtcaggctggtctcgaactcctgacctcgtgattcacctgcctcgggctctcaaagtgctgggtttacagtcatgagccactgcacccagccctgagtcattttttaaaattcagattattgggaccattcctcatgagctgaattataatttttgcaaaagaggttcagaagtctatagttttaagaagccccctgtgtgagaagagtcaaatgcataatttgtatagatcctctcaagttcaaagttctgtgattctaagagaatatgcaaaaagctatggacaacataaaggaaaagaaacaataaagacagtacattcatttcacagaacaagtttgaattggcctaatttaaacaaact

SEQ ID NO: 4831 - DNA, 474 bp, Homo sapiens
tgtctgctcctgattcttaaagtgcccctcattgcctctttttgtcacctctgctcccttgcttctacctatctttttcgtcccgtgtattctcctcatatgtcatttaagaatttcaaacctgctcattgaattccacattccaagttcacaaatatttgtgcattttatcttcagcagcattgtcttcctcatttgagtgtggcaagtttataagaatttcagcttctgctgggcgaggaggctcatgcatgttgatcacctcaggtcaggagttcgagaccagcccgaccaacatggtgaaaccccatttctactaaaaatacagacattagccaggcctggtgttcacaccagtaatcccagctacctgggaggctgaggcaggaggatggcttgaacccaggaggtagaggttgcagtgagccaagattgcgtcactgcactccaatctgggcaacagagtgagacact

SEQ ID NO: 4832 - DNA, 532 bp, Homo sapiens
ggaaagactaatcaatcttgggactctttgaataccatatgtagccatagaatgcctctccatacagcagtctaggaatatactaccaaactactattattgtcttgttagttaaaatctacctatgtctagactggaggactacaatgtcaatttaagctttgtgatttcagttgtttaataagtttggcagatctggttgaccttaacaatatctgtaattacaggagtctctgattaaagtatatgaattatttgaaggcaaaaactataccttatatttctttgtacctgtaaagttctcaagttataattgggtgcatagttactgttcaaagtattcttaatgaggaacaaaataaagtaaaataaaatagagtttttttcattgttctctacctacatatagcttacgtggaagcaaatactgactaaataatctcagaagttcataatttaatagcagaacaaagaggagttgctgctatcgcagaatagattgtttcaagcaaacattcatgtcaatatatga

SEQ ID NO: 4833 - DNA, 328 bp, Homo sapiens
gcagccagtgaaataggaagagaaccaataagcaagggggagtagtgtccagaaggccacagtatttccagaaggaaagagtgaaaagctgtggcaaatgctaacaaacaaagactatataagataaggactgagaagtggcatttgcatttggccaagcaaaggtcattggtgaacttgatgagagcactttcaagtaaaagggcctccgtagagtgaactagaaacagaaagagaagcagcaggtccttccaaggaattttgctattacagagaaagaaaaaaatgaaatagttggagaggaagaacgtggtatcaggaagttgga

SEQ ID NO: 4834 - DNA, 420 bp, Homo sapiens
agaggaagccttggtcagcccatggctctctagtcccggtcattgactcagtaatatttcttgtttacctcctaagtggcaggaattatcacacctggaaggttctgtagaggagaagacactgattagagctgagttttgtgtgataaggtgctttccagcccaaaaagtagtggagactgacagctgggataaggtaacatcaggaagaggaaacggctgggctgaacttccaggagtgtgacctgggcctgtgagcgagtgaaggcagtccctgtggtgcagcagagggtctggagggggttgagacagtgaatgagtcagaggcagaagctggggtcggactgtgaaggtctttgaggccctgctaagggcattgctctttatcctttaggaaatgggaagccatgtgaggtggga

SEQ ID NO: 4835 - DNA, 230 bp, Homo sapiens
cagtttgttcttaaagttaaactaatggggaaaaaaaacaggacagggaggtatctcaagttcatttgagccatttttaaaattttggtagctggtttctgtttttcttctttttaaaatagtaacaacttaggattttgtgtgccaccagcttccattccatttcataaaagcttaatctagcaagaattggtgagccctagtagaagttagaaagaaatgttgaagtg

SEQ ID NO: 4836 - DNA, 538 bp, Homo sapiens
caggactaaaggatctaactggacaatggtcctgttacccaagaaaactgatttgtgtttaaaaacaatacagtaataggacatattcatatgcaatttgagcggatgccattatcaaaatggtaggatgtggtagctaggtattccactctagaccaatatgtgtaatcaggaaggcaggccagggcaaatgaagggagagcttggcagagttagtaattcacatgcctgaaacctagactcaaatcttactcaagtcgcttcttatctgatgttaacatgtcattttccagaacatttctgaacttcgatttccccctaggaaatctaaaatgaggatatgtatctcaaaagacagcatatgggggtcatatgagaaaagcatgtgaaatagtttcatctgtaggagagccactttaaaatttgtgaattaatttttatttttgctcatattggtattgtgacagtaaacatttaccccctaaaacaagctataatattagctgggcatggtagggcacacctgtaatcccagcat

SEQ ID NO: 4837 - DNA, 484 bp, Homo sapiens
gggggccgggcacggtggctcatgcctgtaatcccgatcacctgaggtcaggagttcgagaccagcctggtcaacatgatgaaaccccgtctctactaaaaatacaaaattagccgggcatggtggcacgcacctgtaatcccagctacttgggaggctgaggcaggagaattgcttgaacccaggaggcggaggttgtagtgagctgagagcacgccattgcactccaacctgggtgacagagtgaaactccatctcaaaaaaggaaggaaggaaggaaggaaatggagttaactagtattcatgggtgccgattatgcctgcacccattgatggaacatcttccctcggccagactggctgaccactgggacccagagaggaatgagatcgttccttccccaggctcggatctcacagtctaacaggagcctgatccagggctgagcacttcacagggagaaacaagagatgaccaagatgt

SEQ ID NO: 4838 - DNA, 353 bp, Homo sapiens
acctcacccagctaacttttgtatttttagtagaaatggggtttcaccatgttggccaggctggtctcgaactcctggccttgtgatccacccgccccttcctcccaaaatgctgggattacaggcataagccactgcgcctggctgagaaaacattttaactgatgttaatgagcagcttctaaacacatgattaggacgcagaagtcgttccctctggtggaatctataatgattacattaattcattttgattaattagaaatattcgtatctaagagcatccatgttgagagttctttgtttctaagtggattatgatttatgtaagatagaaaagacaatgggactgg

SEQ ID NO: 4839 - DNA, 409 bp, Homo sapiens
tggtaggaaacttgaatgaaggagagggacacaaaagagggcagaaaagcaagaatcaaaaatacttcatgccagactgaatactgaaagtggtaacaaaggaacaacaatgccttggattcccaggtgcctccagagtattggtgacatttatgaaaaaggggaaagtttggagaaagaaaatccaggtttgggaaaaaaatggctagatttgatgtgttaattgaggttttatttaaattatgaatgagcaaatacagtcttcctaattttgttctggttggttggtctgagacatgcgaagacatagaaaagagttccatgaccttgaggatgttataatgtctggacagttgaaccggtgactgaagctagaaacagaggtcacaataggagttttatagttatt

SEQ ID NO: 4840 - DNA, 487 bp, Homo sapiens
gttcaagcgattctcccgcctcaccctcctgagtaggtgggattataggcacccgccaccatgcatggataatttttgtatttctagtagagacggggtttcaccatgttggccaggctggtttcaaactcctaacctcaagtgatttcccccagcctgacctagccacccccacctcagcctcccaaagtgctgggattacaggcgtgagccatggtgccaggccttcagacagctttgaaagctaattaaaccttcagaaacttgatttgttggaataagttacacctgggcaagttgaatttcctttttcatagcatcagaacttccagcattttattcgcatctgttgagatgtttttgaagagcatttcattacttctaagtatatgaatatgcctatctttagttagtcattcagtatacaagttttttaaagtgtcggtttctcagctatacccagatcatctatatttttattgaaatc

SEQ ID NO: 4841 - DNA, 554 bp, Homo sapiens
tacactaattccctcttcaaccttttgacatttaatttttattaaactttaataaagttgcgttttcaaagatcaccaaataactaacttgatgtgaagtcaggtgcctcttttgtgacttcacctgtttgatctctttcaagcacttactgttgcccaccccttagtttcttctttggtttctatggcacagatctcttagtatttctttcaacttgctgccagccatctgtttgatcctttcagttagttctttctctccacctacattttaagttgttgcatccatttttacttcttaatccacaaactcttttatagcactttcattctctcacatgacttccatactcatatctttgtaagtgattaccagaagtgtatggtgtctccaagtctcatatccaattacacaatgagtaccccagcctcactcaacatgtcttagagaaagctcagcattttctcctgcagacctgagttccttatcttagttaacggtattacaatattctcaattgcataaattataatattttacatagtaaacaagt

SEQ ID NO: 4842 - DNA, 558 bp, Homo sapiens
aactctcctcttagttatttgtttcaaacgcttccctaaaagacaactaaaaaatacaccgataggtttttcttgtgctgtccttcataaaacacagtgcctgatgtataaatcaagatgcaggataacaaaacaaagtgaaaatatgttcatggggattaagaagaaggaacaaaaagatttaatatcttaaaacaagattttcttaaagtaagaacactcttgctccttccagtttaacacacacacacacacacacacacaaattaatgcatgtatggagcaattaaaatctagattatataggttataaattaatctgcaaaatttgccaaagatatgtaggcctgtgttatgaaataagatgtaggaaataggccgggcgcggtggctcacgcctgtaatcccagcactttgggaggccgagacgggcggatcacgaggtcaggagatcgagaccatcctggctaacacggtgaaaccccgtctctactaaaaatacaaaaattagccgggcatggtggcacgtgcctgtaatcccagctacatgggaggctg

SEQ ID NO: 4843 - DNA, 454 bp, Homo sapiens
cctgcaagatccttcacagaccaaccatagcttctcatcgccccctcctatcccatccacttagtgccatatgccgtagacacacaccaccatggcaccccttcagatctcctaaaggaccacttgttctcacctactgtttatgtgtgctggtttgtatgtggttttttctgatactactctttctcctcttaacctcccgagaacatctacaaatcctgaaaggccatgttcacatgtgacttctgaaaagcttcctattacctcctcaggcatctgtcaacatgcttttcagggttcccacagcaacttgtatattctgcactgaagcactgaaagtactccctggtaattatttgttttcttgtctgttatctttaatcttaattttccccttaagcaatcagttagaaagcagatttcaaaattattatgtatgatggatagttaatat

SEQ ID NO: 4844 - DNA, 558 bp, Homo sapiens
acacacacatacacacacacgcacacacacacaggaaagaaaaggtcaccctttttgataattcagcctggggctagttctgatcctacctctaagcattctgaaggtgattcagtttgcactgccaaccaaatcagagcaatgataatgttgtaaaccatgaattcccacatttgaaaccatgaaaactgataaacaatctttacaaaaaacaattaattctacttctatcccatggtgcagaaggagatctgaagaccctccctatgaaaatcacgaacactgtatctttcaaaagtactgtaagtcagactgacctaaattcaaatctccaccctaccaattctagctggattaacctgttatcaggtaagtaaagtctctgattctgattttcttcatctgcaaaaagaggattataaaatctcctctgctttaaagagttattgacaagataagatgaaacaacatatgctgagtgcttagcacagtagaaggcagctataccaaacaccaccaccaaaggtgaaaggcaaaatcacaattttcagctaaata

SEQ ID NO: 4845 - DNA, 486 bp, Homo sapiens
acctggaagagctggcaaaggagcctggggctgattagaaacccctctcttgggaagaggtttgaccagggctcttggaaggcatcagaggaatgacgtaagacaaacagtgtgcaggaaaatcactgtttattccatcctaaatttgaaaaaaactagttcctagacagaaaaatatcagtgcacatagcaagagtttttatttgagtgttgggagcccccaaaaagcacctttgagagaggatgtggaaagtcaccgtctataaatgtgtttttagtgaattcacgaaggatgttttggctaaaattgatttctgtgaaatcttaaaaagctgaacagacagaaacaaacaagcgagcctccatctttccacgtgaggcaagccagcagggatggaccatgaggcacttctctgggtacagaatttaaggaagcaccaaaaatcttagtaatcaagagaaagaatattagaatgaaatatactg

SEQ ID NO: 4846 - DNA, 118 bp, Homo sapiens
actcatgacctcaagtgatccgcctgccttggcctcccaaatcaaatactgtttttgatacctaaaaacaaaagttaatctaaggcaagttctcagtctattctgtgcattcagaaag

SEQ ID NO: 4847 - DNA, 512 bp, Homo sapiens
gatagtgaccagcagagggcagaggccccaggctcaacagccttattaaaaatacaggacaggggaggggaaagaaactcattcattaattctagccgtatttattaagctttcatgatgtgccaggcactgagctagatgctgggagagactgttttcattccagcgtcacgacatgaaacagaaggctttctgttttcattaaaacatgacggtttcattaaaacatattctggtggtgtcgacagggatatgcacacacacacacgccacacacacatatgtacatgtatatcattatataaatttatgttttatatgcaatataagcaacatttaattgtgcgtgaataacatatgtccagatggtgatgagcacgctcagaatcaaatcaagcaggacgaggagaggtccaggctggcaggggccagcgctttagcctccgaggccagggagggcagtgtggggcggacacacacgtgacgagaaaggcgccacaggctgggatctg

SEQ ID NO: 4848 - DNA, 311 bp, Homo sapiens
tggagcaaaagcaccctcgatcatttacagacactgctctgacctggtgctacctggcactacattggtgatagtacatcctgagctttctgaatatttctaggacaattctacaaggagctctctcttcctcagaagagaaagaaccaacttcccgaggagtaacccagtcaagagacacagctaagggaagatcagcatgccccacggctatcagtaaggcaggagaccagtgctgaccaccacctggacccaacgaactcaccacctgaacttacactatcatgcactggcactccaaactggggtgg

SEQ ID NO: 4849 - DNA, 527 bp, Homo sapiens
aagtgcagagacattcttgtggaatagggatcagagccttcccttatatattattgaactgcatccatttacataaccttctgaagtcagttttataaagaggccaccaggctcatggcagacaggatcttacccctgataaaggctgacctctgacactgcaaagcccctcaccaccgtgccagccacagtgagcgtccgggctatgctctccatccttgctgacgaacagacagagcacacagcagggactcggtgggagtgatttaaagtactgaactgaagaagggaataaaccatatttgcacattctccatagctgcttctacacttataaaaagctgtctcggatgggcgtggtggctcacgcctggaatcccaatactctgggaggctgaggtgggtggatcacctgaggtcaggagttcgagaccagcctggccaacatggtgaaaccccatctctactaaaaatacaaaaattagccaggcatggtggcacacgcctgtagtcccagctacttggga

SEQ ID NO: 4850 - DNA, 494 bp, Homo sapiens
caccccactcccttggtaccaatttactgtattagtccattctcacatggctatgaggatatactcaagactgagtaatttgtaaagaaaagaggtttaattgactcacagttccacatgatttggaggccacaggaaacctaatcatggtggaaggggaagcaaatgtatccttcttcacaatgcagcagaagagagaagtgccgagcaaagggggaaatgccccttataaaactatcagattatgtgagaactcacagcataggagtaaccacctccatgattcaattacctcctgccccctgtgttcccccagaacatgtgggaattatgggaactacaattcaagatttgggtggggagggacacagccaaaccacatcacagcattttcttactttactattagcagacacaaagaagtatggattttatcatttggaaatatttttccattttttgaggtaatacattttttaaatggtagaataaca

SEQ ID NO: 4851 - DNA, 462 bp, Homo sapiens
gattgtacgtcagtctggtgagctttggtaatgtgagtctgccccaagggatggctctgcttcaaagtgctggtaaaatcaggtttctatgccagcaagggtgacataggctttagagcaagggtgtccaatcttttggcttccctgggccacataagaagaagaagaattgtcttgggccacacataaaatgcactaacactaatgatagctgaggagctaaaacaaaatcaccaaaaaaatctcataatgttttaagaaaagtttatgaatttgtgttgggctacgggttgtacaagcttgctttagagggtaaccactgaggaagcaggggggaccggggccctgccccttcctggaaaggaagattgggagactagatttgtggctctttctcccactgtttcagtttctttttaggctaggcacagtggctcatgcctgtaatcccagcactctggg

SEQ ID NO: 4852 - DNA, 374 bp, Homo sapiens
ctaaatcatagaattcataggaaatattaactgctttttaatttctccttgggaaattcaccaattttatacgttctgaactaggaatttaactagctcctatacatttacagaaagaaattgactgccacatatttgtgactattgttagaaaaaggtgaacactttatcctcgctactgagttgggaatatatctagatgacatttatgattgtttcctaaatcaaacaagatatttggggaagctctacttgcaaaacatattaaatggcaaagaagctttggttagaagtgaggaggagggctataaggaagaacagataggagtagaaaataaaagggccagaataaataaaagaagtctattttgtag

SEQ ID NO: 4853 - DNA, 512 bp, Homo sapiens
ggtggccctgagcaggttacttcacatctctgagcctcagtttcctcatcagaaaagtagggctagtagcaatgtctgtttcatacggttcttatgagaattaatgaaataatccacataagcactgtgcaggacacctgctctataaagagcccggaacaagtgcttatttcattctaagtagtcatgatacagttttaaagcagatttatccagctagaaattattggcacattttccttctggatactactgctctccagcctccccaccagaggaaggagaagaaaggagatgaaacctcaagaggacatctgcattattttagccactccgataagccgcatacaggaggaggaatttgtaacaacagctaaaagtgaagttattgaatgacctatggccattctggtccccatttagcatctcttgaggatatgtacattagtgtgaacgctgtacagtagcaggactggcctcagatcctttccctataaggagtagactgctct

SEQ ID NO: 4854 - DNA, 513 bp, Homo sapiens
tttcttctcattcattgaagattcaagtacccggtctcactgttctttacactactaatcttatacattcatgtaaatgaattatccaacacattagcctagatccagcttcaatcatatttttatacagtcatactttgaccttttattatcattctaaaatctctattttttaagtctcttactctctttaccatatccaatcttttgcttaccccatgaattctatttgaaccattctttgacccattgaacttccaatccactgactccttaacttttctcactggcaataactccccacatatgcacgcttcattcatgaaaaaaacaaattctcaattcccttgccacactctatcttcatattatgcaagtagcaaaatcttcacccagaataaatttgactctgactattttgctggtgataccctccagcctacagaagaagaggagccattcacagaaatgcagaagaagcttcaggaagatagaagaaaaacctggagacta

SEQ ID NO: 4855 - DNA, 520 bp, Homo sapiens
cattaccactgtcaaaaatgctgaaaatctgtatgttttcaagatgtattaacttgggtatgtttatttcacatggtaactccttgattatccaaaattcactgagaagaggatgttctatctaatacaattttctggttaaaaaaatcctaagacatgttttagaaaatccatggtctattaacaataattgtttgaaagattgtgagtcttatcttctgtaagatcagttgtcaacactcaatactgaaaaggaagaacgagagagaaatgagagcatcatttattgagggcctagcatggccctttcccagctttgaatcttagatctaccttttactgcctggagttgtttagcaagtgatttaaaatgtatcattatcctcatttatgaattgggatcatggtggtacattcccctagcaggttattaggaagactatatgagatagtgcaagaataaagaatctgcttcaacaaaaagctagaaacagttctgtcaaattcacatggaaacaaa

SEQ ID NO: 4856 - DNA, 587 bp, Homo sapiens
gcactaacactgtaattgccatgaattcaagcagaacatagaaataggagaaactgggctgctgtttttttaaacaagatttttttttcctttcagttcaattgaagtgttgctttctaaataccaaggacagttaatctcatgctttcaaatggtaacaatgaacccaagaatctaagagaataactttttaagtctagaatccttttttggactccctgttagacaacttcctatggagcgcaatttggggtcttgaagcattacatgtttgtttgccagagtttatccagaagaccagcactacttttacaagctctcttgactaaacttgtcataaagttggatggcaatggattaggaagtcttgtctggtacaccaccatttttgcaaaaagatgtcgactccatccctcagctcgtttgatctattttaactttaaaatatggatcttcccttagtcaacaacagaaaactctcaccagataatatgcctcaaaggaccttccaccggatccttatcaaattctctttgggagtctactggtaattgtttgaaggacacagtctattcctttctccacat

SEQ ID NO: 4857 - DNA, 324 bp, Homo sapiens
tgtttgaaaattctcccaaatataaacaaatatgccgttccatgtgaatatatttgcatataatatatgctaacacattattagcatatattatatgctcatcagtgatgacctctgagtgctgtatttaggaggcttttaaaatttgtttttttgtgtgtgctttttctatatattttgccatttcccccattaaataaccactgcttttgtaatgagaaaatagctacaaaactgggtttttaaaattaggtcattgataaccttagagtaatttcagtatgttataagtgtggaagatttttaaatttgtttgagtagtga

SEQ ID NO: 4858 - DNA, 451 bp, Homo sapiens
gaaggacaggtggctgggcgggggtgttctgaacgtgttgaagttgagacacctattaggactcccctcgatgtcaggcagatagatctatgagttgggagctcaggggcgaagtctgggctgagatataaatttggaagtcatcagcagacagatgatatttaaagcctgcaagagttaaccccccctccccacttccataacttaatcattcacaggacagtacattttcaaaagactggagaccaagagagcccgttatccccacgtcagcctttgcgaataggccaccttgatcttgcccatgaaaacataatcatcgggctttaaaactcacagtcaggaaagttcaagcaaagatgtgaagccacagaatttgttattcaaaatatcctttggtcgtggttccttccatccacctggagacagaggatttctgtaagcttcccat

SEQ ID NO: 4859 - DNA, 370 bp, Homo sapiens
ctacaacaaccctgagaggtcattatctttatcttagggaagaggaaaattaggcccagagaggtagagacttacctgggttccacacctagcgagaggcagacaggagaccaagcccaggtccagcaccacccttggattcaagcaagggcagggcccctgccccagacctggctctgcagggaccccacactttgtcatgccattttccttgagtatttctacatcctcctacagttcctggggctggctggggcaggcagtgccttctagcagttgccccttacctgtacttgtcctttgtgagccctggtctcatctctcctctttgggatactcctgatgttaccaagcaatcaatgggctcact

SEQ ID NO: 4860 - DNA, 464 bp, Homo sapiens
ggacatcgccccatcccagcagaggaaaacataacatacagctaacagagacaaagactttctattgccaggaacaatggccaacactcatcactcttggtaaagacagtaggaaactgggattcaaacacacagtgaagaatttcagttagatgcaaggaagaaatttccacagggactgtgagtgataatgtggtatgttgcaaagaaaactgaacttaaaatatagaacactggattttagttcctgctctgccacaaaccagccatgtgaccttgtgagaggcattttactattctgggtctcagtcccctcaactgctaaaagagtatcataataaatctctaattttccattcaaccctaaatgtttataagccaaaggttctatgatgcttccctttggaggctgtcaaagaaagagagaatatttcaagctatttccatttgtttggacacagatg

SEQ ID NO: 4861 - DNA, 489 bp, Homo sapiens
catgccaggctaatttttgtatttttagtagagacagggttttaccatgttggccaggctggtctcaaacgcctagcctcatgtgatctgcccacttcagcctcccaaagtgctacaattacaggcgtgagccaccaatgcccagctggaaaataattattcttaacttttaaaaactaaatagaggtaatgaggagaaataaactaaattaaaaatgcagaactttgaatcctagcttcacaaaatatctggtttaataattctgttaaattcttttattcagtaaatactgacttggtacctacagaatacaatctatttcagaataaagtgtttcaattgttgactcatctataaaatgtgaactagaaacagattgtttttttcaaagagccaatttcaaacagtactggaaactgtatggatcacgtactacacatacttacgagatgatttcatcagatttttgaaaagaatttgagcttcta

SEQ ID NO: 4862 - DNA, 444 bp, Homo sapiens
ggcagtatcagctttcatgtatacactaaagggaaacaaagttggatcaggtgtgctgataaatgtttaacaacaggctttccaggtagaaaaaacccctatatgacattcctgatgacctgggaaaataccaccaaagtggagatggaaataagtgtgtacaactagctcttgtgatccggtatgaactggctgcggtgcactggttgtatgtaaaggaaacattatttagaaagtaaatattttgattttcattttcagcaatggaaacagaggcttagcaggatggacatcttgattaattttatacagctagaccatgagggagacagaagattaagaatagcagttatacatgccaacctctgcattagctttaatcctgattcaagtgttgagattccaagtctcatattcttcctgttaatgcctgtggtaaccttt

SEQ ID NO: 4863 - DNA, 501 bp, Homo sapiens
agatagattagcaaaaagcattaactgaatggcttttgagaaaagagaagtacacaaaccagccatatcagcatgtattaatttatctgtatatgtaacttttgttaagttagttaacatctctgtgccgtcacttttttagtctttaaaataagttaacataattttttctatatttttcctataatatacatctttaagtacctagaagactcctggcacagagctagggctcaggaaatacagttaatttatttcttctctttttccccctttttatttcaagaaatgggtgggggaatattaatacctaagaaattaaaatgtatgctggtattaaaaaactcttgaccaggcgtggtggctcacacctataatccgaggatcacctgaggtcaggagtttgagaccagactggccaacatggcaaaaccccgtctctactaaaagtacaaaaattagccgggcatggtggcaggcagctgtaatcccagctactca

SEQ ID NO: 4864 - DNA, 508 bp, Homo sapiens
tgtacccgtgtcaaatgacccttgatgaggctgtctcactattacttttcctggaaagctagctttcatcatagcagaaaagacctcaccatgcagactctgctgggtcaccaacgggcagcaccagtgtctggtttatggcttcagaggtaagcagaggtccaaggacagtggaaaaaaaaaaatcagtatgtttgaaaacatttcaaattaatattaaaataaattcaaggaaacgccattagaaaagccagaactttgctgaactccttgcatttattttatagtttaatattgtttttattttaaataacaaatgggaggaagggcaatataatctcagtgtttagagcattgaagctccaaatctgcatacatgaaacagatcactggccctatgatatgatgttacaatgatccatatactcctatttgcacacacacacacacacgcacatacacttgataatttcttgcaacaaaattttatccatttactttaaggatt

SEQ ID NO: 4865 - DNA, 494 bp, Homo sapiens
aaaggagtaaactgtgggtgcatgttacaacagttgtcactctcataataattatagaacgaaaatatatcacaccaaaaaagattacgtgtggtatggctccatttacatcaaattattggaaataaaaactaatatatagtaacagaaattaaatcagtggatgtctggggaggagggtgacaagggagagactacaaagagtcatggagaaacttttggtggtgactaatttgttcattatattgattgcggtagtggctttgggaatgcatacatgaatcagcatttatcatattatgatataataaattcataaatgcataaactgcacaatttatatatgtgcagtttattatatgtcaattatgccttagtaaaactgatctaaaaagttacatatgaaaaaactcaatattataaatctgtcaattatctccaacttgatctatagattcgacacaatctcaatataaattccagcatgctcttct

SEQ ID NO: 4866 - DNA, 518 bp, Homo sapiens
gagggactctcacaggggcagctataataccacaaccctggcttctcagagcctaggcccaagaacagccatgaccctggtataggtactcctatacactcctacacagtggagtgtataggagtatacctataggtactcctatacatttctacacagtggagaagccaactctgggtgaggtgaactactgcatgcccatgtatccggctagagaaccaacttggaaattatatcctcagtgtatccaccctccaaccaccatatacatatacaattagctgaggaaacagcttggtggaccagttcccagaaatgtcacaccaccattgccaaaaactcccacagcttaggccaccaaggcactcatacctatctctaatttggagtatgtctgatgaatcagcacaaaaattaaattactgggtccacccagaaccaaagcaaatgcactccactcaaccaacaccatgggacccatttatggtaataagcctctctttttaggaaagctgctc

SEQ ID NO: 4867 - DNA, 549 bp, Homo sapiens
taagacttcatggtattgttttcatcaaatgggaaataaggtcagataactatggaacaaatatttatgtagtagtctctcctgacatagtgaatataacggtgagcctgctgaaaattctctgcttcattaagcttacattatgatgcactaatgggtggaggtaggtgctattacattttgaggaactgagtcccatcctgatttgttttaaacatcttaatttttgtcaaattataaagcttgttgaatccattcaattttttgccacattgatagggaataattatttattcagtgcttcacgtattctttacatttgtatcaaaaaaaggatagtggctttggcattccaaaattaatgaagaatgtgatagtcataataatagtcatgtaacttggtgagtagaatatatattctgttgtattcatagattaatagtttttaacatggtgagtagagcaaaccattacttggctaaagagtgttcttagaaattatataagaagataaaatgcttacaaataattggtatcaaatgatattta

SEQ ID NO: 4868 - DNA, 539 bp, Homo sapiens
ggttttttatgtctccttggttcaattttggtagattgtgtatattctgtaatttattcagtttctttagatttttccattttttttgcataaagttgttcatttggccttgcatttttgtctgaagcaacattctagccagagtgacaaatatgtaatgaattaatgttatcttcataaaataagttatgttaaaataatatattaaagtacatgtccactatatttttctgaaagttactttagactagaacttgagaatgaataagtttcttgttttttatatttatttattgtattaaaactgaagataaattattccagatttaatattagattggtgtattagtcagttttcacgctgctgataaagacatgcatgagactgggcaatttacaaagaaagaggttttaggtttattggacttacagttccatatgactggagagccctcacaatcatgaaggaaggcaaggaggagcaagtcacatcttacatgaatggcagcaggcaaagagagagcttgtgcagggaaact

SEQ ID NO: 4869 - DNA, 378 bp, Homo sapiens
acttctgaactccctcaaagatacctgtggccatttactaaggacacaaaaatacccaggcatcttaggttactagaacataagataatggtaaaccctacacatctaaaaccactctgggctggacataggagactgaggcaggaggagcacttcagcccaggattttgaggcttcattgagctatgattttgacaatgcactccagcttgggtgacagagcaagaccctgtcttaaaaataaataaataaaaataaaggctaggctcacgcatgtaatcccagcactttgggaggccaaggtgggtggatcacttgaggtcaggagttcaagaccagcctggccaatatggctaaaccccatctctactaaaaata

SEQ ID NO: 4870 - DNA, 493 bp, Homo sapiens
gaaaactgagattcttttcatatgtccagaacatgccatatatgaggtcttctttatgtatttgtttattctgttttctccattcttaactcctcactctgcctcatgaaacccttaaagaccagctcaaatactgccttctccagccagctttgtctaaacaactcagaattacatttttaagttcaaccagtgttcagtgcactaatgttttgtgcagattattatctccctaaagataggcaccttgttatttaggcatttattcagcaaatacatatgaggtaccattgggttcatgtgcctgggaccagctgggagctgaagttataaaggagaaagatacaatctctagacttcccaggagcatatttcatgggagaaagagaaggaaactggtcactgcaacatagggtgatgagaactaaaagctggttacaggagcacttgggaaagtcacccaacagtactgactaattcaggaaagactttc

SEQ ID NO: 4871 - DNA, 563 bp, Homo sapiens
aatagaattgttctatattaaagaaaaagagacagaaccaatcactataatgatctctcctggattggatcctggataagaaaaactcatgtactttgcaataaaggatattgttaaagcagatgaaaagatttgaataagctctgtataccagaaactactattaaattaataatgatttctttattttgattattatactgtaattgtgttaaagaatatcctagttttaggaaatatatgcaaatatttagtggtaaagagatactatgtattcatctcaaattgaggctatctctcatataaatacatttttttaaattcctttagcagtctccttctttgtccatggatactactgtcttgaatggaatgggcactggaggcttgttaaatcactacgtatgcccatcaaaaagaaattgacaatgccatgtgttggccaagatatgaagcaggtcacattcttctaaattatggatttgagaatataaaataatacaatcacttcagaaaactgtttggaagtttctactaatgttaagcatacacttaccctatga

SEQ ID NO: 4872 - DNA, 509 bp, Homo sapiens
gacttcctgtcataggtgattcctaatgctcctgacccatggcagccaaataggttcccccttggaggcttccattctgccctgttacctgcccttattttcaaatttggaatgtttgtagaagtctgttagtatctctctcacttattttgggggtatcatactgttttcacagcaaaagagcttgcagtcagctttagcttcttcctttaatacatgaggggtaacacctgtgctatttgttttctttcctaaatgccttcacagaagcagttttgaaccagagaatatacacaattaagtaaaaggagttgagagaaatcacatggagagcaataaagaaaagaaactaaccattgttgacagtgcactgtgttctaggcactgtgtagctaccccctgcccccagtacctgcctttctttagagcacatattattttttaaatatttatttatcatcctcctgtctccattaaaatacaagttccacgagggcagacaatttagt

SEQ ID NO: 4873 - DNA, 319 bp, Homo sapiens
  misc_feature 276: n = A,T,C or G
aaactggtatcctcctgccccagaagtttctccaagaaatcctcctcatttccgactcatatccaaagaacagacaccttgggattccataaaattgacttttgaagcaacaggtaagtcatataatagttttttctcccctcctttatttcttaaacttgttaataagtggcatgtatgtttttccctcagatatatcacaggaaccagcaacttaggaagagcctgtgatgtttctaaaatcaattgaagctggttatgacttctttttttttntaatggaaccccccccctcgggggtaaaggaaattcccccccc

SEQ ID NO: 4874 - DNA, 533 bp, Homo sapiens
cagggtacattataggattttggccaaccagtggattggttgcccttgagccaagagcttacttgtgatcttagccatagtggcaaattgcccaggatcaagtggtcagattaaagtagctgtaggttcatcagtttccttcaggaagcattttgggcatattagacactgggattcttacaataggtggcatgctaaatgtccagtagtttcctttcagatagtgtttattgagtacatacctaatgttttccaatgctaggttttggggaattcaaagataaataaagtatccatggaagtcacagtgtcactaaatacagacatatggattcaagaaatgttgtaaccagcctgggcaacatggtgaaaccccgtctgtactaaaaatgcaaaaattagctggatgtggtggcaggcacctgtaatcctagcttctcgggaggttgagacaggagaattgcttgaacccaggagacagaggttgcagtgagccaagatcgtgccactgcactccagcctgggctacagag

SEQ ID NO: 4875 - DNA, 584 bp, Homo sapiens
atctcagtggtacctttgggtgaagcatactcagaaagaaaatgtttaaatggcataaagccttccataaaaatgaaaatccctatcatgaattgatgatgtctatgcagcagatcttgtgcttggcagcttattatttcattaaatctgcacaaaaactcaatgagtttaggtctttttacagccccaattttacatatgagtaaatagaagctcagaagttaaaatgctctggaaaagctcacatggctcttgagaaggtagaattaagatcatttcatatttcccctttcagttaggagagttcttcccatatctcactcgttgtattgtaatagtttcacaaatcacagatagagacatttagaaataactttgaacataaataattgcattatagttgaaatgtgtacaggcacgtgattcaaaatttgtttactcagataccagaactatttgattctttcaaataccatgcctacaattcacagtttttagaattacactgtgatttagcataagtacatttcagtgaataccgaggcaatgcctttggaagagaattgtttacagcaatctatttt

SEQ ID NO: 4876 - DNA, 531 bp, Homo sapiens
agtgaaagtagctaaactagggaagagaaagaaggtgaatccattcaccatttgagaaaacatctgcctgccaagcatagacaattcagttgtggatccagaaaattccttcccccatcaaatttaagatgagacttttatttatttattattttattttatttttgagatagggtcttgctctgttatccaggctgcagtgtagtgctgcaatcatggctcactacagcctcaaactcctgggctcaagtgatcctcctgccttagcctcctaaagggctgagattacaggtgtgagccaccacgcctggccaagaagagagttttaaatgttaataaattggcctgtgataacactgaattatattgggtttcaagaaatcacaaaaaaagcaacacctccctgctgtcagcagctcatagaatggtgggctagacataaacgtatacaaggaaattgccacattgtaagaaaatgtcctattagtggcacatactcatggccatggaagagcaaagaagaggagatag

SEQ ID NO: 4877 - DNA, 408 bp, Homo sapiens
agaccagacgaagctgtcgattcaggtgcccaggatgcctggaaacacctggattctcccgattttattcaaaagccaaatgcgtttgcctactgagaacaaaaataaatctttcttctggtaaagggggaaattagcaagtgccaagtgaaaacacattttctctttccctggacttgattggatgagaccatgaacaggcaaaaggagccaacaggcctcctggccccagagctgcatccaggtgggagctgttgaggcctcagctatacttcccgtgaccttgagaggtcacgatgccagggctggaggccattgtggctcactgtaacatttccagatgttaatgaatgtttcaggagtgattgtgaaattcgctaagtgaaatttatttccctttgctctgac

SEQ ID NO: 4878 - DNA, 486 bp, Homo sapiens
ggtctgctcgctggcttacccctaggacgggcagctcaccacttctcccggtcagttctgtttaagagaagttcctttctgcctgtaagcaatgaagtggaatgatcaccaaaaagtggtgtaagaaaagaaaagtagacccgcagcggggtgtattcgtgctactgtttgtgtaaaacacagaaaaaagaaaggggtggtctgatgtatagtcatacacaccagtggttttggagggagtttttgtggatataccacattctctccatttatcagggattttgccctgacatccctccaccaccacgacatttggcaatctctgaagacatttttggttgtcataactggggaagtggagaggcgatactggcatctagtgagtagaggcctggaatgctgctaaacattctgcggtgcataggacaccctttccacccccagccctgccactacccccccaaaaaaaaaccctgcaaaaaatgc

SEQ ID NO: 4879 - DNA, 474 bp, Homo sapiens
tggcacgatcttggctcactgcaacctctgcctcccgggttcaagcaattctggtgcctcagcctcctgagtagctgggattacaggcattcaccatgacgcccagctagtttttgtatttttactagagatggggtttcaccatgttggccaggctggttttgagctcccaacttcaggtgattctctcacctctgcctcccaacgtgctgggattccaggaatgagccatcatgcccagcctttatttttaatcttacaaccaattaaaaatcaagaaatgagcttaaaggaagccacaaggggatatgccaaacaaaaatgtgggttcattttttaaccttaacttgtattttcagttgactgacagccaatagttggcaagctagttttggcctatgtcaaagcagtaaaataagtccccgtcatgatggtgtccactgtctaatcgaggaaaatgggtatctacatcat

SEQ ID NO: 4880 - DNA, 475 bp, Homo sapiens
gcattttagcgagttgtttatgcatcatttccttgctgaattatgaacaatgaggtaagagaccatgtatctccacacatcttatagtgcctggcccatggcaagatctcagaaaatatttgttgaataggtactgaataaaacgaatttttcctggccttaaaaatattgtacaatgtaatataaattcatggtttccaaatatccaagccgactctcttggagagcatgtaaatcctaaggactctataattcaacactgtttggcaacttctccttgtcctgaaatactccagctctggaatataccttggggtagctgtaggtctcattgtaagctatggaaaagcatattcagcatgataaaatctgggatgagaactcttgagctctgaagtgagctcctgggataaatggggaagagcttcgttaataagagtggcagccaaaggccagtagggaccttcagaagtca

SEQ ID NO: 4881 - DNA, 472 bp, Homo sapiens
aaacagtttagttctttctaatctgtatgatttttattaatgtttattgacaatgtactagagctaggtgttttggtacaatgcacttaactgtacatacatccttgccttgtttcttaccttagagaaagaattcattctttccttattaagtatcagtgatgtctgtggggtctgtagttctatcccctgtatctctcctgatgctgttaaatgtgtgccttttctttttttgcctctcttttccttagttttaataaacaaacaataataatgtaataggttaacataaaaggaaactgattgaggcatataggagaaatatgtgtactatctttgcaaatttgttgtaaattcaaaattattccaaaaaaaattttaaaaatattaaaaactcattaggtttattagcttatataatttcaatatcaccgattagagaaaagccaaagatttgtcaattataagtatt

SEQ ID NO: 4882 - DNA, 549 bp, Homo sapiens
caacatatctgactgaggattgaatttggcttctctctcagctgttcagttcctatattatacaaggttagatccctttctctatgagcagaagaaccaaaccatctgcagcttcggaggagaaaatgtgctttcaattatgcacctggcctgaatgttgagccgcagttcgatgggtccctaattgagccatcatggtgcgaacatacagggagacactgtgtgcatcaggcctgtgggttttgccctaagataatgacagtacagcagccacatcaccacggtgaccaccacagctgccaccactgtcacctccaccaccgcagaaggcccaagagcctgcagacatacatgctgggtgagaaggaagttacccagcaagggtccagggcagcaggctgtgttagggtccctggaaagcctccctgtatcctccagccagaatgcatcatcctgtccccagagtgcctggcctgctccacagtcacctgtctggccccaaacccaaagaagacccagacaacctctccctactcccagcaggacact

SEQ ID NO: 4883 - DNA, 566 bp, Homo sapiens
gctatgggagggttctgttcttggtaataaggaataagatgctggtttcaaaccatgagaccagcttaattgtacttcggagattacgttccagaagccagtaataaccaccggttcaaagagattagaatccagcagctttaaactgcctggatatgcgatgatgggaagaaagggccattcagtatgttctgcaagttcccctaccccctcttcccagttataggcactttttctgctcctgatttttccagaactatagactgccacagggttctttattgctggcaaattttaagtgaggggggatcagtcctttgtacaaactacatgttagcaattaaattcacttgattggctgggcatagtggctcacacctgtatcccagcactttgggaggccaaggcgagcagatcacctgagatcaggagtttgagaccagcctggccaacatggtgaaaccccttctctactgaaaatacaaaaattagccaggcgtggtgatgcgcacctgtaatcccagctactccggagactgaggcatgagaatcgcttgaaccctgga

SEQ ID NO: 4884 - DNA, 549 bp, Homo sapiens
tgtgcccaggctggtctaaaattcctggcctcaagggatcctcgcaactcagcctccccaaatccagagattacagggattatagttataagccactataatcagcccgtcttgtttaaaaatcaaatccctccctatcaaactcagctttctgaatcgcactttgtcttttccaaaacataatattctgagctcagcagacacttccttatgcgctgttacgcatgttagcgttgctggaattacagtaagaataatcatctgccaagagccagttcaacccatttctgatataaaaagccattttagcactttgggaggcagaggtgagtggattacctgaggtcaggagttcgagaccagcctgaccaacagggtgaaaccccacctctactaaaaatgcaaaataaattagctgggcgtggtggcacacacctgtcatcccagctactcgggaggctgaggcaggagaatcgcttgaacctgggaggtggagtgagccaagatttcaccactgcactccagcctgggcgacagagactccatctc

SEQ ID NO: 4885 - DNA, 404 bp, Homo sapiens
attctagagacacatatgtaatgattaaacttaaatgaaaacgaaaatattctaacctgaagttttaaacactgatacacacacacacacacacacacacatacacacaattaaaagaaaaaataaagaagaaaaatcaaaaccaaacacgtctccagaaaaatttcaaaaaattagccaggcatggtgcatgtgcctgtgatcccagttactcaagagtctgaggtggcattatcactagagcctggggaggtcaaggcttcagtgagccatgatcatgccaccgcactcctgcctgggtgacactgtaagaccctgtctccaaaaaaaaaaaaaaaaaaaaaaaaaaaaagggggcctttttttccggaacccccaaatgaaaaaaaaccttgggggggggg

SEQ ID NO: 4886 - DNA, 591 bp, Homo sapiens
gtgctagcccagggttgggctacggaagcactctgttacctgctgctgtttctcagaagtgagccctttggcatggagagctggaggaagaggacgaatgctcaaggtctcagggctggagaggaaatcatgatcatggggtggcaaaggacctcaaggcactgccagacactctgggctcttggagaactgttcagagttggcgataactttctgtaatcctaggcatctcttctcttgtcacatttcattgagatatctgtctatcctatttaacccaagcctgattttggataggatccagaaatctaggtgaatttcaggggcctggttgcttcctcatctagcttggtggtaagaagctcagcccctctctgtgggccatgtggagagtacagaaaataaaactgtatcagggccgggcgcgatggcccatgcctgtaatcccagcactttgagaggctgaggtgggctgatcacttgaggccaggagttcaagaccagcctggccaacatggtgaaacctcctctctactaaaaatacaaaaaatagctgggtatgggggcgggcacctataatcccagctactc

SEQ ID NO: 4887 - DNA, 567 bp, Homo sapiens
tgtagtcccagctactcaggaggctgaggcaggagaatggcatgaacccgggaggcggagcttgcagtgagccgagatcgcgccactgcactccagcctgggcagcagagtgagactccgtctcaaaaaataataataatatagagttatgtacatgtggagtatttactaaattgatctgatcttatatgaattatttcaggcactctcgtcttcatcttaaaatggaatgggaatctacatcatttgggacttcccattactctcagaaaatagcccacctctgctttttgaaaataattctcggccgggcgcagtggctcacgcctatcatcccagcactttgggagtctgaggcgggcggatcacgaggtcaggagatcgagaccacggtgaaactccgtctctactaaaaatacaaaaaattaaccaggtgctgtggcgggcacctgtagtcccagctactcgggaggctgaggcaggagaatggcatcaacccgggaggcggagcttgcagtgagccaagattgcgccactgcactccagcctggacgacagagcaagact

SEQ ID NO: 4888 - DNA, 570 bp, Homo sapiens
ctgtaaataaaaggcatgactgctggaataacctcatgtgagagggtgacagcatcgaggctctaagtgtcagtgatactgttagggttgcaatgcagaggagtggatcccaaagccctcctggaagaatcctccaggaattcttccaaaataggagcaaaagtacaagaaatagaaatgtcagtggaaggagacttataaatccagcatgttcagtaagagtttcagaattagaaaataactatatatgaaatatcaagaaagaaacagggctggttgtggtggctcacatctgtaatcccagcactttggaaggcgaaggcaggagaatcgtttgaggccaggagtttgagaccaccagcctggccaacatggtataccccatctctactaaaaatataaaaattggctgggcatggtggtgcacgcctgtgatcccagttactcgggaggctgaggcaggaggattgtttgaacccgggaggcagaggttacagcgagctgagatcatcccactgcactccagcctgggtgacagagcaagactcacagagcaagactctgtttcta

SEQ ID NO: 4889 - DNA, 106 bp, Homo sapiens
attgattaaccaaaaaaagtttatttttgagaaatttaatttttagataagcaatacaggataccccagtaacccggccagaaatggaaatcagtaaatgaaatga

SEQ ID NO: 4890 - DNA, 527 bp, Homo sapiens
tgagggtcacagaagaacggcccaggagctgctctggaaagtacaggggcccactagtcatccctacatcccctcgctgcaggccaaaaaccccaccagtttagaaggtgagtcactgttagggattgggaatcgtgtccccccaaaaatccagatgtcaaaatcctaacctacagtgtctcagaatgtggccctatttggacctacggtcatcggcatatggacttagttaagatgaggttgcggccgggcgcggtggctcacacctgtaatcccagcgcttcgggaggctgaggtgggtggatcacaaggtcaagagatcgagaccatcctggctaacacggtgaagccccatctctactaaaaatacaaaaaattagccagaagtgatggcacacccctgtagtcccagctactcaggaggctgtggcaggagaatcaggagactcacttgaacccgggaggcggaggttgcagtgagccaagatcgcgccactgcactccagcctgggtgacagagtgagact

SEQ ID NO: 4891 - DNA, 561 bp, Homo sapiens
ataataaactggtggtgttatctattctgtacagttctctgggggctgattacaagtgctgaatggcagtattaatctctgttgtttttcacttgagtgatcctatacattaaagtcacagtgtacattgtttctctgcttgatttctcctcatctcaaaatgtagggtcaaatgaaagaggcaggtagatatttagagaagagcattttaatctaaatataaccatcacgtactattagtaaagaaattaagaggccaggcatggtggctcatgcctgtaatcccagcactttgggaggccaaggcgggtggatcatgaggtcaggagttcaagaccagcctggacaacgtagtgaaaccccgtgtctactaaaaatacaaaaattagccgggcagggtggcatgcgcctataatcctagcttcttgggaggctgaggcaggagaatcggttgaactggggcggtagaggtcacagtgagccaagattgcgccactgcacttaagtcagggtgacagagtgagactccgtctcaaaaaaaaaaaaaaaaaaaaaaaaaaa

SEQ ID NO: 4892 - DNA, 451 bp, Homo sapiens
gaaatgaaacgttaaatcaattaaacagaacagtattttctattaaaactatagaagaactgtgtagttaacttgaaagaaatctaaggattccttagagaccaataaattaaattgtgtattaattaacaggcattaaaaacacatagaatttggactcaaaatacaaacagcaagtaaacactaaagaaaacaatgattcaggccaggcacaggtggatcacgaggtcaggagatcaagaccatcctggccagtgctgaaacccagtctctactaaaatacaaaaattagctgggcatagtgccacgcacctatactcccagccactcgggaggctgaggcaggagaatcacttgaacctgggaggcagaggttgcagtgagccaagatcgcaccactgcactccagccagtgacagagcgagactctgtcccaaaaaaaaaaaaaaaa

SEQ ID NO: 4893 - DNA, 474 bp, Homo sapiens
aatgactcacgctcttttcctggtatcagaagaaagtgccactgataaaaattgtgtgcctgggtcccacctacttctaattgtcctgctcaagcctacctgttcctcagcagtgctggtagcttattgatgagaacaaagacggtacttgggaaatctaaggaagggcaatgtggcaggtaaaattgtcagtaagccgggcgtggtggctcacgcctgtaatcccagcactgtgggaggccgaggcaggctgatcacctgaggttgagacttcgagaccagcctgacaaacatggagaaacctcgtctctactaaaaatacaaaattagccgggcacggtggcgcatgcctgtagtcccagctactcgggaggctgaggcaggagaatggcgtgaacccaggaggcggagcttccagtgagccgagattgcgccactgcactccagcctgggcgacagagcaagactcggtct

SEQ ID NO: 4894 - DNA, 565 bp, Homo sapiens
atagcaggtgacagttttaccacctatttagccttccatgacaagggttgccattattccaacttccaataatggcttcctcattgtacgccccctgaatcctaagcaaatattatatacagttaaccctctaacaatggagaaggggggtatgggagggttggagagctgacccctaacacagttaaaaatccacatataacttttaactcttccaaaacttaactactaatagcctactgttgacctgaaactttaccataacatatacagtttattaatacatattttgaatgttatatgtattatatactgtattcttacaataaagtaagatagtaaaagaaagtatcattaagaaacatgcagtggttcatgcctgtaagcccagcagtttgggaggctgaggcaggagtactgctcaagtccaggagtttgagaccagcctgggcaacaaagcgagacctcattgctacaaaaatataacatacattaggtaggtagagtggctcatgcctataattccagcactttgggaggctgaggaaggagaatcacttgagcc

SEQ ID NO: 4895 - DNA, 495 bp, Homo sapiens
ctctactgagggttccataagataaagtattcctgtgtaaattaatagttcaattaataacttattttttttctgaagtggaaaacttactgctccaggaattgcacctccatctagtcaaaagaatgcaaaaacaatcttttccttttctaggaaattaagtgctccatattttcaatgtttgtaaggtcgtggctgataatctatgaatattctgagtacataggatctaaatagatttggtaggtgaaataggcataatttgtgacttatgggcttctaaatttcacatgcttcaccccttaaaatctagatttccactgtatttttagtacatctcccctcaacaaataattatttaccattgttttccttgaaatattgaaatcacctttgaaatgtgtttcctagacaaaataaaattggcaaggcattattagccactaatagccaaataaaaatttgtttataaagattagcatccacaaaaatctt

SEQ ID NO: 4896 - DNA, 493 bp, Homo sapiens; identical to SEQ ID NO: 4809

SEQ ID NO: 4897 - DNA, 539 bp, Homo sapiens
agtgattggccgcctcagcctcccaaagtgttgggattacaggtatgagccaccgcacccggccaacaactattaaagtggcaccaaagactaggaccaaaatgaaactttctccttgatacaatcagaattgaaagggagttgaaaagggaataattttctcacttctgactcaatattatttgaatcaacatacacacgcttcctaaaacattcttaaataccaacagtgctgcctattccccactttggaaaatttgccccataccataatgaatgtctgatttttaaatctgttgacaagagaaggctgaaactggaacataagagagattcagtttggatagaggaaaatgactttattttttgtaagtatatcacccctcaggagatataaaataatttttaaaaaatttcagtccagtaataggtgaggtaagtgaaaagtgagaacactggaggtgagggcatctcctttcctagaaagcattaagaataggccacttgctgggtgcagtggctcacgcctgtattcctcg

SEQ ID NO: 4898 - DNA, 568 bp, Homo sapiens
agctcacggggcaagggccagtggaacagggatgtgttcttcctacagaaagccttgtgacttcctgccctttcagtaaaggcttttgtgcattctactggaatgtcaggtatcaaaccactaccgccaccgcatagcccttgcccgcctgcagtcggccttctggtccgtctgacgcagtcgaactctgcagcgttcaccttgcttcctatcttgttttgcttccaactttccattacaaaaaaacttccaacatagagaatattaacaactacttccgaccgggcgcggtggctcacacctgtaatcccagcactttcggaggctaaggagggtggatcacgaggtcaggagatcaagaccagcctggccaagatggtgaaaccccgtctctatgaaagatacaaaacagctgggcgtggtggcaagcgcctgtaatcccagctgcttgggaggctgaggcaggagaatcgcttaaacctgggaggcagaggttgcagtgagccgagattgtaccagtgcactccagcctgggtgacagagcaagactccatcccaaaaaaaaaaa

SEQ ID NO: 4899 - DNA, 579 bp, Homo sapiens
acttcttgaaagctgccaatagcccctgaaaaaatagtacacactcctcagttatgtagattaaacaagaaaacaccagtagtttagccacttgtcaagtttcaacttaacttattatcatcatgatatgaataggaatgtataaaattctcagtttggggtagatgacgctatggttaaaactggaattttgtaatataaagcaagggggaaacaggtataagataacaagtggcaaatgacacaggattaaagaaaaatgagaaaagaaggggagaataaatgaaaatcaaattgaagagggaggaactagaaaaactgtaggacaaagtgtaaatgaaagaaaatagagccgggcgcggcggctcacgcctgtaatcccagcactttggaaggccaaggcgtgcggatcacgaggtcaggagctcgagaccatcctggctaacacagtgaaaccccgtctctactaaaaatacaaaaaattagccgggcgtggtggtgggcgcctgtagtcccagctactcaggaggctgaggcaggagaatggcgcgaacccgggaggcggagcttgcagtgagc

SEQ ID NO: 4900 - DNA, 619 bp, Homo sapiens
ttaatataaacccttaaatactcatttctgtatgaaatatgtccgtgtgtgtgtgcgtgtgtatgtgtgtgtgtgtagagggagagacagagagacaaacagacagtgagacagagagaaagacagaggtagaggttatgacaaagaaatataaaaggcatagcgaaataggattagcattcttcctaattatgaaagtattcagaaattccttactcatttcttaataattgtattaagcagtcaaacatgtagagtagatatatttctagtaaattttagtggttaggaaatcatcaggccaaaattgccacatagacttgtagcaactctcctcccaaatcagttaaaaggaagcattaattcatacgtagttacttaaagttacaattcaaaaaaagtaaaggaatattctattttttctacatgtgcaaacaaaaaacaccggatgtaaagatgaaactcaagaataacttgtcttttattcctaagaggacaattaaatggtcagatgtgtactaataggttaaaactcacagggattgaacatgagatttgtgaaaagaacattgtacaaagaaaattaatagaaactcgggggaaaaaaaaaaaaaaaaaa

SEQ ID NO: 4901 - DNA, 600 bp, Homo sapiens
catattttttaattactttatttaatacagagaagatgagaagacaatgtaaatgctgctttgtgagtgatgggaagaagtacttttagtgatagcagtgaatcaaagcataaggtcatcaatagtcgacttcattgcccagtgttttcaaagtccccacgtgtgttggttattctttagtaaagtagacgtgacaatgctcgttggctgttattgtgaagcttgactgataatactgggattttgagatcaagaggctagaagccaagatgtttgaaatatgtaaggtcagctgcctgctctttcctcctcccctacgagtgaatcaacacttgctttataagcttttcttctctatctcctttctctattgttagtttcacttcctactcttaaaaattctgagctttcaaaatcatgtttatcaggagaaaaaagagactgaaagagcttaaaatgggatacctctggccgggtgcggtagttcacgcctgtaatcccagctcttaaggaggcagaggcgggaggatagcttgagcccaggagttcgagacctgcctgggcaatatagcaagaccccattctccacaaaaaaaaaaa

SEQ ID NO: 4902 - DNA, 599 bp, Homo sapiens
tcgttctttcctggtggttttctttatctggtctcatgaagttttattctatacatgtacagcttagtattcaaccaaagactcaaaggaatcgctatgtagatattggagttctttctctacagaacttcctcttatcaatattctgccccacaaactccagccacctcaacctccccaaaccccgttcctcttctttgtgctgtggttcagatagaaaccagggaaattgcagggcttacctcattattttctttctctcaaggatgaaagtcttgcactacctgttgtttaatatgtgaaaacttgttccatacatttaatctagctttctagttgcttatagagatggggcaaatttgcttccatgcattccatcatggccagaaggtggaaatctctggagattttattggaatcatactaaatatgcatatcaaatcttccatcccaaagatattttctgtctgtccacacacttggtatttctttagtgttgtttatttaagagctaatgcataaagccaagcgtggtggctcatgcctgtaatcctagcactttgggaggccaaagcgggcagatcacctgagctcaggag

SEQ ID NO: 4903 - DNA, 514 bp, Homo sapiens
aatgcccattgaaactactctatatgatactataatggttgatgtatgttctaaattagcccaaatctagacttatgagactgggctagaaatatgaatgacacaagaggttgtaagagaactaaaaattatctcatgaacttcaagatcatcccctgggtcccagaattaacaatgagaatacagagaatgcttctgagaaaactgaaagtaactacttcattttgtgacctgccttctgtatgcatctgataattttggtttccaaaaagattgttactaagtagtataaatcatgtacattgggcagaatgtgtgctgagataccttctaggcacctgagctgccaagagcttaccacacgtggagctgcttcctgcttggatgtcatacctggaagctgtggtaacaatggcagcctatgggtcagttctacagctgatgaaaatatgaagaggtgatggtcatttttctggaagagtttctggacttctcaggcagtcacttctgtatt

SEQ ID NO: 4904 - DNA, 603 bp, Homo sapiens
taacattggtgattgaatgttaattttctaaacatgatattgatattgtggctacttaggggaaggttgttacgattagaagatgcttatgtatttacgggtgaaagcacgtggtatttgcaccctactttcaaattgttatgcaaaaataaacgaataagcaaataaagatgtgtttctgtgtgcatgcacacgagcctgtgtgtgcgttagcgtgtgtgtgtgtgtgtagtgtaggagggagaaagagtgaaacacagaatgccaatgtggcaaaatcgtaaaaactgatgaatctaagcgaagaatatgcaagtatactttttcttattctttcagtgtttctgaaggttttaaacttttcaaaatagacacaaggaataaaagactcagtaaaatgaggaattaattcacgagctacagaaaataatatgtgtataaataataatggtaattatgaaacatatgatgtgtcacaatttaagtgggagtattaagatgactcacttgtaactgaagatcaaaaatcacaaaatattgttgggtttttgaaattatattttcctaaatttataataggcccaaaaagaaacagaaattaac

SEQ ID NO: 4905 - DNA, 591 bp, Homo sapiens
gaaaataagaacttacttgtattctttatatggtcagtaaagaagtgatagtggaaaaaaacaaggtcaaatgaaggtgatgatttaggaagttggaaagatagcctaaactacaaaatggtatataactagtgaacacttagacacactgattgatgaacttcagcttttggattggtgagagcataaaatgagagcagctgaggtttgcaaatctgcaatctccttgtggaaaaacaggcgaaaacacatttcagcctaataagatttacctactaatgagtcaagacttgatccatttgtcctcgtaattcaaaagctaattcaaatactgatttgatatattgtgtgaacaaccgttgctgattatcatcgcatacctggcattctcttttatctgatatctaaaatatttggtaattcctggactttctcttttcaaacccagtacagtttaatttcaatcttagaacagttgtctttgagaaattcttccctctactgcatctgtgaatgggcatagcatggttacatacgtactatcaccacagagaacatttgttgaattaaagccaaagtttaaagcaacag

SEQ ID NO: 4906 - DNA, 593 bp, Homo sapiens
acttttagtactaataaaaccaagaaagactgcttaaaataaagacataatatgcttatactactattttaaaaagaaagactgcttacacaaaggaattaaattataccgaatttaacaggacgcacacaccctcacttctaaggtaatatctgaaaaatattctctgattaatgaaattaaaaggcataagcatgatctgtaaaaagtaacaggatttcaatcctaataattaatatattaactaattccagaagcagatcaagtgatactaaaaagcttctgcataccaaagggaacaagcaacaaagttaaacggaagcctatagaatgggagaaaatgtttgcaaacctcacatctaataaggggttaatatccgaagtataggctgggtggggtggctcatgcctgtaattccagcactttgggaggccgaggagggcggatcacctgaggtcaggagtttgagaccagcctggtgaacatgatgaaaccctgtctgtactaaaaatacaaaaattagctgggcgtggtgttgtgtgcctgtaatcccagctacttgggaggctgagccaggagaattgcttgaacc

SEQ ID NO: 4907 - DNA, 575 bp, Homo sapiens
tccgctcactgcaagctccacctcccaggttcacgccattctcctgcctcagcctcctgaatagctgggactacaggcgcctgccaccacgcccggctaatttttgtatttttagtagagacggggtttcaccatgttagccaggatggtctcgatctcctgacctcatgatccgcccgactcagcctcccaaagtgctgtgattacaggcgtgagccaccatgcccggcctatcttcactttattaaaaaaggaaacgagtgaggattacagccccaaatggacattttttcctgggtgctatgaaaaggaacaatggaaaggaaagggaatatttgtcttcttttgttttattgggtcgtgtttgtttgtttgtttgtttgtttgtttgtttgacagggtctcgctctgtcgcccaggctagagtgcagtggtgccatcatagctcactgcagcctccacctcctgggctcaagcgatcctccagcctcagcctcttgagtagctgggactacaggcacatgccacaacacccggctaatttttcctttttttttttttggtttttgggtttt

SEQ ID NO: 4908 - DNA, 170 bp, Homo sapiens
taaggccaggtctgaagtgagctctctgcgctgaggggatggtgtgaggcttggctccccaagtctcaggcatatggcctgttgctcttgccatcagcacacacttgcaggggctgagagtggggtaaaaaaaaaaaaaaaaaaaaaaaaaaaaagggggcctttttttc

SEQ ID NO: 4909 - DNA, 483 bp, Homo sapiens
cagttactttcaaggctgaggcagaaggatcgcttgagcccaggaggtcaaggctgcagtaaagtatgatcacaccactgcactccagtctggggtacagagtgggagcgcatctctaaataataatgacaatactaagaaattcagcaaatggatgtttcatatgtgtgcatttcattgcatgcaaatttataaaatctcaaagataactgcaaacattgaactccagttggtgatatgaatccggaaatgtttaagggtaaagagtactgatgtctgctttaaaattctttaaccttctttaaaaatacatttttaaaaaatcagatgacttgatagaggaatggactgatagatgtgtaataaagtaaatagagaaaaatgttaacaattgtagaatctagatgatggggccaggtgcggtggctcatgcctgtaatcccagcactttgggaagctgaggcaggtggatcgatcacctga

SEQ ID NO: 4910 - DNA, 302 bp, Homo sapiens; identical to SEQ ID NO: 3972

SEQ ID NO: 4911 - DNA, 532 bp, Homo sapiens
gccaacttactgccccacttctgtttccagaagtcacacacactagagtcagtttcatttctttgtagttaccctttttgcaactacagggctattacaaagtcacctgaggccactactttaaacagaaacatagtactacaaagccctagaatctaagacagccccccaatctgagggtcatctcagtccttgacactcctttctttgttaattccacaagaagaagaaattatagagctggcaccaatggtggcttcagcaccaatagtaaagggctggaggcaattgtaaacatcacctccacaatgaaggtaaccttattactcatcacattcaaagtgcagccctaaagaaaataatcacttcttattccttttctcgtatttttttcttggccactcattttcagctgagtgaagtattctactatgtgaaaatgattactagaaggaggtgttaggagagagaatgtttataagatatcttagtaagaaatgtatacttttgcctttgggaaacaaaggacaac

SEQ ID NO: 4912 - DNA, 583 bp, Homo sapiens
ttatttatatttaaacttgttgaataacaatgtaaacaccagcaatcaacagacacagcaaatgtagtttctagaagtctgatgtaagtatgtgttgtgtgttaacaaggcagtattctttgattctgtgtcctacaacttcatatttattcatacatttctctttctttattacatataggttagagtatcactcttcattattactaatagtgagtagtttccagatagcctgtgatttcccagggcatcttggcaggaaagtcagtaataagaaagtcaccaactagccgggcgcagtggctcacgcctgtaatcccagcactttgggaggccaaggtgggaggatcacttgagttcaggaattcaagaccagcctgaccaacatggtgaaactccgtctctactaaaaatacaaaaattagccagacattgtggcatgcacctgtaatcccagcaacttgggaggctgaggcaggagaatcacttgaacctgggagatgaaggttgcagtgagcctagatcacgccactgcactctaggctgggaaaaagagcgagacagtctccaaaaaaaaaaaaaa

SEQ ID NO: 4913 - DNA, 526 bp, Homo sapiens
tattatttcaaagttctttccactatattaacaacttctcatatgataaagttataaagtgttcataccacagagctcactataatgattaagtataggatttaagaataagccttgaaataactgaattcatgaaaataaagtgaccatttatgaaccacacagaaaatttcatacatctcattttagagataaaagagatacaggctatcaagacactcaccctgacaataaggatccatttgatcaaggaaaggccaaatccgcagatagcaccataccttccagctatggtattggtgatacagaaggataaacaaaatccaagccagttgaaaataaatgccactaaaagcaacagaaaccgttcttttataaaccacaatttggaaacaaattaacatagacatattaataatatttcatggctcaatggaaacagcagctccctttcttttaactctgccaattaagccttctttatagactatagcctactttttgcaaatggcttatttgctatact

SEQ ID NO: 4914 - DNA, 548 bp, Homo sapiens
actgtccctggccaaaatgcagtttattttgaaatgtttatttaaaaataagatgggcccagcactttgggaggctgaggtgggtggatcactcacttgaagtcaggagtttgagaccaacctggcttatatggcgaaaccccatctctactaaaaatacaaaaattagctgggtttggtggcgggtgcttgtaatcgcagctactcgggaggctgaggcatgagaagcgcttgaacccaggaggcagagattgcagtgagccgaggtcacgccactacactccagtctgggtgacagagcgtgacaatgtctcaaaaaaaaataaataaaataaaaataagatggatggatagagacaggaatgtataggtagatgcaataaagaagatatattaaaatgttgacggtagaatctaggcagtgggtatacaggtgtttagtgtaaaaaacctttagtttttctccatgcttgaaatatttatttttaaatgttcgaaaacattaaataagaatggatgaaacagcaaaccctaaaacaattctaact

SEQ ID NO: 4915 - DNA, 546 bp, Homo sapiens
ggatttttgagcataagttggcttaaatgtcatctttatgtccccaaggtctcgttatgatgtgacgtcactgcgtaaacccataaaccgattccagcatgaatataggttatccatggttagttatccattttcacactatgagccctcagggacatttttttccattcagtaactatatggatggctctccttctcctcactcctttacattctactgtggatcatctctgtttacaactctccgctcctctttctcaccagattccaagctctttgaggacaagctccacatctggttcattcttcttttgcccatggtgcctggcacagtgtggagcttccaggaggtgatgaataactgtatgtacaaagaacagatgcttatacttaaatccatgttttagagcatctggccagtcttacccactctctgaggaatgtaacattataaaaaacagttaagagacaacctggccaggtgtggtggctcacgcctttaatcccaacactttgggaggccaaggcaggtggatctcttgagcc

SEQ ID NO: 4916 - DNA, 557 bp, Homo sapiens
tgaagtattaaaaattatagatagcgcatgatttaaatggaatcctcttctcagaatgttaaccactaacacacttacagtactctcaggacaaactctgaaaaatagaccataaatcccacagggtggatataccaagttgcatataaagcaaaccaagcccttaagacaggaaacagaacattcaatctcaatccagagaactttagaacagatatgttcaattcaaagttttcttcattgcttgcatactaggctctgagaaagccaaaaaagtaaccaagaaatgtatactcagaaccgactttctgaagctgacaaagtaaaatcccaaaatgatataatatgtaggcatgggatgtatttttgatacccaactcagattgtataacaaataaatgtcaagggtattcctttcaagcctcacctggttacagcaaacttagagacacatatagacacagacaccacctataaatattttttgctctaacataagccaaagctttggagaaaaggtaatgtaaggatatttggaggactccacaagtacatgt

SEQ ID NO: 4917 - DNA, 540 bp, Homo sapiens
tgacttaatcatctcctaatgaccccagctattaatactatcacattagtgattatgtttcaatatatgaattttatgagacacattcagaccatagcacatagctaataagtaatgaagccaggatttaaacctaggctgctctgaagtcaaaaatgctatttctaccatgctgtttctatcccacggacttagcactgtggggtatattaagataatgacacatagtttctgtctcaagaaacttattgttaagtagaagacacatggcaaatactaatcataataatagaaagtaacatttggccgggcatggtggctcacgcctgtaatctcagcactttgggaggccgaggcaggcagatcacgaggtcaggagattgagatcatcctggctaacacagtgaaaccctgtctctactaaaaatacaaaaataaaattagccaggcgtggtggcgggtgcctgtagtcccagctacttgggaggctgaggcgggacaatggcgtgaacccaggaggcggagcttgcagtgagctga

SEQ ID NO: 4918 - DNA, 590 bp, Homo sapiens
agcattacttacgtgtactgagtaaaagagaaggttggaaacaaagatagtgattttgtttttaattttatataaattgtatttatccttctgcaactagcctatttgcacaaagaatcaagagtcagcagcatgaaaaatcttggttattagaaactatgtaaaagcaactggagcctagccatccaatgctgcagtttcctattttatttttcagtatctagtgtttctctctctcactctgctgagtagtgaaaagttaggataatccaattctttaaatattattgatgcacaggggatccaattttaatatttggagaagataaatctacttggaagaatatactgaatattgtattcttttccactatagcagaagtgagcagttatcaaaatgtaaatttcagacatctaattgtatgatattccactcactaaacaaggccatgttttcattaaagcttggattaaaattccagttgtgcatacacttggaattttaaaatttcctcatgagtccatataggttgcatcacccattcaaggcaaaagacacacacatacacacacacacatacacacacact

SEQ ID NO: 4919 - DNA, 589 bp, Homo sapiens
accacacccggcctgaatcttctcttttaaaatatccaggtatatctctttagtgaaacaaaagcaataaccaaaaccaagacttccatgtaggaagggaagaatgagagatgccagcccctggcagagacgtggactgtttgcactggtttcaatttaacaacctcagagcacacgtgattcatcagaatgctgggggctggccaggtgccgtggctgattcctgtaatcccaacactttgggaggccgaggtgggaggatcgtttgaggccaggatttcaaggccagcctgggttaacaaaacaagaccccatgtctacaaaaaatatataaaataaaacataaattagccaggggtagtggcgtgcacctgtagtcccagctacttagaaggctggaggcaggaggattgcttgagcccaggagttggaggttgcagttaaccatgattgtgccatggcactccagcctgggtgacagagtgagaccttgtctttaagaaattttaaaaatagacgggcacagtggctcacgcctgtagtcccagcactttgggaggccgaggcgggtggatcaccaggtcaggag

SEQ ID NO: 4920 - DNA, 523 bp, Homo sapiens
atgtgcaatataaaggagttgaacaaagacagtggttttcaaactggattccgaggaaccctagggttccaagaagacatgatggtgagaagagcaaggcaaaagggaaagaagacaattgttaatgagcaggacccccacttctacccagattgctccttcttgctctgttttgtctaccatgcttccacacaatactacacttaatcaaagggttttggcagggcacagtggctcacatctctaatcccaacgctttgggaggccaaggaagatggatcacttgagctcaggagtttaagaccagcctgggcaacatggtgagacaaaaaaatataaaaattagctggacgtggtggtgcatgcctatagtcccagctacttgggaggctgaggtgagaggattgcttgagcctgggaggtcgaggctgcagtgagccgagatttcaccactgcactccagcctaggtaacagagtgagaccctgtttcaaaaagaaacacacatacacgcaccccaaaac

SEQ ID NO: 4921 - DNA, 487 bp, Homo sapiens
aatctcttaagtgatggtagggtgatctcaacctaaatcttttaattataaattccactctcatttcactatattctactaccttaccatagtgctcactttaactggaccacaagttcagtatagttttcattgtctgagactttaggactttattggttgtatcttcaaggataatcttctgaaatgtgaggccaaatgcttggagttcaagtttctttagtagtcccagcagacagagaaagattaaaaaagaatgtagcaacaagtgtgtgtcaatagaaaattattttaattgaaatgatctattttaattatcaacaagtgtgtgtcaatagaaaattatctattgacacacacttccttctttctactaaccatgacctctaaacttctctttccatgctttaataaataaaaggagatttcttattaaggacaatatattatcttggcaattataatccttttattgataatataaacc

SEQ ID NO: 4922 - DNA, 457 bp, Homo sapiens
ttgtaaaagagttcttgagatacagcactgaatgtaaaggaaaatattggagcattcaactacatttgagaaataacttctgtttattaaaagatactataagaatgaaagcacaagccctaatgaatattcttgtttgatactaaaccaaagcttgagaagtggtagtttcgcaagtttttcaagtggtttggtgcaatctgaagactgcaatcccatcaatgaactttatatctttaccctttaaaattataatttatgggccgggcgcagtggtttacgcctgtaatcccagcacttcgggaggctgaagcgggtggatcacgaggtcaggagctcaagaccagcatggccaagattgtgaaaccccgtctctactaaaaatacaaaaatcagccgggcatggtagcaggcacctgcagtcccatctacgggggaggccgagacagagaatcgc

SEQ ID NO: 4923 - DNA, 459 bp, Homo sapiens
aggtgtgtgccaccatgcctggctaatttttctatttttagtagagacagggtttcaccatatggtcaggctggtctcgaactcctgacctcaggtgatccacccgcctcagcctcccaaagtgctgggattacaggcatgagccaccgcacccggcccaacttgtgcattttaaaaaagatcaaattgaaacactggaaacaagtaaatcaggaggataaagactgaagctcttcataggtattcaaaagtccttttactgtttgagagtggggtcaggatattaacttttagaatactaaattaaatttgtgtggtaaaatttcactggtaacgactaaaagaacagaaatgaggccaagcatggtggctcacacctataatcccaacactttgggaggctgaagcgggcagataacaaggtcaggggatcagagatcaagagattgagaccatcct

SEQ ID NO: 4924 - DNA, 610 bp, Homo sapiens
acatatctctagtaaaactaatattgttatctgccctaagactgccttcccccaagaaaaatgttaatatttagcaaaatcatcatttaccttgtagaagatcaaaaaaagatcatccagtttcccatgcaaatcacctgcagtgcaaatgaaaaatcagtattcagtagagaacaagatgcaatgcccatttttaaaagtgaaatactgctgatccactccaagtgttctcagggcattgggtttttatcctatgacgatgttaatttgacaggcaatttgtctccacagcactcttctcttcctctcctatagtggggacagcatctagtgcttcaattaccttttcagtccagtcatttgcacagggcttcgatcactctgggccaagcactgtgctaagggttttacatgaattatctagttcagtccttacaaccactctatgagatgggttttatcttcatcattctcatcttacaaatgaggctcacagtagttaagtaagttatgcaaagatacccagccatcaagtatcagagcaagaattcaaacccaactttaactcacttcaaaactcaagcttggctgggtgtgatggctcacacct

SEQ ID NO: 4925 - DNA, 329 bp, Homo sapiens
gaattagattagggatctagaagagaagccgaagcatctagactactctcaaccccgcctccccttgcccccaggtcctccttaccagcccacatcctgccctcataatataaccagaatgactttcctggcataaagaccctgaaggcctcttgctcaagcaagttccattgcatggagaaatggctcctcactcaccagtccttgcatgttaccctgacgatctctgaattatctttgattagactcagatcttcacatgtctagggaatcaactgcaaagtcaaatcctggaataggccagcctgggcaacaaagtgagacccctg

SEQ ID NO: 4926 - DNA, 525 bp, Homo sapiens
ggcacttccacaccagctcagatgccctcagtgccacctcagtgcttccctcccacccggttccaactaagtaccttttcttttctttttttttgagacagaatctcgctctgtagcccaggctggagtgccgtggcacaatctcggctctctgcaacctctgcctcccaggctcaagcgattcttctgcctcagcctcctgagtagctgggattacaggcgtgtaccaccacacccagctaatttttgtatttttagtagagacggggtttcaccatgttggtcaggctggtcttgaactcctgacctcgtgatccgcccacctccacctcccaaagtgctgggattacaggggtgagccaccgcgcccggccccagctaagtaccttttctgtagccagcactggggaaactcccagggagaggaatggggaattcctgggatcatggagagacactcccaagggctaggaaagccttccatctctgcctggaatgcttctgaataggggcgaaaaaaaaaaa

SEQ ID NO: 4927 - DNA, 543 bp, Homo sapiens
gaataagtttgctgtgttctagtcaccaaaaggaggttcttgtggcctggttcactggctcatgcgtgtaatctcagcactctgggagcccagtgtgggaggattgcttgaggccaggggtttgagaccagcctgggcaacagagtgagacctcccgcctctacaaaaaaggtaaaaattagccgtgcatggtggtatgtgcctgtagtcccagctactcaggaggctgaggagagaggattgcttgagcttgagttcaaggctgcagtgagctaggatcgagccactgctctccagcctgggcaacagagtaagaccccatctcaaaaaaaataaaataaaaagagagagagagagagattattgtgactggagcacaaggacagagggaaggggcaattcaggaccaaggtaaagaggtcagcagagaccatgccacactgagctttatagcactatgttccactcatctgcctgcgctcaggactcaaaataggtgtgacaaaaaggaagccccaggctataagggctgggcaggtgagt

SEQ ID NO: 4928 - DNA, 566 bp, Homo sapiens
gcttacatccctaacttataaagaactcttaaatttagggaaaaatgccaaaatcttcaataacaggcaaaacacatgaacagacaattcatgagaagaaataaaaactgacccttaaacacatgaaaaaatgatcaacttcactcttaggataaacaaaaattaaaactacattgatacactacttttcacccagaagacagacaaacattcaaaagctaaacaagtcatcctgttagcaaagacgtaggaaaagttctctcacacatctctggtggcaatgcaaagtgccataagcccccaaaaagggaattttacagtatctaacaaagctacatatgtgtacactcctgaggcaataatcctaggaatttaccctacagatttgtccctgagaattcaaaaacacacatgcacaaagccagggagtgtaaaatcatttataatgcaaaatatcataaactactgaaataccaaagcacaggccactggttgagtaacccatagcacagatacccaatggagtgctatgcagctgtttaaaaggagaatgagatcccttgaac

SEQ ID NO: 4929 - DNA, 100 bp, Homo sapiens
atggagactacacaagtagatgactatttcaagtacaactgttaaggggttgtaataaaatacttagagacgagacaggattatggagttttatctggaa

SEQ ID NO: 4930 - DNA, 592 bp, Homo sapiens
gattaccagttgtccaccaccatgcccagctaatttctgtatttttagtagagacggggtttcaccatattggtcaggctggtctctaactcctgacctcaaatgatccactgcacccagctcattgtaacttattaatgtggctactaggaagttttaaattgcatatgtggttctcattatatttctgttagcaccgctttagaatattattttgaataacatccaaatttcagtattagccaaatgattatcaaccaatattgttcagtctggacttagttctatttgactaaatcaactaagtacccactggtttgttaataatttctagagtgattatgaaacaaaataaagctctgaactagaagttgtagaagaagacaaggagggcactgccaaaatcataaaatacagtcctctttctttaaaaagcttacaaccgaggcctggaaagacagagttgaaacacaacaggttatgttcaaggtcaaaacataacacaactgaattatttttcttgaggaacaatggaaagaagattaaccagctgggtgtagtggctcatgcctataatcttagcactttggga

SEQ ID NO: 4931 - DNA, 471 bp, Homo sapiens
ggataacttcccccaggacgcccattccctgcaagacaaacagctctccaggaggagggtgtcctgcctttcatgcaccctggccacgtcccttcctggggaacatgtgcattgaaggaatcttttggcttccctgggccacattggaagaaaaagaactgtcttgggtcacacataaaatacactaacacggctgggcctggtggctcacatctgtagtcccaacactttgagaggcccaggcaggtggatcacctgaggtcaggagtttgagaccagccaggccaacacggtgaaaccccgtctctacgaaaaacacaaaaattagccgggcatggcaacatgtgcctgcaatcccagctccttgggaggctgaggcaggaaaatcgcttgaacctgggaggcagaggttgcagcaagccgagatcaggccctgcacttcagcctgggcaagaaagtgagactttgcct

SEQ ID NO: 4932 - DNA, 587 bp, Homo sapiens
ctcacgtctgcagaaggccactgactttcacacgaggcctcccaggaagggatgccaggcctcagacactagctgttggatctcgggacttgccactccactttggcatttttcaggaccacacggcatacagttgatctaacagtctttcctgtcctcccagtggtcagctgcagcccagttctagggcttctgtgggagaagacaggagagggctgggagtcagggcacacagatgtgtcagatgaggctttgcttgcaaggagctcaccacttgggtggtggagaaggcccagaaggcactactacagtgctcccaaatcaggaaaagattgctaaatgcccgtatactcaggatcacatgggagcccagagttggatgcctggatcagctgggagtctacctgacattgatgatgtttggctagaatactgatggacaaggccaggcgcggtggctcacgcctgtaatcccagcactttcagaggccaaggcgggtggatcacgaggtcaggagattgagaccatcctggctaacacgatgaaaccccatctctactgaaaatacaaaaaattagctgggcgt

SEQ ID NO: 4933 - DNA, 518 bp, Homo sapiens
atccttgggccctcagtaactagttgtcatgtttttgaagccagagttgggcagagctagagctctagggaagatgggcagagctcagggagctgtggaagcatctccttgtttgcctgtacccagcaggtaagggaataacaagggcttgaggctctggattccctggccattggcttagccactcgatgtgttgagcctgctctgaagagggcgggggacatgctggtagaaagcacattggtggccaggtgcggtggctcacacctgtaatccagcactttgggaggccaaggtgggcagatcatgaggtcaggagatcgagaccatcctgacttacacggtgaaaccctgtctctactaaaaatacaaaaaattagccaggcgtggtggcgggtgcctgtaatcccagctacttgggaggctgaggcaggagaatggcgtgaacccgggaggcggagtttgcagtgagccgagattgcaccactgcactccagcctgggtgacagagtgagact

SEQ ID NO: 4934 - DNA, 495 bp, Homo sapiens
gtggctgccttcccactggcgctgcaggttcctcactcagactagattccccaaactctgttccacagaacaacagtgtccctcagaacatcgtgcactccacaggggtaagacctggctatcaatgaatgaatgaatgggaatgaataaaagggcacccgatctctccctctcagggattcacatgggaaaagcccaagctaccaaggtccccgttcacttggcttcacccagtgcttcctagattcagtggaaccccttcctgccccaggacctgccgacatccccaggcaaggtcagccagggcacgtgggaagccctggcccattccttcctccccactcaagaagaaaggaagaggctgggcgtggtggctcacgcctgcaatcccagcactttgggaagccgaggggtggatcacctgagatcaagagctcgagaccaacctggccaacacggcaaaaccccatctctactgaaaatacaaaaattagc

SEQ ID NO: 4935 - DNA, 506 bp, Homo sapiens
gtataacatatgctggggcgtgggtcttctccagggttctttcatcaatctgccccccgtacatcttctgcagctgctcacactcctgaagggaaagtagttaatacagatgggatgcagccagacccgcctcatgcagtgatttcagcagatgcagatctgcctccaagctctcatgggcagaaagagccgcaagagaacagtgtccttgatgagcaattaactcatttacctaagtatctggtgcactaaatagattcacatcctgttctgtatgaatgaatggaaaacatcaaggatggcctttgtatgagtacaagtgtccaatgtgaaatctgtgtacaaagcacatgccattggaagcttggtcatcaggaaggcagaaaggaaattggctctttatagaatctttatagtacagaaacatatagaggtacatttccttcctctgagagtgccgttccataccacctggagagaatgccaggtggtaacaatgtacagca

SEQ ID NO: 4936 - DNA, 523 bp, Homo sapiens
gaggcggaggttgcagtaagccgacatcacgccactgcactccagcctgggcgacagagggagactctgtctaaaaaaaaaacaaaagaaagtacccttgtgattctgatatcagacaaagtagaattcaagccaaaagtattaaacctaacagctgctcccaatattttttccacatttcctctcccaaattctacctagtctattttgcccttgtttcctattactttctcacctttctttttgtctttctccctgctcatctgagttcgccctttaattttactttcttgtatgttctgtgctcaactttttaatatgtagggcaatttaacttaactttgcattttctgtttacctcatatctaaagtctggattacatagaaagtctcaggagcctacagacaaaaacaaataaaaatgaaaaggttggtcaggcgcggtggctcatacttgtaatctcagcactttgggaggctgagatgagcagatcacccgaggtcaggagtttgagagcagtct

SEQ ID NO: 4937 - DNA, 488 bp, Homo sapiens
tgggcaaattaaacagatggcttaggaaggaactgctcagataaagaaggcaggttcccaagtttctagagatagagcctagctccaggtcatgaagataaggctgtaggtaatggaagataaactgtaattctatgaatacctataacatatttacaaggtaatgtcactcaaaacagaaagcaaattgttaaactggagccagaacctaggcactcaaacaatagaagcactgggccgggcgcggtggctcacgcctgtaatcccagcactttgatcacgaggtcaggagatcgaaaccatcctggttaacatggtgaaaccccgcctctactaaaaatacaaaaagttagccgggtgtggtggcgggcgcctatagccccagctactcgggaggctgaggcaggagaatggcatgaacccgcttgcagtgagccaagatcatgccactgcactccaacctgggcgacagagcaagactccgtctc

SEQ ID NO: 4938 - DNA, 354 bp, Homo sapiens
caatgctaagtgctaaggatgtgaagataaatctctgctctactgaatttcagtctagtgggagagagagagacaagtaaatagtctatttctttactatatgttaagttatccaatagaggtagataccaagttttgtgggagcacaaacttcactgttgtcagtgaaggattcctagaggaagtgtatcctggggtgagtcctgaggaataagtaagagtagcaagttaggattattcatagaattttactccatcttctgtgaagatggagaatacataccaaattgtggaggcaaaagaaagcatggcatggtctgaggaaaataggataattagggtagaagcaggtaa

SEQ ID NO: 4939 - DNA, 599 bp, Homo sapiens
atttgttgtttatgcggaagagcagatgtatttctgttcccttaatttctttgtagtttccatgtagattcccgtcttcccatttttgcaccctccatctagagaagattcttgcccagtccctcccatctgaattatttttattcaaccgtttcctcatgagtgccataggctgaggcttccaatttaaggcagtcatcctgcattctcagcatctcctatgttcacaccaaaatacaagagagattcagagaggggatggaatccttaacataattcaaagtaaagctaacatccaaccttttgccagaagatgggaagagtttctactaacagtactgaaaaaaaaactgctattggcagcagatttgaaacactttgctgcttgagaaacccaccagcctgaagtgaaatatttatcccgccctcatttctagtcttaatttctcccaaggtcttactcagcagtcagtaaactgagaaattgattctatatgttctgaaattgcatgctgaagaggctgtggcaataaaatctcactctggcggacatcctccttcctccaatgaacggataatacccataaaattatctcttt

SEQ ID NO: 4940 - DNA, 566 bp, Homo sapiens
tcgttctttcctgggggttggctttatctggtctcatgaagttttattctatacatgtacagcttagtattcaaccaaagactcaaaggaatcgctatgtagatattggagttctttctctacagaacttcctcttatcaatattctgccccacaaactccagccacctcaacctccccaaaccccgttcctcttctttgtgctgtggttcagatagaaaccagggaaattgcagggcttacctcattattttctttctctcaaggatgaaagtcttgcactacctgttgtttaatatgtgaaaacttgttccatacatttaatctagctttctagttgcttatagagatggggcaaatttgcttccatgcattccatcatggccagaaggtggaaatctctggagattttattggaatcatactaaatatgcatatcaaatcttccatcccaaagatattttctgtctgtccacacacttggtatttctttagtgttggttatttaagagctaatgcataaagccaagcgtggtggctcatgcctgtaatcctagcactttggga

SEQ ID NO: 4941 - DNA, 292 bp, Homo sapiens
catgagcaacgacgtgtgtcagtggaaatgaggaagttatgagcaggatagggtaaaacaagcagataagtatttgacacacagagaggagaacgtcgaaagtttaggatagactggttgataagacagttttaataaagctgtgtaatttgaactttgttcagtaggctccctgaagctatttaataatattagtcgtagtagtactattactaatagttaacttattattattattataggttgttctgctttgttttgttttgagaaggagtctcactctgtcatgctc

SEQ ID NO: 4942 - DNA, 542 bp, Homo sapiens
gaaataagtttgagtgttccattgcacagtagggtgactctagttaacaataatatattgtatatttcaaaatagctagaagagcaaatttggaatgttcttacccttttccttttaatatagtaatctccacagcaagtacagatcacaaagttctacttttttcctgccctcatccattatttcacttttcatgaattcagtgaggcagtgtttggtaatagtgtcaaattagtagaaaatgtgaggtctagcaatttgacaatgatataactgtcacaatgggtctactttcagcatgtgccatgcataattagaatcaaatatatacctcttaccatttctcttaggttcacccaactctgaaagctctcaggtcattaaggcatatcaattagtaatgattttttctaccccaccccacccctgcagccaggaaagcatacattaaaggggatatctgcagtcaaaattttaatgtgcacaatttgaaaatatctactttgacacacagaacagtatcatctgagaaactcatttgc

SEQ ID NO: 4943 - DNA, 593 bp, Homo sapiens
gcaacacattaaacggtatttcatgcttccctgaaccaatttcagaaagtaccaattaataagttgatggggaagaggtcaacgggtagcattaaggccacctgtctggagacattaggtgcacactttgaatgaaagacccacagagagttgggaatgaagtaatttatcacacattcatgaaggcataaaatgaggatttaaggcagtttcgaaggcagctcctccatcttgctgctattgtgattgatcccattgctctggacaaaattgggcatcccaatgagacagtgtaaaacgtctgaagctgtgaatttttacgtatttatagcttcttctgtggtgcagactgtgcagagcaaccaacttttctttcagagagttttagagagtcatgtagacttagaagttgtgaagcttccatccatatctcagagtgttctgggcatctttctatgcattcatttattcattcattcgacaaatatttatcagtgtaccatgcatactggaccttagtctagctgctgggaattcatctgtgaactatacagacagctatctctgttcgcacagggtttattttttagtag

SEQ ID NO: 4944 - DNA, 420 bp, Homo sapiens
tagcaatgatataaagaacaaatataaaatatgtttgaaaggaaagttaatgaaacttattactaaacttggatgacacttacagaaacagggaatttggaaagaaagcttgtttgagaatagaagactataagacagatattcagatagcctcaaaaacctatgttgcttgccccagatactagtactttttagtaggcaaaactcttaagatgttctccaatgatgcttgctctcgtgtaatctctttttaatcctgagtagaacctatgaatatgatgaggcatcactctcatgattgtgttaccttacatggcaaagggatttttgcagcattaattaagatttctaatcagataaccttgggttcatcaaaagggagattatctgtaggggcctaacccaatcacatgagcccct

SEQ ID NO: 4945 - DNA, 339 bp, Homo sapiens
gattgtacgtcagtctggtgagctttggtaatgtgagtctgccccaagggatggctctgcttcaaagtgctggtaaaatcaggtttctatgccagcaagggtgacataggctttagagcaagggtgtccaatcttttggcttccctgggccacataagaagaagaagaattgtcttgggccacacataaaatgcactaacactaatgatagctgaggagctaaaacaaaatcaccaaaaaaatctcataatgttttaagaaaagtttatgaatttgtgttgggctacgggttgtacaagcttgctttagagggtaaccactgaggaagcaggggggacc

SEQ ID NO: 4946 - DNA, 330 bp, Homo sapiens
cttagtaaaaacacttcttttctatgcatgctcttaaaaaacaagggtttaggtggacatgtgagttcatatttaattcttccaaatgcacaaaagaattttgttgggatattttttgttgcaaaggatggttgtttttctttaacttattttaaaatataaaaataatgtatttttaatgtagatttgaaaaatgcagaaaaatagaaatcaagaaaaatgaaagataaacactatgaacgtatagtagcataaggttctttccaaccttagtattatgcgtagttttcttctggacttttggtttacagtatttggttgaatttggga

SEQ ID NO: 4947 - DNA, 557 bp, Homo sapiens
atctctaaccttcattgctatactcctccctcacaactgtaagtatgctttaagctccagagcactggctgggagtccaatgccttctttcacaccattcctcctccctgtgataggaggcttgtcttctagatatgactatgttttctacttgaaaactgccacgtgcttggccccagggaccctacccactgcttgtgttcttcatctctctgcccactgactggggaatcctacgctggcagtattgtacattccttcttatcttccctgccaataagaagctgcctcccacaagataggtgaaccaaaaatttgcagaaaataaatgtaaatgccccatggcactatgcatagaggctcaacatcactgagaataaaagggataccaattaaaatgacaccatgataaccatttactacctattagatcggcaaatattcacaagctgaacaatgtattccgttggtgaagctgtggggaaacacactcatccatcctggtgtgaatgcaaaaatggtaccatccttatgaagagaaaattggcaatgcttac

SEQ ID NO: 4948 - DNA, 543 bp, Homo sapiens
ttgttctgtcttctgcttgaggctttggataaaggcaaagcccttttaagcccaagcaggacaaagtccaaatctgaaaattgcactatcctccaaaggtctttaccttccaatgagtcagataattttggatcattcccattaatgagtcatgctgaccaaatgtagtttttgtgtatttcttgctacaacttttaaatattcccttccttccctttctacatttgttgagtgactactgtggaaacaagactcagaaagttaacaggctcttgtataaaagtattttagtaatttaacaaactagtgttgctgggcgcggtggctcatgcctgtaatcccagcactttgggaggccaaggtgggcggatcacctgaggtcaggagttcgagaccagtctggccaacatggagaaaccccatctctactaaaaatacaaaaaattagctgggcatgctggcaggtgcctgtaatcccagctactcaagaggctgaggcaggagaatcgcttgaacctgggaggtggaggttgcagtgagccg

SEQ ID NO: 4949 - DNA, 450 bp, Homo sapiens
gtcctgacctagactagattcgggttcagcttctgccttcctccccgctccccaggctctagggaaagcctgcctcccactccaggtctgcctgggaacaccccaaacacacaccagccacacgcacaccaatattcatatatattttatatgtagttactcttttgtaacagctttacaaaaatagccacagactagaagttgtagaaatgacagtgtgaactatctgtgtgtgctcttcagttccgcaaatcccccaggaccagtgttgagcacgaagtctagcctgcagtttagcctgcagttactctatagaaacatggtgactataaggattgaaaagccacaaaagaccacagattccagtacaattccattagttacgaaatgtccagaataggcaaatccatagagacagaaagcagattagtgggtgccaggggctggggg

SEQ ID NO: 4950 - DNA, 511 bp, Homo sapiens
catatgttcctccaagtctaggaaccattgccataaatatcaaccgcctcttcctcgtgagaccacagtaactatgggatgatacaataagggcaagatgaaagatcaaagctttggtgaaggaaagataatggaataaaagacacggctgtgtatcctgtaattaccactatacaaacaggcatcagctttatagtaataatcgtagagcatttattctgcacttcctatatgccaggctttttactcttttatgaacaacatctcacttgtcacagcttgaggctgtaagttgaattatgtgttgcttactaaagatactggaaattatacatcaaaattcattttggctatgtttagatagtatcaaaatggggtattttccaaaattagcaaatatagttttattattggtaataatatcattaataaaaacgataaacagaactgacaaaagtacattcaagaaatatcaggccgggtgcggtggctcacacctgtaatcccagca

SEQ ID NO: 4951 - DNA, 616 bp, Homo sapiens
gaattagctagccttgaaatccaataaataagtttgtctttcctacaaaatttgtctaagggtaatttttttctttccagagaggccctctgctgcccatccctttgttctcaaaatacaagttaaaaactataagtgaaggctgtgactatgttttagttttttctctatatacttttctattatttttaaatattctgttactttttattggatcaataacaaataaaatatcttgccctgttaccaacataatttcacatatttttaccctaatcttcatttttttcctgagaaattatcacatggattatatgtcacttgagtgaagttataaataaccataacaatttgctctggaagaatccacatgaaactgtaattctaactggtttatgaattttttattcccattaatggcaaatatcagatatccacaagggagaaggtaaaccactatcttaatgttcttccagagtatctctagagatccaaacttcaaaagctgtacaaagtcaaaggtgaaataatctcaaggcctatgtacttgactctagaaaacacgatcaaaaaaataaaagaatacctctttgttaccatactcaacataaaacac

SEQ ID NO: 4952 - DNA, 542 bp, Homo sapiens
gcagattccttgaggagactggcagctgatagttggagtcccagaagctcacttatgaatagaggaagaagtcaagatgatctgccagttcagataatcagtggaaaatcctctgcataaaatcactttagtgatgatggaaatagaaagctaagacactgaatagccagttgctatatccagtgtgccagaggcatacaaagagagcactcattgaaacagagtaagctgagctgtctccaaacagaaatgtggtatgcttttgtcatattaaggaaactgtcatccttttaaaaggaaagtatacagagtggaagattatagtgcagacctatcataggaaagcttaaaattaaataaacctgaaacactttttttcctactaaaaatcagaattaaaaatcacaagttagaatgcttacctcaatctatactaatgatgcaccgggcaccttattaaacaaactggaagtaaaaatcaaaatacgtgatattatttttagatgatttataagttccaagtagtgaagaggaaaaatgac

SEQ ID NO: 4953 - DNA, 586 bp, Homo sapiens
tgtactctcacctgcaaccatcaacaacgtcaataaatccacctgcttctaagactacgtttacttaaagcataagaatacaatgataatgccttggatttatgttgtactttactttcaaagggtcttcacacttattgtcacaatctctacaagaaagagataatgcaagattcacattctgccttctcagccaataacaggatcagagaagttgaaatgatccagctaaatgatgggatcactaaggttttaatcatgtctgatgactctgagcctggactcttctcaaagtacaataaataaattaaaaaagcatgaggaagtgcaagaatagagtatggaagtacaaagaaaacattagaaaacctgggtttgggctgggtgtggtgcctcacgcctgtaatcccagcactttgggaggctgaggcgggcagattagctaaggtcaggagtttgagaccagcctggccaacatggtgaaaccccgtctctattaaaaatacaaaaaaattagccaggcatggtggcaggcgcctgtgatccccgctactcgggaggctgaggcaggagaactgcttgaacc

SEQ ID NO: 4954 - DNA, 422 bp, Homo sapiens
taagtttgtcttgacccacatctattgtttcagttaaatgcattatggatattatacattaattagtatagtgttaggttagctgacaatcatccttttaaaaatatactttgaggaactgaaataggcaagaatgagacaaacgaaaatgacctaagaaaataaccaattacttttgaatcagaacatgaaccagagcattttgtttcatgtaaataatcagactccacaaggtattcaaagaggaggtaaaacactattgcctcaaatgtctatgataaaaggataagaacgttttcaactcctagatcttatcttactgtaggaccccagaagaggagagtaaaaaagctgaaacaggagaaagatatgattttagccacctcatttttatacaaccgagaccgtgttaaaaaaaaaaa

SEQ ID NO: 4955 - DNA, 463 bp, Homo sapiens
tttacagccggtggtctacaggacttacataaatatccacatttgaatgacccttaggaatataaatctaatatgtccagaacgaatcccttattcttattctattccagttctaattcttctttcagtggataattcaaccaatatgcttttctgagctagggctaattatcattctttacttatctacgaatacaccactgcctgagtctatcagttctattggtcaaacgtcatctaacataacaaacatgtcttcataacaaatattcttatattttttatgtcctttaaacataccttctaacaattccctagtttaggtcaccataatcttttacctacattcttgccataattttctatcatatttccctattttgagacagaaaaattattttccacatggcagccaaagtgatttttctataatacaagaataatcacatcactccctcccatc

SEQ ID NO: 4956 - DNA, 528 bp, Homo sapiens
tatcttatttcagttacaatttgcattttaattatgattaatgagactaagctttttttgtgtagttgactgtacctttggattcttttcccaaatcccttttcatttcttattttctttatggtttcagaaaatgtagtttacataattgcagcttgattttttaatcagttaatggcatgcttaatggagagaaaaaatattaactatatttccctttttaattactgtgcttttttcttttttaagaaaatatttcattatgttaaatttcagtgttattctacttagctattccttaaatattatagtattttggatttcacatataattttgtaacatatcttgagttttttgtatatacagtaaggctattttctcttttttgttttttaaggcaaaaatcacataatataaaattaataacttaaccattttaaaacatacaatgcaattgcttttagtatgttcacaatgttccaggacaatttcatcatatcccttctaacaacccattatgcataaag

SEQ ID NO: 4957 - DNA, 479 bp, Homo sapiens
ttccaggagcgccagggtccatggcaaagctctaccctgggccagctgcccccgcacttgcacctgggcacaggaagttgatgttcgcagaattaagaactttttttgtctcaatgcgtgaatggttaaagaaactgtgttaaactatggtgcctccatgctactcagcaataaaaagaaaggaactactgatacacacaaccacctagatggacctcaagagaattatgcagaactgaaaaagccaacgtcaaaaagtcccatactcggccaggtgcggtgggtcatacctataatcctagcactttgggaggctgaggtgggcggatcacttgaggtcaggagttggagaccaacctggccaacatggtgaaaccccatctctactaaaaatacaaaagttagctgggtgtggtggcacatgcctgtaatcccagctacttgggaggctgaggcaggagaatctcttgaacccggga

SEQ ID NO: 4958 - DNA, 589 bp, Homo sapiens
tggtgattgttaattggcttgcatattctgttttggatattccactgtttccttataatttgtttatttataaggaaacttataaacaaattataaggaaacaatagaatatccaaaataaagagaatagttatgggttcgtatagataattcttcagaatctactaatttgtgtctttcttctttacttctgtaaacttttcagctactatatattagaatatttcttaacttttttatattcattctgaaatttcttgctgaaatttgttcagaaggtgagttaacggagctatacatctttagtgtcatgtgctctaaattgcaaaatacatgtatttttatttcagacaacttgagcaacatttgtgcaaatgttttatatacacggacttaatttggtaaatttaggcatgtggtagacaaatttaaaaatgtataaaaatcgtgggcaagcatatgaacattctatttttgctactataaaaaaatagcagactatccaactattttatgatactcaacgatacatcttactaaatggtcacgactcttgcctctcagggtcagagtttgcaatagtgaaagc

SEQ ID NO: 4959 - DNA, 550 bp, Homo sapiens
aaatactggaatcgcctgcctctggctgtcatgacacactgttaaaaaaaggaaaaaagttacaaatcacctgaaattcccctttgcagacacacacacacacaaacacacacgcatgcacagacaccaagacagtgtgtacacctatcattaggtttctgtcccagatagtatgcaacaataatagctaacattcacaacataatttcctcagatatggtttttctcttaattataaaaattcccaaggctgggtgcggtggctcacgcctgtaatggcagcactttgggaggctgaggcaggtgagtcacgaggtcaggagttcgagatcaggttggccaatacggtgaaaacccgtctctactaaaaatacataaattaactgggtgtggtggcgcatgcctgtagtcccagctacttgggaggctgagacagaagaatcacttaaacctgggaggcgaaggtttcaatgagccgagatcacaccactgcactctagcctgactgacagagtgagactccaccccaaaaaaaaaaaaaaaaaaaaaa

SEQ ID NO: 4960 - DNA, 480 bp, Homo sapiens
gaggcctggagggacctacagaagggctcacaatgaagttagacaagatgatgttaatggatgtcagctggcatctctcttccactccctactacttgcccaggaatggaggctgtgcatggaccaaacatcatgggctcctgctcaccagtgctgatctatctgttatcattgctgaatgcccaatttgtcaacagcacagactgatgttgagtcctcaatatggcaccattccttgagaagaccaacctggtggcaggtggattatattgagccccttccacatgggaaagaacattggtctatccctgctgaagttgatacacattgcggacttgggtattctgcctggcttgcagagcttttgttggaaatcctgagcaaaggcttataaaatgcctgatctactgaaagttaaccgaaaacattgtctcacaccaagcgacccattttattgcaaaggaagtacgacaatgacct

SEQ ID NO: 4961 - DNA, 604 bp, Homo sapiens
cttgacctcaagtgatctgcctaccttggcctcccaaagtgctgggattacaggcgtgagtaaccacgtccggccaacaaaaagatgtatataatcctcttgcctgtttaaaaaaaaggggggtcaatagttcagatctgtcatattatagtcttgtttaaccatttaacatttagttttaaagtattatcttttcttgaaacattcacccatgctgtttgctatccatcatcactcaaagtttcttcttcctttatcttcctttcctggccatcaagaagtttactttctcaattctgtccctactagctgtgctcttattcaggtcaagattattcacatttggaatactgcaataatatcctaaaaggtcagcctacctctggtcttgtattcctcaaagcacttaccatgataaccattttaaaccctgctaagcaaacctatcacttccctgcttaaaatcttctagtgactataaaatggatgaaggtcaagcttctccactaaacatagactatctggcctggtccttattctcatcactcacagttttatattctgaattttgcggctccaggagccctgaattgcttgcattcta

SEQ ID NO: 4962 - DNA, 609 bp, Homo sapiens
ctcatctttctcttatgagagaatgttaaatgggttttttgctcctgtcctggaattcaagctaagacctgaaatgctaaatgtaatcagacaaccatcctttctagcctcttggttcatataagaagagggaaaaagatcagtcctgatgacaggctagttcctcctttcctgtttgaagtcagagaatgaggagaaaggaatggagatagaaaagcagagagaaagactgacatttcatgattagccagggcaatttcttttttgttttattttataatggctgctcagtaaggatagcctcagcttactgatgttgttagaaagtgacaattcttgccttgcagaaggattactctgcattgatctggcactttggcctcagtttgaaatagaatttgcctgcagctacattagcataataaaacacagcaaattcacagtctctttctggcacttttcctgcagtatttgtagaatactagaaactattttttacacattagttatacttgcctaaaaatcttcagaccatcatcaatctacagagatctgagagaagaaatttaagttgttccctcccctaggcccccaacatgccataaaaca

SEQ ID NO: 4963 - DNA, 575 bp, Homo sapiens
gcttacaggctatatttgtgtaatatttatatggttttatatggttcttgatggaaatcccctaaaatccttttcgtagcgagtcagagaatgaaatctgtggtttaatccactggcttttctttaggcaagagacagctgtgctagaagaatggaggattataataaatttgaaaaaccagaacagttcttcaggtaagcatgatctgtactcctgaccttaggaattgactctaggtcccagattttgaatttcttatgagcataatcttctacttaaaaaaatcacttaattaacagtgattattgagtatctgcatctcctccaagaaataaaatgccatatacatgacacacacacacacacacacacacacacacacacactcttgatagtcctacagatgactaatcactccccaccccccgacttcctgccttttcattcatacattggggttgagatctctgctaccacaggagctgttgcagagaaaaagatttttaaaatactatattatgtaaattagcacaaccattatggaaaacagtatggaatttcttcaaaaaaaaaa

SEQ ID NO: 4964 - DNA, 450 bp, Homo sapiens; identical to SEQ ID NO: 4786

SEQ ID NO: 4965 - DNA, 569 bp, Homo sapiens
atattggggcaagaaaaaaatgaaaatattatctcctttacttagattttgagaatgggctaagaaataaatacaacaaaaaggcaactcttcatgttctctgtgttacttatgaaggtccaaagatatggcttggaagtaattcaataagatctcctcctcattctttaaatatattctgctgaataatttactaaaagtagtggttgaaaacaatcaatttaccaacattttgttattaaaaaatgcaatgcctaagaagtatttttacatagtgtgctatgtatgttaaatatgcatgcatatgttataattactttatatgtatacaagataaagggcctgggtgtggtggctcatgcctgtaatctcaacactttgggaagctgaggcaggtgaatcacgcggtcgggagattaagaccatcctggccaacatggtgaaacccaatctctactaaaaatacaaaaaattagcagggcatggtggtgtgcacctgtagtcccagctactcaggaggctgaggcaggagaatcgcttgaacctgggaggcaggtgctgcagtgagc

SEQ ID NO: 4966 - DNA, 580 bp, Homo sapiens
gaggtcaatttttaatctttgagcccttggctggcaatacccctggcagcaggggaaggagcatctcaggggatcttggtggcacctgatagcagtctgtaaagtccatttattatgctcctaagatccattgcttcatataaaacttctctcccattagagaaaaagcttgtccagggttctggttggttttccttcctgcagaaataaaaagaagtttagtggcatgaaccacagcctcttgccactaaagttcatctcagaggtgcaatgcattctcttttctttctcttgtattactcaatttagattctccccaccctcagttagccccccttttggtctaggtgaattatttgataaggtgactcaaacactcatcactgaagggttggagtccctactcaccttacttctttcaggctttgtttgctgcagttgtctatttattgttgaaaatatgcagaagagtagcaagatatgccccaatgaatcacctgaattcccaggtgttctttcttaccttcactttgaaagaacaaacctaccttttccttataattggggtaaattatgcctg

SEQ ID NO: 4967 - DNA, 580 bp, Homo sapiens
ctcgtcttagtaacagcacttatcaatcaaattattgtgtagtttagtcactgatttggcatgttaaatgaacaatcatgaactgccttacctggagtccatttcaggggctaaatcttaactcactaataaccttaggatcaaactcttactgcacagagatgcatgtctgcagacaatacatgattccattattctttggtctggtgtgatatttacgattgatcttaaccctttggcgagaatgttttacaccttcccatttgttttcaacctgttttagatatgtaagttgtagaacttcccagctacagtctaacttctttggttaattatgtttcctttaaaacaaatccgggtacaatttttgagggttcacttaccaaactctgttatcaaaaccctttagaacagtcctctagtgtgactaacaaagttctatgttaaaaatatcaacttttggccagtcgtggtggctcacacctgtactcccagcgctttgggaggctgagcgggtggatcacctgagctcaggagttcgagaccagcctggcctacatggtgaaaccccatctctacc

SEQ ID NO: 4968 - DNA, 577 bp, Homo sapiens
aattatatgactatttcaacaagcatctggagataagtttaattttgtattctctaacttttttttagtttactttaacatttttagtcatttctttataataagtcatttgtttcgtttgtgtcctaaataaaatttaacaaacatttaatgagcaactaatatatgccagcaactgtgctcatttatctggtggctaaaaagacacaaaacaatgaatctcactctcatgcagttttcaatttcaacaggagagatgatacaattatatacataactatacaacatggcagaaggcaaaggtcgtgattgaacaaaaatgacatttgaaagtatttagagggagaaatatcatgcagttggaaagaattgggaaacttcccctaggaaaaagaattttagaggatggataggcatttgcaaggcagaagctgggtgggagagtgttgcagtagacagagctacacaggcaagggagcaggacaattcaggactaatcttgggagccacaattctattgattatgctggggaatagggaacatgcaaatttctcccaatcattcaaagaaagaaag

SEQ ID NO: 4969 - DNA, 560 bp, Homo sapiens
gaatgttgtggctgcttttctcttctacccagatcactcaaagtttgttcatataatcaataaggctgtttcactttcttattatttgtgtgttcactggagtatcacttttaatttccttcaagaaattatggaaagttccagttggaactagaactagaacatggaactagaagtttctttgcattcacaatttggctgtttggcacaagagacctagttccatgttctagttctagttccaagaaagttccagttccatagcaatgatgtgcatattgcaaaatttggaagtttggaaagtcccaaattggaaaagttggaactttctagttgtaaatttatcttggaactaaaactagaactagaactagaatatggaactagaactttctttgcattcacaatttggctaatgtttggcacaagaagtctagctttcaacctgtctcaggtttcaacatgcctgcctcacatagcttaatcacttccagcttttgatttaaaatgagagacatgcaaatcttccttttatttgaatacttataggccattgtatg

SEQ ID NO: 4970 - DNA, 585 bp, Homo sapiens
gaattgttcagaaagaggttcacactgggctgcccttcccagcaaagcatcttcctgcgccgtttgtagagacatgtgttttgcagggctcctgcctttccccgggaggccacaggcagccctccattctctggtcccaggcttctcatagcatgtcccacagcccctctgcatattcttcccacttatcctctgggacatcctgcccttttggggtttcttccacctcactggtctctctttcccagttctttttactggcttctcccctactcaatctacaaatgtgaaagggctgcagggctctgtgctgggtgggccctgttattccccctagttctgccatggcaaagcaaataccatacagtcctggggcgttaagtaccatctccagccctgtcatctccctggaactcagactcatgcacccagctccctatatcatactaccacatggatgtctgcaagagattactaacaacatagttaaaagggtactccctcaaaacatgttcttcctccaggcttcttgacttcaataaaaagcatcatatttggccgggtgtggtggctcatgcctgtaat

SEQ ID NO: 4971 - DNA, 579 bp, Homo sapiens
ggtcttgaactcctgacttcaggtgatccacccacttcagcctctcaaagtgctaggattacaatcgtgagcaactgcgcccggcccaggaatactttttcactgaggggaagagggagtgggtggagactgacaataaggtactcttgaggaaatatggtagaagggtggataaatatcagcacatgaggagttgcttcacaaaaatatccaacctactgacaaaagagttgtggagtatttcatgatacaatagtggtcgttgttctgtgtctgtgagacctccttgcgtcattttaccttggtcacttcaaatcctataaacaaacatttactgagatctcatgtgcagcgggcacggtgctgggggcttggtctcaaggctaaggaggtggaggagattgggcttccaaggaacaggtgaataaatagattcattgagttgtggtggttctatttcctcttcccaccaaaaccacatgcgggaaacatatttcctcaaagtctgtggtgtgggttttaagttttttttcgtgttcttagatctaaaagaatcaggccgggcacagtggctcatgc

SEQ ID NO: 4972 - DNA, 572 bp, Homo sapiens
tatggtatgggagaaagagagagaaagagggcaacacgcgcacacacacacacacacacacacacacacacaaacacacacacacacccccctgcatgtaacccagctgaaaaagatctgaatcagccagtggttatgagagggacgaagattggggtatgggggtgtcacaggggacttttttttctttttctctcacatctctgctgggaggaacttttgccttttctttagttgtgtcttctattttgttttctcaggaactggctcagcacagtattttcttaagataggttcttgctttgtcaccgaggctggagtgcagtggtgcaaccatagctcactgcagcctcaatcttgtgggctccagtgatcctcccacctcagactcctgagtagctgggcatggtggcttacacttgtaatcccagcacattgggaggctgagatgggtggatcacttgaggtcaggagtttgagaccagcctagtcaacatggcgaaacccagtctctaccaaaaatacaaaaattagcccagcgtggtggcagatgcctgtaatcccagctactt

SEQ ID NO: 4973 - DNA, 532 bp, Homo sapiens
tgtctaaaacatctcatcttatttttcccccaagattgttcttgttatgaacaatttttgtggtgtagaaaagaatgtgaagaaataagcctttcagataacatttcagattaggctattatagtaaaattaagcatcccaatcaaggcattgggattctaaactgatttactacatctatgatctcttatgtttttaactatttggaagagacagaaaactataactgatttctctcctgaaagcgttctcaaggaaggaaagcatagaaaagggtaacgctggtatattagactcatgatctgctgaaaatataataaaaaaggcattttctaaaaatgctgagagattttgacctaacaagattaagaggcagataagaagtaagaattctggccgggcgcggtggctcacgcctgtaatcccagcactttgggaggcctaggcgggcggatcacgaggtcaggagattgagaccatcctggctaacacggtgaaaccccgtttctactaaaaatacaaaaaattagcc

SEQ ID NO: 4974 - DNA, 535 bp, Homo sapiens
ggaattaaatatctgtgaaggagcaaaattacagtaataattgcttctggccttaatgttgggctaggatagcttgttggataagtcaggaatgcctataaaaataccagttcttggctgggtgtagtggcttacacctataatcccagcgctttgagaggaggccaagctgggaaaattatttgagcccaggagttcaagaccagcctgagcaacatagtgagaccctgtctctaaaaataaaaataaaaacattagccaggcatggtggctcattcctgtagtcacagctactcaagaggctcaggcaggaggatcacttgagcccaggaagttgaggctacagtgtgctgtgattgcaccactgcattccagcctgggcaacagagcgagatcctgtctctaaaaataaaaataaaaaaagtagccaggcatggtggctcatgcttgtagtcacagctactcaagaggctgaggcaggaagatcacttgagcccaggaagttgaggctgcagtgtgccgtgatcactccact

SEQ ID NO: 4975 - DNA, 575 bp, Homo sapiens
agctctgttgtttatttttatgttttgtggagatggagtcttcgccatgttgcccaggctggtctcaaactcctggcctcaagggatcctcctgcctcatcctcccaaagtgctgggattagaggcatgagctaccacacctgggtcatttttataagtaaatatgattattaactgagaaagggtgaatgtcaaacatctgctatgtgggataaatggctgtgtttggcaaagaaactaaaaaataaggggcaatatctccaccaaatcctctaacactgactcagcatgtgccctgaatcatcttataagccaactaggttttttacctataaatgtttcttcactaaagtggctcatgatcatggttttggaggacgaggactaacagacacacaaacaagaaatcaaaggcataactggatagtgcattaataatgaagcatgtatgacagatgatgtggtattgttattttataattacagtatatattaacacatatccactctgcttattgaaatatttttcattccttccatgatagagaatcctgcctctgctctgaagcctttct

SEQ ID NO: 4976 - DNA, 578 bp, Homo sapiens
gcagctgccagctaagatgtctagtgactgatttaagagcagatgcagaggaagccctttacaaaatgggacacactcatggctgcctttctagatcagtgatgttgaacttttaaatatgtttattggctttttgtatttcttctttgtaagtttccaaaggaaatattaggagaatttctgaaccagagcccatgctatggctatttgactttgcagtagacacatttggatgccttttcactacctcctttggccccgaagctcttgttaaaacaggtgcgcctgaggaactgcgtctatgcgtgaagaacactctccatttgcccctgacgtctgcctcactcttcccagattgaacctttattatcccatgctgggctgggacctcattatggaaggcctcgaaagccagcctgcggaggttgaacaagggagtaggatgatgagagttctgctgtaagagattaacccagcatcagtgtaagagacttgagagggaagaatgggtagagaaagagatcagttagaagtcttttattggctgggcatgatggctcacacctgtaatcccagca

SEQ ID NO: 4977 - DNA, 391 bp, Homo sapiens
cacttatcccttccccaggaggcattcaggtctgggaactagccctgtcatgcaagtatcctgtgcagggtttccagcttcctccctcttcagccatttcttcaaataagctctctgccacaggctactcttcgttgtgcaatctgtggacccagttgtcatctgccaccactgtctagttatcttttgactgccacaagtggactccaaaaaatctccaaaagaaattgttaccataacaagatggccaactagacacagccaggaagcactgctcccactgagagacaccaaaatattgagtacaccaatgtattttgcgcccatcttcagagagaaaatgctgagagtcattacagaggtgatgcagacaacaaggctgaagagggag

SEQ ID NO: 4978 - DNA, 574 bp, Homo sapiens
ggaattaaatatctgtgaaggagcaaaattacagtaataattgcttctggccttaatgttgggctaggatagcttgttggataagtcaggaatgcctataaaaataccagttcttggctgggtgtagtggcttacacctataatcccagcgctttgagaggaggccaagctgggaaaattatttgagcccaggagttcaagaccagcctgagcaacatagtgagaccctgtctctaaaaataaaaataaaaacattagccaggcatggtggctcattcctgtagtcacagctactcaagaggctcaggcaggaggatcacttgagcccaggaagttgaggctacagtgtgctgtgattgcaccactgcattccagcctgggcaacagagcgagatcctgtctctaaaaataaaaataaaaaaagtagccaggcatggtggctcatgcttgtagtcacagctactcaagaggctgaggcaggaagatcacttgagcccaggaagttgaggctgcagtgtgccgtgatcactccactgccttccagcctgggcaacagagcaagaacctgtctcta

SEQ ID NO: 4979 - DNA, 575 bp, Homo sapiens
cgtgcttgactttcaagactggctcttctgcccttagcaaatgtccagtctatttcactgaaacagaaaaagcaaagtagaattgatttacaaaagtgaaagatggatttttgttagaagagtgatgactgaatttaattttatttttaaaggtctgtgtacagttatacaactcacatacgtatatgcacatatacacgcacacatacattgtcttgatacaactgcctgagggaaaaacacacgtttcctttgataaatctcttggtctgtaaaatttctaaatcagagatgaaaggcactactaaataaaagctcaccacaagacaggcatggaagtttataaccaatctgatgttgtctagataaccaattctgtgtttggagctgggtagcattgcacttctggttgatgtgattgtatgaattagtgttcgcatgttaatgggtatatggatgaagttttccatcttaatgacagttgttggggcactgttctggtagaaagcacaatgtctctgcaaactcttgaggccaatgcatacaaaagcaggaggcattttgggaggggagag

SEQ ID NO: 4980 - DNA, 577 bp, Homo sapiens
gtccataaaggaatatctgaatgggtaagagagaacaaggagagttgggtcacccaaggcaagagagaagaacctttctagaaaggtgtagttggcagttttaaacatgccaggaaaatcaagtagcccaaggcccaagaaaaatctactggatctgagaaaatagaagctataggggaaaacattttgtttgaaaaaaagatgaagattcaaaagggttgacgattgaatggaagaccaaaaagtagagatatgtggttgattctgtctctttggagtaatgtcacttttaagtttttatttctaactcttataattaatatttcttgttctactaactactaccttcagggtaataaagtagttatatccacatattttcacctctcctttactatgaaatgactacttgtacattttcatcatttagctggaaattgtctttgaacttttgatagaaatgtgcattatcctatcatactctatttagattcccctttagaagtgacttatttcctccagctgctagaagtgttgcaagtagacagtttttagctgctgaactcctatctggatt

SEQ ID NO: 4981 - DNA, 502 bp, Homo sapiens
accatgagcctctgctctgatgtaatttttagtgtatgttgtatttgttgacatataattttatattttgcttctttcacttaatgtatcatggaattttttcatatcattaaatattctctttgtgtggcacaatagtatttcagcatgtagatattttgtaatttattgaatgaatcctttttgttgcatattttcaattttgtctgtaattatatagcaatgcagggaatagtcccgtgtagcaggtggaattctaagatgaactccagtgacacttaccttgtataattccctctccctgtgaacatgatgggatattacttccatgattatgttatgttacttgcaagggaattttggagatataattaaggttgctaatcaattggctctgaattaatcaaaagggcaatattctaggtagacctaacctaatcaagtgagcactttaagaacagagagttttctcctgcttgtggcagtagaggaagtcagagag

SEQ ID NO: 4982 - DNA, 570 bp, Homo sapiens
attacccaatattgtgttaaatatctttgtcactgttccactttattatggcaatagtgattttcaaaattatttttcccacagaaccctctctttagatgaaatcctagccagaagcataaacaaataaaacagataaaagcacaatgattctgttaaagatgagaataaatcagagggcttttcagctgcaaagtactaagtattctcttcatcctatgaatttccatagtactcattgtctatatctctcatctcatgccaaattacacactcccttgaattttactttaatgtaactctgttgcttcaactaaattgtgagctctctgtgacagggaccacagctttaaagctttacatctccctcaacgcagccaacaatccaacaatgtctttcatacaatagctgtttcctactatgtacatgtttccaaattaattgaatatgatgatgaacatatagggttccaaataattcaattcacttttctagaattttaggatgtattccctcagggtccttagatacagacagttacacacacacacacacacacacacacacac

SEQ ID NO: 4983 - DNA, 564 bp, Homo sapiens
gaagtgactttgaatagagaaggaaaatctggttgcagaagagatggtggtgtgattgatggaaaggaaataactaggtctgttgaaactggggagccagggggagatgtctagtaggtaacgggatggggtcaaggcccaataaaggtgtctgaaccagaaattaaaatgttgaagtggttagtgtgtagtagaaggtcgcaacttggaagttaatgggatatcttaggaggaccataagtaatagtctttccaatatgtatcatctctggggtgattttctagattatagcattatggtataagaacatcaaaatattttaaggaggtcgtaatataccatagaaaaaggatttgctgatttatgcaagacagctcccaatccatgaggattaaaatgtaagctcttgtctcttcttgtgttagtatataaatataatatccgaggatcacttttgtttctggtcatattgcagtaactaatactggattttgcttcttgctgtgatcaactataaaactgaacaaaatgtatgaaaaagatggtttcattcattgagcact

SEQ ID NO: 4984 - DNA, 562 bp, Homo sapiens
ttttgatagaacgaagtcagtgctaaataaatatctgttgggtcactaggctttgaagatgtcatctactgtttatgttcatgagctcttggaacatgctagagtattttgtgcagagagccacaaagtacaaaaataataatgaagcttcaaagccaaaaggcattaagtggagagatgcaagtcttacgtagcagaaagctaaggctgtgacattttttcaaccttacatcaatcatttagattttagccaatgagcaatcagttcatcatcttaataggatcacaagaaatagactgatgaagtcttctgctgtggaacatctgttcacgctctctctttattgttagcctgctgtcttttcatgcagtaaagaaaaaacggtaaactatccaggcgcttagtatatgaaaatttaattcacttttcctttatttcctgttcatattaaattgtcttactgtcatcatttattttatcatttattttggtattatcaccctcttgtagtgaacagaacacactaagagttactcatttaaggcctggtgaggtggctca

SEQ ID NO: 4985 - DNA, 583 bp, Homo sapiens
cagaaatgagaaagatttgtttattttagagaaaagtaagatgcattctcagaaaagtcaaaattaacaaatacaaagtggaaaaacaatatctacgctatggatttgttaaccatacttcatggtttatttgagatagtacttgcttactcatattgttcttcccaaaattgttaataacacactcttttacttaaaatgtggttaaatttggaaaagtaattatatggtcatcttctctatgggggcatcaaggagacagatcattttcagtaaaagttaaagagataattagaattggcaacgaatttgtcgagaagctgatctaacgggtatatattttcatcccgattttatccatgaagaagtagaagccaataaacattaagttattttaagtattgctcagtaaggaagaggcaaagcttcatgcaaaccaggatcaagttcacaatctcctaaagaaacaaaggcagtacaatgatatggaggctatgataaaacaatttaaaatatgaaacattgctgagatggaataggatgaggtctttaaatgtgattggatttgttgactacctttaag

SEQ ID NO: 4986 - DNA, 567 bp, Homo sapiens
taactgttacctgtatgaattaagataaggagttatgccagaatataagtcacctgtgtcactaagtttactgtttagctcactttttttgtagcaagattttgatgaaggacgcaatatgttgatttacagtctggtacaaattttgatgtagaagatgcttccaatatcctggtctcttagttccttgatttcttctccagtgatcttattttctaccctaactcaactacatattcccattgtcatatcctagaatattttgtcttttatctgtaactctgctctcttcccccaatctcatttcaagcatcccactttctaattcctccagtaaatacgtcagttccaacagcccatcaatcccattgggacctacagtttatctatccaagcttttccctgttcctcaccctcacttctatacagctgaagtttcatactgaattataatcactttctcgtatacacgtttaacaatcttgtccctccctggcttcatgcccagtgatctcttgtatctatgaccatgtcctttatcttctcctctgtcactggatgaactgt

SEQ ID NO: 4987 - DNA, 563 bp, Homo sapiens
gaggtccaaggaatgataatattagtttggaaattctgtattctctattataaacctaactacaatttcaagagggtagtggataactcttctatatctctgatcatttgcagagctcagcacagtatccagcatgggtgatgtctgcataaataaattaagaataaatgcttcataacaaattagcagctgatagagataatatttaaaataaaggtgttgttcgagaaaatggaaccctatgactgtcacattaaaatgctgtaattgtataatactatttcaaagataacacccatccaataaatattctgctctgtgaagaaatgcctacactaagcatggaggaaaatcttccattggatagtgaagcatagttttagatcttctttgactgcacaggctcctttcacagcccttccaggaggtggaaagggtttctaacagtgtgttcgtctggtcaattgtacttcttatatttacagtttgaagatggttttcacataattgcttctctgtttctattcctccttccactctgtctactctccctgcatgtgggt

SEQ ID NO: 4988 - DNA, 453 bp, Homo sapiens
tccaaaccagattaaaaaggaatagaatggatttccaagacaggcaggcaggaaggaaggtctgaggtttcattgtaggaaagaggctttctacacttagccggactatgtgcaccctgcttagagcaggcagacccatgcagggaggactagagtccagtgaacagtatcaaatcattgagtgcagcaaaggcaagttgcttggtggtctgcagggctccaacagttacaacagtaactcagtcaaatagtaaaacttgaaagaatggaatatttacattcttcttagaaaaaaagaacacaaattcattattcagagatgtagtccaacagtgtatttgataaactccagaaagaacatgatatgggcatatatacccattctgccccaggtctcactgactcctcccttctccccactctcaacctcccatcccctaaaaaaaaaaaaaa

SEQ ID NO: 4989 - DNA, 560 bp, Homo sapiens
acctcttctcctgcgttattattctccttctcactagtaatatacttaatattttaattatttgtcttgcttatttcctctatgggaggtcaatgaagtcaagtattttgctctccgctgcaccataggtgactacaataatgcctgttatatagaatgactccataattaaaatatgctaaaataataatggaatatgatttcctacataatatatcaaaaaaacttaagttaataaatctggcaagagcagagagaaatgtaaattgtcttatactgttgatgaaggttaacttaagcaacaatattctggaaagcaagttgtcaacttagacttaaatacattttttaaaatctataacttctggagcatgtcttaacgtctgtgaaactactgtaagtgtcacaaactcatacacttataatactacttaatgtttttataatacttaacaaagttttatttaccaaagatttacttataaaaaacttataagctgtctgggcgcagtggcttacgcctgtaatcccagcactttgggaggccaaagtgggtggat

SEQ ID NO: 4990 - DNA, 580 bp, Homo sapiens
ccagtgttatcaaaaagataacgggttttgaacaagcatttggcactttgatgacaggaatctaaatcagcttcagtgatgaactcaataattataagattctggtttgattgagacatacacctatctttgatgtcctggtttggttcaggcatactgaggataacttagagtaatcttatttcttttggaaaggcacaagaatatacataatgctccaaagattcttgatgtcatgaaaatcactctcatcctaaaggatttgttagccagtgatccctctgaagcaagttcacatttattagaatttcagaacagtgtagataatgtggataattttagttctagccgcataaaatacccagaagtttattattacaattaaatcttgttttttattgcaaaataccgtggtgttctctataactgtgttgaatttataatgatctaattgagaggaatttatccccaaaggataagtgtttacattttttattttaaattattaagggcatatattattttaattacagagatagtatataagtaaaagattcattttatttaaatgttttcttaa

SEQ ID NO: 4991 - DNA, 571 bp, Homo sapiens
gtccataaaggaatatctgaatgggtaagagagacaaggagagttgggtcacccaaggcaagagagaagaacctttctagaaaggtgtagttggcagttttaaacatgccaggaaaatcaagtagcccaaggcccaagaaaaatctactggatctgagaaaatagaagctataggggaaaacattttgtttgaaaaaaagatgaagattcaaaagggttgacgattgaatggaagaccaaaaagtagagatatgtggttgattctgtctctttggagtaatgtcacttttaagtttttatttctaactcttataattaatatttcttgttctactaactactaccttcagggtaataaagtagttatatccacatattttcacctctcctttactatgaaatgactacttgtacattttcatcatttagctggaaattgtctttgaacttttgatagaaatgtgcattatcctatcatactctatttagattcccctttagaagtgacttatttcctccagctgctagaagtgttgcaagtagacagtttttagctgctgaactcctatct

SEQ ID NO: 4992 - DNA, 570 bp, Homo sapiens
catgtttatgatctcgtaatgattctaagctcatcaccatttctgttactgtgaatctgatgcttggcatttggcatcagctacagagtgcagggattcggtacaattttaacaattgcagagaatggccctaaaaataagaacttgtgggctggaatcatgttttatctgccaagggaatctgggaaggaaaacaggtgtttaataatgaagtggtatgaatttaattatcatctactttgagggtatcacacacttggcagccttatcaatcaaggaaggaaattaatgaaaaagttaagaactctctacagagaatacatgatgcagttagtaattttaaataggcatggttaggtcctgtacagatttgtatctgatcctcttagggggtgcggctacccaaggctgcatttttcatcctgtggtattaccttacctgaatataggactccagctctagatatcccatctataaagtcaaaataaaccttctcactgggtgcacacaaacattcttctaactgtagcaatgaagaaggggtcaaacagatggaagatggggattaa

SEQ ID NO: 4993 - DNA, 578 bp, Homo sapiens
tgataggattattgctaaaggcagaccagtgtgataagatgtggaggctggacagatataagtgtggaagacttttcactaaaccaatttgtcaggattcttgctcaaactggatttaataaggacagaaagagaagcccaaggtcgagcctagtgcagggaggactcagaggagcctgactgaggttttggtcaaaggagagtctttgtcaaatgttgaagtttcccttatcctacccctaacataatgacgttgggaacaaatcagaaaagaaacataattttagataaaagctggagcagccacaaactaacagcttagaactcactaccattcacaattcattcctttatatgtaaaaacaacctcacaacgtgctgacaagcaagtcttcctagttaacaataatcaaaacaaatgggaaatatatttgtaaagaacaaagcgaatcaaagaaattccttaaatctgtcattcagctagcatgcttgggaattattcaaaatactgctaggcttggtacaatggttcatgcctataatcccagcactttgggaggccaaggcagggggatcac

SEQ ID NO: 4994 - DNA, 548 bp, Homo sapiens
agactatacagagatttctcccctaactgactacacgtactccacgtcctatcctactaggacagtatgaaaagtcacaaaataccaagctagggactttctaagcttactaacaaggagataacctttccccagtggagctataagacatagacatgtacaagcagatgctaaaggagtagtgacagatcaagagaagttgggacatccacttgagtaagagtatttttcaatatggaagccctctttctggatacagaatttaatgccttgaccagtttccaaaataatggttccaacatgctgctagaaaggcacctagaaacatgagatgcaatgcccctacaccaatgagatagaattgacatagcaaatggtggaagaaggtattaaaagcaaagaagtgatcatgtctgagcagacacattaagctgaaaactcaccatatggtttatgtcatgaaaagtcttgaatgttgtatcatcataccatttctaacgtgataagaaatgtcctggtgaggataaagcagcatcactaagaagttt

SEQ ID NO: 4995 - DNA, 573 bp, Homo sapiens
gtctggggttcagtagccactgcaccagtactggggctccttcttcattatgccaaacaacaggagtggctgaaccccacaaccccagtggcacagagcttgggcccaggatcagctgtgactgcggacctgcacagcaaggaaaccaactcccactactgcacttccagattgcacagagcacccctggctccaggacttggagtggggatagactgcagtagaagtggttttgatgtctaaggtatgggcacacatggtgtgatgtgcagcttaggtctgaagcttggacatgcatggagcagctgccactccagggtctggggcatgcataggtttaagaaggtgctggcttgggttctgggcagcacaaaagttgcccttttttgggaaaggaatacacagcatctccctctctgagggttttacggtagcaataactattggttacctcagtggtgaaagctatcaatatcctctgcagaagaggccactggggaccatggtggcatctgccacatggctgatcctgagagcccctgccctttgttttcttcatagccatcgccagac

SEQ ID NO: 4996 - DNA, 567 bp, Homo sapiens
gaatcacaaagtctttaagaaaatggagacaggacctatagtgatcactactcacaaatcactagaatcacatgctgaaacactgctgcagaatatcaatgtgtggtctgttcccactgccattaacccaaccatgactttctctgcctgtcctggtatagaccatttagttcttgttaagcacagttttcattattttcaacctttaccaaccaaaaactactaaagaaaaagttaatattctaaggagtacagttaagagatatcctaacattctcactgaatcagccaaatataaaggctaacatgttaaacaggctagagcagttttcttcaaactaaagcagtagggccctggagttaacaagacaactttccaggaggttaggatagtttaaggagaatccggttaaaggtggtctgcttccaccgtactcccagagcttgatctgtctgagaattcttgtggtttgctggttgtccttcccatcctcccttataaatgtattcacttctcccacattacttcctaatcttacaattgttcatttcccagacaggtgcagt

SEQ ID NO: 4997 - DNA, 566 bp, Homo sapiens
gaaggagtaaactgcaaatctctgggccaagagtgtacagttatacttcatgagtaatatcactagaaagcagaacaacattcagtggtttgaagtgtagtattgaaatgctgaatgggttataaaattcatttgttaaatcactcatttattcaaacagccattaagaacatgctgcatgtcagaaaaagcttagtcgtcagaaacataaggagtgtgtgtatatgtatatgttctgtgtgtgtgtgaagagctcacaaaattaagcaactattacatcacaacaaaacttactgtactgaaagaaagatattattgccatctgctttctcaataaattcaggggatagttttgagctactactatatataagctagtaggaggtaaagataaaggaacatgtgtaacaataagaatttaaatgaaaaattgtgttttaatgctatgaattagagattgttaatttgtaaaggttgcctatgtatatgctgttttttattattaccacttcaatttttttcacctactttctactatcttggtttgctttccttagtctttaatt

SEQ ID NO: 4998 - DNA, 565 bp, Homo sapiens
ttttgtttgctgctatattctctgtacctggaacaggcctggcacatagtaggagcactatgttatttccagaaggaagcagtgaatgagatacaaaccagaaaagacagcagaggtgataaacctaacattatacaaagtgaaagtcaaggtgcaaattatgaacgaaacaaaggttttacactcatttttgaaagggagaaataacagtcacaagcccttaggtcctaaagtaaaaactgtctccccaaaaaaggaaaattgcaaatactacattgattttagaaaggttaactcccatcttggtcacatctcagaagcaaaaagtgacgtaaaagacttgaataaagaaattaatggccaggcgtggtgactcatgcctgtaatcccagcactttgggaggccgaggtgggcagatcacttgacgtcaggagtttgagaccagcctgggcaacatggggtaaccccgcctccactaaaaacgtaaaaattagctgggtgtggtatcaggcacctgtaataccagctactcaggaggctgtggcaagagaatcagttgaacct

SEQ ID NO: 4999 - DNA, 603 bp, Homo sapiens
actgtctagggattctgaatgttcaagatcttctttgctattattaaaggagagattaagctcaattaaaaattaccaaaaaaatcagctgtattgtcattagagggttaatcgaaattttaatgttatagatcatattaaccttttctaaataagagcaccttcatctgagtttatccttgtcagacttgccccttataacattaggcagaccatgactcctcttcaatcctaataggtgaagaagacatcaggacagcatggaagtgtgtccacaattactctgggttgtcacaaagatcttgactgttatctaggatgaccctttttagcatttgagcggtctctttaaaaatcaaacgaaatatatggtcctcgttctcataaaataaaacaaaaacaaagcaaaactgaaaagaccaagaaacaaaaaggtaaaacagatacacatgggattgttcattacctgtaggttaagaaaccctggtctgggaatatgagattgaatcagtgtaccagctttggaacatagtaagaactgaaagactaatagatgacagaatgttacagacgaattcacaatgagccatgaaggaataggag

SEQ ID NO: 5000 - DNA, 602 bp, Homo sapiens
gccctcatgcctgtgatcagtgagtgcagccttcctcgggagctatcatcaggacctgcaagtgagtttaaatgccagtgagcagagacaatgtattcaaaaaagactccagtttcagctcaaacattcccctaggaataattttggcaagagatctattctgaattcgtggtaggctgggggcaaagatgagagaaagaagaaaagggaagtctctctgaaaggagctttgaccccagggcttagaaacggagtctgtcttcaagcttttggatgctctcgtaaaaagggtttgtaaataatttagcacccccaagtagtagattctaagtggcaaacagcctgctgagaggagggctgtagaggccccagggaaaagagaactcaggacaaccagcttcacaagagcagggaccatggctgctggtcaccaccatacccccagcacctgcacagttcttggaccatggcagatgctgctcaggggctacttgcgtgggtcaacatctaagggaataaacaaataaatgatttatcattagggaaaaaagcatgccaaaaacaacagcacatacccataatcattccccagttttgacacc

SEQ ID NO: 5001 - DNA, 510 bp, Homo sapiens
ggaatttatgaatgagagtgctttggctgcaaagcattcccattatagcccctcagccaccacaaaactgctgtgtaattggaagggaactttttcccatgcaaaaaagcttgctgtcggcgccaacccatcaaagccatggcatggagggatgcacacctgcaggtagcctacctcattcatggggatcctggtccctgcctgcatcttctgctcacaaagggatctggatctgagaagatcagatcacagaagcagggaatgaggacgtggcaaaccttgacggtcctttcatccactcaattcagaggtgaggaaactgaagctccaaaaaaagcaaaataaacaagtcccaggtacatagcccatcaaaggcaaagcctggacccgaagccagcctttctcttgcatcccagcccatccatatatctaaaagctgaccctatttcagtgtttatttacctaaaactatgatcaatgaattcaaatatcctaaatgtcattctggct

SEQ ID NO: 5002 - DNA, 577 bp, Homo sapiens
aaagttcattctattttgatgggtttgcttccctggtttattgatgcatgcctttgtttacaatatgaatggtaattcttcactgtctgtaatgaatactatgcttactttacaaaattaaagtgaagaattctttctgtctagagagaaaatattctgtgtcttaccagaataattttctgtgttatatgatgaccttataatgtctttgattatttaaggagaaaaaaaattcctcatttatgaaagacataagggttttttctaactgcattgctgttagtatatatttttaaatgttttattgtcactttaattaaataggtaaccaaatattgcttcttaggtatccatggcctctcgtaagcaagtgtccaaactgttctgataactgttaaaaatttaccttccccaaataggatcctaaatgtagaaaaaaatgaaataaaagtttcaagattttttttacacctaaaactttcatctttgagatttcccagaaagctccggggaaaaaaaatgacaaggttttctcttttactttataaaaaaagaagtattagaaataagtgggttt

SEQ ID NO: 5003 - DNA, 524 bp, Homo sapiens
atgtgagaaataagttccaataaattgctgtgcccttaagaaagtcaaaaaacaaaccctacaaaatatctagaagtcaaaaataagatcaaagcacatacaagatgatgaaatatattcaaatatatccatacttcactaaatataaatggactacatgctacggttgtactgttggagaaaaaaagcaaatccacctacaggagatttacaaagacacttgaaaaacacatggatttgaaatgttgacagtgacagcacagaaagttcaagaaaatattaaataaaaaaattgaaagccatgatagctagagtaataacaagtggcctttgacatcattttttactgcttctgccacactatatcccgtaagtcaccaagtcctatgttaaatgtcttttaaatatttcttggttggggtgattaaaaccttttggaaatagtggcgatgattgtacaacatcataaatgtaatcaatgccactgaattgtatgcttaaataaggctaaaagggcaaatttt

SEQ ID NO: 5004 - DNA, 496 bp, Homo sapiens
  misc_feature 427: n = A,T,C or G
gtatcagggggttctattgtgcagccaagtttgagaaccatgcaataggtccaactcattcaggaggggtgaaagtctaaatgccaaatgtagctgctccatgtctctggctctctgaggtcatttgtttattcatccaacaggccactcactaatgggtttccactgaggtcacagaaacacaatcttttgagtattagtgtaaaaactcccaactaaaccagaaaggacatcattaattcatttattcatttgataaacactgacttagaccttcatctgccccagtcactgtgatatgcctgggaatactgagttgattaatgattaattctagtgatcgagaagctccagaccaataagaggaatggatttcaacataataatatttactccctttacttttactgagtattctatgctaganactgcacttagcaatttgtccacattatttatttttatcttcataaagccttctgatgtaagcagcatt

SEQ ID NO: 5005 - DNA, 598 bp, Homo sapiens
cggtggtagattctgggtgcttatcacaagggacagtaagatagtgtctgttaagaggccgtttcgagctactgaagtcttgctctttttatgggcaagagtcccctggttaggactgatagtggaagaatgtgcttggtcatgtctttatctggctggatgcatctttattgatcaggcaaaatatctgatccctgctggcaacgtgccttatgaaatgtaagatagagtctttttctaagatggagccactaatgtcaagggtgctgtataaatggcctctgtgtgtttcctctttctgtttctcatccttacccccatctcaaaatatctaaattctattcatcttaatgcctgaattaaatagtatctccttcagaaatctcccctggtttcctcagctgaaggagttgtatttctcttctgtacgcctacaggcattttatctgtggatctataattcacttatttatacaattatgattcaattctcgatataagtgccttatccttcccactttaagcaactcagatgtgagattatgtcctcaatcatttacaatcccaagcagagttgctggcttgtgacaggctcaca

SEQ ID NO: 5006 - DNA, 560 bp, Homo sapiens
tctctgtaactagtttagtttagacaatgaagaattcaacgcaggttcttgtgcaagaagccagcatgggaaatacagtgttttagagatttattggtgggacacagaacagttaatgacgaaaggaagatgacaagttaaacctcagttcttgcactaactagaggtttgtgactctggacaagttgtcagaaacctctggcctcagtttactcaaccacagaataattcctcctttacaagtgttgcagtgaagatgttgctcctttatatctgttgctagcccacagatgacaacaaagaaatactggctattggcatctgggaacttcagaagacaaaatgaagcctagggataaaaggggaagaacaggctgggcatggtggctcacacctgtaatcctagcactttgggaggccaaggtgggtggatcatctgaggtcaggagtttgagaccagcctggccaacagggtgaaaccccatctctactaaaaatacaaaaaaaaattagctgggcttggtggcgggcacctgtaatcccagttactcgggagcctg

SEQ ID NO: 5007 - DNA, 315 bp, Homo sapiens
gtcagcccgtcccttctgccttggggaccagccaggctttttccttactggaagctgggggactctagctccccatctccttgcacacacacacacctgcacacacacacgtgagcccaccctgcagagcttcagcatactcaaatcagaaggcccccttctatttcagtgccttcaagggcttccgaggtcactctcccagagaccagaggccttaagacatcgcccagagtcacccagagtcacccccccgggctcttccctcccagggtctgaatctttctttaaaacagagtctcagggtgggtagagggg

SEQ ID NO: 5008 - DNA, 493 bp, Homo sapiens
gtatcctgtaattttaagaaacggtttgcaaacctgagtgttcctcagacagagtggcctgtaatgagccagcccaagaggctgacacccaggtgcctccaatctcatcgtgtgtggtgcctaacagcactatctgggtaaatccagagtaggttactcatctgtttacatagctaaggtagaagtggacaataagacctcaagtataaggatgacagtgttaggattattagatgcatctactgatagcccgtaaaacgtgtaagacagaagcagaaaacaaacttacttgcacacactagtattaatattgtgacagctaacagccagttgtttctggcttttaagaagttggggctggacgctgtggctcatgcctgcaatcccagcactttgggaggccgaggcaggtagatcactcaaggtcaggaaatcgacaccagcctggccaacatggcgaaaccccacctctactaaaatacaaaaatcagct

SEQ ID NO: 5009 - DNA, 511 bp, Homo sapiens
agagtcaggaactagatctttcttatcgctccagaatttagtacagtcacacacagaagagcgtagatactcaggaatgttttttaatgcataaaagaggaaaggaagaaaggaaaaataaaaagaggtgttatatccatctattcatatccaatgacctgtccagattcatcgttagggccactcacgtgcaaggtaaatgacacatatgaaacaaaatctgtggataaggagcagaatgatgagttgggggtagagcaaagcgataataaaataggggatttgccttatttacacagactttaaatacgtgagttaaaaagcctaaactttcagagacagagaaaacaaatgtggaaatacagaagagtgtgatgttgaggctgtccaccctagctgtgccctccaagtaggtaatgttcagtaccaatcactctgcattgacttttcacataatatccgtggtcataaatgtggagacagttagcaggctgctaaacagcagtacatt

SEQ ID NO: 5010 - DNA, 485 bp, Homo sapiens
tgcatactttaatccagcctcagttggtgtgtctgggttttctggctaggaagaatgctgctgtggaatgtgctggaacagatccttacgtgcgctgtgttggagtctttccaggtcaggggttctcaaacggatttcaggaccctttacatcatccagaatgatccaatagccccaggagcctgtgtctgtgtggattatgtctgccggctgttagtgtgttagaagttgaggccaggcatggtagctcacacctgtaatcccagcactttgggaggctgaggcgaggatcgcttgaggttgggagtttgagaccagcctgggccatgtagcaagaccccgtctctacaaaaaatgaaaattagccgggcatggtggcgcatgcctgtagtcctagctactcgggaggccaaggtgggaagatcacttgagcctgaaaggttgaggctgcagtgaaccaagattgtaccactgcattccagcct

SEQ ID NO: 5011 - DNA, 493 bp, Homo sapiens; identical to SEQ ID NO: 5008

SEQ ID NO: 5012 - DNA, 530 bp, Homo sapiens
cccagcaggatttatggccagtgaggagggtactaactgcataggtaatggcagcattcttcctgcttacaaattcttagatctgagtttttagatcccctaagactatcatcagttcagtgcttatccagacaacccagaattttttattaaacaattatcatgacagcagtctgctagatcccaggtgatataaaaatggatttttttcccctaacatttttgaagaaagagtgtcatatatgtgcatagacaagatacgttaaatgttacttttggaccaccctgcatgaatcaaaactggatgattttgatgtgtgtcaaacaaatcaaagggaaagtagaaatcagttactggccaggcgccatggcccacacctgtaatcccagcactttgggaggccgagcctggcggatcacctgaggtcgggagtttgagaccagcctgaccaacttggagaaaccctgtctctactaaaaatacagaattagccaggcatggtggtgcatgcctgtaatcccagctactt

SEQ ID NO: 5013 - DNA, 615 bp, Homo sapiens
tagataattatataatcatagtaatcatgtttttaggccaggtatggtggctcatgcctataatcccagtgctttgggaggctgaggtgagagaatcactcgagtccaggacttcgagaccatcctgggcaacacagacatcatctctaccaaaatatacttagctgggcatgacatatcatgcccaactaattattaataacatcccagctacttgggaagctgaagtggaaggattgctggagtccaggaggttgagtgagctatgactgcaccactgcactcgagtctaggcaacagaggaagacctcgtttccaaaacgaaacaaaaacaaaaaaacaaatacctttataacatttccacaaatgataacagtagacataaagcaactgataaaactaattgaactagagaactagacagaactagttagcacagatagaactagaacactgtcaattaccttgatctaattgatagaaagccaacaactagaactaaaactatttttcatgaaaatcattcaccaagacagtttcaggcaaaataataataataaaagcctcattaaaactaaaacaattataaatatattcccaaaaaaaaaaaaaaaa

SEQ ID NO: 5014 - DNA, 551 bp, Homo sapiens
ctttacaaacaaccaatgtaacaaatatagggaacagcaaaaaaattaatccacaagacttttgcaaaatatgggttctaaattaagaacttatagagttcagcggaccttgctgtgttcctgtgcaaagtcagtttagatattaatttaacatgcaagcaaaataacaggagaatgacctctgaccctttcatcagtgcttttcttctcccatagtgacccactggtcaaccaacagtcagtaacttaggcagtaatggaaggtgaggtcaggcatagttcatgtgcttctgtaatctctttgcatctctgcgagttaaacttcttagaaagctttttcaagatgaaatcagcttgccaattttcccccttcctttcagagaaatgccttcaagcacttgaggaaaaccactgtactcatcattttactaatttacatgtcatgtagtatttatcatctttatacctatttcacatatgattatacctatttcacatctttataccttgttcacatatatttcatgcttattctatgtataaaccatagc

SEQ ID NO: 5015 - DNA, 520 bp, Homo sapiens
  misc_feature 449: n = A,T,C or G
tgcagattctgagttaaaagtctcctctgttccttgttgtgaaaactgcttgttaattgaaaaacagtgacaaggtcctataaggtattttactttaaaattatatacaataaaaatgtttgctaaatgaagaatcatcataaaaccaatttgttttacagctaggagagacttttgtgtttatcaaacctgttatttttactttctttggcaagtggttgattctttttcggggcaaaaaaatgtacactatgtaccaggaacaacttatcatatcaagaaatctaggtagttactaaagactactggttaggtctaaagggcctgggggcgtaactaaagatgctgtccctgtccaaattaggataatgttagcatcaagttttcaatcaatagcttgatcatatcaaatatacttaaaatcaggagttcataacagtatataacanaaaaggctggactcagtggctcatgcctgtaatctcacaactttgggagcctgaagtggaagggtcacctg

SEQ ID NO: 5016 - DNA, 512 bp, Homo sapiens
cattcatcactatttttagtttaaaacaagagcaacacatctggaaggtattggcttttcaagtcaactgctggaaagacagctggggggtgtccatttcaggaggcttaccttggtatcctggggtcgtgccacgtgctaactccagtctgtgtatgcaaaaagtaaacttggccctggactgttgttctttgttctacacaagaaattagagatccaaatgagacaagttcaattccagggagagtttgtaaccaaccctcgatgccctcacgtctggtattatctaaatctagataacactcccctcttatcccagttcttctctctgaggtggccgaataatcccctcttctccatctcgccccatgctctcctttccagagcactacagacaccctcatctagcctacatgttaccttggtttgctttggtgttcgtttgcctaagattttcacttgatttctaaactgggagatttggagcaattgctgaaaattcatgattagct

SEQ ID NO: 5017 - DNA, 415 bp, Homo sapiens
aactaatgcagaattgatttttttaatccagtgagtttttattttttaattagttaattttcatttattgtgactgatgattgcatccattttttgctatcttattttgaacttagtttctgctgccttttctgttatctttttttgcctttcttattccattttagccacttgtaagtttagcaacttttgtatgctagttttaatactattttattttatttcattttatttatttattttttttgagacgcagtctcgctgtgttgcccaggctggagtgcagtggcatgatcttccctcactgcaacctccacctcccaggttcaagcaattctcctgcctctcagcctcccaagtagctgggattacaggcgtccaccaccacgcccagctaattttgtgtatttttagt

SEQ ID NO: 5018 - DNA, 471 bp, Homo sapiens
aatgatactgtgataaaaggcatccaccagcatgaacttcatatgtgactttgctgttagatctcaggaagatgtaaaaaggcagtttaagatcttttatcccaacttcctggataataaaaagatagtaagtttaggactttataaaagaaataaaatcaagaaagaaatggggcatgaaaaagaataaggttagacccttagtttataccatatataaatattaactcaaaatgggtcggccgggcgcggtggctcacgcctgtaatcccagcactttgggaggccgaggcgggtggatcatgaggtcaggagatcgagaccatcctggctaacaaggtgaaaccccgtctctactaaaaatacaaaaaattagccgggcgcggtggcgggcgcctgtagtcccagctactcgggaggctgaggcaggagaatggcgtgaacccgggaagcggagcttgcagtgagccg

SEQ ID NO: 5019 - DNA, 563 bp, Homo sapiens
gtcagctatctagaacattcctatgacgttgtttctaagcaattagaagcctggaatattttgagtggtctgaaacactttcctccacaaaacagatgcctgttttaccagtttttcaaccccattgtgatgatatatttctttgttttttaatgaaactgttgtgctccttttcagacagccctggtaattctactgtaatataatctccacgaagataggtaagtggtctattttgtttacagctgcatcctcagggcttagaacagtgcttgatatacaataggatttgaatacatgcatgtggaagaaatgacttccgtcaggactaaggtacttacacaaaagtatttacggcctgcccggtggctcacgcctgtaatcccagcactttgggaggccgaggtgggcagataatctgaggtcgggagtttgagccccacctgaccaacatgaagaaaccctgtatctaccaaaaatacaaaattaactgggcgtgatggcgcctgcctgtaatcccagctacttgagaggctgaggcaggagaatcgcttgaaacaagg

SEQ ID NO: 5020 - DNA, 510 bp, Homo sapiens
aagcctccggagattcccttcatgggatatcttcccgcacactcagaaccctttcccaaccacatgggacacacctgccactggacctcgaggccgaggcctccttccaaaccccagccccaggcaaagctttctgcctcccttgcaggtccctctcaggggatttcaatactcgtggaacctgccttccttcaggagttcttacacccgcgcctgggcttgtttattccctcaacaaacgcctgctaggcgcggaccctgtgctggtgggcaggtgatggtgagcgagacccactccaggctccgggacctcatggagtggaggagctgggtaaacaggtgggtggcaattcagtgcaatgaacactactcgggagtgtagagagccaggtgggggaattgccaggggatggtgcaggcagaaaaggcttataagggggtcattcacatggggtcctgaagggtgggtaggagcccaccaggccaagggtagagtgcagcccatgcacg

SEQ ID NO: 5021 - DNA, 591 bp, Homo sapiens
ggaaccccaaacaaggcatgcctcaggttgggtcacacaacgtagcaatgtcctcctggaggaaacgcctatttctgcctgttgttaagtgtactctatgaagaacccacatggagtggtctcatccacctcagatccaggtagagaaaagtgggacctgggggatgggagctcaccaggcgtctgcagtgttcccgtgctaaaccctctcacatcacggatacccagcatggggccagagactcccagacagaagcagaaagaggagggcatctctacatgaagaattacaaccagcaatcaaccactactgacaactgtttaaacacctcatgattctgaattaaagacaccaagcttctcaaatacaagaatgctaaaagaggccgggtgcatgggctcacacctgtaatcccagcactttgggaggctgaggcgggcggatcatgaggtcaggggatcgagaccatcctggctaacatggtgaaaccccatctctactaaaaatacaaaaaattagccaggcgtggtggcgggcgcctgtattcccagctactcaggaggctgaggcaggagactggcgtgaacccg

SEQ ID NO: 5022 - DNA, 501 bp, Homo sapiens
cacagagaaagacagagacagagagaaagacagagatggagagatagaaacagagagacaaatgggaaagaacaaagtataccccaaagtacagtctgctagcagtagcctgaagtctttctgaccacttggcagcagcttggaaaatgttcctcactaccttcatggaacctatcatagcataagaaccagcccaaagtaaatggatgggactttgaatttttgtttaaaaatgatggcttgtgcctggtcaaaatggtgtgtgaatggcttatgcattgatatatatcgattggcataagtcagagcgcttcagacctggtctcggtctaagagatcctcagtggagacgtggcgtctttggtcatctaaggtccctgcagcatcacaaagggaaagggcggcatcttctagtgtttacacagcccaacagaaatcctgtgttcttgtaaggaggtgaccaaggtggacctgaacctggattttgtctggttttatctg

SEQ ID NO: 5023 - DNA, 481 bp, Homo sapiens
gtgggggaacctcctacagaattattgagcagtgaattggggcatttcttacagaattattgaacaatgtacttttatcacaaaaaagaaatttggagagaatctagttcgttctgttaaccccccaaaatactgaagcttttgggaattatcatgcttgaggttgcttactgaatgctggtcttctgccgctagcagcaatgcttgtttcatggtctacaatgtgcagcatcactatattctttcatttcccataaacagttgtgaatggaattccaagtgcggaaaatgggatcaaaatttgatgcaaactagtgaagatgtttgacctttccatctggctcagagcggagcagttgttcaggtttagtagcctcaagcaattacctgagatcttaagattagcatgttatgataagaagatgtaatatttcatgttaacaactgagtggggaaagggaagcatacataccgcattagt

SEQ ID NO: 5024 - DNA, 508 bp, Homo sapiens
tatataaagctgagcgtgagttaggattctggagaccatggttgcttatctcaacacagaaattgtttggagaaaaattgtctggcaaccgatattagtgtaacgtttctaagggattaaactggttactaatgtacaaaaaaaatcaaaatattttgtaatttcgtgaattggatctaaataaaacctgtaataatgactatgaaatcaaatttctaaatagggggaataatcttctgccgtcattaaaatgatgtgccatttagaatatttttttctaatttcttgtctctctttaaagctcttccataaatcatagaaatgaatacttatgattttggggatttttttttaccctgataaacataaacttaaaatttagggagctttttaacatttatgtttatttttataattaatacaaaattacagaagaaatgaataataatatttccagttaaacctagctttagtaaagagatgtatattattaatttatcctctcaag

SEQ ID NO: 5025 - DNA, 582 bp, Homo sapiens
tgggagacactggccctttttcttcctcttcctcatcatcactttcattttctgtaaataaattcagagaagcaggtcacattaagcaattcatacttcacatatgaacaaatcactgtccagtcatagcacaaggacataactattctcagtgcaagaataaggattctgacaggaatattctagggtgtcctagattaactttggtgagaattagatgaccctgctttccagacccacaggccaaaatctccctctacgtgtagaccataatgccatattccctgcctgagtcaaagttaaacaaaattttttccccaaaaaaatctccaaaaattggtcaaacaattttctaagagtgttgctgcgatacggacttatatcaccaggtaacatggacattaaatgtttagaggcatctatacatgaaacacgactgatagataaatttgaacaactcttgctttaaaaagaatctgtgatttgggaggccaagacaggtgaatcatttgaggtcatgagttcaggactaccctggccaatatggggaaaccctgtctctactaaaaatacaaaaattag

SEQ ID NO: 5026 - DNA, 434 bp, Homo sapiens
agtcaccctgagagtgaaacagatacaaagagagaatgaccctcacagctacagaaagaaatgaaatggggcaggagaagagggggaagaaagctaaataactgatttttttaagaatgccagattaaggccgggcgtggtggctcacgcctgtaatcccagcactttgggaggccgaggtgagtggatcacctgaggtcaggagtttgagaccagcctggccaacatggtgaaaccccgtctctactaaaaatacaaacattagcaagatgtggtgtcacgtgcctgtaatcccagctagtagggaggctgaggcaagagaatcggttgatgctaggaggcggaggttgcagtgagctgagagggcgccactgcactccagcctgggcgacacagggagactccatctcaaaaaaaaaaaaaaaaaaaaaaaa

SEQ ID NO: 5027 - DNA, 506 bp, Homo sapiens
aatatagtatacaatatctgtcacttctctatccatttggcaaagacttcatagagacaaatgttacagaggctcaaaaatggagactactagaaaaatgaccaaagccagaaataaagtatgtgctaattagaaaacaaataattaaatggcccaacccgaatgttgtgtgatgctgaaaagagataaatttctaaggcacaccatctgttttacagtttattttgctgtactacaaacctactcaatatagttctgcagtgatctagctgctaactcatttgcacaattactttaggccagaaataactgttgcacagaatcctttgagagagcaacacattcatggaagagggcaaacataattcattcttgggtgaagactatttttagcccttaaagaaaaaaaagttattcaaagaaatgattagaaattgccaaaggaaaattagataatttaaaaggagagtgatatcactatatatttatgtatctaaatttatctg

SEQ ID NO: 5028 - DNA, 463 bp, Homo sapiens
tgggattacaggcgtgagctaccacacccagcccatgccatgcctttttgccattatagtcgaggcacttggctttgcatgtttatcttttatgttagcgatcccaatgacttcatgaagtgacttcatgagggtatccacacctgggttccaggtctcccccgcgtggaactacagagtgagtatggcatgtgctggagaaaacaaaatatgtgctggccgtgtccttggggaagatatttgatccctaaagatgtgattgcctcatgtggctctacaaaagagttgtttagagtttagcatgagcaattgcacagcacaaactctctgttgtttgcgtgcattggggcagggcgtccagagccgggggcacttcagaggatgtactggtgattttaatataaaaacatccaaaacaattagatgtaaatatgaggaatgggtcatattacctatttaatgc

SEQ ID NO: 5029 - DNA, 512 bp, Homo sapiens
tgtttagtaaaccaggtttagatttcactcttgtacatttcacccattatctaggaccaattaaacatttggcactgaggaataattcagagcaacaactcctaggggagaactagattgtctggttggtgatcaaaaagaattaaagcatctctgaaggcaattagtccccaacactgtgaccaaggccctggaggtggggcatgttctttctgccttccacacaccgcttcaggctgaacaaggtgttattttttaaccctttgtgaattacacttctttaaattcctgtgataattattccctatttcacaagggtgcctttctgtaacatcttgaatatgttacacaaatagtctttcttgaggcaccctctggtgataatactaaagatcacaatcaaaaacaattgtgcccagagtagaagtaccactttgcatttaggttgtgatccactgaaaagtaaattaaacacattaatatttctatttagggaaattctgacaagtaat

SEQ ID NO: 5030 - DNA, 285 bp, Homo sapiens
ggagctcaggagcattcaggatttccatgccccttctctctgcatcctcctgcctctaatctagctatagcaaggacactacagcagttcactctttaagagtatttctggttacccagtgaagggtgggatcaactctcccacccaaaactgggttgggtgtcaagactgattcaccacatctcaggagggtgtggaaagatgtattgctcacatgaggctttctggggagagcagggcagccatccaaacgggtctagtttttattttggttggagagtggct

SEQ ID NO: 5031 - DNA, 468 bp, Homo sapiens
gaaaaccaggaaaatatactcaggagtcaagagcagacaatgtttcaagaagtcctaacagcattaggcatacacacacacacacaaaatcaaagctacaatactacggtattcaatagaaccatatgcctcagatataactcaatccctttatcccaaaatctaattccacttcttacagtcccaacctgatgaatggcatcacccagtcacctaatccttctccttcacccgtatcaatacaccattaaatccaaaagattcaactcattttatatcttttatttcttatctgttctttcctccatatggcttccaactaaattcaggtcttcatctctcagcaggatattgaaataatcccttatttgtacccctgccccttggcttagtctggtacaacccatcttctaccttggtgccagataaaaatgtccaaagtatgtatttgattatattactttctct

SEQ ID NO: 5032 - DNA, 587 bp, Homo sapiens
acagaagggccagcccccaaatttgtgtgtgtgtgtgtgtgtggagacagggtcttgctatgttgcgcaagctggtctcaaactcctggcctcaagcagtcctcctgcctcggcctcccaaaatgctgagattgcaggcataagcctcctttataccctcaaaactttccttttctctaatagctggaaaaagtaggggtcagaagtgttataatgattttacaaaactatcataattaaaatgggtatccagagacttatcactcttcttttttagattcctgtcttttcagtttaataaaattcaagtaaccaggctttgatatttttgtattagtatacttcacagagatgtctcacagatttttaaaatctgagctttgtttttgttttgttttgttttgtttttggccaaagaagggctctggccagtagctgaggaagcaacaaaagaaggtgacagagacctactatgtacccacgataattaaaaatttaaaaaagagggctgggcgcggtggctcatgcctgtaatcccaggactttgggaggctgaggtgggtggatcacctgaggtcaggagttta

SEQ ID NO: 5033 - DNA, 574 bp, Homo sapiens
gtatttattaagtatttaccctgaaataagtactgcacgaagcatattcattcagtattgtccagttgctcttagcatgaagtcactggtgtcaccttgatggcagtgatgagacaaattacttgtttcacctctttaaacatcagatagattgctggggacaaagagacagcatggcttccaaccattacacaagtcccccttctgcagccaggatcatgtctaggatgatgcagttatggaagacagcatgctgagtttctattaatttgatgaatcaccaaattgagaccagtggtggtggtgtccagggacaaagtgaattgcttcagcagtgggtagataacccactgtttttcagttaactttttcagcaaggtaataatttccttgggatggtatccaaagggtggcaaacctctccctaaaagtagtgtagatgaaatctaggctcagttctgtagctattttctttaactagcactctaggaaccactctaggaaccagtattacacttacatgaggacttgtgatgacctggacacctcttttgttttctacgatgagagtgag

SEQ ID NO: 5034 - DNA, 555 bp, Homo sapiens
tactccattgttattcttaggatagtgagtgagttttcatgaaatctggtggttttataaggggcttttccccctttgctcagcacttcaccttcctgccaccttatgaagaagaatgtacttgattccccttttgccatgattctaagtttcctgaggcctccccaaccctgtggaactgtgagtcaattagacttctttcctttataaattacccagtctcaggtagttctttatagcagcacaagaatggattaatacaccaaccaatagggagcttgagaaacttagctttccccattccaactcccacacataaactaccctccgtgcagctactgcttgctgtcaccctgtcctggatgcaacttcctgtttgttcttgcctgtcaaccttctcccatttggatcataaataacaaagagttctgcctatcctctctgtcattgagttgtatcttctcaaaagaacctttaaatattagaaaacaacttgcaagatttcaagccaactccaagttatgtcacattacacctgcacacccatacccaaca

SEQ ID NO: 5035 - DNA, 569 bp, Homo sapiens
acgtcaaaaatatgtgtgctaaagaaacacagaactaaggaagtctatttacctgatagaccgcctcacccacggggctattttcactgctgtaaaagcgaaaacaaatagaggacaagtcacagtgccaagaatacaggacttcctcttgcagatcctcttttttccaccctcactgtagctctggggaaattcctattcagtgggagaagtttaagtcacaaaacggcaccagcccattctcaaagtgctattatacacctctgagcagtgaggatgggtaatgtcagcaaaatatgcactgtttattttcttgaaaattaacttgggctggaaacgccttccagctccttcctctcagtggattttccatttactgtcttcaaccacctgggcttgtctgtacctcctccacagctctactgagaccctcctgtttgtctgaactatgtcctcatgttccttctgccacatgtgctcaggcctcagtttttccatgaaactttctctaacttagctgcctcctttccactgttctcaagccctttctggagttacaagggcattag

SEQ ID NO: 5036 - DNA, 526 bp, Homo sapiens
tgtataggagtatacctataggtactcctatacatttctacacagtggagaagccaactctgggtgaggtgaactactgcatgcccatgtatccggctagagaaccaacttggaaattatatcctcagtgtatccaccctccaaccaccatatacatatacaattagctgaggaaacagcttggtggaccagttcccagaaatgtcacaccaccattgccaaaaactcccacagcttaggccaccaaggcactcatacctatctctaatttggagtatgtctgatgaatcagcacaaaaattaaattactgggtccacccagaaccaaagcaaatgcactccactcaaccaacaccatgggacccatttatggtaataagcctctctttttaggaaagctgctcttgtgtttctacatttgccccctgcacatgtggtagaaaaattgcttcttccagttttaacacatgtgcaggggtaaatgtagcaacagaaaaaaacgtggcaaaggaagaaaacatgacac

SEQ ID NO: 5037 - DNA, 486 bp, Homo sapiens
caatttgttctatccaggaaatagcaatattcttttttccctgagagcaaaaggccattctgaggattctgaggaaaagcccaggtctatggtcaacaattttctatctaggagcaataggcttgcctgcttgggccttacacaaaaatgctgcatctatgttttcattgtcaaggcaggaggtgataccagcagttctcagaatctgaaagaaaggggctggggacagtggctcatgcttgtaatcccagcactttgggaggccgaggtgggtggatcacttgagcccaggagtttgaggttatagtgagctatgatagtaccactgcactccaagaaagaaaaaaaaaagcctgggggtggtggctcatacctgtaatctcagcactttgggaggcggaggtgaatggatcacacggtcaggagtttgagactagtctggccaacgtcgtgagaaaccccgtgtctacccaaaatacaaaaatt

SEQ ID NO: 5038 - DNA, 529 bp, Homo sapiens
ctccagggcagggctgggaagaggacttactgaaaacaatgtggatgtttcatttagacatttgttcgttcgttgtactgtggtattgggtagcactgagcacctcacccccacaagccaggtccagcactaggccctgggctgccaaccaccgcaaggcaggcacctcactttaatggaatcaactaccacatttacaaatgatgtacttcaaggccgaggcaggaggatcacttgagaccaggagtttgagaccagcctgggtgacatagtgagaccctgtctctatttaaaatgaaaatagaaaataaaaatataaaaaacagacaaacaaatgatgtacttcagtggcagaggcaaggcattaggagagtctggaaaagggagtgcagaggaggtaacatttgtactggatctgaaaaaaataaatcagaggaccagccgcggtggctcacacctgtaatctcagcactttggaaggctgggggtgagggcagatctcctgaggccaggagtttgggaccagctc

SEQ ID NO: 5039 - DNA, 554 bp, Homo sapiens
caagaaaaggtgatcatcacaaacctgaagctcaggcttaagacccctgagagtcggggagatgtttcaagggattctggagaacatatctatttttatcatcatactgagatgtcactggccttttttaccttgctaacaattgcactgatggtgcacaagcgacaggcaagactgctggcatgttagacttgatcaaggcagtgacctcacactgtacaactacttattcatcttttaccatgacatggtgagcaaacaaagtgagggtaaaagctggtttgttagtggtaaatgaaatgccttggagaatgtgttttgtaggaggtaaattatgaggataattgcattatgtttaaatagttttctcagacatcagtgaaatgggaaaatggctatgtgataacacagaatagcccttatgaaaacaacagttggccgggcatggtggcttctgcctgtaatcccagcactttgggaggccaaggcagagggatcgcttgagctcaggagtttgagaccagcctgggcaacacagtaggaccccatctcta

SEQ ID NO: 5040 - DNA, 562 bp, Homo sapiens
ataacaatagtcctatcaagtggtagaaacttaagtccccatgtttcacagatgatagtaaggtgcccgacaaggaaaagagctaaggagtttgagtttctttcccttcagccccctgctgctttcatgacaccatgacatttccctggagagagaaccccctagaaaggtatcaggtgatagcatttaggaaccttctgctgatttgtgataagcttattccagtgacttagccttaatactaagcttatcctagtattaatgattaaaaggttggatgaagccaggcatgctggctcacgcctataatcccagcactttgggaggccgagacgggtggataacctgaggtcaggagttcgagaccagcctgaccaacatggagaaaccccgtctctactaaaaatacaaaattagctgggcatggtggcacatgcttgtaatcccagatactcggcgggctgaggcaggagaatcgcttgaacttgggacacgcatgttgcagtgagccgagatcgcgccattgcactccagcctgggcaacaagagtgaaactctgtct

SEQ ID NO: 5041 - DNA, 523 bp, Homo sapiens
ggagagctcattccaggcagtgagaactccaagtacgaaggctctgacgcatggcatgtttaaaggccccttcaaacaattttatggcaggaatagaaaggggaagaagagtgtttcaaggtgaggatggaatgtagactggaccctgtcagcccggttattcaggttttagcttttaaaagagaagttataaaatagttttattttatagaaaatgaaagtcagaaattaggacatgataagtactgcatagctaaaacataatgttcactgcaggttagggactgaaatcatgagaggcaactatgggaccgggcatggtgactcacgcctgtaatcccagcactgtgggaagctgaggtgggcagatcacttgaggtcaggagtttgagaccaacctggccaacatggtgaaattaagtctctactaaaaatacaaaaattaccttgggtgtggtggcacacacctgtaatcccagctactcaggaggctgaggaggcaggagaatcacttgaacatggg

SEQ ID NO: 5042 - DNA, 570 bp, Homo sapiens
tcagtgaaactctaagaatagagaagatgtaaaagttacatttttgatttgtgtgagtccgaggtaagacagtgtttgacagccgagagagtgctgggcctgctttgtagtgttagctctgctccttgcttgtgagacaacttaggatgttccaaccgctctgggcctcaattcactctttgtaagttggaaatcagttatatctcatgtaccaggctaactataaagactatatgacattttatctgattctatgtgcatttgtgagaatggtagaagttgaaaagggtcatctccaaaggaggggggagagtcagagtctggccacttacgcagctaattcacaaagcagagggtatttaaaaagtaagaggccaggcatggtggctcagcactttgggaggctgagggggtggatcacgtgaggtcaggagttcaagaccagcctggccaatatagcgaaactccatctctactcaaaaaatacaaaaattagccggccacagtggcgtgcacctgtaattctagctactcgggaggctgaggcaggagaatcacttgaacatggga

SEQ ID NO: 5043 - DNA, 499 bp, Homo sapiens
aatatcatcataaaaaagatttccaaaatagcacatctatgttctttactgacacatatattccaaaactttgttaatatagggataagaatcacccaatcaacaaaagctgttaatacgcatacatgtaaaatataaaaacattcaaatgctaattccaactccaaataggaggctaaggttaatttccctttaactttacaagttaaattccataataaaagttttataaaacaaattctaaacctcattcaacaatatttactataaccaaaatgtcaaatcaagagtttgcatttgctcttggaattcaccaaagaacaggatcattcttgaaaagcagactaaggcatggctactttaaaaggaaaatgatccacagccaggcatggtggctcacatctgtaatcccagcaattctggaggccaaggcaggcagatgacctgaggtcaggagtttgaaaccagcctggccaacatggcaaaatcccatctctgc

SEQ ID NO: 5044 - DNA, 504 bp, Homo sapiens
agattgacaagcattaaaagtctgataatgtcaagtattggtgagaatgtagagaaattacattctcacttttgtcagcagtgtaaattgatacaatcattttctgaaagatgttagtaagatagtaaattcaagcttcatgtattttaaccccagcagttgtactcctgtctttatattcctgatgaatgaaatccttgtatttttattttggagacggagtttcgcccttgttgcccaggctggagtgcaatggtgcaatctcggcttaccgcatcctctgcttccccagttcaagcaattctccggcctcagccacccgagtagctggaattacagggatgcaccaccatgtctctactaaaaatacaaaaattagctgggtgtggtggcatgtgcctgtagtcccagctgctcgggaggctgaggcacgagaattgcttgaactctggaggcggaggttgcagtgagctgagatggcaccactgcattccagcgtaggtg

SEQ ID NO: 5045 - DNA, 573 bp, Homo sapiens
tggggttacaggtgtaagccaccgtgtccagcttagctattacctttgtattctaccagtatgaactcaagaaactcatttgattcttctatctgtaggtcagattcactgtgtgaaacactgacaatatatggtctataaattattaatgatttcaaatgattcacacacatattcatacagttttcaagttactaaaagctgaaaagaagattttgtggaattttcacttttttcccatctcctggaaacggaagtgagcaaggcagaaaacagagggtaaaaagaattcctaagaatatactgggctgggcgtggtggctcatgcccataatcccagcactctgggaggccgaggtggggagatcgtttgagaccaggagtttgagactagcctggccaacatggtgaaactctgtctctactaaaaatataaaaaattaggctgggtgccgtggctcacacctgtaatcccagcactttgggaggccaaaatgggcagatcacaaggtcagaagatggagaccatcttggccaacatggtgaaaccctgtctctactaaaatacaaaaa

SEQ ID NO: 5046 - DNA, 521 bp, Homo sapiens
ctgcctcttctaccacctaagtcctgcccacccctgcttcaggttgccccataatgcctcactgtcagtcaggcctttcacagcctcctccacctgcaggcaccactgcttcctccacacccctcagccatcaccacctctcatctatacatgaaacggaatatccccttccattggtggatgctgggtttgagtttccctttctacctcttctactagagttaagctcaccaaagcaagaactcttttatatctcttgacagcctcaaaacttagcctagtgctttgggcagagttaagtttaaaatatattctcatgtgtggttaaggatagctgcaataccagcaattgttgactgtttactacatatcaagattgtctcatgggttaggcatggtggctcatgcctgtaatcccaacactttgggaggccaaggcaggtagattgctagagcacaggagttcgagaccagccagagcaacatggcaaaatcctgtctctacaaaaaaatacaaaaat

SEQ ID NO: 5047 - DNA, 628 bp, Homo sapiens
tacctcattcttttttaaaaagtaagtcatcttctaaggctcctccacttccaaattccaaggacccaatccagaaagtgaggtctagattaaccccagacatgtgttggtggacctccatgctaaatctctacaagaatcaatgtggcgttgggatctaagccactccagacttgacagtggataagtctaaactcctggataagtctctccaagctgctatgtctctgagtgtagtttggtgcttgaggaggggccaacatttgttacacttattatatcagtcatctcatttaatccccattacaaccctccaaggtgtgtctgcactggataggtaagaaaaccaaggctcatggcccagcatggtggcttacggctgtaatcctatcactttgggaggccaaggcaggtggatcacatgagctcaggagttcaagaccagctggacaacatggcaaaacccaatctctataaaaaaatacaaaaattagctgggcatggtggcacatgactatagtcccagctacttgtgggggctgaggtaaaaggatcacttaagcctgggaggtcaaggctgcagtgagctgagattacgccactgcaccacggcactccagcctgggtg

SEQ ID NO: 5048 - DNA, 484 bp, Homo sapiens
tagttctgaccattttaaagagtaaggctttttatttatttatttgctttctgaagtcttaaaagaagttatagatctagttcctataacttgaatgtgagtccagggactttatttttttatatcctataattccttgtatatagatagcactttacagttagtaaggactcagtaaatgttttgtgacatggcattttaagctgttctgatgatgttatccaataaaaatcacaccatctcatatataaacacaattatggatgtatattgaagatcacctgaggtcaggagttcaagaccagcctgagcaacatggagaaaccctgtctctactaagaacacaaaaattagccgggtgtggtggcgcacgcctgcaatccccgctactcgggaggctgaggcgggagaatcgcttgaacctgggaggcagaggttgcagtgagccgagattgcgccattgcactttagcctgggcaacaag

SEQ ID NO: 5049 - DNA, 546 bp, Homo sapiens
tctgatccctttctctctcagagttccataaattcggatgtcttagtcaagtaagttagactacagaaagcatatgttaatctactaggttgttgtatgaaaatcatttaacaaacagtacttttctttgttctcatcttttagtataggaactacttacataatttgtgcaactatggggatattcatacggtttttcttttttggtgagttacattaattgattcttgaatgctaaaccaatctacaattcctgggattcactttacttggtcaaaatgtataaaactttttctgtattgttggacttgattcactgaaattctgttaaggatttttgcatttatgttcattagagatattagttggtgggttttggctaatggttctgatatcaagacaatgctggtctcatgaaatgagctggaaattgtttccttctcttctgttttctagaataatttttataagtttggttttatgtcttccttagatgtttactagcattcatcagtgaatccatctagacctggaatttcctttact

SEQ ID NO: 5050 - DNA, 624 bp, Homo sapiens
gttgttaaaccattagctataatgtgggatacagcaagagatcattgggccaaaaatgtccactctgagccctgagtgatctggattcctaattcaccctcagagggtaattttacggggggtgttgttccatagcactttgacaatgggtctcatttttctgtttctctactctgcaaagagactacatggaagactcttagcatagtaatttaaaacccctctttgagtgccaaataagttatggagtccatgtacagagaaaaagaacacatacacaaacatttgcaaacaatttcaagatgttcacactgtccaaagcacccgtgtacctggtcccaggttaagaaactattttgcaatgtcaaatatgctgtgaacttgctgtgagcacagctttttccctgtcactgaagtctatataacttccataatatgatattctcactaccagtaggtataatgcctgctggaggatagaacaggagagaagagcttcgtcagtctgtagtcaaccccagaagggtacatactagcacacaaaagcgatgagcaagccctgtgtattaaacattctgtcatcactgacagccccctaaaagtcaaacctacaatttatctaat

SEQ ID NO: 5051 - DNA, 544 bp, Homo sapiens
gaagaagatgggagaacttccttcctgctggtcacttaggagccagaatgacctttgttacctggacttttccttttctcctcctcatcattgttccatccccactaagaccttcattattttggaaatattaagttagaaatctagtcatggccagcatgagagagggacagggatgcatacaggaatcaaactgaatacattttgtgttttcattccccgtaggtacttctgctggtgtcaatcattgggactggattatgtctaagcatcttcaacctcacaggggtaatttgaaaagttgaggaggggtttgcttttgaagagataagctcatataatgcagaatccagcctttatggggatcagggggtcactccaaccatggccttcacaaatggccttcaactgtaccccttgggttcatatccaagtgaaattattagtctaaatgattgaaagataataatatctattatacaattaaaaacctgtatcccctcccagatcatacacctacaaattcatgttttaaactaatctt

SEQ ID NO: 5052 - DNA, 562 bp, Homo sapiens
agggaaggttggaaaacctgaggccagggctctaggcaacaggaagggatgaatgatggtcttgcaagccactatcactgggataaatcgatttaaccttctatccatctttgtgtcaaagagccttagcttgggtcacatgactaaccttggttgggcaggacagggcaaggtgacttgattcaaccaagacagcacttagtggaggagaagtaaataaattgctattagcaaaagaaaggagtactggatcctagaaagctaaagaacaataaatgtctactacaaggtttaattttgatggctcccaaacccatgttcctttcattaagttaaaagttctctattcctgttagttggtcaagtaaaagacgtttactttgggctgggtgcagtagctcacactggtaattccagcactttgggaggccaaggcaggcggatcaccggaggaaaggagttcgagaccagcctggccaacatggtgaaacccctgtctctactgaaaatacaaaaattagttggacgtggtggcacacatctgtagtcccagctacttgag

SEQ ID NO: 5053 - DNA, 373 bp, Homo sapiens
tgccaaaatttaacttggatgggaatgttaatgtcctacacacgatattatttatggaagtaataatgtcaaactataattttttgatgtcattgttatatttaatcagcatgggaggacatgacttgttgatgaggttttccctggggaaagaaaaaaaatacttccagcataaatatactgaaatgatgcttaattttggaagtgaggtgagaaatggggaagccagacttagattagatggagaaaaaccttttctcttagaaatggaaagatagttgaattcctagactatggctattttcaaaagtcattaaccacccacaacatgggaaaaactcatctaaaacaattcctgatgttctttgccctt

SEQ ID NO: 5054 - DNA, 503 bp, Homo sapiens
agtaaccctaatggccaaaataaagtacatttggatatgcatatgcccaaagctatccatgacaaacataaaatttagtggaagctttttctgctgaaatttatgaaaaattcataatgcatgccatgaaagactctctttttaaataaagttacttctcatattataaaactgatgaaactattcaatttttatccaaaagttttgtgtagcttcctgggagttttccatactaatgtctcattatactacagaatttccatgggacagactggcttcactatatgcagcatactgaaaataagagctgtactccagaataatccactatagactaataatccattaattttattacatcactgttacacctgtatagcattagcttatattgtctcttgaattaataaattattctggaaaagtaattaaccatctcatgtttattattttgacaagttaactccattgcctaaacttctatacttaaatattaaatagta

SEQ ID NO: 5055 - DNA, 448 bp, Homo sapiens
aatatcatcataaaaaagatttccaaaatagcacatctatgttctttactgacacatatattccaaaactttgttaatatagggataagaatcacccaatcaacaaaagctgttaatacgcatacatgtaaaatataaaaacattcaaatgctaattccaactccaaataggaggctaaggttaatttccctttaactttacaagttaaattccataataaaagttttataaaacaaattctaaacctcattcaacaatatttactataaccaaaatgtcaaatcaagagtttgcatttgctcttggaattcaccaaagaacaggatcattcttgaaaagcagactaaggcatggctactttaaaaggaaaatgatccacagccagggcatggtggctcacatctgtaatcccagcaattctggaggccaaggcaggcagatgacctg

SEQ ID NO: 5056 - DNA, 532 bp, Homo sapiens
ctttgcaattgctctgcctccttttaaaacaaaacttttgcccttgctcatttctacttggagctgtcatttcttcctcttagcatcaataactccattttgctgtttagatcgtatcttcctcagaaaagatgttccagacttcactaagtcaaattcctttgcatagctcttggcacagttgtggtgttacttttgtgtgcatgttagttttattccttcctttatcccactgatctgagtttacagatcagtgggatgtgactggtctgtttttattcattcttgttccctaggtgactaatagcatagccattgagacatagtaggtgctcagtaaatatttgttggatgagtgtttaggtttaagaaagtatctttgcaaacatttgcagcattatcttttaatatttatagctagtcagtcatatatgccaatttctgcatctacctatttgtcctctttaactgtatatgccattagcagcaaagcagtaatatggatattactggcaggtttaagtcattgaca

SEQ ID NO: 5057 - DNA, 510 bp, Homo sapiens
gtttcccctggggatatgggttaacagttctgagacactgtacacgtatactggaattgaacaatagatggtggatggtgaggacagatttcttgctgttgaaatgggtggttagaaacaaacagtggagaaagctagaatatgtgggaatggactagagtttgagacatcagtatcaactcatgtttagcctactgtaggtacttttatttaatatcaatgaatatatacatagaaatatttttgatacatgtatttatatgaattaatatgcaaaaaatatttccttgccctggctgggtgtggtggctcacacctgttatcccagcacttttggagcccaaggtgggtggatcatgagatcaggagattgagaccatcctggctaacatggcgaaaacccgtctctactaaaaatacaacaaattatccaggcatggtggcattgtgcctatagtcccagctactcaggatgctgagacaggagaatcacttgaacccaggtggcag

SEQ ID NO: 5058 - DNA, 526 bp, Homo sapiens
cccaaagtgctgggattacaggtgtgagccactgctcctggccctaatttttatttttttagtagagatggggtctcgctacgttgcccaggttggtcttgaattcctgggcttaagggattctcctgccttggcctcccaaagtgctgggattatggccatgatccactgagcctggcctgtaaaagacacttctactgagcctggcctgtaaaagacagaagacggtgtggaaggagaggattgcagttggtcacagacttgttggccacaggaccctttatgtagggagcagctcaaaaggcaccagggcatctggccaggcgcagcggctcgcacttgtaattccagcactttgggaggctgaggcaggcggattacctgaggtcaggagtttgagaccagcctggccaacatggtgaaaccctgtctctactaaaaatacaaaaaaattagctgggcatggtggcgcacgcctgtagtcccagctacttgggaggctgaggcaggagaatctcttgaacct

SEQ ID NO: 5059 - DNA, 426 bp, Homo sapiens
cattctatacattaatatcttgtcagtttgattcctgtaattcagaaacaggagttctgtgatggaggctaaaacaaggctgagatggcacatttttactttcttggagggccttcattgaatagtcagccagcctccaactacagcatctctaccattttgctaacttcaaacgttccttgacagcaagcagagctctgaagcctgtcagctatcacgaggtcaggagatccagaccatccaggctaacatggtgaaaccccgtctctactaaaaatacaaaaaaattagccgggcgtggtggcgggtgcctgtagtcccagctactcaggaggctgaggcaggagaatggcgcgaacccgggaggcggagcttgcagtgagtcgagatcgcgctactgccctccagcctgggcgacagcgagac

SEQ ID NO: 5060 - DNA, 490 bp, Homo sapiens
ggatggtctcgatctcctgaccttgtgatctgcccacctcagcctcccaaactgctgggattacaggcgtgagccactgtgcctggccaacttccctgtttttagttgccttttcaaggatatattcttagaggcctgaaatagtatttctcatttcagtgaagtttttagattcctcaaattgcctcaacagcacatgagagagatgcatttctcagtggtgggaagcttgtgtccaccctgacaaccacatacagctcaaaaatgagaaatgtagcctaggttaaaggcagtcgggtggtgaggaaatactgtaagctgaagagctcaggcctacctaaaaggaatatctattttgtgaacacatggagttggggttcggtgttactagatcttctaacttaataagcaaaactagaaatctggactttcaagtaaaatcttctggctttgaagctgattttaaaagtattttggggctgggcatggt

SEQ ID NO: 5061 - DNA, 457 bp, Homo sapiens
acctaattctaacttaatggatgtgaacaatttttctccacaaatacagaaattcaaaattctaaggaggaagaatagaataagttctttggcaccacttaagaagcttgaaaggcagcagttaactgacatgtgattcccattcatctacatccttgcactaggctgggcgcggtggctcactcctgtaatcccagcactttgggaggccgaggtgggcagatcacgaggtcaggagatcgagaccatcctggctaacatggtgaaaccccgtctctactaaaaatacaaaaatattagctgggcgtggtggcggggtcctgtagtcccagctacttgggaggctgaggcaggagaatggcatgaaaccgggaggcaaagcttgcagtgagccgagatcacgccactgcactccagcctgggcgacagagcaagactccgtctcaaaaaaaaaaaa

SEQ ID NO: 5062 - DNA, 556 bp, Homo sapiens
caagtgaagcatatggccccatcaatgtgagttactttctttaactgttattaataataagtaaatgatatatatcttcagttccatgagaaataactcaatgaagtcatgcaggcagtaaggcagccattgtactaacccttcaagaatttaggacaataatatgagtagaggacacacataaaccaacaaaattcagctttgcttctgttttgtaaatgaagttcaaaaatacaattttgaaatttaggagagatagtaactatgttaaaatatgtggacatttgaccacatcacctagtgccctattttctaagcttccagcattgaaccgaaagtgctaaagtgaatcagatgaaataccttgatgtcagtcaaagggaatagcctgattgctcagccatcctttacaatctcccattgaaccaaggagaggtgaaacgatgtatatagcaaagtcatgaagattgatggcgcccgctgcttccaaatgtaccctatctgcatgcaaaccacttgacacatgaactgatagaaaacaaagagtgtttgccca

SEQ ID NO: 5063 - DNA, 562 bp, Homo sapiens
taattaattggctttacattagccgtctgtaaatacagtgtttcccagaggggagaggagaggaaggacaccaactttatttttaaatgaacatttatttttgtgctaatgagggtgttcaggggtacaaatgacaagacccaactcaaagggtacattaattgcctcacatagtaatgcagagagaggacagatttgagagatgcttgacttctttgctcaattattttatagaatgcagggtttttgcattttcccactttgtttcagtgctttccatggttaatgttggtttccttctcaggtcaaaataagagatcgcatctagaaatgataatcctcctccagttgaggcagattttcttagaagcttcctagtataccaaccttcatatcacactgaccagctatcattagaaagaaataagcaatttccaagattgacttagacccgtcatctgaggtgggatgatggttgagaagtcaacattaatattcagcataacctacctttaaattttgtattatattagtactatatgatgaatgtttaatctttggg

SEQ ID NO: 5064 - DNA, 188 bp, Homo sapiens
catcttgttataaattactctgttaggtcaagtcctggacattttcattcttagtacataaatataaaggacaaaactgttagcatgcaattgtcctttcctttttccgggattcccatgctgtgagtacaatgcaataaaatattaagaaattaacatattaataaactaagccataagaaatgcta

SEQ ID NO: 5065 - DNA, 405 bp, Homo sapiens
  misc_feature 156: n = A,T,C or G
ctgaataatattattacagaactgaaaaaaaaaacccaaaaatactactgtaagtatataagaacataattgaatgtgaaattgttctgttttatgtaaattatgtttaaagctaataaaggggaaatgtagaaaattataaagaatttaagaaangatcacgaggtcaggagatcaagaccatcctggctaacatggtgaaaccccatctctactaaaaaaaatacaaaaacttagctgggcatggtggcaggtgtctgtagtcccagctacttgggaggctgaggcaggagaatggcgtgaacccgggaggtggagattgtagtgagccgagattggccactgcactccagcctgggcgacagagcaagactttgtctcaaaaaaaaaaaaaaaaaaaaaaaa

SEQ ID NO: 5066 - DNA, 453 bp, Homo sapiens
agcctccctctttttactagtggggaacaggaagcttaggagaagtgaccgacccaaggtcagacgtccattgctagtttcatctgcccaccccgaatgggaaggtgggtagatgtacaagtgaaatactgaacaggggttagaaacagccagcattgccgggtgctttggctcatgcctgtaatcccagcactttgtgaggctgaggtgggttgatcacctgaggtcaggagtttgagaccagcctgaccaacacggtgaaaccacgtctctactaaaaatacaaaaattagctgggcgtggtggcgcacgcctgtagtcccagccactcgggaggctgaggcaggagaattgcttgaacccaggagatggagattgcagtgagccgagatcatgccactgcacaacagcctgggcaacagggtgagagtccatctcaaagaaaaaaaaaaa

SEQ ID NO: 5067 - DNA, 522 bp, Homo sapiens
  misc_feature 216, 217: n = A,T,C or G
ctcactcttgtcacccaggctggggtgcaatggcgtgatcttggctcactgcacgctccgcctcccgggttcaatgattcccctgcctcagcctcccgagtagctgggattacaggtgcctgccaccatgcccagctaatttttgtatttttagtagagacaggtttttgccatgttggccaggctggtctcgaactcctgacctcaggtgatctnncccaaactgctgggattacaggcgtgagccaccatgcctggccagcttatcaaaactttaaggagtactgaaaatcatttagaagttagtaagttatagtctttatacaaaaaagagtcaagtgttcatgttgtataactacacttagaagacagctaggattttaaagattttcctttattttgtgtagagaagaaacatcacacaatattctacttgtcatctttcctcaacttaattacatatatgctcacacaggcaaaatatttaagtatatcataccatgaattgttacttgacaaaaa

SEQ ID NO: 5068 - DNA, 568 bp, Homo sapiens
gctgaacttgatttaacatggttttattttgtttttaacaaatagaggccatgatgactgtttaggctgagtaatggaggcctctgctccaagggcaggctgcttttcaaacagttgccatctcagtaatttttatccatttgcatctcacaacatcacaagacaggtttacataaaagtccaggttaccctgcaggctgcgtggtaacctttgattttaggttgatactggagagaaggtccgagaagaagccatccttaacaggaaatacattaaaaaaattctttgaaactggttcctgtgtcattgaaaggcttgggtaagaacacacacatggctgggcatggtggcccatgcctgtaatcccagcactttgggaggccgaggtcagcagatcacctgaggtcaggagttcgagatcagcctgaccaacatggcaaaaccccgtctctactaaaaattcaaaaattagcccacacctggtggtgggcacctataatcccagctactcgggaggctgaggcaggagaatcactggaacctgggaggtggaggctgcagtgagcc

SEQ ID NO: 5069 - DNA, 608 bp, Homo sapiens
  misc_feature 55: n = A,T,C or G
cagagtgaatattttataaaagtataattacacataaaggaaaatataatacatntgagaaagtggttgttttatttagtttgagaattacatgctattaatgtatttgtatcattagaaattttgcagagatccctacagaaaataattataacaatttccttttatttcaacttcgacaatgtggtagcaggtatcctgaaggtgctgcctctgacacctcctggaaattctgtgtgcatgactagaagcattatttgaatgcttggctgagttccggagagggactctgagcagccagagggaagaacaaagtgtcgggagatactgggaggacacaggaatgcaggggacaggaatgcttttccaatttgtgcattggggaattgggggcaatcaccacaggagacaaaagttgggtgcttgaatccttgggtcagaaatcaaaacttactcccaccttctgctccacctacccaactaagcctggccctggctgggctacaccctcactgaaaagtatgcaagaaaaaaacctgcctactagctcagagggctggaatgaatcccaggctgtgtctacgtgggtgtcagcggggattgagtaa

SEQ ID NO: 5070 - DNA, 525 bp, Homo sapiens
ttgtaggcaccacttaataattccaaagacttatatattctaatactatagttgaataaaataaaaaagaaggtaacatggtactgtggccatactctgtcatactgcctctgaaagatgtggcatggtggtagagcatggaagagcaactagcaaagttaggagttagtgtttcatttacattgctgttttgacaaaaaatgtatttactaataaaagtacagcttcatctgcacttcactgaaggaaatcattgttaattgattttagatgagcacatgaaagtgatgagttgcattagatggaggtctaaagtcacatggaaattaacaaaacaatttattactgaataatacttcatactgatcaggctctttatacttttcagagtatctgcattatacactctctcattgatctacaaaataattgtatgtgacagacaggtagcactttgattttcacatttgatgaaagaggctcaaaggacattaagtgaagtaacttcacatccacatgtcttct

SEQ ID NO: 5071 - DNA, 608 bp, Homo sapiens
ttgcaagaacatggatgaagctggaaaccatcattctcagcaaactaacacaggaacagaaaaccaaacactgcatgttctcactcataagtgggagttgaacaatgagaacacatggacacagggaggggaacatcacacaccggggcctgtcagggtgtgggggcctggggagggatagcattaggagaaatacctaatgtagatgacgggttgatgggtgcagcaaaccaccacggcacatgtatacctgtgtaacaaacctgcacattctgcacatgtaccacagaacttacagtaaaataataattaaaaaattggttttattgcagaatttaagtacctatatatcttatattgcaaatgtttccctgcctgactttgtatttaaccacaacattaatgaataaatatacaatttatttttttgttttggccttaagtcacattttattttattaatatttgttgtgatactactgctttaaaatattttattctctttatttttgcaactataagttggaggctaagaggcaagtttaaatgctgagggagtagtttcaggtaaaacatcatctataatcatcacatgattatatttatct

SEQ ID NO: 5072 - DNA, 504 bp, Homo sapiens
tggcctggggtccccatgtgggagcagcgcgatgacaggggccgacccctgcacaatgcctgccctgtgtgggcctcatgtgtccttgggggctgccggtgtgtggagagagaaggatgactagagcccagatctctcatcaaggtcggtggctctctgctcagtagctgatccaactaactggtgacttccccaggccctagctcctcctttcccacctggagaatcttctctgccttgattcttagagaatgacagtcccttggaggccgaggagggcagatcacctgcggtcgggaattcgaaaccagcctgaccaacatggagcaacccgtctctactaaaaatacaaaattagccaggtgtggtggtgcatgcctgtcatcctagctactcaggaggatgaggcagaagaatcgcttgaacccgggaggtgggggttgtggtgagccgatatcatgccatcccactccagcctggacaacaagagcaagactccgtctc

SEQ ID NO: 5073 - DNA, 580 bp, Homo sapiens
tattagattaagggcccaacctactccagcatgacttcatcttaatgtgattatatctgcaaaggctgtattgccaaatatgatcacaccatcggtatcatgggttaggactgcaacctatcttttgggggaatataattcaacctacaacagttcctgaggaacaaaattagatagaaataagatgcacactttgggcatttccccaagcccaattctgtacaacactagaaaatactgcatttgtttctagaacgtttctaaccacaacattggaaagttcctaacattggaaatcattcagaataatgcccaaaacaacttagaaagtggaaggattgactaataaagaaatctaacaagagtaaaataagtggctgggtgtggtggctcacacctgtaagcccaccactttgggaggctgaggtgggtggatcacgaggtcaggagttcaagaccagcctggctaatgtggtaaaaccctgtctctactaaaaaatacaaaaattagccaggtgtggtggcatgctcctgtaatcccagctacttgggaggctgaggcaggagaatcgcttgaacc

SEQ ID NO: 5074 - DNA, 560 bp, Homo sapiens
gttagtgcaatggagaagtccaaggggacgcaactgtcaccagcaggaacgcaaacccctgtttaggcatatggccactagggggcgagagagtcaaaaggctgcatatgaacgtcagccttgccctcttcaaggtgtaaactttttcctgaatttccaatgaaagcattcttggatttcttctccctaatcatccccgatacttggtacagcaagaatcaggaatcatagtaatattttacccccaagcaattgtaaacatccacttttggcaatgctttttgttttctaataaaaatgtaaacatgaaaacagaaatcaggaaaatttcccaagattgattactgttttgagctgcctcctatgcaattgcctggaagctgtgaggccccaatgtgctccttccaggcactgtgaccagagacactgcgcgttgggtggggttgccagggaaaacacaggatgcctaattaattcaaatcaggtaacaataaagcctttaatgtaagtatgctccaacttgtgagggcagtgtgtgtgtgtgtgtgtgtgtgtgtgtg

SEQ ID NO: 5075 - DNA, 607 bp, Homo sapiens
attttaatgaaagttatactgtaactattttaaagggaaggggaaccacacatccctaagagattcaaatgtaatatattctcaaaatggaaagattccagggatacagatttctttctttcatggatttctcctaagcgtgttcaattcatttgatcatcaccgcctgtgatctgtgctttattaacattttagcatttggttggacccttcttacctctctctctatccatcacgtaagacatttagtgctgcctactggcagttatctgtgtaattgttttatttcactcactaagtgataagatccttgagtcaagacgctatgcgatatggcctgtatcttccacaataagtaatcacattgattcaaaagattccctcacgatacatttttattgcaaaaatgattttgtatttatccattttggaaaagaaattttatctcttgagcccctaaaaatggaattgtacacattaagacccttatacatatcacataataatcttcagggtcaaacattatagttttcacctgctgctattcctttgcagtagactagaatagagaattatataaaatttctacgactgtcaaaaaaatata

SEQ ID NO: 5076 - DNA, 576 bp, Homo sapiens
ctttactgggttctgggttgtagtccaaactgagtctctgacttaaggggatctgaagccattcatgtttagtttagtatctgatatacttggttttatttcttccattttaatttatggttgactgtttattattcttcatgattttctatttacagatctgtatgtttgctgatataaagtcactatttcatgtatctcctttgtttctttgaaagttctttgcttttctacaaagtgttaataataggatcctaatgaaacgcatcattgagtacttattctcaactgttacatgaaaacaacacagccaccatttctcctccaacaatgtgccttccctcaggcccaaaagatgaaacttgtaaaatatctttactgcttcactctaaattacctttggaaaaggtttttacttttttattccttttcctacctcaatttattgaatttgacaaaatcccctacttcttttggtcccagactatttttaaattttttaattgctgcatcattatttaacattatacactgatttatctatttacatacataaataagtgataaagaaagact

SEQ ID NO: 5077 - DNA, 536 bp, Homo sapiens
aacacaaaagcttccttgagggcaatctaatcactggttatctatccgtgctctgagcagagatttgaaacacagtgcttgtcattttctttctacaaactctccagtactgtcataagtagccattgtactcctcattccttctgatagtcatgattactacctcagaggccaagtgctgcagccacttgggctgacgattctcagtgttcaataggcactttgtcccaggcaaccgtaagtgatgatttaagtgatttaatgtccctgcacaccaaggcatactacaatctcactgtccctggccatgaggttctcactgtgtttaagcctaatcaagtcaaacagcccacccccaaatcccattattgaaggtttgtttcctggtagcacagctgataccaagtgctatatcattcagggttcatttagaaaaaacaggaagtacgctagaaattgtaaacagaggggagtgaatgcagggagctgattatgaaagtggtgaacaggctgaaagggcaaaaagaaaaagatag

SEQ ID NO: 5078 - DNA, 562 bp, Homo sapiens
caacatggtgaaaccccgtctatactaaaaatacaaaaattagcttgtagtggtgcgcgctcgtagtcccagctactcagggggctgaggcagaagaatcacttgaacccgggaggcacaggttgcagtgagccgagatcgcaccactgcactccagcctggcaatagagcaagactcagtctccaacaacaaaaacagagtctaaaataggcaaattcttaaagacggaaaatagattaatgattgccatgggctgtgggaaggaataaaagtgaaatgacatctaatgataaagaatttctttctggggtgatagaaatattctggaattcatggtgacagttacagctttgtgaatatactaaaaaccacttaattatatatttgaaagggtggatgttatggtatgcaaattatatttcaattttaaagaaaatgtcaacactcaacatgaaaatattcaaaattacagctccaacatcagaataaagactatatttttggatctctaggattctgatatgagtaagaccatgagtcattattatttggacactaaat

SEQ ID NO: 5079 - DNA, 411 bp, Homo sapiens
attctcctgcctcagccttccaagtagctaggatttcaggcgcccaccacgcatgccaacactggacattctgtaagggatggcttcccttatgctgacttgaatcatacaaactgctatcacatctagctccttcatcctgaacacattcagtcttctgcttgaatataaatctgaggtttcaattgtgttcctacagtcaatggaaagctactggaaaatttggagagtggcattaaaaatcctcctggaaaaggccgggcatggtggctcatgcctgtaaaaccggcactttgggaggctgaggcgggcagatcaccttaggtcaggagttagagaccagcctggccaacatggtgaaacctcgtctctactaaaaacacaaaaattagctgggcgtggtggtgggcg

SEQ ID NO: 5080 - DNA, 612 bp, Homo sapiens
agggtcacaaaagggtgaaatccatataccagcagggctgcattcttttctgggggctctagggaaaaatctccttctaatatcattcaggttttggcagaattcagctccctgtggctacaagattgagtcccttgtttctccactgtctgttggccagtggttgcactcagctccccctttcctttccatatggcagcgttcttatttaagccagcaagaccatatccaattcttctggtgcctcaactctctgagttccccttctggaaccagtcacagaagactccatttgtaaagggcttgtataatcaattaaagcccacccagataatttccatgtcttaaattcaactgtctcatataaataacttagtcatgggagtcaaatccatcaagttcacggtgtgaaagattatgtagcaggtgggaaatcctggaggccattttagaattctccccattgcaactgataaacctctagacagtccgagcaagagaaagagataagacacaaattaccaatatcaggaatgaaggtagtggggcaacattacgggatggtaagggaacaatgctgaatgcataacactatgccaataattctacagc

SEQ ID NO: 5081 - DNA, 567 bp, Homo sapiens
acataaaaatatcttcttatattgctgtttatcactgtaaaacaatctctcagaataaattctattcccctatgtttcagaatgacacaagtatcttaaaatttaagacccagcataatacacatatgggaagagaagtttattgctcattttttgtctttgaaaaaatggcactcatttctcttaactaagaatttcttgagtcttttgttacatatctatggtatgaacacttggttctcatttttcatcctagcaaaaaagagagagtaataatttaagatataccctgaaaatatttttacttttaacattagctttgtaatatccttgaagcattttccttaaaactagggttcttttgtttgcataatgatttttcttcgtgggacttaaagtactatggagttggatcccattccgttgaatgcatagatagctctctggtggtggttggaattgttcagtgcctaggatggttagcaggtacttaagggtttgttgaatttaaaagaaggtgagtttctttaaaattcctttaaagaattaattctcgatgagcctgag

SEQ ID NO: 5082 - DNA, 605 bp, Homo sapiens
ccttttcactccgttgtttcctttgctgtgcagaagctttatagtttgatatagtcccacttgtcaatttttgtttttgtagcctgtgctttatttttttaattgaaatttctatctgagttattctgacttcactctttctgcactggcatcttttttctacaaattatttcaagaatacatacacgatttgaactattttgctgtttttttgcttagatattatttggcctagatgagttacagaaacaaaatttgcaacttgaatttctcagtcgctgcaacaaatgtgctgcttctgaaggcatatccctcaggaggcaagtatcatatagtttgaagggatgtgtcagtcaaggctcaaaaaaataatgctgtaaaaactgaggaaatttagtattatactaaagctgatggttaagatgtaaatattttatttttgtccttcccagaaacacatacataattttaaacttctctaaaatgaacactattggccaaatcctaagaaattgtgaacgacaaattccatcactaagttatcccatatatgtgtactgtatttttctcatttttattttagtgaatagaaatgttagaaagtc

SEQ ID NO: 5083 - DNA, 319 bp, Homo sapiens
gaaaaatattggcttatattctagataaatacatacgcccacataatcccatacagggcaaataagtatgtgtgtctctgcggtgtgatgtgtgcatgcatgcaagcatgcttggtagactttatctgctcactgaatactttttccaacccaatgtatggaaagtgacagatggatcagcaatggctgagaagcagttacacatatctggccagcatggttttgattgtatgttgggttgtcagccagctacacaccagaactattattttaggcggctggaagagaattattcaatgtcaatgggaagagagagata

SEQ ID NO: 5084 - DNA, 516 bp, Homo sapiens
taattatggtgagaccttgggaaagatactgttttccacactgaatattccctgaaaagcgtagcagcactccacttgggaattcacgttatcaccattatcagaccaactgctagaatcaccttttctttcctatttagcttattcattcattcattccacaaatgctcattaagctcctactcttgccaggtattatgctagaaattggggatataaagatgaatttaaaacatagtctttgtacttgcccttaagaaatctacagtctagtaagaagaagacataagtaaataagaacaatgaaatacaggctctagaagagatctatatcttggaaatgtcagtgacagaggtcagtagaggacttcaaagtgttcaccaagctcaatcttgaatgaaagttggtacctatcagggagcaaagaggaaagactataatggtaagaacgagaatatgaatgaagccaaaagtgcaaaataccttatcatggtaggataaatacaagctagtca

SEQ ID NO: 5085 - DNA, 597 bp, Homo sapiens
attgtaggcccctttaagcagggctatcacatattgctgtgcaggctgcacagggtgactccaggggccacccgctgcagagactgtgctgtgtatgcacatcatacatggcagcccttaggttgataaataccttctggttaactcttccatctgtagctgcaagtctgcagtctccctctgagggtttttctagtctcttctctaactaggactgaatctttctgtccccaccgagactgtgccctagaggcaggtatagtttctctatcatttagaggcactgctctaaaacagagcagtgatggctttattggccctgaatatatgtgaaggcattagaagggtgatactggatagataatgagaaagacccacttcttccatcacctgtcacctctaatgttctcttccccaggatttgatagatcttactcagatttcagtgcttaaagatgccttttgcggccaggcatggtggctcatgcctgtaatcccagcaggttgggaggcggaggtgggcagatcacctgaggtcaggagtttgagaccagtctggccaatatggcgaaacctgtctctactaaaaatacaaaa

SEQ ID NO: 5086 - DNA, 598 bp, Homo sapiens
ggggtcggagggcctcacgtgtcccaggcatcagtgacctccccttgccattgctttttcctgttggctgccttttcctaccaaattccacttggcaaagagggaacccagctctttcaagagggacatcaactcctggttgttcaggaattacttggccctccttggctatcggccattcccagctgatgttggttccaagcctgagcaacagaaacagaggcctgtcctagccctggctgttcctactggacccacgtccagttctgagccacccctgggtgtattagccagggctgagcaagcagaatgtgggatggaaggtgagagctatgcagcaaaggtctcagggtggctctgctctctctgaggcctgtaagaagaacatgattggccgggcacggtggctcatgcctgtaatcccagcactttgggaggctgaggcgggcagatcacctgaggtcgggaggtcgagaccagcctgaccaacatgtagaaaccccgtctctactaaaaatacaaaattagctgggcgtggtggtgcatacctgtaatcccagctactcgggaggctgaggcaggagaattgcttgaacct

SEQ ID NO: 5087 - DNA, 458 bp, Homo sapiens
agtctagaatggtaggagcatcctgagacccctagtgggagtctcaaaccaacacagctatggtagaacatgtgaacaaggatcctggagacaggttgaatcccgggtatctagagctaaccatatgaggaatctaatacaacctgtgagcaagattgaccccagaaacttgtgccatgttcttgttattgctttgtatcgcctctagactcaatacccctgggagaactcaaaaccagagggaaacattgcctgattaaaagatgcatatctgagatttaaaatagggaatggatgtgatttctgacacagagagcccactggagagcaggtgggtgtggatttgcagagaggaatagaaattaaaacattgcagacattcagctactatcaggtggggaaaaaaatgagtagtactctcagctactatccaggtggaaaaaaatggatgatgcatt

SEQ ID NO: 5088 - DNA, 451 bp, Homo sapiens
ggaattgtcaatgagatagaagaaagagaggcagagagagatcatgacaagaagcatatatattatttctcaactttcagatttctctctctgagcttaccctctacatgcctttgaaaaatcataaagaaaacaatgcatttttcaggtctgaagctgagaactgccaaagcttctcttccacggatcccacattgaaatatgtgtctaccaaagtacataatgtacaaaaattagtgcttgtatattttttcttactaactcttggtcatctttagagttttacagttttgaatcagagcttccacttagcaaaatctactaaacagtagaaacatatgtttttggccatctggcttatataaagtttgttgattattacatgtcagccacatttttgaaaataccaaatgtgtgtcgagcacggtggctcatgtgtgtaatcccagca

SEQ ID NO: 5089 - DNA, 556 bp, Homo sapiens
gacctgagcccaaagcccttagtctgggctattaacgctataaaaatctccaacaactgattcctttaagctactgtagaagggttcttgcgggaggcatgagctaggctatgcatgcagatgaggcccttcctctacaaagccacagggaagccccttacccaggctcccaaatactgtggcccctccatggtagaagatgatgcctcgccggggtctggaggatgctgccttcggctggaacagcctcacgggtatcgtcccaaaacgcaggtcggtcaccacaagttcagggtccttttaattctcacgctatcatgtaaaaaacgaataaatttgggcatggagcaaattcccagcttctcaaatatattcccctgttggaggtaacaaaagaaagccagacgttaggagaggttagaatctggatggtagattccctgacacttagaattgttaggatgttttcacagtttctcacctgcctcctgtaggtacagggggctcttcaggaatccataggctctggactgtgtccaggtagagggctgggttt

SEQ ID NO: 5090 - DNA, 536 bp, Homo sapiens
tcggagagcaaacataattgcaatattttgtgtaagcatgactcaagaatgtttggttagttgccttatagcccttggtttcctcacctgtcagagagagtaatgattttcttatagaattatgagaattaaataaaatatgttacatatattaaatgaaattatcctgtggcagaaattattctgtgtcagatctgtttgacttgaaatataatttatttatcataattctaagagaaaagcatatgtatgtgtatgaacatagatagattgacagttaattggctagttcctggcagttgtaattacataataaactctcttaactaacttgagtcctgcttatataaaacgttgcaattaggccaagtgcagtggctcactcctgtaatcttagtgctttgggagaccgaggcaggaggatcatttgaggccaggatttcgagaccagcctaagcaatataggtacatcctacgtctacaaaaaataaaaacattagccagacacagtggcatgcgcctatagtcccagctac

SEQ ID NO: 5091 - DNA, 565 bp, Homo sapiens
gcctcagcctcccaagtagctgggactatgggcacacgccaccatgcccggctaatttttgtgtttttagtagaaacggggtttcaccatattggccaggctggtctcaaactcctgacctcgtggtctacccgcctcggtctcgcaaagtgctgggattacaggcatgagccaccgtgcctggcctaatttttgtatttttggtagaaacggggtttcaccatgttggccaggttggtctcaaatccccgacctcaaatgatcctactgcctcagactcccaaagtactgggattacaggtgtgagccaccgcgttcggctgtagattcttacaaggagtactcaccctaggtggcttggatcccagtaccagcccacagcctggggttggggatccctggcctcgagattagatcatgggccgactgggtgccacttgggcaaaagtcatttcaccactctatgccttctctcctatggaggtgctatggttttccatcagtagaatgggggtaaaaattatacctacctgatatggaggatgaagtgagttaatctgtgtag

SEQ ID NO: 5092 - DNA, 513 bp, Homo sapiens
agggtcacaaaagggtgaaatccatataccagcagggctgcattcttttctgggggctctagggaaaaatctccttctaatatcattcaggttttggcagaattcagctccctgtggctacaagattgagtcccttgtttctccactgtctgttggccagtggttgcactcagctccccctttcctttccatatggcagcgttcttatttaagccagcaagaccatatccaattcttctggtgcctcaactctctgagttccccttctggaaccagtcacagaagactccatttgtaaagggcttgtataatcaattaaagcccacccagataatttccatgtcttaaattcaactgtctcatataaataacttagtcatgggagtcaaatccatcaagttcacggtgtgaaagattatgtagcaggtgggaaatcctggaggccattttagaattctccccattgcaactgataaacctctagacagtccgagcaagagaaagagataagac

SEQ ID NO: 5093 - DNA, 429 bp, Homo sapiens
ggtttactgacttcctctaagtctactatttccagctcttcaaaacagaaggaataaatgaagtgagaagaacactggaataaggctaatagacaaagtggctaatctcagacccccaaggtcaaagaaaagcaattcatttcttggctttcatcaacacaagatatgatttatcaatctaagagcaggattacaaacattatacatctcaatgatatgttcttgcactgtgtaactttttgaacaatgacagattgcatagtcaccacaaagtcatgtcataaggcaaaattcattacacttgcacaagcactaggattttttaaaacaaatgtacacagtagcaattattactactatatatatgccatttttggggggaaagccttttaaaattcagttattccttgggattctatcatcttcatg

SEQ ID NO: 5094 - DNA, 481 bp, Homo sapiens
tccatgcctgtcattacgttaatccatatttgcttatccttttgatcttaatcggcacagtaggttttattatacccttacatagcaatttcagggtcacgtgaaaaacacatgaatttaggaaacattaagtacaaacagagaaccgattgtgtcttggttagatcaataattgtacatggttgtaaatgtcattccaactatttgtacacttgaaccatggaaacaaaattatttaatgagttaattctatcatctaaaattaataatacattttaataccctttgagtaccacaataaagttattacagaacaggtactttcatttattccacaaaaaatggagaaccgaagcagttgttgctttacctaattattgaacctctgatttgaatggaggaagctgtttcctgagagaagcggccccttttagcaaaggaacaggagttgtaatggaagcagttcccagccactgcaagc

SEQ ID NO: 5095 - DNA, 537 bp, Homo sapiens
tgttcagaagtagccagaatgctataatgaaccctcccgcacccatcacccccacacactattaatgcctcacctgtgttctttcatataaacctctgcctactcacctctctttattttgaagtagaactcagaaatcatttcgtttcatccttatatattgcagcatgctctagagttcatttgtaactcaagaaaagagcaataatgtaattccagcaataaaagtctctttaaaaaataccatcttttgaaaaggaaatctctctccattaaaaataattctccactatttttaatagaatgtcttctctaaaatgatttttatgaatctaattttttgggggattccctgaaaaggattttgtaatcttaagtttgctcctaatacaaagtagtagggtacattattttttaaaattgtaaatggtgactgatcaatatttaaatcatgttccaagatcagtagctttgtggtatgggggtggcgcagggcactcttaaatcctttaatgaaaatcacaactttatttgaaa

SEQ ID NO: 5096 - DNA, 556 bp, Homo sapiens
tcatctagactaatcagatccattaggcagaaacttggtctgtaaagcaaggaacacgctcagaagttacacagatgttccaattagatacactggtatatatatctaactatatatagtgtgtgtctatgtaatctaggcataaataataattttatttattagagtataggattaaacatgtctggagcccactaaaatgaaacacagtttctataaagacaaggctgtgggttcagttggggtggggggagttgttttactctttaaatgacaagatcttctattactatgttttttactgctcaagaatcaaaagatccaaattcatatcctaaatttgactgttattctttctacataaaactttattttttatttcaggatgtcctccgagttgcagaaactaagttgtagatatatcacaaaaattgacaatcccatgagtatttgatcccaacacaaaatattcaggataacgcttcactttctctcactggtctttcaacacttcttcttggcaaaaaaaaaaaaaaaaaaaaaaaaatttttgggg

SEQ ID NO: 5097 - DNA, 437 bp, Homo sapiens
acaacctctctttcacggaaggtcactatattgagcaccaacccttcgttcataattcagaaaggttctccatcctgggaagagcaacaaattaaaaaaccgctaccgacgtgcagatattttacagcgcaatccagtgagactctgcattttcatactgagaagtaaaatatgacctagacaagacccagacacaggctcataagaaagactacggggctttaaaattattgccttgatcatggaaagaaacatgaggaatcactggcagccacaactcaggatggtctttgggggcaatcagtgtttgacagaatcaaagaacatctggaaatcagcatattttgagctagttcacaccctgcttggttcatatttcaacagctctatgtactaaggcagttatatggccctgagaaaagcagcctggatttatc

SEQ ID NO: 5098 - DNA, 551 bp, Homo sapiens
tgctggtataaataaaacctcctgaagcagaaaggatccttttactcaagggagaaattcaagatttgtttcctgaaacaattttctctttctgcacttagctaaatgtgcaataatgagttgtgtccatcaggatatttaacttccaaaatgatattcagctctgctgttaataatttagtgtagaaaggtatccaaataggaaaagaagaagtcaaactatctatctttgctgacaatatgattctgtacctggaaaaccctaaagattgccaaaagtctcctagaactgataaaaaaaaatcagtaaagttacatgatacaaaatcaatatacaaaaatgtataccatttctatataccaataaattttaagctgagagccaaatcaagaatgcaatcccttttatgatagttgcgaaaaaacttctctaaccatgtagatcaaagatctctacaaggaacattggaaaccactgctaaaagaaatcatagatgacataaataaatggaaaaacattccatgttcatggattggaagaatcagtatca

SEQ ID NO: 5099 - DNA, 511 bp, Homo sapiens
gtttactgtgcaaatggaaggtgaaacagaagttaagcatcacagtgaggaaaaaggatattttatcacagtaaaaggaatcattcaccaggccaggcacggtggctcacgcctgtaatcctggcactttgggaggccgaggcaggtgggtcacctgaggtcaggagaccgagaccagcctggccaacatggcgaaaccccatctctactaaaaatacataaaattacccaggcgtggtggcgggcgcttgtagtcccaggtactcgggaggctgaggcaagagaattgcttaaacctgggaggcagaggttgcagtgagccaacattttgctactgcactcccgcctggggggcagagtgagactatctcaaaaaagaaaaacaatacccaaaaataaataagtagaatgattcaccaaaaagatacagcaactaatgagcttgaatgtacctaacaccaaattatgtaaagaaaaaaaaagtaaagcaaaaactaacagcattttaagg

SEQ ID NO: 5100 - DNA, 534 bp, Homo sapiens
gagctgcgggggaggtgggggtgagaggtttagttgtagacataattgaggtctccatacctgcgagccaccaggagaaaggagaagatgtcccataggcacatgggacatcagaagaactgattctgggtcagggaatcccattatggagccaccagttggttcagggaaagactgtgatgtgaaaaggggtaagtgccaagtacagaatgctggagataccagcccatgaggagacatggagacgaatcgtggaacaggcagagaaatctaggcaagaatggggctatggaagccgaaagaataaagtatttcacaaagaaggaactgagcaactatgaaaaaggtgcagagaaaacaaacaagataaagaatggggactgttcactaagcaggtagcacaaaaccacttgtcacttttgcctatggtgtttcagtggaaagggaaaggtaggaaagatggcagtggatggagaagtagatgggtggtggacagagagactgtgatactgtaatagacaagtctattgagat

SEQ ID NO: 5101 - DNA, 561 bp, Homo sapiens
acgtattttggctttatttctggattctctattctattgcattggtctgtatctgacacaattattaatagcattctctttctctcttaaaagcacccaggactgaataataaattgtgtgttcacactgcatctatgggaaacagttcttaacagctcagagtgaaccatggtggaaagatcctgtatcaggagacagggctgctgttctaacttggccactaacccggggagactttggatgagtcccttcacttctctgggcctcatccagaaatgaggggttggaaccagagccattccctgattcactagatcatttattcattcaacagatcctttttgagcttcctactatgttttggatgttataattttggcagatttcaatattaatgacagaatgttccagcttctccctgcttttgtctgctaaacggaattctggcttggtccattaggtctattcctccccctgtggaaaactagaatatgtcactctaaaatgtgcctattttgcataagaattgttgagctgcaggcaattaagaagaagcagat

SEQ ID NO: 5102 - DNA, 487 bp, Homo sapiens
tgttgtgccaaggggttaaagaaggtcccatctggccctgagtcccagtcctcaggtgtccctgaggtgtctatcatctgtgtggtccacattcttcagttcacatatgtccccactgagaaggctgcatcagccatcgtgaccaactctgagtcaggcttgaggacccaggaatcagtcatttgactgcttctgtgtcctgtgggggtgctgtttgtggcaatgactctctggacccatcacacagatgtcccctctctgggttcttgttgtcccctctggactctcacctaggaatggggcacagttacctcttgggaacataccaacatccagctgtctttatgttccttgtctcacgattcacctaccaaccctccaaccaactacttgcagggagaaagcctttctctataaatagtgctcttttctctgaggtatccagcattaactcctgcatgggtaaaaccttcggatgcaaagaaac

SEQ ID NO: 5103 - DNA, 597 bp, Homo sapiens
acatcttctttacagaaatgtttattcaagtcctttgcccctttttcaattgggttgtttgtctttttgttgttgatttttagtcctctatatatactggatattaatcccttctcaaacatatgatttgcaaatattttctcccattctatgggttgcctttttactctgttgaaagtgtctttttgatgcacaaaagtttctcaccctcatggagtccagtttgcctattttcttcttctgttgttcatgccttttgtgccttatctaagaaatcctcaccaaatccaatgtcatgaagattttgccctgttttcttctaagacttttatagttttcaaagacatttaggtctttgatccaatttgagttaatttttgtatatggtgttagaaaaggtccaactctattcttctgtttgtggagatccagttttcccagcaccatttgttgaaaaaccgttctttccctattgtcttgttgatctgtccatgtgggcccatacagaattccctcattcctttcatggctcagtcatattccatcatatagaggtaccatccctttccaacctgtcccctgctaaagccctaaatt

SEQ ID NO: 5104 - DNA, 597 bp, Homo sapiens
aggagcttgggttcagctcctagttgaatcaagtaactctccgccttcatctgtttaattcatttacacttagagtagtatttcttttgcagaaagggatgcatggctaaaaatgtactactgcttccattaatgaaaattaatttagcttaataagatgagtctgaatcttggattctgccagccctgagtttgaattctagtttgacccgtttctaggtatgtggcctttaagtttctcatctgcaatatgggaattaacactaacttcctggagttgtgagagttaaatgatttgggtgtataaaatatctgatacatgctctttataccctctttactccactcatagtaaataaatcctgtgggaagctgaagtacggttgggattgaattgaggtgggtgcaaccttagccctcacctggtagacttccttctagagtttaacctggagatactggagcttttgccattaagggaggtaacagatcattacaaaacattcctctggagttattcaggagactagaactgagccctttcttttgagagggtcaaaacagtatcggtttatgaatgactatgatagtacccct

SEQ ID NO: 5105 - DNA, 579 bp, Homo sapiens
gcctcgttcaaagcaacatatcattgccaaaattcacagttctagcacttacaagaaatagagtgaaagagaaaatctaatgaggagaattgtccccatttctttccaatgccatgcccaagaccagtgccatccggtagaaatataatgtaagccatatatgtaactttgcagatgtgaggtcctgggtgaggaagcaacctcttgagctaaagacaatcctgcctgtgtagttttacattatctagtagccccattttaagaagtacaagaaacaggtgaagtttagtagtttattatattacatccaaaatatccaaaatattatcgttcaacatgtaattaatggaaaatatcaagctattttacttcctttatgtatactaagtcttagacatcaggatacgtattttacactcacagcacatttcagttcggaccagcgacatctcaaatgctcaacagccacatggggctagtgatgccattctggagaacaggtctatacaattaaaactcccagaatatgcagagttgaataacctgcccttcagtaacccaacatgactgcccctgaat

SEQ ID NO: 5106 - DNA, 476 bp, Homo sapiens
gatcattattatttttaaatatattgcttgtccctagcataatctggcatatgatacaagctgactacttttatttaaagcctggtatgggtatgtatgactagaataggaatattgaagataattctttgttggacttggatttcttttgcgtattgagtcaaatttttttaaaaagagactttagaggtgaattttttcaaattatgctttgtgggagactagttctgtgagaagctttcggtcaaataaatttgggcagagctagatatcgtatctccctcttagatagttttaatttaggctgggatattaaaaacttgagaagtcttacagtaaagaaatcaattttgtgttacttccagccatagggcaggttagatactctgggggctccttctatgtcaaacctactggagcctaggtttaaaaaatactgttgatggactgggtgtggtgactcacgcctgtaatcc

SEQ ID NO: 5107 - DNA, 453 bp, Homo sapiens
atggtctattcattattgaaagtggagtattaaggtcccctagaattattatagtatccttggttttataacttcaatttcctttattttatttgagaagaattagaaaaaaaaatccaggtcaatcaattaggtttaattagaactcttataatattttattcagggaaattgaaggaaattagtatttgtaactatctaccatatggaaggaactgtattcatttcctttactattatttcattcagatctttacaagaataaaaagtattgtagccagatgtagtgcctcatgtttgtagtcccagtacattgggaggccaaggcaggaggatcacttgaggccaggaatttgagaccagcctgagaaacagagtgagaccttgtctctacaaaaactaaaaatattagcccggcgtggtggtgcacacctgcaatcccagctactctgg

SEQ ID NO: 5108 - DNA, 580 bp, Homo sapiens
cgtcagaacaaacagctgaagctatgcattatgtaagtaccaaggcaacattggatcttcctaaataatcttttatatctcacaaaatatatctaacccgattgtcccaaagtcccctttctgactttttttgttctttattgaagaaattttcaataagtataaccaagtaacaaattacttgttgtttttcaggatattagtaaagatccaaatgcagagaagcttgtttccagatatcaccctcagatagctctaactagtcagtcattatttaccttattaaataatcatggaccaacgtacaaggaacagtgggaaattccagtgtgtattcaagtaatacctgttgcaggtttgtaatttgctatgtcaaataatgctctcaaaaaagagaagttggactgcatgttctcactcataaataggagttgaacaatgagaacacatggacccagagagtgaaacaacacacaccggggcctgtcagggggtggggggcaaggtgagagagagcattaggacaaatacctaattcgtgcagggcttaaaacctagatgataggttgatacgtgcagc

SEQ ID NO: 5109 - DNA, 541 bp, Homo sapiens
tcatgatatcatcaaaggtgcttttggtggagtggtgaatggaaactagagcaggtaggttgagaagggaattgggatgtcagaaaattagcagtgaaaggaaaccataatttcaagaagcttgtccatgaagtgggggtgagggcagtgtggggagctgatagagttaaaggagtgttttgcccttttgcttttactccttaagataggaaagatatgctcatattttacaccaggtggtagaaataaggaaagggagagaccagtgataaaggaaagaccacaggaaagtgagatggagtcaggtctccacagagactgaaagctggtttgcctctcctttctctgtaaagtaggaggtgggtcctggtcctatgaagagagacgggagatgacttgggaccttcagagggatcaccagcatcactgaggggccagctgatggtatggatgatgagtccataaaggaaccataaacccagctccacaggttttctccagaatcatttctgaagaatgttacctgcaatgtgcccctgga

SEQ ID NO: 5110 - DNA, 603 bp, Homo sapiens
aacaaagaatttttcattatagtttcaccctttagatatggttctgctaccagacactgggacagccatgatttttgttctatttacctatatttgctatttggaggattaaaacattagactacattaaacacagactctacagaataggtaatacgggtcttgtggggtcattttgacaactaaagaaaagacttatccttgttatgaacaagtgtcctaccctacaggctatatttaattctagcatcttctgctgttgtatgatctagtacccattaacaatatgaagaaatctttgacattagtcttatatttatattatttataagtattcacaatctcatttataatgttgttaatagatgaaaaaatggaacgttgagtcattatcaactgaattaaatcaatatgtagagataattgcttgggcttttcattttaagcctagatacaatcttagattgccccaaattaaaggtatacagtataaaaatatgtaagttaggttcgtccattcatccatttagttattcttccaacaaacatttcttggacgcttgatgtattaggaactggtctgagaaatcaatgtatgacttc

SEQ ID NO: 5111 - DNA, 462 bp, Homo sapiens
gctgaacttgatttaacatggttttattttgtttttaacaaatagaggccatgatgactgtttaggctgagtaatggaggcctctgctccaagggcaggctgcttttcaaacagttgccatctcagtaatttttatccatttgcatctcacaacatcacaagacaggtttacataaaagtccaggttaccctgcaggctgcgtggtaacctttgattttaggttgatactggagagaaggtccgagaagaagccatccttaacaggaaatacattaaaaaaattctttgaaactggttcctgtgtcattgaaaggcttgggtaagaacacacacatggctgggcatggtggcccatgcctgtaatcccagcactttgggaggccgaggtcagcagatcacctgaggtcaggagttcgagatcagcctgaccaacatggcaaaaccccgtctctactaaaaat

SEQ ID NO: 5112 - DNA, 610 bp, Homo sapiens
gtgctgtgggaaggctcaggcttggaggcgcacaggcagctttggattctccagacagccacctcctagacgcatgttacaggacaaatcacctgcctaattttgcttaagtagaaaattggaattaataataacaataaaaacacttcttggggttttggagcccattgagagactactaagtttctgataaaaagagagaatttaaaatgattgttattagtaggtttttttcccaagtgaacctgaaatgaatgggtactttagtattttattttcatttcaaaataagacaagagaaaaagtatgagagtgtgtaaaaaagtcagtcatgcattttaaggagttaacacagatgatagatgaacacaatgtcatcagccttcatcacaaagtgaccataaaatatatatttaggaaaatgtaaaagtagggtctatcaaagcattttccaccatcatctattcaggacctcttctgctgttaagtagaggtgagaaaagaacagttacaatggcaataaataatgtcatatagttctgccttttagagacctgaggaagcaggtaatttaggattaacatgtacagaaaataagactcctctctct

SEQ ID NO: 5113 - DNA, 609 bp, Homo sapiens
tacttccaatgtgccttattttgagcctgatactatggaattttgcctgctattacagtacccaattattgcttggaataattttgcatttcctcgcattttacagagcatggcttgactgacaatttgacaatcagatagcctaggctgatgccattgtatctatttaataactttgttaaccaattaacacaagcagacaattcccataataattgagtattaaaaagcacaacaacaaataaacagtggacacttagaacaaacatctgaacactgttttagcccagttgccttcttttcctgaaagctccaaagacatacacacacacatacacatacacatacacacacacatgcacacacacacacgaagaagcacaaagaaggcaaagtacatttcattttgggattgaatttttactctggaacccagtataaagctctaacaggtaggctgatcttcaaggaaaggctctttttctgtgtatatggtaggctacttcccttcaagacccctatgtgaatctagaatctaaaccatggatggcgggatggcgacacctgtgctaatgtttgagaaaaagtaacaaaaaaaaaaaaaaaaaa

SEQ ID NO: 5114 - DNA, 554 bp, Homo sapiens
atttgctttccggtccaagttcacgggcttcccgaatcccctccacagatcctcagggttcaatgtggatcaggccataccaatcttaagctcaacccatgtgggcactgcaccatggttttgaatattgaagagacttaaaaatgtatggcaagtggctgggtgcagtggctcacacctgtaatcccagcactttgggaggccaaggcgggcggatcatctgaggtcaggagttcgagaccagcctgaccaacatggtgaaaccccatctctattaaaaatatatttaaaaaaataggccgggcacggtgcctcatgcctgtaatcccagagatcatctgaggtcaggagttcgagaccagcctggctaacatggtgaaaccccgtctctactaaaaatatatttaaaaaattggccgggcgcagtggatcatgaggtcaggagatcgagaccatcctggctaacatggtgaaaccccatctctactaaaagtacaaaaaattagcctgggcgtggtggcaggcgcctgtagtcccacctacttgggaggctg

SEQ ID NO: 5115 - DNA, 609 bp, Homo sapiens
cgcgcgatctcgcctcactgcaacctgcacctaccatgttccagcgattctcctccctcagcctcctgagtagctgggattacaggcacccgccaccatgccttgctaatttttgtatatttagtagagatggggtttcaccatgttgaccaggctcgttttgaactcctgacctcaggtgatccatctgcctcggctcctaaagtgctgggattacaggcttgagccaacacgcccagcccttactagacatttttctaattaaaaaaatattttaaaccttcaggaactgacatttctattagaaaaggtgttggaagacctctgatgacactggaatttgtttgaaaaaaagtagaaagcataacactcaggaaacactgactgtcaatagaattgttcaatgtcaggtctgtgggcaatacaatagaaaacattatgcacgagtttccacgctggcagcagtgtgtcaattttaaggtaaaattgaaaccgttgttaacaacaattagggtgcaggaggaagcaagttagttacagaatttcataaaataatctgtcactggaaagtaagaaaaaagcatgtttactagtaacaataataaaagt

SEQ ID NO: 5116 - DNA, 557 bp, Homo sapiens
gacctgagcccaaagcccttagtctgggctattaacgctataaaaatctccaacaactgattcctttaagctactgtagaagggttcttgcgggaggcatgagctaggctatgcatgcagatgaggcccttcctctacaaagccacagggaagccccttacccaggctcccaaatactgtggcccctccatggtagaagatgatgcctcgccggggtctggaggatgctgccttcggctggaacagcctcacgggtatcgtcccaaaacgcaggtcggtcaccacaagttcagggtccttttaattctcacgctatcatgtaaaaaacgaataaatttgggcatggagcaaattcccagcttctcaaatatattcccctgttggaggtaacaaaagaaagccagacgttaggagaggttagaatctggatggtagattccctgacacttagaattgttaggatgttttcacagtttctcacctgcctcctgtaggtacagggggctcttcaggaatccataggctctggactgtgtccaggtagagggctgggtttt

SEQ ID NO: 5117 - DNA, 571 bp, Homo sapiens
gattcaagtgattctcctgtctcagcctgttgaatggctgggattacaggcacgtgccaccatgcccagctaatttttgtatttttagtagagacagggtttcaccatgttggccaggctggtctcgaactcctcacctcgtgatctgcccatctcggccccccaagtagctgggattacaggcaccggctatcacacccagctaatttttgtgtttttagtagagacggagtttcaatatgttgaccaagctgttctcgaactcctaacctcaagtaatccacctgcctgggcctcccaaagtgctaggattgtaggtttgagccactgcactcagcttcattctagcttttaatataaaagatatttttcaaaagtaccattagtgactcttttaagtaatgggaggaataaggtcattagaaaccatttaccaaccaaaatatttgtgataggctttgttttgagccctttgaaccctaaatgaagttctctatactatctaggggtgaaaaaagttgtttttaaattctgcttcatttctaataaattagaaaattcaaagcaaaaa

SEQ ID NO: 5118 - DNA, 599 bp, Homo sapiens
tttatttatttatttatttgagacaggaatcttgatatattgcccaggctggtcttgaactcctgtgcccagacaatactccctccttggcctcccgagtgctgggattataggcatgagtcactgtacctgacctgctttttaaaaaaaaatgacaactaatgttgcaattaacaatcttttacttagtggaatgttatacttaaattccagaaaggattattgggtcaagagtacatacaattttgagagttacaactttatgggggttgtatcaatgtgcctcccccaccagcaaagtatgagagtgcctctttctccactgggtgtgatggcacatgtctgtgatcccagcagtttgggaggctgaggcaggagaatctcttgagcccaggagttcaatatcagcctgggcaacatggtgaaaccccaactctacaaaaaactaaaaaaatcagctgggcatggtggtgtgtgcctgtagtcccaactactagggaggctgaggtgagagaatcgcttgactcccagcaggctgcggttacagtaagctatgatcatgccactgcactccagcctgggcaacagggcaagacatt

SEQ ID NO: 5119 - DNA, 508 bp, Homo sapiens
gatgtccaggaatgcagctcagtaggtctcagccttatttcacccagctcttattcaagatggagttgctctggtttgaatgcctctgacacaaaggttgtaagaggagaaacaacttggtgagttccagaaaaaacaaaaggctgaatgaatgagatggggctcaggctgaggttagcaagaagccattctgcacaaggtttgagaccccgagaaggagcgtggatacctaacacaaagaatgataggaagcaccgacaggttttaagcagggaagcaaaacaatcgaatttctgtttttaaaagatcactctgtctgttacatggagaatggattggggtaggtaggggtagaagatcttgtagccctgaatggaggtgacagtagctacaatcagggtgatggcagtggatgtaaggtcaataagtttaacatatatttgacagaaatttaaaaaatagaagttattgggtgggttggatatggcaggtagtaaaagagagtgag

SEQ ID NO: 5120 - DNA, 596 bp, Homo sapiens
ttctcaacattacccctctccatcaccccaggagataagccaccattatctcttgctagatgactggggaaaaacacaaaccaactaaccttttagctccacctgactgctcatccatcctccatctgcacaataggaggaaaactttgtttgtttgtttatttatttatttattgagacagagtctcgctctgttacccaggctggagtgcaatggtgcgatctaggctcactacaacctccacctcctgggtttaaggggatggattctcctgcctcagcttctcacctagctgagactatgggcatgcaccaccacacccagctaatttttgtatttttagtagagacagtgtttcatcatgttggccaggctggtgtcgaactcctgatctcaggtgatctgcctgcctcagactcgcaaagtgcggggatcacaggtgtgagccactgcaccaggctggaagactttataaaatcataaatctggtcatgccaacacctttgctgaaaatccttcagcatcttcccaaagcatataaaataaagatcaaattctttagcatcatctctgtagtgggctgaatggtgcttct

SEQ ID NO: 5121 - DNA, 594 bp, Homo sapiens
attgccctagcatctgcatcccttcacaatttcaattctttagctatcttctgaaattttccttttttttcagttggacttattgattgtaacttatctcctagtcctatatccttcattcttatctttgttatcatcactttgctaaactcagtgaatttacctatccttatgtctacagctattgcatgtatactgaaaaccacttctaattttgatcttttacttgcatgtgcataatcctaagaccctgaagtacagcatgatagtagactttcatctcattcttgccagattgaaaaaaaaagaaatcaacttccttaactttctttctcccttcagattttctgtttcttttattgacatgtccagggctggaaatcttggaatcttctttaaatcaatattctttcgttctgtctcctttcgctttgtttgttcttagtattttcttcacaaactctcttagaattttcctttctatttcttttcccatggccctcactctaatcctttaactcactcttaaataactataaatattttctttccagctcactgcctccggattctttctaccatccaccactacca

SEQ ID NO: 5122 - DNA, 586 bp, Homo sapiens
agaaggggcctggcattgtgttgagcactcttgggaatttgaggcaactctattacccttccttggcctcaagaagcttagctatccccaaaataagaggaggcaaggaagaattaggagagttaagagtccttgtgaagcacttaaagactaaaaagctaccatgagtctataaaggcagattctctgaggaccacaggtatataagaagaaaaggaagtcttgattcagtaccagcagaggatctggttcggaagatgaagtgtgtttgagacgttaattaacaggaaccagagtcccagctgactctcgagcccaccctcatttctagtcccggctttttccactaacctgccctgctttttaaatgaatacccaagacagtctcatagcagtgatattctttccgtcaccctttggggaatggggagagacatggacccttgctccaaagccatgatgcctaaactcctgcctttcccaactaacaaggagcacaactataacctcaggaaatttaagttttaaaaagaaatcagatcgggctgggtgcggtggctcatgcctgtaaccccagaactttgag

SEQ ID NO: 5123 - DNA, 565 bp, Homo sapiens
ttctctattcctgtttccttgtctgtaaaattaggataataattgttcccaaatcataaagttgttatggggagtaataagatagagtgtgtaaaatactccatacagagcctggaccatagttaagagtaagtactctacaaaaacttgtgtttgtcattagagatacaataaaaagttatgaaccaaagtggccagtaaaaaaaaatgaaagtttttatatactgagcatctataatgtgtcagtcattatgttaaccagttttcatacattatttcttttaatttgttgtcttcgaattattttaaaagaattaaaagaacacagtatgatttaatgtgaaaacgaaaaagagaagattccagctgggcacggtgactcacgcctgtaatcccagcactttgggaggcctaggcagttgaatcacgtgaggtcaggagttcgagaccagcctggccaacatggtgaaaccccgtctctactaaaaatacaaaacttagccaggcgtggtggcatggtgcctgtatcccagttactcaggaggctgcggcaggagaatcactt

SEQ ID NO: 5124 - DNA, 513 bp, Homo sapiens
agaagggcagcctgagctctgcctcctgtcagatcagcagcagcattagattctcacagaagcacaaaccctattgtgaactgcgcatgcaagggatctaggttatgtactccttatgagactcgaacaataaatgtaatgtgcttgaatcatccccaaaccatccccaccccctactgtctgtggaaaaatcatcttccaagaaactaatccctagtgccaaaaaggttggggaccgctgcactatgatactcaattaagggggacaccagggccttacagcatttaagcaatcaagcctcctatataagcaccaggccatagtatgaccccagagtcctgtcctgtctctgaatcacaaagtgggtagcagcaattgaaagtggaattccattgtccaggcacgatggcccacgcctgtaatcccagcactttgggaggctgaggcgggcagataatgaggtcaggagttcgagaccaccctgaccaacatggtgaaaccccgtctctact

SEQ ID NO: 5125 - DNA, 425 bp, Homo sapiens
tttgggtttttttattgttggtaactttttttttttcgaggcagggtctcactctgttgcccaggctgggatgcaggggtatgatcacagctcactgcagcctcgaccacccaggctcaggtgaacctcctacctcagcctcccaggtagctgggactacaggcgcttgccaccatgcctagctaatttttttgtattttttgtaaagacagagttttgccatgttgcccaaggtggtctcaaactcctgggctcaagcaattttcctgcctcggcctcctgaagtgttgggattacagacatgagccactgcacctggccaacatcatttttaatggctgtatcatactccattatatataaaatactccataatatcataacttctccatttatgaacatttagttcttttcaggtttttacc

SEQ ID NO: 5126 - DNA, 591 bp, Homo sapiens
ttagctatttatcactgcatttaatatttatgaaaacttgcaagctttaattatttttaaaaagacttggaccttaagtgggccatgacagtatcctcagaaagatgacaataagtaagaggatacaacttcctttataattgacagatagggttccgtttgtccaattactttttttttaaaagaagagataaattcactgtaatgaatgtgccataattggaatctatagaggtctaccatttgaataaaaggtgctggatgatcacctccttagaggaaccatctaaggagaaaaggatatacaaccaaatgggtgtgcattgtgatagaaaatgtccctctccacctccacttagtattttattaagacttagaaaaattaggccgggcacagtgcctcacacctataatcccagcactttgggaggctgaggcgggcggatcatctgagtcgggagtttgagaccagcctgaccaacatggagaaaccccgtctctactgaaaatacaaaaattagcctggcatggtggtgcagacctgtaatcccagctactcaggaggctgatgtgagagaatcgcttgaacct

SEQ ID NO: 5127 - DNA, 438 bp, Homo sapiens
tttttgcttaaaatattctgttttccagtttacagggcttttcaactggttttaagataaccactgtttacatctaaacttttttttgtaaatgactgctgagtttctatacatattccatagctagagtttcaaagtaaaagctctagtatctttgtattagtgtgtgtatgcgtagatgtgttaatatgtgcatgtatatatatgtgtgtgtgtgtgtgtgtgtgtgtgtgtgtgtgttgtggctactaggtacaaaattggctttgaaataaatattttcaaattaagtaaatgagcccaatgcatttgaagtacatgtgacttaaataaatatttaataaataagttggctttaaaattattggtaaaaacaaattagagatattttaacaattatcagcataccttatagtttatattaattcatcaagtgat

SEQ ID NO: 5128 - DNA, 596 bp, Homo sapiens
ccaggcctcagcctgacaagctcacctcctggtggtcctgctcgggtagtcccactgcctcctgggaaagttgtggcctctgagagagggaggaattggaggtataaagactggacaggacattctgggtttcccaaagctgatattgcttaatgggccatgttcagaattcctgacctgtgtgggcacttccaggttccagaactttgccagaggtgccctcagtagtatctgaaataagaaaggtggtcagctggtcaatgtgttgcctctcatgaaatgggcatgggctcctaaaggaaagataataactttgtttcttcaatataccagtacatttatttctctgggctttctagttttaagagtttatccatatattgctcgtggaatatataattccctcggtgagtttacacagaaagtcctccaccactgagaccctttttttagggtttaattacagggagatagattcaggccaagtcacctctataactgcaagggaatgggccccatgctagcctgatgaagagggctttgacacagggaacaaaacacaaggagggaacgttgaagtgttggaactgtatcta

SEQ ID NO: 5129 - DNA, 607 bp, Homo sapiens
gaattttgttctgtagggaggtaaatctattttctcttgaagatacagagctaatttatttgactgaagcacttcatgacagcaatcatggaacacaaaaagaagctatcaatgtgcacacagaagcaagaacacaggccgtgcacacaggacaagcacagcaactgactcaaaagatgagcccttcccccagcagtcagtgggattcttctggtcttcctggaaaggataaagaacttatgagcactgtcactctaaaagggacagaatctaacgcaccttcatacaggccatctgaagcaaaaataatttggataaattttaaccagccgggtgcggtgactcacgcctgtaatcccagcactttgggatgcgaaggcagatggaccacttgacgacaggagttagagaccagcctggctaacatgatgaaaccccatgtctactaaaatataaaaattagctgggcatactttgggaggccgaggtgggcagatcacaagatcaagagatcaagactatcctggccaacatggtgaaaccccgtctctactaaaaatacaaaaattagctgggcatggtggcatgcacctgtagtcccagctac

SEQ ID NO: 5130 - DNA, 487 bp, Homo sapiens
ttgctttctcctaaagatactcataacattatttgacattatacctgagacatcttgtttgtctattaagtgtctgtgtgtatgattcatgtgagtgactataatataatctattacacacttagctatctgttttatatttacttgtgttttgagaacactaaacataataaacgctatcactggtgaccaccaaatgagaacatcttgacaatcatctcagatacgataacacaggtttcaggaacacagtgtttgacaccagaaaagaatatatggatttgaacactggtcagtatgtgaactttagtatctgatctattcttttacagtttggttttctcagtggtaaagtgaggatatattgaagtcttaacctttaaaaagatgcagtttctacttcaaacaatagagtgttacctaaatctctatttcccctacttttgcatcttggtgtgccttttaatcatattctttactgagttgc

SEQ ID NO: 5131 - DNA, 343 bp, Homo sapiens
accagcctcttatttggtagcacctagaattgaggccaagggaagtaaagagatcttgcatataattattgaagtttgttttatttgccttcagacttccttcttcatgaattcatcttttctctttaccgtatttcaggttctcaatcctttttatttattcatttattttaaatagagacagggtctcactatgttgcccaggctggtctcaaagtcttgggctcaagctattctcttgtctcagcctctcaaagtgctggtactacagatgtgagccaccgtgcctggacaattctctttatttataaagaaacctggccgggcacagtggctcacacct

SEQ ID NO: 5132 - DNA, 578 bp, Homo sapiens
atcctttttaccttcttcctcccagtcaacctctctctttttcacgtactctaccaacatccccacccaatctccccttatgcctccaaaattagtcctatcctgattgtggagtttggggttttctttgattcaatggatgataccagtcacaccatttgaaaaaagcatatgacagtgttgttcagtgttggtgaacaggaattcttgatatttatttttaaggattccatttaattgctaattacagatctttgttaaattaagccgaccttcactcacatttaaaaaatttaactttgttttggttttcatgagacaaatatctctctttaagtgaacaagcttttaaaagaattagcttcttcagtatggaaagcaagatgcaattcgcagctggtgcaatggcttacaccagtatgtaatcccagcactatgggaggccgagggggaagaatcccttgaacccaggagttcaagcccgggctgagcgacacagtgagacatctttacaacaacaacaacaaaaacaaaataacaataacaacaaataattacctcagcctctcgagtatact

SEQ ID NO: 5133 - DNA, 582 bp, Homo sapiens
cttcctagatgggatggcggccgggcagagacgctcctcacttcccagacggggtggcagccgggcagaggctgcaatctcggcactttgggaggccaaggcaggctgctgggaggtgaaggttgtagcgagccgagatcacgccactgcactccagcctgggcgccattgagcacggagtgaacgagactctgtctgcaatccccgcacctcaggatgccgaggctggcggatcactcgcggttaggagctggagaccagcccagccaacacagcgaaacccgtctccaccaaaaaaatacgaaaaccagtcaggcgtggcggcgcgcgctggcaggctgaggcaggagaatcaggcagcagtaccgtccagcttcagctcggcatcagagggaggccgtggagagagggagagggagaccgtggggagagggagagggagagggacagagggagagagggagagagggagagggcaggatttttttttaagtaagaattctttaccaatccttctttccccaacataaaatctcctatttgaagtgaagtttgaggtagggactcgagaggcagtgcctc

SEQ ID NO: 5134 - DNA, 572 bp, Homo sapiens
cagtcaatcttattcactcacagaatgaattgttcccaccctattcaaggaacttccttccttcaacccacctcacacactcccactttccacaaatacatttaattcagacatgaaatgggatttcttgacaacaaagcctcattaggaagagagtggatttcaggagaagatgctggaattatccctctcgtggcttatctctggtcctatcatgaccacaggatgttcaccaacatgctttcccagtctgtgcagggagaaataaaagctcagtaaactttgacaaatttggtcaactctcaagggaaacaaggtgtttatgacagattgtgtctataagatcttttctctatgattcccattttggttgtgcttgacatttaaaatgaaaactaacagagcagtgctgagcagaaacagaaaggaacagtgatgggcagtaaaccaggccttgcttagtatttggtgtcagtgccatgcattcttaccagcagcattcagtgtcaccacaaaaagtgacatcttcctgaggaactgtttacattagaagactaaagaaaagctaaaac

SEQ ID NO: 5135 - DNA, 571 bp, Homo sapiens
taggttagtttctgattggagaaactgttctgaggagctctgaaaaatagaactacatttatcaaagttttagtgttgataagaagggcacccgataggttttcattctcagctatgagtccacagacacgactagaggtgaaataagtcttattaaaagtaaaatccagtctcgacccagttcaatcacagaataaatggagatattcaacccctcaagctttctttctagcaaatgaaagggactctctatgatttgaaaataaaatcactctatcttgagtgtgtgtgtatgtgtgtgtgtatgagagagagagtgtgtgtgtgtggctgtgtatgtttagacatatgaagagtaaagaatatacgactaagaaaaaacagatattaggtgtcatcccagagataatcagtacatttcaattatcagataccataaataggataatcgtgttaaagttaattaaggaataaatgggaaaaatagaaaaataatgtcaggaaatttgaatctacatacagaaatcacagattcttttctgaagcaaaaattataactacttttttaaaa

SEQ ID NO: 5136 - DNA, 605 bp, Homo sapiens
cttatctttcattaaccttgtatcctcttagtgtctggcaaagggtgagtaactaatcaaaatttggtcaattaatattaattttaaaataattacatgtatattagtacagagccaaaactccagctcgaaactcccacctgctttcattacccttcctggtgggcttctctgcttccccattggattataagcttcttgtagaccaggattatgtgatacctcattgtgtgagcatgtaaatagttgatactcagtgttcttaatataattgaaatgtaaattattatgattacacagggccagcataattaataggccatacactcaactgagaatacaagagataagttgtttgcactgcagatggtattttctaaaaatgaataaagtggcatgaactgaatgcaagtttatgttatctctagttgaaaagaaaagtttctctcttaagcactattacgccttcttttggcagcagcaataattttcttcttaaattcacaaaagtcctaattcttgaaaaagtatgctaaagcaatgtggtttactcaaacaacagcaagcgctctctgcatgattccttttcgaactttctttaagct

SEQ ID NO: 5137 - DNA, 586 bp, Homo sapiens
taatttttagtgcaaatgtagtatttcttaattattatattgtttatttggaagtcaacggtattagggttctctagagggacagaattaaccatcaagtcaacccagctgtgacagttgggttttactctgatttatttggggaaggctaagtgctaggaatgtatttttagtatgataatctgtacaactgatgtcaaaccaatgtattgcatgaattcgcaaagtggtcccatgacacttccaaccttttaagtagtcttcagatttttaaaagggcataaattttttcttgaaaacgctgtcacccaccataaatttgactttctatattctcttggaattgtactagcttttcaaggctgagaggatgaaaagtagggggcagcatcatgtgagtagaggatggttgtctgtggactaaaggaatgagctgagctcctcaccttcttatgacttcagaaatcacttactgacaagaaggctgacggtaactaaaactgttaaaaagctaaagttagtgtcctatcttgatatacttctctttccccaaaccaagggcaaaaccattcagacctgtcctctc

SEQ ID NO: 5138 - DNA, 598 bp, Homo sapiens
gttacttaacaatatttttcactttctaaccctagttctgttgccatgcaggtatgatttagattgacttatcaattaagttatgtaactgcttgaaattaacattatgtgtgtcaatgttgtgattacaatcttcaaactactggtttcacagactgacagatgggataattttagcaaagcctcaccttcttattctattgaatatggttcctactcattgtctagggtagaggttgacattacagttcactctaaagtaggaatcctctgagctcacaagaacaccaaaagcagcattaggaagcctcccaaaagatgacatctattgtgttgcctacacaacaacaacagaaagaaaaccttgagtgtagagaagagaagcatccaagaaactatacaggacaaaggaaaagcctaataaaaactgaagcccaaaggaaagattcaggtcaagaaataacatgcacctgacttcaaattatactacaagcctacagtaatcaaaacagcatggtactggtaccaaaacagatatataaaccaatggaacaaaacagagacctcagaaataacaccacacatctacaaccatcag

SEQ ID NO: 5139 - DNA, 538 bp, Homo sapiens
attgtttcaaaggagtgctacttcttcctctcacatccaagcataataaaaccttaagagaatatttgtgtaatcaaatgctgatgagtagaataaagaaagttaataggaaaactataatagacttatggttacataatggtgagtcatgagcagtatggtcatttttatatataagaatgaacttgatgaaggaaagctactttaaaaacaatacctagcatatcacttaacagggaatctcaccaggcagccctataaaaatcagcagtttctttctctaaaaatcaacagtttcttccttccttcctttctctctctctttctttctttccctctctttttctttctttctccttttcttttctcttttcttttctttctgagacacagtctcactctgtcacccagactagagtgcaatgacacaatctcatctcactgcaacctctacctcccgggttcaagcaattctcccacctcagcctcccgagtagctgggtctacaggcgcacaacaccacacccagataattttt

SEQ ID NO: 5140 - DNA, 534 bp, Homo sapiens
gcctcatttaaccagcactgacagcacatgggcgtttcacagaatttaacttaccaaatagcctaaagttatctttccttataaagttaaaacattttcatgggcagtttttcaaaatgtatgcaattcttccttgcttttttgcatgtagcaggcattgcttgattaaactttatgttggatgacttaaccttttcataatgactcaatgtcatcattacaaaaattaattattactctgggttataatacagtattgttctcaggagtttttgaggtttggaaagatatttatcttactaaaagctctagagtgctatgattcttcttattagaaggatgagggtaaagaaggggtctaaactgaatactcagttcccatggctctgattttagaggtcattatgtaattctcagacacctaagttttgaggctatccctggaagaaactaccctaaagtgggagagaacagaaagatctctttgagcacagaggacatctactgaagcccaaataattttatactatcagc

SEQ ID NO: 5141 - DNA, 600 bp, Homo sapiens
agttattaggtgacgcagtagagattgtaactcagatctgtttgacatcacatttattccttcctaaatagcttctatttttatggacacaaatcttactaattatggataactgatgctgggattaggcatacaaacaaaaatgtagtaggctagctagaatgaataagcaaaatgtaaaatgtttttaacagaaaatcaacattatcatacttaaaaacagtttgtctaagaaataggaagtattgatagttttgtcttaattacttaataggaatccttcttatttaaatcattaattccttgatatacaaatagatcttgtataaatgaacaacataattcattctaagtattcttggaatactttgagaatcttagaattcgtgggaagtcttctgtaaagaacatgaagaataaacaaaacacttttaaaagttattataggccgggcacagtggctcacgcctgtaatcccagcactttgggaggccaaggcaggcagatcatgaggtcaggagatcgagatcatcctggctaacacagtgaaactccgtctctactaaaaatacaaaaattagccgggcatggtggtgggcg

SEQ ID NO: 5142 - DNA, 594 bp, Homo sapiens
cacccaggctggagtgcacgggcacaatcatggctcactgcagatccaagctcctgggctcaagtgatcctctcacctctgcctttcaagtagctgggactacaagtgccagccatcccacttggctaattttgtttcaagagatggggtctctcaatgctgcccaggctagtctggaactactggccttgagtgatcctcctgcctcgggctcccaaagtgctgagattataagcttgagccatcatgccaggccagatggtgcacagtttttaaatgaaatatttaaatcatataaaaactcatggggaataatataacgaatataatacgatacaatgcatacaatgaacaacacaatggcctaatatatggcaagtcacctttattatctatggacctctttttacccctccagctctccccaccaatgaaaaccattatcaggccaggcacagaggctcacacctatgatcccagcactttgggaggctgaggcgggcagatcacctgaggtcgggagttggagaccagcctgaccaacacggagaaacctgtctctactaaaaatacaaaattagtcaggcttggtgg

SEQ ID NO: 5143 - DNA, 516 bp, Homo sapiens
aattcatgctcattaaggagacgactaagtgaatcaacgacatcactaaggttatttctctatcctcgcatatgcatatagattaattcagtactctaataaatgtacaatttgatgtcactgtaatctcctttctctatatgtcatgcatcctaaatagtaaaatgatcatagggctatagcatgctctatatccagtttctatagaacatcaagtgcaatacgaaacacagagttctcagcaataattgaaggactgttaaagcatgaattaatctaacacatcaacaatcaaattaagaatcttgtatctttaattttaataagacaagtagaccttttgaaataaactcaaggtcataaaatattacctataaacataaacattggataaatgtgtaaaccacatctcagagttgacaatgaatgaatcacgaatgctctttttattaacaagtttgcgaagaaaactaataaacaccacatattaaaaaatacgcatatatttgctatata

SEQ ID NO: 5144 - DNA, 522 bp, Homo sapiens
gaaggggcgaggagggacagagattgtgggggcctggcacattgagtagactctgccccatcccatgtgcctgcaaagaatgatgaagtagtggctgatatagctgctcccgtaaccagccatactaaagcttgattctacccgccacctgcaagtggaaaggagaattccatgttgaaatggaattcagggcccaaagctgtaaacagcattctattgtcagcttgtgtcataccaggaaactctaacacatgacaaagataatcatcacagtcttaagagtttgggtgctatcggccagatcacgaggtcaggagtttgagaccagcctggccaacatggtgaaacctcgtctctactaaaaatacaaaaattagctgggcgtggtggcgcatgcccgtaatcccagctactcaggaggctgaggcaggagaatcgcttgaaaccagaaggcggaggttgcagtgagctaagatcacgccactgcactccagcctgggcgtaagagtgaaacttcatctc

SEQ ID NO: 5145 - DNA, 591 bp, Homo sapiens
ctctcctttgtccttgggcctcttcgatcacttattgtaatcgtcatttattgcaattgactacttgcgcctgtagtcccagctactcaggaggctgaggcaggaggatcgtttaagcccaggagtttgaggctgcagtgagtcataatcgtgccactgcaccccagcctgggcaacagagcaagaccttgtgtctaaaatttaatataaaaattattttttatattaaatcatggaatatttcaaacatacagaaaaccttgtctcctgtatgtctcctatcatgccccttgatgacagggacacagattcattacttcttctgtgccccaatcctcagcctagagcccagcccagattaagtgttcagtagaaaaacaaaacaaggccagatggggtggctcacgcctgtaatcccagcactttgggaggccaaggtgggcagatcacaaggtcaggagttcaagaccagcctgtttaacattgtgaaaccccgtctctactaaagacacaaaaaattagctgggcgtggtggcatgcccctgtaatcccagctacacaggaggctgagggaggagaatcgcttgaacc

SEQ ID NO: 5146 - DNA, 559 bp, Homo sapiens
gtagtggaaatcttgttttatatgcattattgaccagtccattaattaaccgtctcacaataattaacatcatgttaccttttagtttatatcaggaaaacctaccagagttttctaatctgttaaactgctgataaactgccagctagagtttttcccactcccccaaaatgtttaaaggtgtcatgaatgaggtatattatgttttctggctcatgatttggcaatccagtttgtcattacatattacacagagttgtcatggataagaagaggtggaaaatgtccagtaagccagttttactctgcttctgtcaatttataacaagctgccccttgaaatttactttctgattattcataagtattgtcactgttcttggaaaaggaaaaatgaaaagtgcacaataggccaggcatggtggttcacacctgtaattccagcactttggaaggccaaggcgggtggatcacctgaggtcaggagttcaagaccagcctgaccaacatggtgaaaccctgtctctactaaaaatacaaaaaattagtcaggcatggt

SEQ ID NO: 5147 - DNA, 524 bp, Homo sapiens
aatatcagcctctgcaaaactctacatgaatccttatgcagaatcagagctcaaaacgcccaaactggattgcaacatagaaatacaaaatattgccattgaactgaccaaacctcagtacttaagtatgattgaccttttggagtcagtggattatatggttaggaatgcgccttataggaaatacaagccttatttaccacttcataccaatggtcgacgatggtggaaatatgcaattgattctgttcttgaagttcatataagaaggtatacacagatgtggtcatggagtaacataaaaaagcacaggcagttactcaagagttataaaattgcctacaaaaacaagttaacacagtctaaagtctcagaagaaatacagaaagaaattcaggacttggagaagactctagatgtttttaacataattttagcaaggcaacaagcacaagttgaggtgattcggtctgggcaaaaattaaggaaaaagtctgctgacacaggcgagaaacgtggaggct

SEQ ID NO: 5148 - DNA, 536 bp, Homo sapiens
attccttatcaatccatcatagtgaatttcagagtggcccctcaataaacacatgttgaaatgtttgctaagagagccttgtggctacttccaaatttttcttctgtaacctgaaagcccaggacaacaatttctatggcagtgctacattgggtaattatttcttcctttctttttaagcatgctaggaacttactctgatgaatttgggaacctagattttgagcgatcccagcatggttctggaatgagcaacaggtcaacagcgaaaagatttatttctgctctcaacaacgttgctgaaagaacttataataatatatttcaatttcatcaacttcggcagattgccaaagaactaaacattcaggtatgttaaactagttaatctcttttgtaataatttcaggaggtccttgttaatatatagtagaacagaaacagtttttacttatttaaaattcatacctgcttcttctcaaaggttttcagcatcttgatagtcagagggaaacattgtagtaagacagtctcta

SEQ ID NO: 5149 - DNA, 97 bp, Homo sapiens
aaaaataaaaaaataaagaaaggtaaagaagtcagtcaagtattaggtactggctactggcacctgtaacttcatgctatttacaaaaacaggtgac

SEQ ID NO: 5150 - DNA, 532 bp, Homo sapiens
ggaggtggaggttgcagtgagctgagatcacgccactgcactccagcctgggtgacagagcaaaactctgtctcaaaataaataaataaataaataaataaagtagatgattcacagaaacctctgttcttttagagcactcttcaacactttttatgctttttatgtttgatttctaataaatatgtttctttcactacaccataagtatattccttcttctaagtttcattaaggtagaatcacgtatgtcttatttcctgttatatccctaagtacctagcatgtagtaggcattcaataaaaattgattgaatgattgaacactcaatcccatgatttgagtgtttttttttgtttttgtttgtttgtttgttttgagacaaagtcttgctctatcacccaggctggagtgcagtggtactatcttggctcactgcaatctctgcatcctgggttcaagcgattttcttgcctcagcctctcaagaagctgagactaactacaggcatgtgccaccatgcccagtgat

SEQ ID NO: 5151 - DNA, 598 bp, Homo sapiens
ctttgcaattgctctgcctccttttaaaacaaaacttttgcccttgctcatttctacttggagctgtcatttcttcctcttagcatcaataactccattttgctgtttagatcgtatcttcctcagaaaagatgttccagacttcactaagtcaaattcctttgcatagctcttggcacagttgtggtgttacttttgtgtgcatgttagttttattccttcctttatcccactgatctgagtttacagatcagtgggatgtgactggtctgtttttattcattcttgttccctaggtgactaatagcatagccattgagacatagtaggtgctcagtaaatatttgttggatgagtgtttaggtttaagaaagtatctttgcaaacatttgcagcattatcttttaatatttatagctagtcagtcatatatgccaatttctgcatctacctatttgtcctctttaactgtatatgccattagcagcaaagcagtaatatggatattactggcaggtttaagtcattgacaggtaagttaaaacaacaaacaaacaagaagggaagggagaccaagtatttaaaaaaaaaaaaaaaa

SEQ ID NO: 5152 - DNA, 530 bp, Homo sapiens
gaaagtactttgataagcaaggttatgacaacttcaagctgttaactcctttaaattctcctcatcttttgaggcaagatcatgttcttggcatggcccttcacaatcatgaagactgcagtataggacctagcctcttttccctgcatggaaatccagtaaacctggattataagaatgtgtggttaaagaggccaaaacataagactgatgaagggtgaatttagagatgtgtagtgaataattaactttacccaaagggaagttcggcctttgttctttgctgctgttgggtaacctctaggctctgagtgtcctgcctgagaggaatatctttattctagaatttgtccacaggaaatctaacaatgtgacatgcaatggaagctttgaaccatgccctataagttcagagttccagatgaagtagagacaaaatgcattagtcttatctcttggctgaggatgggaactggagactaaagtttagccacagagacagtatgtgatcaataaaaattctgaacact

SEQ ID NO: 5153 - DNA, 527 bp, Homo sapiens
aaacagatatattaccaaaaaagtgttcaagacctgcattcctgaacaataaaaatacttgaacaatatttaatattaagaaaatgtcaattatccttaaattgatgcacaaatttaatatgatctcagttgatataatgtggattgtgtccctgcccaaatctcatattgaaatgtaattcccaatgtcgaaggtggggcctggtggaagttgattggaccatggggatggatttctcatgaatagtttagcaccatccctcttggtactgtccttgcaatagtgtgtgagttcttgtgatttctggtcgtttaaaagcgtgtagcatctcattccttgctctctcttgctcctgccacgtgaggtgcctgccccccatttgcctcctgccatgattgtaagtttcccgacacttctacaaaagccaagcagattccagcaccatgcttcctgtacaacctgcagaaccacgagccaattgaacctcttttctttgtaaatcacccagtaccaggtatttctttat

SEQ ID NO: 5154 - DNA, 382 bp, Homo sapiens
ccttccaattattcgctattactgcaccagtaacttgtgtctccccttcaatgtaagtgccataagtacaaggactctgtgtttaggtatgtgtgagctattcacaattataatggaacagtgagaataagtcactaaagatatcagtgtctggcatgtaataataacagcagatcagtcaatatgttattaaatatttaaactatggggaaatgggaaaagagaaggctattgcctaggtaaatatcagtgccatgatgatgggccatggtagcttgtttcactggcacatgtttcattgaaccaagcttctgcaaaggcttggtctcagcacctggaaaagcagtcaattgaaaagatatagtggtggtgtgggtgctgc

SEQ ID NO: 5155 - DNA, 605 bp, Homo sapiens
aaatctatctttttgtctatcaattatctacctatctatctatctatctatcatccatttatcatttatctatcatctgtctaccatctattatctgtcctatctatctattatctttcttcctatcttatccatctatccataccatctactgatctatgaaatctctctcactatctagctacctatctagctattatatatcatctatctataatctttcatctatcatctgtctttctatcttatccatccatcaatccaaccatccctccattcaactatttcatctagtgatctttcaatcaaatctaactacctatcatctattctatctatctatttatcaatctatctatacatccatttcctactggttctgtttctctggcaaatattgactaataataattctagtctcctaatgatgagatatcattgtcagatagatctatgaattcagtttgactaaaagcatcaatttcagcactagggatcaatggagaaaagagaaataaaaggaaggctgcattttcttggatgagcaagaataaacaaacagagctaaccagccatacaaacactcagcatccacctatcattct

SEQ ID NO: 5156 - DNA, 585 bp, Homo sapiens
ggagaactaacatgcgccctgcaagaacacattagcccttgtaaatcaatcgttcctctgccttacagattacctgcaaaatgttgtaataggtgtgatttttaatttcattaatttggccaggcacacctgtattcccagcaacttgggaagccaaggtgggaggatcacttgagcataggagtttgaggctgcagtgagctgtagtctcactacttcactccagcacaggtgatggagtaagaccctgtctctagaaaaaaatccattgattaataaatactaataaataaaacccagtgcggccgggcacggtggctcatgcctgtaatcccagcactttgggagaccgaggcgggtggatcacgaggtcaggagatcgagaccatcctggctaacatggtgaaacctcatctctactaaaaatacaaaaaaattagccaggcgtggtggcgggcgcctgtagtccctgctactcgggaggctgaggcaggagaatggcgtgaacccgggaggtggagcttgcagtgagccgagattgcaccactgcacttccggcctgggcgacagagcgagactctgtct

SEQ ID NO: 5157 - DNA, 541 bp, Homo sapiens
acaccatgttagtaaggctggtctcgaactcctgaccgcaggtgatctgcccatctcggcctcccaaagtgctgggattacaggtgtgggccactgtgcccagcctccagtaaccctatttttgcatttgatgttgaaaattgctcacatatgatggtaatcctattgaaagacttgaaattagataaaatgttagctgtgaaacacttcataaaaaaaacaaaacaaaacaaaacaggccgggcagtggctcatgcctgtgatcccagtactttgggaggccaaggcgggcggatcacgaggtcaagagatggagaccttcctggccaacatggtggtcaagagatcgagaccttcctggccaatatggtgaaaccccgtctctactaaaaatacaaaaataagctgggcgtggtggtgtgcacctgtggtcccagctactcaggaggctgaggcaggagaattgcttgaacccaggaggcagaggttgcagtgagctgagatcgcgccactgcactccagcctggcgacacagcgagac

SEQ ID NO: 5158 - DNA, 590 bp, Homo sapiens
tattcctatcttgcgtgtccaccatctattgaaagccacatcaaaaacttaataggctgcatgtatattgaagaaaaaggggggagccagcaataactggatacatatcttgcagaagatttatgtgcagtgcaatcctatggtgattccaaggtagaattgactagacacccatatctagaatcttcttagttattacgctttgaaaatgcaatgaataggtacattggatatttgttttgtaaagaacactgaacattaaagagtgaagataaaattcagtttactactgtcttgtccatacaaccacagaatgctagctatgattgaaagatcttgtatctgcgagaatcaatatttatgagacctaacaattgtcttagagagatggacttaatgaactgcatgcagtaacttaaattgaccaaatattttgatagatttgtcggagtccaaaatcaagtaaaataatgtcatagagttttatattaacttgtaaaatggattagtttcaatccttttatgacagtgcattaaaaaataataacccatactcatctaaaatttctgttcatctgatcacagtgagc

SEQ ID NO: 5159 - DNA, 603 bp, Homo sapiens
tgccaaggagggctgggaatcttgccctacactctgctgttgcttttaaatgcggagaaggttggaggaaaaagaggtcgcatctgataatattgatcagactcaaagaagatgcgtgcctcatgccctcctgtctggtgcccagaggtggcagctgctcagaggtcactaggtcaccatggcagaagcaccgatgacctgaatgcctgtggtaatgaattcttccttagtcttgcctaagacgtaaactcagctgggcgaacaccttgatttcagtgttgagaccctgaacagggaaccttgttgtaagctgctaagtttgtggtgatttgctatgcagaatggggccacaacaggcagcttcgaggcaagttatacaaaaatgaaatgactgatcttgctcgcctgaatacgatggattaaaaatactatacacactttacatgtaaatgagcaatgtattgtctcacacataagaaatcctagttctacttgggttgtggattttctcccctcattgctgtaggggcctttcttgccttcgtccctccaagggaatattcagcacctgccatacctcttctgagcacactgtcttttctc

SEQ ID NO: 5160 - DNA, 501 bp, Homo sapiens
tggggctcaatagtttaatatattgtttaatttctacatcaatgatagtttaattggcattcatgcaaatcagttctgctgggagtttattatcctactccagtaacaagtaacgcattccttaaatatagtgtatgtataaattctacatggtaagtgaagctgtctttatgaattgctgctatagaatatactagattgtgtaggttttagtacaatccaggtaattatcaagcctttgtaatattttcaggaaagtgatcctttcacttcagtttatggaacttggaaagttttcagttaccacccacttgttagatcataaacttaattctatgtatctgaatttatttttctatttataaatttatctggatgttttctcaaaggtttcccgattaaaaacctatgactttgtaaaattaaaacagaagtaataagaattgtgttaaaaaacagaatcaggccaagcatggtggcttatgcctgtaatgccaacac

SEQ ID NO: 5161 - DNA, 595 bp, Homo sapiens
tttgtgatctgtcatggtcatggtatttcagagttggaggatggtctgagttctgacctggtgtaggaatcccttctcccaaaactctaacagtacattctcaggcttcgtgagctcaggcttaagacacattattttctgatgctggacagcttctttaaaaaaatgtagtttcttacattaagctaaaatttattttatgaaagttcaagaattctggtccaaattgggatgaggcctatggtgcaggacttccgtgaaattttatgagattacaaatgcaaaacacttagaacagtttctggcctattgccagaattcaataattgaataaaggcaggcagaaatataacagagataaatgtcatgtgctgtacttaggttaaagtatagaatatattagttctgttccatcttctaggttttttattttattttattttttcattataaatcctccactggaattctagggtttttaaaatcaatttttaatagctaaaataatgctttttcaatctagtaaattgtccctaactcaactttatttagaaagtacacatagcaaaactgccttagtctgggcatgttttat

SEQ ID NO: 5162 - DNA, 592 bp, Homo sapiens
atgcaaccaggcattcaatccaaccatacatccaagcaaccatccattcaatccaaccatacagtcaaccatccatccattcatccaaccactcatccatccatctctccctccctccctccattcatctatccatccattcatcccttcaaccatccatccattcagctatctatccatctgtcaaataaaagtatttcactcctggtacccatctagcaccatatattaaaaacataaggaaactgggattgactatcatcttaaaagccaattacatcacatcaggcatatcaggccatgcagaactgttacatccaagtgatacaaattataattactgttattaataataaaaaacagtttgcaaccaaacacatagtagaatcagataagataatgtttctaaaatgcctctcacagtgcctggcacatagtagatgacgaaaagttgatttcctgtaagtgtcaaccattgggctaaatcctgagataaaattatgaacaagataggcttggtccctgcccccatggaacttctatttgataagtgctatggtggcagcaaagagctcagagcatataacagaga

SEQ ID NO: 5163 - DNA, 597 bp, Homo sapiens
tttccgggggaaggacagtctattaatgtggcccatactgtccagcctcctggagcacagagcagtggacaaacagagctgagtgtatcttgggggcaaatggaacactctatgcatataaaaaacacttgcatgtactccataaatatgtaaaacattatgtatcaataaaagaaaaaatctagctcaaacagtaaacactcctgccacccctgaaactgacatttccttaagagggacatccaactgtgacctaaacacaatgcatcctgtcccctcccagaagctgaggtgtccatactcacagagggtccctttgacagctggtaatggctcccagagtctcttcctggaaggcacattgagcctggcaggcacccaagggcacatgaatctgacccctctggggattgctgtcagctgctgcagatggaaggtgctgcctctgcggcatctcaccacggagctcccattcctcagcaaccccccatacctgctggccaaactgggggaatagagacatgagggactttgacctgaatcccaagtaaaattactccaaaatatttgaaaatttgaaacaacaaatcatcccat

SEQ ID NO: 5164 - DNA, 592 bp, Homo sapiens
cattgttcttttctgtattaatagttatacttaaatgagctgatctagggctttctattaatctctattaactaatcatgacattttgattccatttaaaattgattttgtattttactaaaatatctagaatttgggtaatgctgaaaccctaaagataattgtgaattaaagtgatatctctctaacattaaatccaacatattttaaaaacataattatttaataatgttttcaaatgattccacacgtgaatagcactgaaaactataataagggcagtgatgataatattcaggctatcattccaggcactcagcatacccatctacttgaagatcatcaatttataagaaatgctctgtttgatagcattgctcaccgattctctaccaatacatttataagatttatgtgtgccttccaaattggcttcctactccagattcttagacaaaaatacatattggatggttaataaaattcattctactttccatttattacaagctatacttgaaaaaatttattgagcactgaaatacatacttgatctactgtaatagaaagggctccttgatgtgcctaaaga

SEQ ID NO: 5165 - DNA, 542 bp, Homo sapiens
gtaaataaatacttcaattctgccaggggaggtggctcacgcctgtaatcccagcactttggaggccgaggtgggcagatcatgtggtcaggagtttgaaaccagcctggccaacattgtgaaaccctgtctctactaaaaatatgtgttttagctgggcatggtggcacatgcctgtaatcccagctactcaggaggctgaggcaggagaattgcttgaacctgggaggtggaggttgcagtgagccgagactgtgccactgcactccagcctgggtgacagagcaagactccatctcggaaaaaaaaaatcaattataattttgtttacatgtattattacacaaaatggtccattattcagaagcctcccatttgaggtaatgattggtattattaggatcttttgatgaaatcttggttgaattgatgataatatgtttttaaaatatatagatgtttttatttcccaaataaaagaaataaagactctttacaatttaaggagaatattagagaatttttaaaataggtcaggcacg

SEQ ID NO: 5166 - DNA, 575 bp, Homo sapiens
cttatcctagacctctttccctggccctttatggcttgggctccgtagaggacaaagtgaataaaaccaaattttttattgcttcaaacagtatgatttcatcttgtaagatgtactttttcttttctaaggctgaatttgtttgatttctggtgaacacctatcttctctatccaccttcattcatttattcatctgttcaacacatacagtcggacacctactcggatcaaaagtcagagatcttaagagcacagcctctaagccagatcatctgagttcagatttcagttctaccattattagttcaatgatattggacaagttacttaacctgtctatgatcaaaagtcagagatcttaaagagcatagtctctgagccagatcatctgggttcagattgcagttctaccattattagttcagtgacattgggcaagttacataacctgtctatgctgcagttttctcatgtgcaaaatggggataataattatgcctacctcatagcgttattctgagaagtaaatgagttcataatgtgaaggccttagactaataactggtgcatatg

SEQ ID NO: 5167 - DNA, 487 bp, Homo sapiens
atggccgtgaggactctggggttgagctggagagtgaaacagacaacactgaacgagaagaccgacaatgcagtgttacagcagtgccttaccaattgatgagaactaaaatggatgttttatagcattttatctaaaaacagccccaagaaaaaggaattcagtttcattattgatatttaaaatggttataatctttcaggtggtagatggggagctccgcaacagcaggaattggaatccattcattcatttatcagtaacatgagcacattgcctagcacctagtaggcactcactaagcactggctgcaccaattcatgcacctttaactatctgctgagtacttagacacaattgtcagtgttaaactatattctgatttctgtattttaaaaatccttgggcttggcgtggtgtctcatgcctgtaatcccagcactttgggaggccaaggcgggcggatcacgaggtcaagagttcaag

SEQ ID NO: 5168 - DNA, 398 bp, Homo sapiens
catgtttctgaatttttaatacattttattaattcttgctgatctgtgaaacactaagaaaagtaaattgttttataattttgtctcttaatatcctccaaaaaattaattctattgctttttctttgcatacttcttggatactattttcctccctttgtgtcagtgacttatcacaggaagaaaaaaaaacgttccccatccattccttacttggtatctatagggctgtaagcgaagacattggctttatctacaaactgctgcagtcagattgttatggaaataggaattaattattgtagaagcagtataatgatcttctttggaatcagagaattaaaaccaggattcaaagcaatacccgtaagggaaagtggttggggtttatatcggaa

SEQ ID NO: 5169 - DNA, 452 bp, Homo sapiens
taaggaaattctacaatgctgctgtatgaatgtgcttgtgtctgttgccagaaacgaaggtgaaatattggcaagcagggaaaatatgtttgggacggaaggacagaaaatagggaacatgaaaataagactctagattttctgagggaagaaagacatcttgatcatttttttctgtcaccagtatctgacagaagaaatagttaaagataaatggtacaaagatggcactattgactttcatatctcttagtacttccaaagcaaaatactgtctttccactatctatcaaactataaaattgtttttgtttttatatttattctgtgtcatcaggataataagctatattcttcttatataggcaggatgataagctacacatgtaataagagttcaggtcacttttgtattaatagcaataatacatttacctattagcatgtcatag

SEQ ID NO: 5170 - DNA, 538 bp, Homo sapiens
ggtacattatatctctagaatgcatttttctttgctttcactgtcttatgtaatgtaatgaattgtagatgatggataggaagtgcattgttgccttttttgttgctggctagccaagtctttgaacaacatcagttatttactaatagccacaaatgtttacactgctaagaaaggaattattgactgggcgcagtggctcacccctgtaatcctagcactttgggaggccgaggcgggtggatcacctgaggtggagcattcaagaccagcctggccaacatggcgaaaccccatctctattaaaaatacaaaaaatcggccaggcggatcacgaggtcaggagatcgagaccatcccggctaaaaaacggtgaaaccccgtctctactaaaaatacaaaaaattagccgggcgtagtggcgggcgcctgtagtcccagctacttgggaggctgaggcaggagaatggcgtgaacccgggaggcggagcttgcagtgagccgagatcccgccactgcactccagcctgggcgacag

SEQ ID NO: 5171 - DNA, 344 bp, Homo sapiens
acagaaggggttttacatggagcaaaaagacaatgtatttttaaatgtactttgttgaaggtgtgtgttgtcgagacaatacagcagtgaagagaaggcatgcaaagctgtcttgttggagtctggctaaagagcaccaaagcagcctggtgtgggatgtcctctgggggccacctggacttgctatgttaacatggagggactaggcaggggtatgaagaaggaagcccagcagagcaggaggcagcagcaacaatgagagattggttatccatatgacttggatctgtgtccccacccaaatctcatgttgaattgtaatccccaatgttggaggtggggac

SEQ ID NO: 5172 - DNA, 305 bp, Homo sapiens
aataggttttatgcaagaattaaaactgaagtgaaacaatggtggctttgtggctggctttgatgggctgatcagagcaggtcagtcagggttcagccagaggagtagaaccaataagatatattaagagatttattgcaaggaattggcctatgcaatggtgggggctggctgggaaggtctgaaatctgtaggacaggctgttaggaagggcaggctgtttgttaggaagggcaggctgttaggaagggcaggctggtggaatttctttttctttggagagatctcagttctgggtgggtgcg

SEQ ID NO: 5173 - DNA, 495 bp, Homo sapiens
cttatatgccccagtttaatcatctgttaaatggggttagcaataatagctcatactgttgatcatgagaaggatatatgacaagacatttacagttctttgtaacttatttgggacctaccaaagaaaatattataagtagtgtgttaatgtacacacagaaacattaacttgtgagttccacagatcttgggggtttcataagaagattactgagaaatctaaataacccagtatataaaactctgcatagcaaaatacctgatacatagtaagatgtccgtaagtattaattatcaatgtcattactttatgtatcacatatactgatatttatccaagcgtcaatcttgccttctttctcaataataaaatttcaatttttgtttgtggagacagtgtatccaggtaaaaagggcattttgcagtcttcctcgctgtttatgatggccaggtaattcagttctcttcagtgcagatgtctcctggggactt

SEQ ID NO: 5174 - DNA, 583 bp, Homo sapiens
  misc_feature 487: n = A,T,C or G
tgtcctgatgtaactccatggcaaaatggcaaggttatgaattcccctaacaattgcctacaaattctcatgttcagcaaccccaaatctcagatttttctagactctcaatgccttcagttattctgggaaaacaaaatccacccaaatgcaaactataatatccaagccttacagcctcttacaactgctactctagctacctcatacttgttcttcaggtcagaaggccaaaacacacttcgtttcttcactctaagtttaatatcttgccttaaatctgaggaagcattcttcctccataaacaaatgcatgtatttgtcttccagccaactgaactagaacttgtacactagtttacttagccctagacatccaaattgctccttccaatcaattccttccaatcccactttatagttctagcagagaaaactgagcaatccatctgattgccctgttcattggcctagggattgccattgngttaagcatgggaataataggtatgagcctcacagcccatacttattataccctctcaatggaacaccccaccaagctcaaacatatctcggacac

SEQ ID NO: 5175 - DNA, 544 bp, Homo sapiens
gaggagcctcctaggagatctttgacttgatcaggacaaaatcaggttttgccatattaggatagaggggatgagagaaacaacattgcacatagtttggataatgacgtgggtttgtaagacaactcttcaaacggtgtaaatgacaggagcacaggggccaggctggtatcagagaggggaacaaggaccagttcttagatggatttgtgtatcatttaaggaatttgaatttcacatagattggggatcccttgaagggtactcagaaggagttatattatcaggcagaaacatcactctggcggcagcatgagggatgggttgaaaaatttaaaacttgaagcggcaagtccattcaggcgactactgcaatagtcttggcatgaaatgacacattaaggcaagattgcccagggctttaacattgatattattttaaaaataaattgcctgtgctagtaatgtcctgtttctttgcttactggttgaagactcaatttttatagataatgcggaatagatttatacagccagtttagct

SEQ ID NO: 5176 - DNA, 600 bp, Homo sapiens
gggaagcttccaaacagccactagccatgttaccaacacatacctgtgcttcacagccagcaagcactctgagcatgtatgtgcctgcacccagcctggcaagtggtcatgtggcaacctactcccatgaaaggccactgcagagctgcatggccttgctgcacccacaaacattcacatgcagcccgacatccagtcctgcagcagctctgcctctccaacagactgccacagggatgcttggcattgctgtgctcatctagtttggtggctgccctgcctcactgaaaagaaagccacacagccaccttgctggcagcatctctgtaagctcaagcctggcccaacagccagcacagcagtagccactgactctctggagaggtagccagacagcttgtcagctctctgtgcccccacatgcccaacctgaaaaccaatccagtgctcccaccccaagaaaactatgccactacctcaaaagctctcacagcgtagaccactgagtcaatcacagacaccactgatgagtattacagccaaagaaactgcacagataccgtgctactgagtccacccagaatcaaagccattcaccat

SEQ ID NO: 5177 - DNA, 329 bp, Homo sapiens
cccacgttttttgtttccagacatttgtactgggacatgttcaagaggacactaagaaaacaaaatgatctttaacccatgtgtacatgtaggttccaaaagtctcaggcagaccgggctaggtcgctcacacctgtcatcctagcactttgggaggccaaggagggtggattgcctgagacgaggagttcaagaccaacgtggccaacatggtgaaaccctgtctctactaaaaatacacaacatgagctgggcgtggtggcaggcgcctgtaatcccagctactcaggaggctaaggcaggagaatctcttgcctgggcaaccagag

SEQ ID NO: 5178 - DNA, 589 bp, Homo sapiens
aggtagagaaatatggatcagggagtctcctccagtttttattaatagttaggggaatatctcttggcatttatattcagatccatggtgaagatcggaatgaagacaatagaaccataagcatcttttctttttttttgagacagggtcttgttctgtcacctgggcctggaatgcagtggtgcgaacatggctcgctgcagcctcaacctcctgggctcgggcattcctcccacctcagcctccgtagtagtgggactagaggcgtgtgccaccatgcctggctaatttttaaatttttttctcttttgtagattcagggtctcactatgttgctcaggcttgtttcaaactcctgggctcaaatctttctaaaggcattttttccaaagtgagtatctgaataagcacattattcaggtagtgaaaaccaatgcttagtgggaactttcttttgtctcaattactcaaaatttattatctcaaaaaagaatgctggctgggcacagtggctgatgcctgtaatcccagcactttgggaggccgagatgggcagatcacctgaggttgggagttcaggaccagcctg

SEQ ID NO: 5179 - DNA, 592 bp, Homo sapiens
tgttgggtctcaaaaattggtttgtggcttccttttcaaataagtcacatatactgaattgccaactgttaccaccctaccttttgtattaattcacaaatgtaggcaacctctaggtaggttcaatcttattgtctccataacgatcaacacacaactgataaaacaagcaccagtctcttacctttgcagactcttgagaaggtccctgacattagagagatttatggggtcaatggacaaatgctagatttaataaatacttaagatacaaagccgctgtatctatctcttggatcccttctgattgcccagtgtggagatcatggttcttgcaacttcaggacttggctgctgagaggagccaagaatgtggaaacagtgtagctcatttattgcttccatgttggtctgagattatgggaaaaaaggtactatcagtccatggttggattaataacaaggaagagcattaaagctattttgagacttttcttcaagtttgcacttggaaaatttccaatctcaagtaaagagaatagtggccgggtgcggtggctcatgcctgtaatcccagcactttgggacactg

SEQ ID NO: 5180 - DNA, 561 bp, Homo sapiens
cttaataaaatttaatggtattctttgatcaacctcaagtttcacaaaacacactgcactttcataagggctccccatggctgacagatcagccgtccaaaagaagggaagtgtcagagatggctctgctagactcacgtatttttcagtagaatctgggtcaggttgtggtggtcaggagatgcttctggagctctgggacccacaagcctgagtgtcatggtggagtattaggacaacttgaaaacatagtggcaagagaaggcttcctctctcccctgcagttcatcctccaccacacccaaagtgctaaatagatattggttaaatgaataatggggccgggcatggtggctcacgcctgtaatcccagcactatgggaggctgaggcaggtggatcacgtgaggtcaggagttcaagaccagcctgggcatagaggcaggagaagcacttgaacctgggaggcagagtttacagcacgctgagatggcaccaccgcactccagcctgggtgacagagcaagactcaaaaaaaaaaaaaaaaaaaaaatttttgggg

SEQ ID NO: 5181 - DNA, 415 bp, Homo sapiens
gtgggcacggagttatggagcctgtgggttcctgtccttgtgttcaatggctgtccttgtcacttgtggcacacctgggctgggcagggatgagtgtcacccaggcccactctgtaaggagagctgtcctctccaggcagtggcatctcagctgtgataactgggcaggtccactggccagaatcataccagacagaacagtgccagaggccacccccacctgcagctcatttatttgatccctactgactgccctgtgccaggcactgtggtaggccgcgggaatacagcagacaaaaacccctgccatgccaaagagggagccagaaaaacccacagtgagtaagtgaatcgatacgtaacacgttccatgcaaaatacactaggagaaaagtagagcagggaggggatgtct

SEQ ID NO: 5182 - DNA, 594 bp, Homo sapiens
attattaatacttcccagaaacccactagggaaccagaaaagcctggcactctgagtcatttcattcagcgaacctctgaaaagacaagccttctaggcaaaaagctttcctccccaactgccaaagggggaggaacctagaattttcaaaagctgagtatcttgtagtcctagataatttgagttcacttttagtttgatatgtctttgcctaaggaaaagactctcctgatgtgtgctgttattctccagtccactgtgaattttgttcttgccttgtcaccctaagtataaaaccacatgtctaaaatcacattttagatagggctataaaatttacagagtgctgttatatacattatctcattttactaaactatgaactcaattgccagccagaaaagctgatcagtgaatttaagagtttgtatttagtgaaacttttgaaactttgaaatagaagtgtgagtcagatagctgatgatttaaaacactaaagcctttctcaattgttcattagaatttaccaccactcttctttgtgacctcttctctactgctctgtaagcatctctcccataagttctctctctc

SEQ ID NO: 5183 - DNA, 471 bp, Homo sapiens
tggggaatagagtggctatttaggtctagcagcccttgggctcatttgctgaatgagatgggaagttattggacagtattgaacggagaagatatcatctgacttgtgctttaaaagaatctttgtgacagctataacaagaagagactataggggatcaaggatgttagcaggaagtccaatttagctgcaattacagatattcatatcaactgtggtagcaataaaaatggtgagagtggtggaattccggccatattttgaaggcaaagtcaataggatttgctaatgaattaagcagtatgcaatgtaatagttgtctcccaagactatgggtaagaacactacccactgaaacactggcagtgctttttaaaagcccagtgttgggccaggcattgtggctcatgcctgtaatcctagcactttgggaggccgaggcagtggatcacctgaagtcaggacttcgag

SEQ ID NO: 5184 - DNA, 509 bp, Homo sapiens
tgctttcagcaagaaactgaggttgtatcactaagaaaggggtgcttttccaagtgctacacctggaaagaatgaagcatttgttcgttcatgcttgcattaatattctttgagcacctgtgatgtgtcaggtctgcacgaggatctaggaatacagcaggaaacaaaagagccagcccctgccctaggagtttatgagcaagggggagagacagattcaaaaaatattcccataagcatataattacaagctgtgataaaacgtagaaggaaaaagtacagggaataactagagattatataataacaaggggacccaatatcccagtgagggtggggccgtgtgtgttcaagaaggctgaggcatgtttgagcttcgatgtggaggaagagttaactaggtggctcttcttctaggcagaaggcattggttgcaaatgagtccaggaaaagggacgaaggcatcttccaggaacagaagagcagctgtgaatggggcttaaaggatg

SEQ ID NO: 5185 - DNA, 586 bp, Homo sapiens
cagggatgattccctcttacaacattttgttttgttcattttgcttttccaagaggtagaaactgaatttacatctaaattcttggtaagaaaaattcctgaataagatttgagggtgtcaggtcttagaacagagatgctcatctcaggcaaaatggatcctaagggggagcaagccacactagacattcaacaaaaagcagcatcatgaacattttcaacagctcattgttaatgttcctcataaaaaggacaggttcacttgcactgaggattcttttagggtaagagccattgaatagcccttcttggggccaggcgcggtggctcacacctgtaatcccagcactttgggaggctgaggcaggcagatcacttgaggccaggagttcgagaccagcctggccaacaaagtgaaaccccatccctactaaaaatacaaaaattagccaggaacggtggtgaacgcctgtaatcccagctactcgggaggctgaggcaggagaatagcttgaacccaggaagcagaggttccagtgagctgagatcacaccactgcacgccagcctgggcaatagagtgagac

SEQ ID NO: 5186 - DNA, 602 bp, Homo sapiens
aactaaattactgtattcttcaactaatgggacacaatattcttttttttcttttttgagacagagtctcactctgtcgcccaggctggagtgcagtggcatgatctcagctcactgcaacctccacttccagggttcaagctattctcctgcctcagcctccaaagtagctgggattacaggcacgtgccaacacgcctggctaatttttgtattttcagtggagacggggtttcactgtgttagccaggatggtctcgatctcccgacctcatgatccacctgcctcggcctcccaaagtgctgggattacaggcatgagccaccgcgcctggccgtaatatcctttttttaatcccacttggaaatcacaaaggaagcattactaaattatgatttaattctgcatagttaatggaaaaatattttgccatgttttcaccttattacattttctcaatatcagacaaagacctgtttttttcccattaccaaagttgtggatcatttcacgtattttaaatggatttaatcctcattaactgagaaatacagttacctagatcctctatgctatctaaaatattgaccaaaaaaaaaaa

SEQ ID NO: 5187 - DNA, 307 bp, Homo sapiens
tatttctattattgtgatgaaaagaaagcaatacaagaagatgaagtgtttattaaaacatggttacttgtgataacatattcctgttgtacatgactttaaacatattcactgagggcatttgtccaaaacaactgtgaaatgtgtttgctgtgcgactcgggctaagttttttttcttctgattacagctctttttaatagactaatattaattcaaaatcatgttgaatgttgagaagttggcagccctgtttcctttttgacgtggttaaaaatgagtgtgtgtgtgtgtgtgtgcgcgtgtg

SEQ ID NO: 5188 - DNA, 525 bp, Homo sapiens
ggactccaccagtctgaccttagagccccacttttaaccctgtttacccagggcccccaggtacttcaaatctatattttgggccctgagctgttgcccacatttcactcagaatgtaatactcagaagcctgactgctttgtctctaccttgtcttcctggcttctgtaatcatttttcccctttttaaaccttttactttgaataattcaaatttatagaaaagttgcaataactggccaggtacagtggctcatgcttgtaatcccagcactttgggaggccaaggcgggtgtatcacctgaggtcaggagttccagaccagcctggctaacatatagtgaaaccccatctctactaaaaaaatacaaaaattagctgggcatggtggtgagcgcctgtaatcccagctactcaggaggctgaggtaggagaattgctcgaacccagaaggtggaggttgcagtgagctgagatcgcgccactgcactccagcctgggcgacagagcgagactccgtctctc

SEQ ID NO: 5189 - DNA, 493 bp, Homo sapiens
taagctctgtatactagaaactactattaaattaataatgatttctttattttgattattatactgtaattgtgttaaagaatatcctagttttaggaaatatatgcaaatatttagtggtaaagagatactatgtattcatctcaaattgaggctatctctcatataaatacatttttttaaattcctttagcagtctccttctttgtccatggatactactgtcttgaatggaatgggcactggaggcttgttaaatcactacgtatgcccatcaaaaagaaattgacaatgccatgtgttggccaagatatgaagcaggtcacattcttctaaattatggatttgagaatataaaataatacaatcacttcagaaaactgtttggaagtttctactaatgttaagcatacacttaccctatgacctgtcattgcacctccagggattgacttgtacacgaataattacagcagcactatttgtaagagcc

SEQ ID NO: 5190 - DNA, 569 bp, Homo sapiens
gacctgagggaaatgaattaacctctctgagcttcagtttcatcatctgtaaaacagtaacagtaataatagatctaggctaaaagtcatcacagtatgtagtaggcaagcaacaaatcttaatgccaaacaaatgcgagctgaatatgtcctttgaaaagactaagtattacataatgaaagtacttcattattgtctgcaatatttatattgacagaaccatattttcccaaagttaatgttatttctgggtgataaaaatgggcatttcttgataggaatttggtcctgtatctaagattaaacttcctttctcacatacatctgctctgtgttgccatataagtgatgggcagtaatgacatttttgaaatcactcaagccataatcctgctactccctcattccttacatagagatggtcaccaggaatactatctagttgccaatccctaatacctctctaatcaaggcacttgtttctttctcaccgtcttagttaagatatcctcatcattcaccagcagtttttaaactccagtgagcttcagaatcacctccagagccc

SEQ ID NO: 5191 - DNA, 359 bp, Homo sapiens
ggcctcccaaagtgctgggattacaggtgtgagccatcacctccggccgggggttaactaattaatcttgcctatctgtaaaagaagatgctgataacccctcatcagggtcataggagaattaaccagcctccagagagaaagccttcagctctgtgcctggtgcggaactcttcttcttgtggttattattgagaggctagagtgacctcccgttttgctgaaggccctctctggaccttctctgccaactttagtctggagctcccactgtatatcaaccctggcatactgtgcacttaccttttccttctttcctacctccatcaagaacacaggcacaggccgggctcacgcct

SEQ ID NO: 5192 - DNA, 502 bp, Homo sapiens
cacatgcacacacacacacagacacacatacacacagcatatggatatatatgtgtgtgtgtatatatatctccattgaagtgaaatagctagctaagtggtctaaagaaatcgatacagattccagaatgactcagtgttatacaagaaccaaaatgaaaatgacatctgaggggaagggaaaaaacataaaattgagaatcaggagacatggattctacattaactggtcagatgtactaggccaatcacttaacattaattgttcagatgtggtaggccaatcacttaactgggcctccactttttttttatcaatatggtgacagtgttggtagatgatcctaaatttctctgtcatttggacattccataatcacacttccaggtttgctcttgggtgagcatcaagtgggttggggccagaaaaggaaaaatttaggaatggtcaaggagaggtgctgccaggttacccgagtgagaaactggtagctgcagtagt

SEQ ID NO: 5193 - DNA, 516 bp, Homo sapiens
aatgtaaaaactaaggcacagagtggtagggaaaggattgccttagacaaagctaccattttaagttctggaccccagttgaattgtccacctggcgagagttttgcagggtggaaacaatgccttcagccagttatgaaataagcaaaagtctgttccctgagaggagacatctgcatgaaacctacaggcatgtgggaaccagatcttaaccttggtctcaatgcaagtatttgagaaattactgcaaacagcagtaactaccagttttgtcttttattattcagctttcttgttaacttcagagaagtgcaaatgtgaaatggacatcgctccatcccagcagaggaaaacataacatacagctaacagagacaaagactttctattgccaggaacaatggccaacactcatcactcttggtaaagacagtaggaaactgggattcaaacacacagtgaagaatttcagttagatgcaaggaagaaatttccacagggactgtgagtgataat

SEQ ID NO: 5194 - DNA, 437 bp, Homo sapiens
ccacaatgactatagcaagaggaaatatcatgacttcataaatataaagatctaacactggaggtgtagaggtgggaagcggtagagacagaagggtgaccatcatgtgactttattataaggagtattttatttatgtataaaagaaatacagttgggccaggcacggtggctcacgcctgtaatcccagcagtttgggagccagggcgggcagatcacctgaggtcaggagttcaaaaccagcctgaccaacatcatgaaacccagtttgtactaaaaatacaaaattagctgggcatggtggcgcatgcctgtaatcccagatacttgggaggctgaggcaggagaatcacttgaacccaggaggtggagtttgcagtgagccgaaatcgtgccattgcactccagcctgggcaacaagagtgaaattccatct

SEQ ID NO: 5195 - DNA, 526 bp, Homo sapiens
tgctcttccctgtgccttgctgcgtttttctctctttcctctggagccccattcttttgccacttcactgggccaggcttgttcccaaactatgagactttctcagtcctctgtgcttttgcccttgtggctgtttctgcctagagcaccccgcccttctcttcacctggcctattctgaggcttgtgtggggctacaggggagagaggagggcggctcagaccaaagttccagcagtgacagtgctgagggctcagattttgaatgttttgaaagtagcactaactgaggccaaggcaggtggatcgcctgaggtcaggagttcgagaacagcctggccaacatagtgaagccccgtctctactaaaaatacaaaaaattagctgggtgtggtggcgggcgcctgtaatcccagctactcgagaggctgaggcgggagaatcgcttgaacccaggaggcggaggttgcagcgagctgagatcgtgccattgtactccagcctgggcaacgagaatgaaactccgt

SEQ ID NO: 5196 - DNA, 532 bp, Homo sapiens
aaatctatctttttgtctatcaattatctacctatctatctatctatctatcatccatttatcatttatctatcatctgtctaccatctattatctgtcctatctatctattatctttcttcctatcttatccatctatccataccatctactgatctatgaaatctctctcactatctagctacctatctagctattatatatcatctatctataatctttcatctatcatctgtctttctatcttatccatccatcaatccaaccatccctccattcaactatttcatctagtgatctttcaatcaaatctaactacctatcatctattctatctatctatttatcaatctatctatacatccatttcctactggttctgtttctctggcaaatattgactaataataattctagtctcctaatgatgagatatcattgtcagatagatctatgaattcagtttgactaaaagcatcaatttcagcactagggatcaatggagaaaagagaaataaaaggaaggctgcat

SEQ ID NO: 5197 - DNA, 579 bp, Homo sapiens
gtttactctagagctatgggtcagaaaggggtttcagcatcagcgtctgcaacctttgtataacagaggataaggccgggcgcggtggcttatgcctgtcatcccagcactttgggaggctgaggcgggcggatcatgaggtccggaggtcagcaccatcctggttaacaaggtgaagccccatctctactaaaaatacaaaaaaattagccaggcatggtggcaggcgcctgtagtcccagctactcgggaggctgaggcaggagaatggcgtgaacccgggaggcagagcttgcagtgagccaagatcgtgccactgcactccagcctgggcgacagagcaagactccgtctcaaaaaaacaaacaaacaaacaagcaaacaacaacaacaacaaaaacagagcacaaaatcagtgatggagaattaaactctttagaaggctggttcagcctggtgcggtggctcatgcctgtcatcccagcactttgggaggtcgaggcagaaggatcacttgagcctaggggttcaagactagcctgcgcaacatggcaaaaccccatctctacaaaaaaaaaa

SEQ ID NO: 5198 - DNA, 573 bp, Homo sapiens
aaagccaatgtcagaagcacagcttagcgctgacaataaatgaacacttgaggtgcatgccctattttttccatcctttagcatcagggcagcttgaaacactgtgggtttctgccaccattctaccaaaacactccattactgacctactacattctgccaagtggttgcattttataggaacaaataaacaaagacactggtcatctcttcccattgaatgagaacagagatgtggccactatgatgactctccattgaggaatttggggcaatgatttttgcattcaatcccatcaactcacattaagtgagcaataaaggttcctagaaaatatgggttgggggagacctggtaacatctcacagctttctggagaatggcttcttgcctatggtctgctggggacaagcctgaagatgaggcttagaagatagaggggtgtaaatcagagaatgtcctgccaatcaaatattacctgcttcactcctttgatgcccccaagaattcagatttctctaccatgaaaaaaatatcagcacccacagggctgtcttctcaggccctctacc

SEQ ID NO: 5199 - DNA, 468 bp, Homo sapiens
ctgattctcatctggttctccctcatggtctgggatcagtcacttccattgcatgactatgcctgcctctcgcccacacactgctccctctgccagaggcacccttctccccctcctcttgcctggcttaactcttactcatcagttacttactccttccacccagcttaactcctcagtgtgctctgcttagatgcctcttctgggggcagggaggggcctggtctcgcactgctagtctagaagactgctttctctgtgctccaccacatcctgcacctccccagtcacagcagttacctcctggacggcaagctcactcttattcttgctcaccagtgtctaccaccatattataagacaatatcaagaaatcaaccatttgggccagatgcagtggtttacgcctgtaatcccagcactttgggaggcggaggtgggtggatcacttgaggtctggagttcgag

SEQ ID NO: 5200 - DNA, 358 bp, Homo sapiens
ttatgactttgactatattttacaacttgaaaaattttcatttttatggtgccatcagcctgctacttaatagaaaatgttttattgacatttatgttctttacctaatgatgtgtatttaaatgatggctgtcatcttcattagaactgactgttgaaagagtaataagaatgagaatacagaaacctggtctcattttaattgtacaaactgagaacataacattgggctgaacatttcaccaatttgactacaacatttaatttaaaaataatatatatctccaatattgtatgatcattattattgtgatttattatgcttactgacacatgaaatatatgtatatatgtatat

SEQ ID NO: 5201 - DNA, 596 bp, Homo sapiens
gcaaaatgtgaaaagatctaatcagaaacaatgaaaaagagtaagttatctgctgcagttcttctatttggtctcaccagaagctgctcacacagtcatttacttcagtttgtcactcctgagtctggcgctgccagccgcagagtgaaatcatttcaggtcagtcatgtaactgctgacccagagtttatcctaaactggggctatgaaaggtaaaggtaatgatatttcatgcttctgagcaaaaactcaagcctcgtgaggctgagggaagaattgccttgacctcaggccagagatgaagacgaatttatgccacttcttcctttgccataatattctttccttgtcctccccctgattacaaatataatacatatttattggccaggtgcagtggctcatgtctgtaatcccagcattttgggaggccaaggcaggcagattgcctgaggccaggagttcgagaccagcctgacaaacatggtgaaaccccatatttactaaaaatacaaaaattggctggatctgatggtacgcctgtaatcccagctacttgggaggctagggcaggagaatcacttgcacctgggaag

SEQ ID NO: 5202 - DNA, 545 bp, Homo sapiens
ctttatcactatagtagttacattagttcacttaactctcatgtccttcttatgtatgatggaaaaatatgcagtggtagatagaatgctgaatatgtattatctctcgtaatgataccacagagacacagtgttactgtgaaaaatatgtataatatttttctcaagaaaatccttacctatgagaccctatacgtggaaggtgaattgtttccttcaaagaggcaacttggtggatgttaagaagacagggaggacccactttgggatctggtgtcaagagtctagtcctatcattgtcacaggtttgctgtgatcagaagccggtcctttccatagtaaaaatcattctattgtgttacatggtatttacgaaagtgtggaacacatcagaatcaaatcatttaatgcaaaggaagcctcccacactttctaattttcttatagtgcttcaaattaagtcatgaaggatggctcgttttagtgctaatatgtccttgacacctctgtaacattcgccagcctcccttttttagaagagagag

SEQ ID NO: 5203 - DNA, 494 bp, Homo sapiens
cggggctgaggacacagcagccttatcgctaactgtggttctggccagggctctgcacaaggcaggagcagcaagctagttacgcagggccagtgccctcaacctgctctcctgtttttcctgtccttctcccttctaccaggtggctctttcctgctcaggacagtgctcttggacagaccctccagtgggcacttaagaggtaaggcgcaggtcaggtgtggtggctcacgcctgtaatcccagcactttgggaggctgagaccagtggatcacttgagctcaagagttcaagaccagcctggccaacgcggtgaaacgctgtctctaataaaaatataaaaattagctgggtgtgatggggtggacacctgtaatcccagctattcaggaggctgaggcagggagaatcgctcgaacccgggaggcagaggttgcagtgagccgagatcgtgccagtgcactccagcccaggtgacagagcgggactccat

SEQ ID NO: 5204 - DNA, 459 bp, Homo sapiens
taagtctccccttctcctcaaataactttcaaattgctgccaagaactatgttctatcttaaggcttttgagaaaaaactttcaatgaagatagccgcctaaagttatacaaatatagaagaaacgggataaaataaagcttagattggaaaaaatatttaagattctacaaaattcacgcgtaaacaagggaagctgagtaattgtatgttcaaatacttttaacaagtgcaaaacatgtaggcttaaagaaatagagctggccaggcatggtggttcacgcctgtaattccaacagtttgggaggccgaggcaggcagataacttgaggtcaggaattcgagaccagcctgaccaacagagtgaaaccctctctctactaaaaatacgtagatcacctgaggtcaggagtttgagaccagcctaaccaacatagggaaaccccgtctctactaaaac

SEQ ID NO: 5205 - DNA, 594 bp, Homo sapiens
ggtggtcactacttctggtgaaatcaactgcctgtttagtaaaaagaagacccacagacatttgctgagcatccatcatgtgccaggtgctatgctgggtgccttggaaggaaggccttcccaacttccagccaagatggggcaggcagacacatgcctttagctccacttccttctgaagtcccaacaaattatgggaaagaattaaagggcacaaggtcacaggaataaacagaaaaggaaataagaacatagccaacaggagatgtcagcaaaattctggaatctggaaagctgatgggtaatttatcactgatgggagattacagaaggtggaaagcaggttggtcaaagggcacagctccgaagcaagtccacttgtgccatgaatccccctaaggcttaggaaatggtggccctaggcatggcagaggccaacagaacagtagggctaaaaacaggaggaatctttgaaatgttttacaagtctgtaaaaggaattctactcctagatcccatccctaacctatttaagaaaccaaaagtttaacccgaaaatctttggacttagggacagcccagggcagagtatca

SEQ ID NO: 5206 - DNA, 515 bp, Homo sapiens
cgttcttgttgcccaggttagagtgcaatggcacgatctcggcttactgcagcctctgcctcccgggttcaagtgattctcctgcctcagcctcccgagtagctgagattacaggcatgcgccaccactcccggctaattttgtattttcagtagagacggggtttctccatgttggtcaggctggtctctaactcctgacctcaggtgatccacccgcctctacttcccaaggtgctgggattacgggcgtgagccactgtgcccagctggcccagctttttaatctcccagttcagaactcttgagcaatgatctagatattgtcctgactccagaatgtagaaaggtgattacttatgctagaatgaagcatatgctagaatgaaggcatagagaataacagataataaatagagagtaagcaagtagctggtatgcgggagtacagttggcttccttatccgagcattctgcatctgcagagtcaaccaacagcggatcaaaatactacaa

SEQ ID NO: 5207 - DNA, 526 bp, Homo sapiens
tcaaggttttggtgagcatattaccatgaggaagagcatggagtgggtgatttggacctcagggctaccataaggcctgatttccaagggaagaggaacatgagaccagagggctctgaattaaccctgttaacttgtcccaaggggactcaggcgactgttccccagctctagcaggagctggtgcatgttggcttccaggaatagagctcaatggtgcctctcacacatatggcctcccttgtaggagaaagctggttagtcctttgtccaccagaattgttttggaagtctcttgggaggcctataggtaaacttcctagcaacggatcagatgcactacttggggatctgtgggatccaccgccatgcctgagctcctgggctgtgattctctcacgccagttcccattggtctgtggatgacagggagtcagggaaacagactcagaggatgccctctaaaactgggaagcaaatatggagcagcagttagaaatcccgtgtctggggagttcttggaggg

SEQ ID NO: 5208 - DNA, 383 bp, Homo sapiens
gttactgaaatttttcaaccattgaaattttctctagaaatatattcaggtgcgtaggaagtgctgtttatttaataacacagggtcttcatatcagaggggtcgaatttagccctcatttgtttagtgtattatagaaatcatacaccaacacatctgctgatttttctcttccctctgagtcatatctgtgtctttaaccgttctctttgaacaactgtgtttgtattacctctcagggtttggatttcctccttattttttatctgtgggctattggtaagcattgttttaataactgcatttttgttgtacactctgctcattgtagtttttgtctttctcttggttgagtggaaaaaatgttttttttttttttttgg

SEQ ID NO: 5209 - DNA, 496 bp, Homo sapiens
  misc_feature 438: n = A,T,C or G
agacaaaacattttgtgattgaacccatacaatttctcattgtagagatgctttcccttcgacagtgcgatgctgtacaatgctacagcaacagtgcccatctctagtcacatagatggacactcctgcagattatctctccagtgtttcctcttccccccatcccttaacatctcttccacatttcccaattcttgtctgtttattgtgcatgctggttaattatttcagagctttcttcttcttcttcttttttctttctgagactgagtcttgctttgtcacccaggctggagtgcagtggcgcgatctcggctcactgcaagctctgcctcctgggttcacaccattctcctgcctcagcctccccagtagctgggactacaggtgcccaccaccatacccggctaatttttttgtatttttagtagagacggngtttcaccgtgttagccaggatggtctcgatctcctgacctcgtgatctgcccgtctc

SEQ ID NO: 5210 - DNA, 593 bp, Homo sapiens
agaggcatgggcacacagagaaggaagacagaagcagagacgggagtgatgcatctacaagccaaggaagaccaagaattgccagcaccatcagaagctacgagacaggcattgaacagattcttcctcggaggcccagaaggaaccaaccatgtcgacacctcagttttggacttcaggcctccagaactatgagagaataatttattttgttttaagccacccaattagtggtagttcctaacagccctaggaaaccaatgcaatgtaaattctataatttgtattcttgcaaaacatgaattgctttgtatgactgtaattttaatttacataaacaatatcatgctgtagattgcttctgcttgtttctttcatttcttgtagcactttctttgggatatatccatggtgtgggtacctctggtagcattcatttacgtgttcccaatccactcactagtgatgggctcccaggaggcttcagatccctgtccctgcaagcagggagaataaacatctgtacacacaccaaatgacttgtgcatgacaatttattttgttcatatacccaaacatggaattgctaagtc

SEQ ID NO: 5211 - DNA, 462 bp, Homo sapiens
gcctgtaatcccagcactttgggaggccaaggcaggtggatcacctgaggtcaggagtttgagaccagcccggccaacatggcaaaaccctgtctctactaaaaatacaaaaaattagctggtcgtgatggtgggcagctgtaatcccagctacttgggaggctgaggcaggagaattgcttgaacccaggaggcagaggttgcagggagccaagatttgaatccattgcactccagcctaggcgacagagcaagattctgtctcaaaaataaataaataaaaataaaaataataaaatatcataaactacaaataaaaccagatagactggttcaaatatatgctctggtattcactaatttaacttttgagagttagactgttttcctctgtgaaaggggaactataataactttgtatgctttgcgggaagatcatattacaatgtattgaaactcctc

SEQ ID NO: 5212 - DNA, 474 bp, Homo sapiens
tgatttaacataagggattaaccacaaagaaatggtgctgtcaattactatgaaattgaacaacatcacattagaaaagatatatgtatccactttagagatttgaagttgactcataaaatttacaaaatcaagcagcaaaaatattatatatccttacttctttgtagaacactcactctccttatgattgctttaggattaccactgagtacccctccccaacccagcttaggaaggaatgtgtctctggacctgagggaagaagaaaactataaaaaattgtatactacccatgtaaaaagcaggcaaagtaaaagctaaattttcagaggattgctaatatcagggactctgcaaatataaaattttctctaaatattcatataatttttgtctttaaattggggctagaatatcgaggatgaagattctgtcctttgaaaagaagactacaaatgaaattttatgatt

SEQ ID NO: 5213 - DNA, 322 bp, Homo sapiens
acagaaggggttttttatatcctttctggtaagctcactttaataagtttattgtttttggtttagcataactttgggtgactttaacatttctcagactgttatgggaaatgtggattcatttggacatgtactgacatctttcagatcatcacttttgtacattatatatttttaaaaggttgtatctacaatatttatgcctgtgtctatgataactttatttcaaagagatagaagagtttatggaggaatgtttcacatagcaagataaaatggtatgacagtggagcaggaaaattttgtagtaagacaggttaat

SEQ ID NO: 5214 - DNA, 581 bp, Homo sapiens
actaatgaaagaatagaaaagtcactgaaatgccatcctctcagaggttttaatcctcctgaagcaacagcaaataagtggacattttaagattagcatagaaaacatacggataactcaatataaatgcatgtcatagctcataaatgctctgaaagctccttctgagctattacagtgcatgctgtgaatgtgtattaacaatagtgcacaatcgtacattaaatacatcatatatttgcatatttagttctattcaactgttgattttaaaaatatactttctccaaagaactatagtcttggtttctagtagccataatttttccattagtgtctatcaaaatagtaacctagtttgatattattcaacttttaaaattgcatttaaattcctacaaaccaggaaattctctctctttctctctctgtctgtctctcttcctttctctctctctctctctctctctctctgttgctcagttacttagctatagctgaaattattattacttggaatttcaggaactcatctttctaaagattaacaacactttatacactttaacactctttagtag

SEQ ID NO: 5215 - DNA, 513 bp, Homo sapiens
tctcataggaattctaaccacaaacccacctgcacctacttttggtgataaaattcacataattcaattactcccacaacaccaaaataaaataatcttaaattgaatgcttagttccaaagtggccttggattgatggtgtcctcagggaccagacataagcaaattcaaatccttttttcaaagaagacactctagatacagaaactcagtcagcaaagatacaggagaaaaatgagcttgaaaaaatgatgacaattgtaattgcagaaccagttcaatctgtttcagctttgtcagtgataaaatgtaataaaatggtgagttgtttttcagttgccatgaatccccaggttgcaagtcaaacagcctcaggatatgcagatgaaccaagcttgcccaattcatgaccccagagctggcaagaacaaaaagtcaaccacatagggaacctaaatgtccagattggggaatggagaacacattaagaagcaatggggaacctgttttttt

SEQ ID NO: 5216 - DNA, 551 bp, Homo sapiens
ctataatttaccttacatggtaaagggatttagaagattaagcaaggatcttgagatggggatattaccctggattatccagtaatctaatcacaagggtctctataagaaggaggtagaaaggtcagagaaaaaaggcaatgtgataacagagtcggtaagagagagtcttgaagaggctatgctgctggctttgaaggtggaggaaagggccacaagctgagaaatgcaggcagcctttagaagccagaaacagcaatgaaatggattcttccaaaaagccttaagaagacacggagcactgttgacttattttggacttctcacttccacagctgcaggataataaatgtgtgttatcttaagccattaaatttgaggttgttatagcagcaataggaaactaataaagagaccaaaatcttcaaaaataacctactcaatatcaggccagataagtggaggtcagtcaaggctgggagaaggagggagatcactgaaatacatcactgcaatattttaaaattaaggagagtaactagaccctgaac

SEQ ID NO: 5217 - DNA, 484 bp, Homo sapiens
tgtcatcattacaaaaattaattattactctgggttataatacagtattgttctcaggagtttttgaggtttggaaagatatttatcttactaaaagctctagagtgctatgattcttcttattagaaggatgagggtaaagaaggggtctaaactgaatactcagttcccatggctctgattttagaggtcattatgtaattctcagacacctaagttttgaggctatccctggaagaaactaccctaaagtgggagagaacagaaagatctctttgagcacagaggacatctactgaagcccaaataattttatactatcagctttccagcctagcttattggcctaagccatcaaagcaggaacatacgagcttcaaggtgcaagatagtaaaatggtagaatttcttaggtcctgtgctattgaagctcaacttaaagaactgaaaggctggatcacaaggtcaggagtttgagaacagc

SEQ ID NO: 5218 - DNA, 592 bp, Homo sapiens
tgccttgagaaccattttccgctaaccttccagaacgtgtttgttctgtagcagtgctgctcagtctgggattcatgttaggattcattggaggacttatttaaaaataaggatgccgactgggcatggtggctcatgcctgtaatcccaacactttgggaggcctaggcgggtggatcacctgaggtcaggagtttgagattagcctggccaacatggtgaaatcccgtctctactaaaaatacaaaaagtagccgagtgtggtggtgggcacctgaaattccagctacttgggagactgaggcaggagaattgtttgaacccgggaaatggaagttgcagtgagctgagatcgcaccactacactccagcctgggcaacggagtgagacttcatctaaaagtaaataaataaataaaataaggctgcctaggacccaccctaagaatttctgatttaattcacttgaagtggagtgcagacatctaagtcagacctcctcaagcttttaactccagacatgtaagattgtccactacagaataatttgtaatagcaaagactggaggcaaccctcataggagcctggcta

SEQ ID NO: 5219 - DNA, 538 bp, Homo sapiens
ttccttatttgtatttatcagtcattttattgcaggcatggtaaaataaattttggggtctaggccattcattgactagactgctatctgtaatttatcaggttacttggacctgtctgccatcatcaagatatatggctggggagatagcaccataaaggaaacaattattgagaagataaatgacctgtgagagggctacaagtctctagagtgtgtgaggaaaggcagaaagttaccttggccaaagattttgcttgcatccatatatccagttggtttcgggcccaggaacagtgtattttcactgatagcttccccgtctttcaatttcattcttgttctcttagtcaatactccatagaaagtgcctctggccccacacttattattcctttggcctactgcagaaattagaatatattttgaatattaaaagtggcattcattgagcaacagctttatctagaaattatccaagtgtctcagagtgttttctgagtttaagacttagtggcaaaaaatggtggcatatgtg

SEQ ID NO: 5220 - DNA, 539 bp, Homo sapiens
atcataaacttcaacgtgaaggaacacacctggcctgtccaagtggctgctaagcccttgaaggtggtaagcccagactgagatgggctgaagtggaaaccacacaccagcctgccaagactaagtacaaaaaagaacacagacaactgcaataacttttgatattgatcatatggtaaaaatgatcatttttaaatataatgggctaaataaaatacactattaaaattcatctcaccattaatttctttacttgtcttaatgtggccacgagaaaatttagaattatattacataatgtaattacattacagctactagaaaatttaccatgattacacctcacattattatttgtgttgggcagcgttggtatataccctttgaatcagaacttgatccctaggaacaaatcctgaggaattaagacaggcgtataaagatgaacagatgagggtaatcaaggttgcctgtttagaacagtaagaaactggggggctgggtgtggtggctcactcctttaatcccagcactttggg

SEQ ID NO: 5221 - DNA, 535 bp, Homo sapiens
gtgagggggcagggccaggagcagggcatatgtgggtcatctctagccccagggtaatcagggcactagctctgtctggccccgcctgcgatgaagtagtacacgatcgcgttggggccctcatctgcatccactgcgcctgtcacgttgcccacgagggtgccgcgtggtgagtgctcaggcactgtcagcagctggtactgggggctgcctttctgcagagggagggggatgtcatcacttggggccaagggaagacccgagcttccagtccctgtttcagggccctgggcagtgactttgtaggtgctgagggagtttactgtccaggccttatggggtgagtagaaccgttgtaacctcaagggagcaaagcatggcccgcggacctgagctctgccctcacggagtgttgcccagaacccaaatgagtgcttaagtgagagaagcacacacgttactcttatatgtacatgcatgtgtatgcactcacactcagcagtcgccaaggaacatcacatcccatgtgcacaca

SEQ ID NO: 5222 - DNA, 414 bp, Homo sapiens
gagcagaaacttttgctaggctgcctctgctgtgagcaatattttaaaccttaaccacagcatttcttttctggctttcattttggtttttcccatccactttatggtcagttttcagtcttttgttcacagtagttacactttcatttctccgttttttatcttcatatttagaagagtcagttgcactactaccttttctaatttcctttttttcagcaacaacactgtttttacatttatcacacagaacttgcctgggtcgtagtttaatagcattcattattgaagtgggttcttccctgtacatttttcgtttgggtcgcttaattttccgaggaggtggctgaggtattgattggttatatgtgtccctgataaacaaagggggaggataaggtgctccttcatgga

SEQ ID NO: 5223 - DNA, 549 bp, Homo sapiens
aggctgtataacccttataggataaaaacacatgcacttgatctcgtaagagaacaattatcagccgggcacagaggctcaagcctgtaatcccagcactttgggaggccaaggtgggtgtgtcacctgaggttgggagttcgagaccagcctgaccaacatggagaaaccctgtctctactaaaaatacaaaattagctgggggtggtggcgcatgcctgtaatcccagctactcgggaggctgaggcaggagaatcacttgaactcaggaggcagaggttgcagtgagccaagatcatgccattgcactccagcctgggcaacaagagggaaactccatttaaaaataaaaaagagagagagagaaaaattatctcgttgggaagcaaaagaacgttgaaggaacaaaccagaaagacttaattggccatggtccccagggaagaaattccccatttctcaccaagtggtacctctgaaatttaaccttaagaggccaggtgtggtggctcacgcctgtaatcccagcattttgggaggctgaggcg

SEQ ID NO: 5224 - DNA, 537 bp, Homo sapiens
tggctccagggcactcactttgcattctctccttagctccctgtcctccaactgtttttagctctatgtggaaaatccaccaaatgatctcgtttttgtttaccactcaacctcagcttttggtgcatccgtggtttgaggtcccctcccctgcctctttcccttcatggtcctctgcccccacagacctccatctcctcatcatgttgctctgtccccttcttggtgtcccaggcccattttctaccataaagcccttcccccaggaccttccataacagcacgttgacctcacatgcacacgctgaactcacacacaaacacaatttttccttggattcactttgtagtacaaagccttaaattccaaggcttatcctcaataagtaaagaacacctcaagtttcaatggccttggactatgcctgtcaggcaacagactgtttgtggacagccaactacttaatctccccacgtaagtattggtacctaagtagctgtgctgtaaagctccacgctgatgccaataaagccctc

SEQ ID NO: 5225 - DNA, 514 bp, Homo sapiens
cagtggcacagtctcggctcactgcaacctctgcctcctgggttcaagcaattctcctgcctcagcctcccaactggctgggattataggcatgtgccaccacgcctggctaatttttgtattcttagtagtgacagggtttcaccatgttggccaggctggtctcaaactcttgacctcatgatctgccagcctcggcctcccagagtgctgggattacaggcgtgagccaccatgcctggcccaaatttaacatttttaagcaatttaagcacaaagtagctaaatatgtaattttgtgctaattcataggcagtattttggatttaaatacatcagtatttcacgatgttctgcaaagggtaccatcactgattggaggagtcccactgtatgaaaatgttgaaggtctgagtgtggtggttcaggcctgtaatctcagcacttagggaggcccaggtgggaggattgctggagcacaggagttcgagaccagcctgggcaatatagcaag

SEQ ID NO: 5226 - DNA, 242 bp, Homo sapiens
  misc_feature 181, 182: n = A,T,C or G
aatcccagtactgccaccaacaatgttagtatttgaaaatggcttaagacttattggtagtttttttgtccatagcatatattctactaggaccttatggtacaaattactgtgttttaaagttacttggaatagttctctatgtggttttgtcatcactggatatatagttaatattagnngtggatcacgaggtcaggagttcaagaccagcctggccaagatggtgaaaccccgtctct

SEQ ID NO: 5227 - DNA, 526 bp, Homo sapiens
  misc_feature 470: n = A,T,C or G
tcaaggttttggtgagcgtttaccatgaggaagagcatggagtgggtgatttggacctcagggctaccataaggcctgatttccaagggaagaggaacatgagaccagagggctctgaattaaccctgttaacttgtcccaaggggactcaggcgactgttccccagctctagcaggagctggtgcatgttggcttccaggaatagagctcaatggtgcctctcacacatatggcctcccttgtaggagaaagctggttagtcctttgtccaccagaattgttttggaagtctcttgggaggcctataggtaaacttcctagcaacggatcagatgcactacttggggatctgtgggatccaccgccatgcctgagctcctgggctgtgattctctcacgccagttcccattggtctgtggatgacagggagtcagggaaacagactcagaggatgccctctaaaactgngaagcaaatatggagcagcagttagaaatcccgtgtctggggagttcttggaggga

SEQ ID NO: 5228 - DNA, 487 bp, Homo sapiens
  misc_feature 420: n = A,T,C or G
ctactgtcattatgtctggctaacaggagaaactctgtgagtagctattaattaacaaagacaaagcacattaaagagaaaatggaaggagggagggaggaaggaaagtaaagtttgagaggaaaagaatatagattcataagtcctggggataagtaatgaagccttatgcttgctatattttttctttctggaaatatagtagttgtctgtggtgaaagaagaaagaagaaattacttgaacaaagagtttaaataaagacttgactattacaatgttaatgccaacatactacccaaaacagtggattgcccataataggttccataaatataattacgtttgattaaatcaaactggaaataccacagatttctggtattcttcataccactccaaaaggataataacagtaatanagtatttcatatatatacacacacacacacacacacacacacacacacacacacacacacacacaca

SEQ ID NO: 5229 - DNA, 504 bp, Homo sapiens
gagccaaatattcttatattctataatctgtgttcttcccaaccagaggtgttatctgcagagactttttttatcagactgaaatccgtcctgcctttttagaatgagctcatttttcttcactccagctaatgctgacatttaccaaatccagtcctgattaagtaagcttccatcaccaagaaaactggaaaaaaggtaggattcataagacagtggattcccatccagtgcttgtagctctgttatcctctttagaagtatctgagggttaacaaaattggaaattgtagaggaaacaaatttgcactgaatttagacctaatttacctgaaaatgggattcctttaaaatccacagtgagcccacagttttgtcctgtgactgagattcagtcacaccttgaccatgtatttatttcataaattaagccttcaggccaggcatggtggctcacacctgtagtcccagcactttgggaagctgaggtgggtggatcacctt

SEQ ID NO: 5230 - DNA, 442 bp, Homo sapiens
agaatgccctagagatctgagacttgcctgtcccataatcatgaatctagtttcttagaataaaatttggtatctccttctttctctctgtctctctgtctctgtctctgtctctgtctctctctctctatgtacatgcacatcctattgaataaatatgcatacatcctattcgttctgtttctctagagaactctaactaatacacttttttttcttatctcattgtgttctttagtcatccaatctttgaacttttgttgtcttgaaccgatggctattaaattgattttaaaattattcggaattttcttctgtaggccatgtgttcttattaggctggattctttgacaattttttcatgtagtcttcccttccatttcttccctttcttcctgtagccctcgctgtcttccttttctccttttttgtgtagtgtgt

SEQ ID NO: 5231 - DNA, 600 bp, Homo sapiens
cattatcttagactatctagactaaaatgccactcaaaaaaaatcaaaaaataaaaaagtgaaaatactgtccttttcatttaattacttatacctacactattattaagacacaacaaattttgttttccaaataactagctgtgggaaataagagaggagaatattacagattatcagaaagaaacaaagcaaacaagaatgattaaatattagtacacaatttgacacattttctgtattaaaattttatgtctaatatctggatttaaaaatttatctcaacaaaatattctttcataaagagttttagatggctgggcatggtagctcacgcctgggatcccagcactttgggaggccgaggcgggtggatcacttgaggtcaggagtttaagaccagcctggccaacatggtgaaaccccatctctactaaaaatacaaaattaggtgggtggtggtggcgcatgcctataatctcagctactggggggctgaggtacgagaatcacttgaacctgggaggcagaaggcggaggttgcagtgagccaagatcgtgccgctgcactctagcctgggcaagagtaaaactccgtct

SEQ ID NO: 5232 - DNA, 610 bp, Homo sapiens
gatgaactttaagctagggaatttcagctatcaaaaaaacccactgaaattgggagagcttcaaggaaaccacttcaccgttgttctcaggtaaagaactgcaggtgggaatgtagaccagagggtctggccagggcatcttgagtatgttactcacggttggtcataaggtcctggtggctggtactaacagaacaggagtggcagcaagggagggcagagcagggcctggcagggctgggagagcagatacctctgtgagagcaaatacctctgtaggatttgtgtggacaccttgccccttgaaaacctagtgcagcctttggaaagacaccatctccttcaaatattgtagtaaaagacaccgagccggctgggcgcagtggctcacgcctgtaatcccagcactttgggaggccttggcaggtggatcacaaggtcaggagatcgagaccatcctggctaatacggtgaaaccctgtctctactaaaaatacaaaaaattagccgggcgtggtggcagacacctgtagtcccagctactcaggaggctgaggcaggagaatggcgtgaaccgaggaggcagaacttgcagtgagccgagatcgct

SEQ ID NO: 5233 - DNA, 583 bp, Homo sapiens
gtttcaccgtgttagccaggatggtcttgatctcctgaccttgtgatccacccacctcagcctcccaaagtgctgggattacaggcgtgagccactgcgcctggctaattgtttgtatttttcgtagagatgaggtttcaccatattggccaggctggtccggaactcctgacctggtgatccacctgcctcggcctcccaaagtactgggattacaagtgtgagccaatgcgcctggccccattttgtatttttatagagtcagggtttccctatgttgcccaggctggtctcaaactcctgggcttaaacgatcctcccacctcagcctcacaaagtgctggaattacaggcatgagctactgtgcccagccaggaatcttaattgttgagacagcttcctgtggaggagagagggtagacccttactaatctaagttatgtctgtaactcgtcttttgacttagcgaatttggccttgagacatgagattcctaggacggggcaggacagactgaaaacaggaagagtggagaaccaatggcttctgtcccagcaaatagttgctccaggccactcccca

SEQ ID NO: 5234 - DNA, 547 bp, Homo sapiens
ccacatctctgaaatccagttttcagtgcaacaaactatgatttaattgctttgacctggcaggaaggaatatttcctttaaacctcaaacacagaagacctcaaaattaaagctcttcaaacgcataagatgcctcagcaatataacaaactcagggtgatgagagttttatgaagagtcagaagaatcatcagaaacagagggagtagattctaacatgtgaggaaggctgtgttatgtaacgtatggaacattggcggactttcagctccttggctgttcatctttgcctgtgctgggtctccacattctccttttaattggaatgtgtatttgaacagaaagtcattagaatagcaacttgtaggctttgtatgcaagccagtggttttcttgccaattttactgctgaacacttaaacttctaatggagaaaaatacttctcactgtggtgcgaagtaagctatcataaagaataggtcattagtggtggcagtttctaggagccgtggttattatccaagaatagaagatgctgaggaagc

SEQ ID NO: 5235 - DNA, 574 bp, Homo sapiens
gtcctcaaactcctgacctggagtgatctgcctgccttggcctcccaaagtgctgggattacaggcatgagctaccatgcctgacctcaatcatctttttattctccacacctggcaagttctagacacactgtggttccatacaagtttgttgaataaacaggagacagatagaaagtgggaactctggaagtagagaagattccagaaattgtgcatatttcccagagactgtggcccaattcctcagtcttgccagagtttctctatctcaactcaaaccttatgtgtgggcccaggcgcagtggctcacacctgtaatcccaacactttaggaggctgaggtgggcagatcacttgaggccaggagtttgagaccagcctggccaacgtggtgaaaccccgtctctactaaaaatacaaaaattagccaggcatggtgttgtgcacctgtagtcccagctactcgggggactgaggcacaagcattgcttcaacccatgaggcggaggttgcaatgagtcaagattatgccactgtactctagcctgggcaataaagcaagactgtccca

SEQ ID NO: 5236 - DNA, 602 bp, Homo sapiens
gatagaagttggtggaagaggagagaacggaaggcaaaccaaaagagaaattccaggcagaacaacttctgctttgcactggaacttttgctagaactcttgggaatgagtctctctttttctgcggggaccacttagcagggaggacacgcctggagctgcccgcctgagagagaaggccatgtggagtgggcagcatcaagacgggaagaaagccacggtcctgagaatgcagatttatttaatttgtataagcagaaaacttccagatcgagtcacaaaagactaatttgaattataaaaacagaatcaggctgggcgctgtggctcacgcctgtaatcacagcactttgggaggctgagacaggaggatcgcctgaggccaggagtttgagaccagcctgggtaacatagtgagaccccatctatacaaaaaaatacaaaaattagctgggcatggtggtgggcgcctgtaatcccatctacttgggaggctgaggcatgagaatcagttgaccccgggaggcagaggttgcaatgagccgagattgcaccactgcactccagcctgggttatggagcgagactcagtctcacaaaaa

SEQ ID NO: 5237 - DNA, 559 bp, Homo sapiens
aggttttacatcacacaccacgcaacataaacatctcctttaaaacttcttgtttttaatcctcaaatcttttctttttgccagtggcttcattagaaatgtttcctattggcctgagcaattcaatggtggtgcccctagattgtaaacaaccctcaggagaggaaaaagtccggttgttaattaaacagatgatcaaaattgtttttgtagggtgtgtatgcatgtgcatgtgcctgtatgtgtgtgctgggtggttctcatttcatctgggttcacttttgttaccttctttgctctttaaaacaaccccaagagatcatttagtcccattttgtagaagaaaagattgctgcacagaatgatttggaaccacgtctaaggttgcacagtttgtcagtaggggaagccacagtgccatacagacctgattctagtattcatgatgccagaaactggtcccagaaatgaaaggctgtggctttctcgattttcatagcagtgggtaaattcttctttctaccacaatggaccttcttcaacgggccctgagtaagtg

SEQ ID NO: 5238 - DNA, 586 bp, Homo sapiens
tattgttttaccaacacttttcttatgtacctgacttatatctggtaccctaatactttatgtgttttgaactttctagtgtcatgaaaagtgctaagatttggaagccagacagagctcgtttggctttgaatttgctaactatgtgtcttttgtattttctaaacatcatttttcctatcaaaaattgtgactaataatacctaccatctcacaagacaaattgtgagaatgaaagtaagaaatgtgtttaaaatgccagcatataatatgtattcatgttatggaagctgttactgctgatgttataattattactatttacttcagtgattcactagcagtgttttatttgactcacatattttttcttttacataaacattatgatgacaagaaatatgaagcctacaaaatgactttttttgtgtatgcaaagtcacagccagatcacaaattccaaatttcagtcaatgaagttttcactctagttatttctgattttcttaaactttatcttgatatcctcttactttcttttcctgagcttcatcttatcctgcagttactcttctctctttcccag

SEQ ID NO: 5239 - DNA, 442 bp, Homo sapiens
tactgcacattgcatactgaaatctgaaagaatgtttttgcaaaatgacttaatcatacttctctgagatcaaaatctaataacattactttcataacgtgaatttgttctatgttgacttttagtacttgaaatacaggcttaattaaaaatttgttggccaggtgcagtggctcacacctgtaatcccagcattttgagagattgaggtgggtggattgcttgagtccatgagttcgagaccagcctgggcaatatggcaaaaccccgtctctactaaaaatatacaaaaaattagctgggagtgatgctgtgcactgtagtcgcagctactcaggaggctggtgggggaggatcacatgaactcaggaagttgaggctgcagcgagccatgatcacgccactacactccagcctgggtgacagagcgagaccctgtctc

SEQ ID NO: 5240 - DNA, 576 bp, Homo sapiens
ggagcagggcgcagagggagaaaaaggactaactgtaaagcctgaaaggcttccatccaggccccggcctgcacctactcagtgcgtgatcttcggggatgaaggggaataatttcatcaccatccaggccccggccggcacctactcagtgcgtgatcttcagggatgaaggggaataatttcatcaccatccaggccccggccggcacctactcagtgcgtgatcttcagggatgaaggggaataattatttcatcaccatccaggcccctgcctgcacctactcagtgtgtgatcttcagggatgaaggggaataatttcatcaccatccaggccccggcctgcacctactcagtgcgtgatcttcagggatgaaggggaataatttcatcaccatccaggcccctgcctgccacttactcagtgtatggtattcaagggtgagggccaatgacttactcattcttagcctcggtttcctcatttgcaaaggctgatgctatcaaccttgcaggttatattaagaatcagagaatgtggctgggcgcggtgtctcacgcctgtaatcccaaca

SEQ ID NO: 5241 - DNA, 399 bp, Homo sapiens
  misc_feature 143: n = A,T,C or G
aatatcatatatgaaaacaggactttacactgtaaaaaaagtgaagtttacagtattattttaaaagcttattttaaattgaggtacattgacaataaaaaaattattcctaaaagagggggtcctatttgcacttatctgcnatttccaatagtatttctaacaggaaatcttaccagaaaagattaatttcagagcaagtaaaagtatatattctgcaatatttttcttaaaacagtataattttacgatcccctacacgaaaaactttttccgaaatttcgagatctccacaccactaaattaacagtaccaaagagttgctatcatgttactttcaaagtgactgtatatgaaaaacattaggacattttaagtgtttgaggggaaaatgtaact

SEQ ID NO: 5242 - DNA, 578 bp, Homo sapiens
tcagggagaccaggggggtgcaactagggtgtgggaagaaggaggaaaagaacatctttgataccagtttcttcccactccacgggagcgcagcatgcttcacttcaagacactcttcaaaagcttttcttttgccttctctaccagggacatttcaatgcagagaggccccagcctccaacctcctcagtggcctcaggaccgccctcttcttcagacaagtttcctagaacacagatttggggttgaagagtgctagacagagggcaggcaaaaggcagaaaaactaatagaaaaatcaaactgttgagccatttttattcttcaactgagcaaccaagtctccttcttaaagaaatggcttctcagccaaattcaattttattagagggcatgtagggcaaatatagaatggtaaaagaaagaggtgcatattccttattggaattaggcttagttaaatgctgaatttgaagcaaaaaagtagaatgtgaatttatattactccacccaaaaagatatttttcattaaaagtataaaaaacgtattttttaaaaaagtaaaatcaggctgggca

SEQ ID NO: 5243 - DNA, 523 bp, Homo sapiens
gcagggtgaggtgcattgcgttggcttccctgccagatgctgtaggaaaatacactggaggccaggtgcagtggctcatgcctgaatcccagcacttcgggaggctgaggaggtgggcagatcccttgagccaggagtttgagactagcttaggcaacatggcaaggccccatctctatgagaaatacaaaaattagccaggcatggtggtgcatgcctgtagtcccagcttactcagggggctgaggtgggaggattgcttgagcccagaaggtcaaggctgcaatcaagctgagactgcaccatgacactacagcctgggcaacaaagtgagaagctgtttccaaaaaaacaaaaacaaacaaacagaaaacaccagagacctggttcctaggttcatagcattctcccgtggaacataaacagctagtgtaagacctatcttcctccagaaacaagtgagttatgagtgcagatacagttcattgacagtcaatgtgatccataagctgggtgggacagt

SEQ ID NO: 5244 - DNA, 375 bp, Homo sapiens
ctatccctccccatgacaaaaagaaaagttacaacataaggcatattggagccagttcccagtcacagaaatacatttgaagatctacaatgttgcacaatgtgcaaatttggagaagtaattttgaggctaagtaaatggctggagactttattaaaatgtccctttgtctttgctggccaaactggcacctcaggatcacagaaggagcttttgtttcctccatgacatcaagaagctctgggtgcaaagggcagtcttcagagaatcctggaagcagagttgctcctgcttcagggaggatgtgcccttgccacctgcagggttagagggctttgggatgtgcccttattagccttgtttggttttgtgggg

SEQ ID NO: 5245 - DNA, 139 bp, Homo sapiens
aaccccaatttttttcgtctctttttgggccactgatggtttaaatgttgtgtctttgttattttcccaaaggtccttgagtttctccttttattatatttgtttctggttgtgtgtgtctgtgtgtgtgtgtgtgtgt

SEQ ID NO: 5246 - DNA, 407 bp, Homo sapiens
tgtgtctatgttcctaaagcactttgactctgagagagaggacaaactgaacctgatatatgatgtttgtgccccttgacggaggctgaattttctgaacttgaatgatcaatacaacagtgtcttgctaaaaattgtctggcagaaaatttttcattcatttttcttgatggcaagtaatgtattccttcatcagaacaattaaacatctttaatgatttttaaagacagggtgtaattacatgcacatgataaaaatttaagcagcaccaagggcgtacagtgaaaattaagtctctttcctgactggagatcatagtatgagtgtttcatggctcccttcagagagattccatgtctagcatttatacatgcacataaattcatttcctttttaaaattaacac

SEQ ID NO: 5247 - DNA, 500 bp, Homo sapiens
gcctagtctgaagcagtctgttatagcaatagaagatggaataaaaatgaggagaacacaaacattcagtccataacaaggattcgcagaattggaagcatgtgagtgagaaatgagtgctatacctttatttcaatttcggtaattgagatcttaggtgaaatatagagttaagtgagaaaatttactagaatgtctatagcactgtccattatccataatagtaaaaaccaaaaataattcaatgtccattgacaatggagtagatgaattacttgttgtacatccatgcagtaagaatgaacactccactacaaggacaaaatagataaatctctcaagcatcatgttgagcaagaggagctagacacaaagagtacattctgtatgattatttttatacaaagttcaaaacaggcagaacaaacctattgtgtaagaggaagaggacagtgattacttccagggagaagggagggaacagtgattggaaaggggca

SEQ ID NO: 5248 - DNA, 483 bp, Homo sapiens
taatgcctatggctattacaagctcttaagcttcctaatgcatttggttctttctgctctatatatcaacatctgctataaacattgaagaacagaaacagagtgctgtaattcttgggctggtttatgatgcagagtagaggggacttattcttctatattttaaaggccctgtagtattcttcgtattaataatgcctaacatttgtttaatgtaatatactattcaagtactttctaatacatgaccctgtgcaatccttacaatgtttctgtgaagtaatattattgtccctatttcacagatgaggaaactaaggctgtgaaaactgcaaatcagaaacatgagtctaaagcgtggatgtttttccagcatatagagcgtaggtgaaagacctactctttcaagatcagaaaactgctgattccaaaccatctagtttgtagcgggagaagagtatgtgagaattgagatagaaacaa

SEQ ID NO: 5249 - DNA, 464 bp, Homo sapiens
ggtaccagttattctctgtttcaaagactagagttcattataatttttttatcacataagaaatatttagcgtgtagccctacttcaacacttatccaattcttattttccacaaagaaagctcattaagcttattttgatgactcagaattagaggatacctctcaaatttcttctcccacatacttcactggttgttctgaactccaaagaaagaaaaatcagaaggaggccgggcggagtggttcatgcctgtaatcccagcgctttgtgaggctgaggcgggcggatcactagatcaagagatggaaaccatcctagccaacatggtaaccatcctagccaacatggtgaaactccgtctctactaaaaatacaaaaattagccgggcgtggtggcatgcacctgtagtcccagctactcaggaggctgaggcaggagaatggcatgaacccgggaagag

SEQ ID NO: 5250 - DNA, 527 bp, Homo sapiens
gtagtcccagctacgcagggaggctgagacaggagaatggtgtgaacccgggaggcggagtttgcagtgagccgagactgcgccactgcactccaacctgggtgacagagcgagactctgtcccaaaaaaaagaagtttctgtagcctgtagtcccagctactccggaggctgaagtgggaggatcactggaacgtgactgtcacttgagggtatgatggtcagctgggtttccacccctttgatgcacttcaaatcctgtgtatcccacaaagacttgctcctttctaaaggctatggtttacgttcaacagaatagcagcaaccaccataagcctgaaggctggctagtctttaatattctgccctattcaaagaaatgagtctttccctcattcctaaggatctcccaggtccattacaaaaaaagaaggagcagcaaggtgcagtggctcatgcctgtaatcccagctctttgagaggcccaggcgggcggatcacctgaggtcaggagtttgagaccaccct

SEQ ID NO: 5251 - DNA, 479 bp, Homo sapiens
ggtggcgaaaccccgtctctactaaaaatacaaaaattagctgggcatggtggcgggcacctgtaattccagctacttgagaggctgaggcaggagaatcgcttgaacccagcagacggaggatgcagtgagccgagatcacacgattgcactccagcctgggtgacaagagcgaaactccatctgaaaaaaaataaagaaaaagaatttcagagttttctgtctcaagaagtcattttcctacatactggaaacagggtggtcattcctaaaacctctgagtctgtccccactaccgcctaacttcctagccaaatccaagccttgagaaactccgctggaactgcctgctatttcccaactgtgctgacaacttcatgggtaaaagatgccattgtggccgggcgcggtggctcatgcctgtaatcgcagcactttgggaagccaaggcaggcggatcacgaggtcaggagatcgag

SEQ ID NO: 5252 - DNA, 597 bp, Homo sapiens
acaggtagaggccactttggtaccattgtattccccaatccaacccaaccactatacatacacacacatacacacacacgtgcacacacacacacacacacacacacatcaattgttaacaaggacaattttagagtataaccaattagtaaagatataattttactaagtagaacagggacctaaaatacaataataacagaaatagaaagcaaaaaacaaaagtaaacctcaacaattattacttatggacccaagcactctgcttaccattttacaaacatatctcacatgttctttacaacattctcacaagggcaatatttatatccttaatttacagaagaggaaagtgagacttagagaagaaaagcaattttccaatgtcaaatttctgcttgtggcaaagccaaattaaaacttaaatattattaggccaggcgcggtggctcatgcctgtaatcccagaactttggggggccgaggtgggtggatcatgaggtcaggagatcgagaccatcctggctaacacggagaaatgccgtctctactaaaaatacaaaaaattagctgggcatggtggcgggtgcctatagt

SEQ ID NO: 5253 - DNA, 470 bp, Homo sapiens
tacatgttcttcctcctgcgtagaaaggatcgtccctccactttcgccaactaatccctgctcaacttttcatctcagcaggaggcccattctctttggcaatcctctggcctccagcccatttattatatgctcacatgtcaacatgtacttcgtacagcatgtaacacaattgcacttttatattttaacaaattatatttcccatattgaactgtaagtctcctgaaagcaggaattttgttcttgctcatcatcaactttttcaacatccattaatattcctttaaattaggatggcaaagatcatatatagaaaattggctaagctgtggtccattcatgtttgctcccaattaaggagcacagctatgaaaaggaaggcttcaaattaataaccaatagatttttttaaaaagaaaactggccaggtactgtggcttatgtctgtaatatcagcatgttgggag

SEQ ID NO: 5254 - DNA, 518 bp, Homo sapiens
taactgcccctctgtggaggggatcccaatacccagaagctattgctgtcaaaggtgagtgggttagcaaaaatctctgacatttcatccagcagattgccaactaggcaagattctcgttaaagcctaaacgttgctctctctctctcttattctctctctctctgggtggtgtttcctccagcccccagaagtaccttggatgggaaagtttcatgactggttgcctggcttactgctgctgctgactgactatgtttgcagtgaaggtgctccaggccttcagcagcatcctcctagtgtttgcgtatgggcaggtggagcaaccattgagtaaagatggagcagggagaactgagtggtgaaaataaggcagcaggagagggcaaggtcacagtggaaagacctttagagtcaaacagctaggttcaattcctgggttcctaattaatcatgtggctttgagaacatcactttacttcaatgtgtgtctcactgggttggagtgagggataaat

SEQ ID NO: 5255 - DNA, 329 bp, Homo sapiens
ttcaaggatgtatatttccattttgcagatgtagtcactgaggttcagagtgtccgtgtggtctagtggatgatgtgggctttaaaaatatatgtgagataaaagaatgcgaatctgctagtattacttggtagatgaaatgaggtggctaggtaaggcatctaacgtgtcccccagcagggacagaggaaatctccactttgtccctccactgggagaatgtacactaccattcagaagctttataatgtgtaagacacaggtccaacccaagaatcaaatcagtgctctctccgcttcactggaggttttaaagggatgggggtgag

SEQ ID NO: 5256 - DNA, 370 bp, Homo sapiens
tacggctgaactcattcagggtcacacagctatatatggcagatctgggatctaaaccaacattaattttaaaattaatgctctttcctttatgtaaccctatctcctaaagatcaattatgaactccaatgctcacttaaggaaaagagagaattgtcaacttttaaaagaactatacaaggttgttacagtgaaattttaaaactggcctattaagctaatgttatctagctttaaaaataaaaacaaaatcaaggagttaaaaacagcataaaaacatgccaaagacttaccaaaatgtcaaacaaattttaaaggaaagctcttagctgagggcaaataataataatagacaggactcatatctac

SEQ ID NO: 5257 - DNA, 498 bp, Homo sapiens
gtttcaattttatgacacaacagaaaaaagaagaaactctttttattataatttaaaaaatataattggaagtgaatataaaactgtctttccaaagcacaggcaacttccttttgggcagacaaaaagcactaatcacttcggggggttccctgatttctttggcacagttaaaatgcattaaaagtatgactgatcacagagaatggaagtcccaagagaaagctggtttggattttatttcctttaagtgcacactttaatctcttagctaggagattttatgcaattgcctattttatgtatttgattccttgttttaaaaattgctctaaggtagatgctttttaaaaagcaaacaaactatttatttattcaataaacatggattatgcctgggtcacagacacactcatatcaggtgtctaggaattacctgtggtaaattttctctcaattacataattcaatttaatataatagaaacgtcatttttga

SEQ ID NO: 5258 - DNA, 542 bp, Homo sapiens
acaccatgcccggctaatatttatatttttagtagagacagggttttgccgcgttgtccggtctggtctcgaactcctgacctcaggtgatccaccagcctcggcctcccgaaatgctgagattacaggcgtaagccaccacgggtggcctaattcccttactttttaactaattcttcactgttacatttaatgatacagtgaagatccttgtttgtatatctctgtacatatttctaaatatttctgtcaaatagactctagaaatagacttactgaatcaaaaaagtacacacattttaatgttgatagatatcggttaactgccctccaaaaacactgtgccagtctccgttcctctatggaatataatagtactaaatttctggcaagacatgatggctcaggcacataatcccagcactttgggaggccaatgggggcagatcgcttgagctcaggagttcaagaccagcctggacaatgtggtgaaattccatctctacaaaaaatgcaaaaattagctgggcctggtgacatgc

SEQ ID NO: 5259 - DNA, 454 bp, Homo sapiens
gacaatgaaagtggtccagccatagaaacttatctcctttcctctctcctatcctcccttctcctccctgcctgttctttcctcctttccttccctctctcctctcttccctccttcctttctctccttcccctctgggtccgggctggtggaatgaggggaattagtcctcagcagcggagtgacaggaatggttctggatggcatggccaggctgcacttcatcttgggaggattcttatcctaacttggagttaacaaattaatccaatctaagggttcattcttatagtagacacttctgttttgttaaataaacagttttagcattcctccattcttcattctactaacgtttgggttccagagttccagcagaaaatcaagacgtggttgggcatggtgcctcagcctgtaatcccagcactttgggaggccaaggtgggtggatcac

SEQ ID NO: 5260 - DNA, 345 bp, Homo sapiens
attagggaggcagacctgatgttgaatatgaaggtgagaaaaaggattaagaaataattcttagtcatcaattttgtgtcactatgtacattctggtgccaggaatgtgtagagaaggctgaggaaataaaaaaaaatgacttaaattttgtatatgttgagatttagctgacaggatatatacgagggtgtacactaggtggtggatagagagcttatgattaattgtgatagagattagctgaatagagagcttatttatttattttattattattattttttgagatggacttttgctcttgttgcctgggttggagtgtaatggcgtgatcttggcttact

SEQ ID NO: 5261 - DNA, 515 bp, Homo sapiens
aggtgcggtgtaatcccagcactttgggaggtggaggcaggaggatcacaaggttaggagttcaagaccagcctggccaatgtagtgaaaccctgtctctactaaaaatataaaaattagccaggcatggtggtgtgtgcctgtggtcccacctactcgggaggctgagacaggagaatcgcttgaacccaagaggcagaggttgcagtgagctgagattgcaccattgcactccagcttgggcaacagagtgagactttgtctctgtttttaaaaaatgaagtgtctaaatgtcattaatattgcaatgagtaagtaaactccaagttatatatcagtaaaaatcagtaagctagataaacatatatcaaacaaatatcaaaaacattttgcagactgaaaacacattatagaagaatatgtataatagcaactatagaggctgggcatggtggctcacgcctgtaatcccagctctttgggaggttgaggcaggtggatcacgaggtcaagag

SEQ ID NO: 5262 - DNA, 492 bp, Homo sapiens
ctcccatgacacctggggattatgggagctacagctcaagatgagatttgggtggggacacagccaaaccatatcaagtagggacatgtggaaggattcgtggatagcactaagatgtcattgaaggttggagactacctttctgcaaaggccagtttctgagatgttgagttagatggtgtcatgggcaggaagcagtatcatacttgctcattacttgttatctagtccaactgcagagagatggcaggacaatttatcctagaaaacaggcagggccaaagcagcaatcagctgggatgggggaaggagtagcatagcttaagagctctactttgaccactatggaaaccaagagttttaagcttggccacacttgaattctaatcatatcatagagtgaacaagaactgtttcaatcatgatgtaatctgagaataaattcaccaacatgacctcgttgcaaatggggtcagtttttatttttaacat

SEQ ID NO: 5263 - DNA, 568 bp, Homo sapiens
gtccagctgatggaattttaggagactgcttgagaacattagttggaaacataaaggagtacactaggaagtgtctctggattccacagtcaccgggagccagggtgccctgtttgacttccgcctccgtaacactgtgttttgcactctccccactctgctttatataccagtgtctcccagcctgggctgcatcttctgaggtgactctcaaaaactttttaaagttactgacgacttggtctcaccttcagagattctggttcaatgggtctgggcgggtctgggcattagtatttcttaagagcccgccaggtggttctaatgtgcagctgggttgaaatccgaactttgtagttcttgggacttctttaccacctaaccgagtggccagtcttccggaaccagaggagcgcgtcactccgcagattctcccaagtggatcaacttgggatcacttcagctcctgcatagatgacaagactatgaaagtagaaactaggcctggcgcggtggctcacgcctgtaatcccagcactttgggaggctgaagtgggcggatcacctg

SEQ ID NO: 5264 - DNA, 267 bp, Homo sapiens
gtatgtgtgtgtgtgtgcgtgcatgcatgtgtgtgtaactttttcctttgccagcgggaattaaacttacttggtgaaagagacagcaagaaaacaaaaggcagtatttaacattttaggtgaaacagtgggggttttagacacgacaatggtgattacagttgatggataaatagatagcactttatgatcaattactctgagtattttagaatatatgaattgccttagagatatgtgctcatgtgtatgtgtgtgtgtgtttgt

SEQ ID NO: 5265 - DNA, 583 bp, Homo sapiens
taattttgcacatgcagttgtttctgcctgaaatggccttgccatcttccctatccaattgctatctgtccttcaagatcctgatcggtgaagcattatttctgcctccaggcagaaagaaggtgctattctttgttcatccataatattggtcatatttccttatggtaacttattttagtgtattagaaccatctgtttacttcaatatttcccttttattggtggggggacattttggactcagttgagaatctaatgaaagtaatgaatcttctcactggaaacatacacatacacccaaatttttgcccatgagcaatctcattaactactctctccccaagcccacccaccacatggacactaggtgaaaaaaaaactagtttacatactgctaggcccagcctggtggctcaagcctgtaatcccagcactttggaggctgaggcaggcgaatcatttgaggtcaggaatttgagaccagcctggccaacacggtgaaaccccgtctctactaaaaatacagtaattagctgggtgtggtggtgcgtgcctgtagtcccagctactcgggagactg

SEQ ID NO: 5266 - DNA, 524 bp, Homo sapiens
atatttcaatttcattctcttcttctaagcctttaggatttcagctattacatgattaattcactgagtgcagtatgtcacttcgtcatgtctcctggtttctatagtaagtgttcagtactcttaagtctaatgttttctttgaggcattggaagtcagacttctttttttcccccaaatactttagcttcattagctcatattttctttctgaaagtttttaaaattcctcatagaaacagacaggtttccatagttttctagcttctcaagttgatacatacgtaaacttaattgatatataatttgcatgccacaattcacctaaagttaacaattctatgagttttagtatacttatagagctgtgcaaccactatcacaattcattttagaacagatcagtacacctttctaggaattctttagttgaaactactgaactttccacagctctgagacatggtagttctgtttttgtctctaggtcaaattctaaggctgggcatggtgggatcacctg

SEQ ID NO: 5267 - DNA, 561 bp, Homo sapiens
gaaacaaaaatctgaggctgagctacagaggagaaagaaatgtattccttttcacatttgggtatgcttgagaatctctaaacagcacaactgcaccaagaattctcttgcattattactctgtactattaatttgtttgttgatagcagcaaatgagcttccacttactgagtcctgtgtgagcccagactatttcagcacttaagagtccttcaatgactacctcagaggtggatctcagggtgtctggggctcctatgcacatatgtttcttgttgtttacaaagctctttggacttaatctgaatgacagttgccctaaaaagctggagacaaatgattagccataaagttttatttttcaacatttaatttttagaataattaatttaataacagattttagggcatgtattccttgctacttagtggtttatgtctcttttaggagaatacctcattatgttctctatattgtcacataagagatgctggttctgcttttgattctaggagtcagtttaagtgaccatagatgatatacgtagtgtatatcatct

SEQ ID NO: 5268 - DNA, 512 bp, Homo sapiens
tttgagatggagtcttgctctgtcacccaggctggaatgcagtggggtgatctcggctcactgcagctccacctccctggttcatgccattctcccgcctcagcctcccaagtagctgggaccacagatgcccgccaccacgcccggctaatttttttgtatttttagtagagacagggtttcaccatgttagccaggatggtctcgaactcctgacctcgtgatccagccgtctcggcctcccaaagtgctgggattacaggcatgagccaccgtgcccagccatgatacagcatatttaagaaaaaattaaaaacctgaatagacctatagtaactaaaacttaaatataccctcctctttgctagccttcatcaaaaaaatcccaggtgagttctatcaaacattcagagaacatataattccagtccttcacaaattgatccagaaaacagaagaagaagaaatgttaccctgttcattttgaaacatgttaaaccttgggcagcata

SEQ ID NO: 5269 - DNA, 288 bp, Homo sapiens
agagtaagttttaaaagaagctagtggattttaaaaagggcaaatattatataaggaacatgaatattataattcatgttattttcatgttcatacagaatacttacaaaaattaacattttctggtccataccacaaattcaaacaattttcacggaaataacgtgacacagaatatatttcctaaacaaacagcaatgaaggcagatatcaatacaaaaacgaaagctagaaacataagtgtaataatattggttggaagctattttaatgaatattgtaatatgt

SEQ ID NO: 5270 - DNA, 505 bp, Homo sapiens
aacacgtgggtacatggaggggaacaacacacaccagggcctctcagggggacagggggtaggagaccatcaggacaaatagctaatgcatgcaggacctcatacctaggttatgggttgatgggtgcagcaaaccaccatggcacacatttacctatgtatcaaacctatactttctgcacatgtatcccagaacatgaaataaaatttaaaaaatatatacactgattcatgatctcctttctctccttctgaaacactctttaaaacattttagcatttccccctctgtcttccatgtctcctaactacatgtttcttattttccatgtctttattcctgtgttcattttggatagccccttctgacctatattacagtttactagttcactcttcaactgcttctaacatactaatattctgttaaaaccattcatttgggttaaatttcaattatgttattctctatggacattctatttgttttcttttaatcttcttg

SEQ ID NO: 5271 - DNA, 588 bp, Homo sapiens
agcccctaccaggctttcccacccatcctgtctacaaggaccaacagatcagtgctgaggtcagagtgtacgcacactggacattctgatcattcttgctagtttgctcctggtagcttaaaatcttaaaagggagttggtaatctcaccacctatgttcagccaacaaccaaacactagaatgtcctatttgcagagctttatacattttgaagcactttcacacacgttggaggctcacaggtgtaagcaaatgggcaggtatcaagactgggtttcttggctgtgcacagtggcttacacctgtaatcccagcactttgggaggccaaggcgggtggatcatttgagatcaggagttcaagaccagcctggccaacatggtaagaccctatctctactaaaaatacaaaaattaggctgggcacggtggctcatgcctataatcccacactttgggaggcagggcaaggggatcacctgagttcaggagttcgagaccagcctggccaacatggtgaaatcccatctctactaaaaatacaaaaattagctgggcgtagtggtgcacacctgctatcccagctac

SEQ ID NO: 5272 - DNA, 554 bp, Homo sapiens
ctagccacattcttctgctttattttgctagaattttgcttttgggggtataaaatatttgtaagccatctaagcttttgtttccagtaacatgcctacattgtttttaccaagaatgaataaaccaaaaagcatatattttttagcactggatttagtgatataacgtagttacaacttgatttagtactattcttttctgcatacatgatcatatattttagtttgtgaggttactggcctaaaacttttgaaatcactcaaggtggagattttatctctgtagcacagaatgttatttaattacagtgtaatctgatagggatgaaaagattaaaataaaatgagaaaagacaaaataaaatatagttaaacctgatttttttcttcattgagagtattttataaatgattacttttataaatctgcataataaacaacatttatattgcatatgtcttccatacataaattcaaaaccttggattcatccaaagccatgtggcattttaattaaaagaggtttggaaaatgtaacttgcaattatataaa

SEQ ID NO: 5273 - DNA, 437 bp, Homo sapiens
ctaacaggaaaaacgttcacaacacgcagcaagtttacaaaggaggatgcagaataggattccaacctaattaaaaataagtaaggccgggccaggtgcagtggctcacgcctgtaatcccagcactctgggaggccgaggcaggtggatcaggaggtcagcagatcgagaccatcctggctaacacggtgaaaccccgtctctactaaaaacacaaaaaattagctgggtgcggtggcgggtgcctgtagtcccagcttctcgggaggctgaggcaggagaatggcgtgaacccgggaggtggagcttgcagtgagccaagatagcgccactgcactcccgcgtgggcgaaagagcgagattccatctcaaaaataaataaataaataaaaaataagtgaatcctggtgcggtggctcacgcctgtaatcccagca

SEQ ID NO: 5274 - DNA, 555 bp, Homo sapiens
tcaggggaagggtggagccaggggtaagacacccatcacccttcttgcctcctgacccaaggcctgggttttccctgcaggaccctgactgggtggagggttagccagggtgacttagggatgcaatgcagacagcttggtaaaatagtcattctcagacttgggctctggagcaaaatattacccctagcctctgagctgctccggccacttcccattctgcctttctggggttgaacctggaagaacctagggtagaccctttctgtgacagccccttgccctaggaaggcctgaagcagaccagtctaatcacctcattttacaggggcaggctgaggcccaggcctctctggcgcccacaagatacattcgtcctgctcacctggcattcagaatcctttgccaagagaagcacccacatttcctgctccacccacagcctatcctcctccttttcccagactattggtctttgctcacactgttcctctgccacaaatgccctttcatgcctttccccctcttctacgtgggatgaattttaaaaattag

SEQ ID NO: 5275 - DNA, 566 bp, Homo sapiens
agataaaacagtatgtaactgttttatccgttctcatgatcatagtagatgcctatttgtgcaggcaaaaaaagttttaattctcagtaaatacatacacaagcattagaccttaagatgaaaaaaagtagatattataatataaaacctttttccacaggtacaacaaatgtgggcaaattataatccaggcttaaactattaccccaaaatctaaatgagaaaaggacgatctgtaccctgataccaaactagataaagatatcacaaggaaacaatatgccaataccccttatgaaaatagatataaaactcttcaacaaaatagtagcaaactgaatctaactacatgtagaaagattatataccatgaccaaataggatatattccaggaaaaacaaattggcttgtatgaaaatcaatcaatgtattatacctacattaatagaataaagggcaaaaagcacatgatcatctgaacagacacggaataagcatgtgacaaaatccaaaaaccatttcctgacaaaagactcaacaagctaggaacaggaggaaacatctt

SEQ ID NO: 5276 - DNA, 547 bp, Homo sapiens
aatcgcaaccggtgggaaagttcctaagcataaataaaaccatatattcaggatagcaagacgtccaatggggctttgtcatagaatattcatgtgattatcatagctggagaatgaggctgagaatatgttttgaaggacaatctattccccccaaaaaaatacctggatgatctcattgatgttagaaaacttaaaaaaatgttaaaatagaagattattataatttgatttaatatttataaaaatcaaacttccaaccctatggaagatgatgtggactgcaaaaattgcattaagcagcagaatttggctcacggatatacaaattaggagccttttctattattcctcataaaacataaggaagaattaaaaggtgcctgagatactgaagtaattgaatggggaattcttaattaatcagctaattatttaaaagatcatttattcatttaagaaattaattgagcacctacattataccatgtgtattttattttattttaaaattctatttatttatttgagacagagtcttgctttg

SEQ ID NO: 5277 - DNA, 440 bp, Homo sapiens
accaccacgcctggctaaatttttgtatttttagtatagaccgtgtatttttagtattcttagtattcatatacaatatttttagtcttcaccgtgttagccaggatggtcttgatcttctgacctcgtgatccacctgtctcggcctcccaaagtgctgggattactggtgtgagccactgcgcctggcctggaaactctttcattactgaaagaatcatcccttgaccacaggcaactctaaattcctttggggaagaatcagaatgattcttgctcagtccagctactctcttgaattgagaagtaactcaggaaccatttgctgtggatttctctttacaatgtggattgaggaagagaaggtccatgtgccaagaagataaggcagactcacagatagctgagtcaagagcaagaatcttaatgacatttgggtc

SEQ ID NO: 5278 - DNA, 471 bp, Homo sapiens
gcggcttctcctggtattcaatgccatgcttggcacatagagacttcaccagcggggcgatcttgtgtaagttgtgccggggcatggtggggaagaggctgaggagtgtgtagggtgggcagagcgtgaggactcagagggccatgctgctcccgcttcctcccaccacctgggcagaggctggctggggccctcagagaccctgtccacagccaggaccagtctcaaagtgtggctcctcgtgtgtgcccagtggggtgccacgtgtgtggaggggagggtgcagccctccgtgagcaggagggcgtttgtgctctatggagctgggaagatattgggtggccagagacaaagtgtcatgtttttcaaaaaagaaatgaaatagctggggaatgctaggaaaagaggcagtgaggtgaggcacggtggctcacccctggaatcccagcattttgggaggccgaggcaggc

SEQ ID NO: 5279 - DNA, 553 bp, Homo sapiens
tgtcctacagagctgggccaggcgcgcccagaacagggggaaagtgcgagtccactcttcctatgcatgtcctgcttcccaaattaaaagtcccagtgagaggaagctgccgctgtcctacagagctgggccaggcgtgcccagaacagggggaaagtgcgagtccactcttcctatgcatgtcctgcttcccaaattataagtcccagtgagaggaggctgccgctgtcctacagagctgggccaggcgtgcccagaacagggggaaagtgcgagtccactcttcctatgcatgtcctgcttcccaaattaaaagtcccagtgagaggaagctgctgctgtcctacagagctgggccaggcgtgcccagaacaggggaaaagtgccagtccactcttcctatgcatgtcctgcttcccaaattaaaagtcccagtgagaggaagctgccgctgtcctacagagctgggccaggcgtgcccagaacagggggaaaagtgccagtccactcttcctatgcatgtcctgcttcccaaattaaaagtcccagtgag

SEQ ID NO: 5280 - DNA, 490 bp, Homo sapiens
ttattctcagagtccattttgacagcaaattatatggtcacactgtggatagagaaacccaagactttagagcaggagtcatttaaaggagtaatggtagtgtgtgactgtgtacatagttcaaagtcattcttagtttgtataaaccagaaaatgaggctgagaccatattgctgggaagaacaaagctcactacattatcttgtgactaccaaagaaaaagagctaagattccattagcttgaatccacataaagcttaaagccaaattcgggctaattaaagtcaggctctgggaaaacaaaagcataaaagcagtaatcatgtctgagtaagatgaagtagcctgtgggtatgaagaaaacaaagaccaacaacagtcagaaggaaggcagaaaaagcactttgggaggataggagtagatacaggcatcatatcaagttgcctggatgagtgttgtcatccagtttctccattttgaggtttggg

SEQ ID NO: 5281 - DNA, 603 bp, Homo sapiens
tattaaattttccctgtccaaatttctgcggtgatttctgtcccttgcttgaactctgatacaacatctaaggacgctttggtctttgattcttgtctttgaaagacgatggcaaggataaaggagttgtgtgtgtgcgcgtgcgcgcgtgcttgccattaatacagacttaaaagcagcagagtagcagagtggctagtacagggtactccagccagattggctttgccacttcctagctatgtgccctggggtgaggggagttgcctcagtgtcctcatctgtaaaatggagatagagtggctagaatatacccagttaagtttgaatttcagaaaaatcacaaataatttcttaatataagtatatcctaaatattatacgggtatccttcctgtattcttatttgcgaaatctgacaagactagtattacatcataaaaggttaaattaaggccgggcgcagtggctcacgcctgtcatcccatcactttgggaggctgaggtgggtggatcacctgaggacaagagttcgagaccagcctggccaacatggtgaaaccctgtctctactaaaaatacaaaaaattagctgggcatgat

SEQ ID NO: 5282 - DNA, 511 bp, Homo sapiens
atttccaattattttcccacctttagggcagacagaagttagctcggttcaacgcccatgagtttgccacgctggtcattgacattctcagtgacgccaagaggagacagcagggcagttctctctcgggttcaaaaggtaactgctcaaacctccaaacacttgcattttttggccctctaaatttgactcaggtgttaaagttataaactaattaaagcagtcatcaacatgacagttctataggtttttggttttttgtttgtttttttactttaagttccgggatacctgtgcagaatgtgcaggcttgttacgtaggtatacgtgtgccatggtggtttgctgcacctattgacctgtcctctaggttccctcccctcagccccacccactgtaagttttattggtagtatattgtgataaatagtttacctgtctgagccctggtgaattaacaatatttcagagttattaactgctacacatatttatcttatatatgatttct

SEQ ID NO: 5283 - DNA, 597 bp, Homo sapiens
ggtttaatggctaagattgggaaacttgtaaattttctgtgacttttgatgatatatgatgtacataaattagcaggagaaaggaaaagtagtacgctagaaaacaaaacaagaaagggattgaaggcaaaatttcattaataatatattgctgacacaggaaagagaagggagtaattttgatctctggaaaagtgtttaaagaatttctttcacccctactgtgggctgagtcccaaccattctaagatcttgcaacatctggcctgatctaagccatgtgaacacttaatgtagtagggaaaaacattatttgtgtatgaaatttacatgccattttaatcattgcataatgttgtttacttaaatatgcaattttttttttcttttttgagaccttggcttaccacagactaaatagatagaagtaggtgctaatgtggtcttctcacagacatattccacaactcccaagaagtaatatgtatttgattcttcaaatactgttatacattgggtagcactcaaacactcattgtaggccagggatggtggctcacacctgtaaccccagcactctgggaggctgaagtgggc

SEQ ID NO: 5284 - DNA, 561 bp, Homo sapiens
gaggtgcacggcccctgcccaggctgggtgggaacatagaataaacagcagtggaatatttgtgtctgccatgagtgtgcaggacctagggcctgggaggagaaatgcagcccaaccctcagtggcttagctccagcagggaagggccaacgacatcggcagaggcactacttatcagaaccagctcagccccagaaagggtggggctagggtagacatcaggagggacttcccagctgtctgagttatgacaccttgccaaaggaggcagcagaatcttctcccactcatatagtaccagggagaattttctctgggttgatttgaaggctgtcctcttttggaacttgagaaggacagacagcagaatacctcttaagtccttccttaaaaggatttgggttttgtttggtggctcatgcctgtaatcccaaaattttgggaggccaaggtgggaggatagcttgagctcaggagttcgagaccagccggggcaatacggaaagattctgtctctacaaataatcaaaaaaattagctggacatgatggcgtgtgcctg

SEQ ID NO: 5285 - DNA, 345 bp, Homo sapiens
ggaggtttgaacaaaacaaaataatacctgaaaatgttgaatggatatgtaatatttgtgaatgtttatgttctctatttcaccattatttaaacatttatattttcaaagggagacaataattatattttgaaatcattttatttttttatagagtgctgtattttttcttttcaatttcaatttggtgagcaaacaaaatcagtcagaatattatacataattaggtttcctttttgagatttgttgaaactctttatcctttatgtatgtatttcaagtagtataataaaaaagaaatataaaatgattagatatacataaaagtattgtagattatgtttt

SEQ ID NO: 5286 - DNA, 588 bp, Homo sapiens
gagatcttgcagaataattttaaaacagtagtgggtattttctgcttttaatgggtatgtctagtatttcatatattgttgcttatagaacactattcaaccaagacatgtcaagactagttgtctctcaaaccattagtatttatattattcctttccagctacacttgtaggatgtaaaagaccatttccaggaatatggaactgttttactaggtggagggtatatataaccatataatagtcacagaaactacattaatactcacataaatcaaagcataaatgacatagaatcttggcagatttgcttaaggttaaatgtataactcttatcagcaggaggtgaaagaatatattcttagatacttggcacatttagaaaatataatctaatattctttttaaagaataggccgggcacggtggctcacacctgtaatcccagcactttgggaggccaaggcgggcggatcacgaggtcaggagatcgagaccatcctggctaacacggtgaaaccccgtctctactaaaaatacaaaaaattagctgggcgcggtggcgggcacctgtagtcccagctactc

SEQ ID NO: 5287 - DNA, 615 bp, Homo sapiens
ttaataaccacctggggtgaataattcccagatgtgattcagatcatcaactgttctaaaccggtcattaattctttgaaagtatattattaagtcttgataggtattacttaaatggcttataggctattttgtagtctttttattttgtaggtcaatatctttccattccacctttaaacttctattttagtgagagaatagtgagaaaatggattgtctaaaatacaaaaaatgagagcaaatgtatacactttctacctgtacttaagactaacgatgaacaagaacacagttcaattttcacaaccatttagtcttttttccacaactgattctgcccaaagttagtatcaaattattccagctccaatgagagttgcaaaatatagcctttaaacaatatcttatttaaaataatttgttacatgtacatctacttagctatccagccaacttttattgagcatccctcatatagcacttactatgccatctacctgacccagagacacaacacccaacccattactgcaagagtttacaatctggtaaaagatagacatttaagtattgtgagataaatgctatgatatgcactgagtttcaggtggt

SEQ ID NO: 5288 - DNA, 400 bp, Homo sapiens
agaatatacatgggggagtgtaagtgaggatcaaagatcgctgtgaacacaatgaagaggtttcccaggataattcccacatagaataaagagaagaagagaaaaaggaaaaactgcatttccaaggattgtgcaagtccaagtaatacaaattctgttaccagagagtcatttacttggtccactgaatcagatagaagggaagactgtgaagcaaccggaaagaaacgaaggaatcaacttagtgtgactgaaaataatgcgttaagtgttaatgatttaaaatttattattaacaaatcttttatttgatagtagattatttaaaaactagtgggaacccagggtataaaaggttaatgtaatatggacaaagctgtgctcagaggcagtctattgc

SEQ ID NO: 5289 - DNA, 442 bp, Homo sapiens
agattacaggtcatctttgaaggactcgagattgaaaaccataggtcttcagtctctatatcattttctttagtaactttgaacccagataatattaacattatgataaaaataatttcagattgatgtatgtaagaatcgtgtgtaatgaccaggtatgaggcaccctcataaaattccttgtaatcctctgaaacaggaagattatagtgattaagccatagatcttttagattatacattggtacatttacttcataacttctttacaggaacacagtcaaatgtcttagtattcagaaatacttcacctttggtttcatttataaagcattgactcctttgtataagaaatttagcctgttcatcacaaaacaatttaattactactctgggctgctcaagatggtttgtacattagtatttagatgaattttagatg

SEQ ID NO: 5290 - DNA, 455 bp, Homo sapiens
gtttctcaccctgtgagcccggggcttccacccaggggagcattcagcaaagaggcaccagggacaccagggaaagtgccctgctgtcgtctgagaagcacacatccttccctgggtggggcaatggtctcattacacacagccaacacatactctcccaccatctgcgtacacagactcccgctggcactgggactcaccctctgaagccgtcactgtgccggtggtgttggccagatccagaaggatggaggggaacgcaggatgcaggaggtaaaggtggtgaaggctgggcggctcagttcctaggatgatatcctgataataagcagcaaaaaggaagagcaaaggtaacgctacattcccacacgtgacagtcctcaggtgaaaaggcagagtagaaaatggtgattactcattcctctcagatgctaatgcctgatcctaactacaag

SEQ ID NO: 5291 - DNA, 421 bp, Homo sapiens
gcaccttttacttcttatgccccatacatactgctttgccctataataattttcattcttgccttgactagcttcaaaattttgtttaatgagcatcaccttttgagtaattttcctgatgttttaataacatcatagcaatcttaacagtattctataatcaattatttaattgaattgatgttttgcactatatcctaaactcaaggacagtgaatatgcatactatgtattcaataaattcttatttcaacaaagccaggatgcctttggaagctaacagtgtagttgatcactatgttcccagttctaaacatgatgtcttatgcatatagaagcttgataaatatttattgaataaatttttaaatgagtgtactagaacagatggctaatttccaataaaagtaatatctatagc

SEQ ID NO: 5292 - DNA, 378 bp, Homo sapiens
aaagcgtgagacgagaagggagagcaagtggaataagactggcacaaggacttgggtctgggcactgggtaactgatctgggaggggagggatttggatgctcccaaggagtggcgttgagatggtaaaggtgaatggaggcaagataaaccagaaaaaggagcccggagaagatgaaggactgaggccctgatggtttctgagcccccagcacgtgctccgcagatggctgtggaatgtgtctgagggagagagcgtatacttgataaagagttcagatggcataaattgtgggatgcaagaacaattctcatacctagggtcacgccactacattttagtaattctggtatgaaaattagaaatgggtgaggtata

SEQ ID NO: 5293 - DNA, 354 bp, Homo sapiens
gcaggagagagacggctgtcagacaccaaataattgactcttaggtggttttattcattgttgagaaatatggtagattgggtttcatttaccgaatgagaattcttcattttcactttgtaatttttcttagtatatagtcagcccactgtatttgtgtgttccacatctgtggattcaaccaactgcagatcaaaaatattgaagaaaaaatcgcatctgtaccaaacatgtacagacttttttcttgttattattctctaaataatacagtatgacaactatttccacagcatttacattgtattgggtaatataagtaatctagtgatgatttaaactgtgcaggaggat

SEQ ID NO: 5294 - DNA, 603 bp, Homo sapiens
aacagggcttcctttctagctcctagtgtaggacctgcttcccagaggccactccatgtccactgcttcaaagagtggtacaacttataaaaatagatccagaaggtgatttcaggattagatgctggtgtgttgcttacgaaatctcatcctcatccattctgagccaaattactgatcacatatttctcattcatacaaataagtaaattctgcaagtttatgccactaaacttttccacacacatagtaggcaaggtttctacatctcaccctcagctttagcctttgcttactctctggttgcaaaacagcaggaattaagggtaataaagttaacattctcatcccatagagatcagaggatgttcctgtcatctatcaagtaattgagactcagtgatgatagctgtattaattcatttctggaaagtaacagtgctaggcataaataaatgtaagaagggtggagaagtaccatatgaagcaagcttctaacaattaaaaagttttcaagggtattcccatcacagtgtcatcataaagagcactgtgcattgaatttcagcccttcttcttcctctctgtcccctccagttgctg

SEQ ID NO: 5295 - DNA, 551 bp, Homo sapiens
catataaagtaccctacaaattataattatttgagtaagggaccaaaattttgcaaggtaaatattactatcctttttgtttatttgttttaaattaatgaggaggcctggagcggtggctcatgcctgtaatcccagcacttctggagactgaagtggatggatcacttgagcccaggaggtctaggctacagtgagttgtatggcgccactgcactccaacctgggtgacaaagcaagaccctgtctcaaaataataataataatagggctgggtggggtggttcatgcctgtaatctgagaacttagggagactgaggcaggtggatcacttgagatcaggagttcgagaccagcctggccaacatggtgaaaccccgtctctactaaaaatacaaaaattagccaggcgtggtggcgcacgcctgtaatcccagctattctggaggctgaggcggaaagaattgcttgaacccgggagacggaggttgcagtgagctgagatcgtgccactgcactacatcctgggtgacagagtgagactccatct

SEQ ID NO: 5296 - DNA, 531 bp, Homo sapiens
actagtgcaaatttctggcaacagtatttcatctccccattatttatccagggcattgaaaattggcacacatcacagatccttaagtcattctctgaatcaggaggagaaaagaggagaacagagagagcttaccatatgtgccagtcactgggctgagtgctgtgcctaaaggatcccacttgatgcttgaaataaccctgcaagatcaaactaaaaactcatacacactcacacacacacactcacacacacacacatgctcaagcacacactagaaactacagaacaaagaaaacgttgacaactaatagaagtatagtgctggctaagcacagtggctcatgcctgtaacctcagtactttaggccaggagttcaagacaagcctgggcaacatagcaagacaccatctctacaaaacattttcttagataaaaatcatttttaaaaagtggtataatgcctaagggctcagggaaacagtacccctatggctgtatggtaagcagcaggcaaggctacttgtcag

SEQ ID NO: 5297 - DNA, 635 bp, Homo sapiens
atggtcatttttaggcatgtatcattcatttactcatagtttggtttacttaaattatcaggaatacaatgttgcaatgatgcttaaaaaacacttgttagttttccctgtaccaggcaatggttataattaaaatgatatgctgttgagaagccactcttaagagtccagtttgtttaatgttatgggcagctaccaatttgtggtgtctctgtatatttttgtaaagattctcattttttatgcttgaagtatttggtgaaaagatgttggttgaccataatttgcaacattgtctcattaaaaataaactttcatattcatatttggtagaactgttaacctagaaacgtagcttgctaataagatagaatgatacaaaagtgaagtagtagccacagtacaacactgactgctcagacacatttaggttcagggtggacctttatgtcttgtcaagatgtctaggcccggctgggcgtggtggctcacacctgtaatcccagcactttgggaggctgaggcgggcggatcacgaggtcaggagttcgagaccagcctgaccaacacggtgaaaccccgtctctactaaaaatacaaaaattatccgggcatggtggcacatgcctgtaatc

SEQ ID NO: 5298 - DNA, 596 bp, Homo sapiens
atttaatcacaggcttaatctgcagttcaagtcagcaaatctggaaggtgataacaccaaaagagaacattggagctgtgggagggaacaactggggaaaacaagaggactccacagcagggaaaagagcaagaacacacagaccaacatctcatttggaggaagttcagaaacattggaaaggtcacacccagactcatgttcacaatatgaacccagggaaggtcagataatctccctttattctattgctttccaccaatttcagaattttcagttaaataacattttaatccacctgagggagctgaacatgattctctggaggagggaacaggtgaagagacaaagccaagcaggaaagaaaaacaaggtatcactggaggatctgaagtctctggtggacacagaagaacagacttcaactatgaagtccactgcaaaagtaaatgtcaaatgtagctttgagaagattcacagacacttccacaataaaggcctggcaaaggtaaagtatgatcaaatacaggcagaaaatgcataaaatgaaataataggccgggcgcagtggctcacgtctgtaatcccagcacact

SEQ ID NO: 5299 - DNA, 597 bp, Homo sapiens
ccagtttgggccaaattcataccagtcacagatccaaaatctccccttgacttggttctctgtctcttaactcctggaagagaggcttataattgcagctctgcagaaagattgagtttccactaataacttgttaagcacttactaagtactaagccacaatactaggcactttgaaacagacactatctcatttgttctgtgttgataattattatttctgttatttatatggagaaactgaagttcagagaatttacgccatttgccccaagtcccacagttaccaagccacaaagctggagttctagtttaattttctgaatctaaatccagggttctttatgctactgtacagtacttcttggtggctctattacaccaatgctttattctaattagtcaattgcatgaggttaatgataagaatttcttattgttgctaatagtttccattgcactatgtgcactatatgcaccaagttttatactgtgtggacttatttcagttggttctcccaagacatgtaggagacaggtattatctacattttggggatgagaaaaccgatgtatggaaagtaacacatctaaact

SEQ ID NO: 5300 - DNA, 544 bp, Homo sapiens
gagacagggtctcactctgtcacacaggctggagtgcagtggtgcaatcataactcactgcagcctcgacctcctgggctcaagcgatcctcccacctcagcctcctgagtagctgggactacaggcatgagccaccaggcctggctaattttttttctgttttattatattttgtcattctgcaccttcatgaaataatttttgttgttgtttttgtttttgttcgtagatacagtgtcttcctatgttgcccaggctggtctcaaactcctgggctcaagtgatcctcctgcctcagcctcccaaagtgctgggattacaggtgtgagccactgcacccagcctgaaaaattcttaaatttctacaaatcataaggatttaatgtattggctaaaattgaaatctctagatcccaactttaagacttaagacaaaagattaagttcattaataaataatctttggacacataagaaactgacagtttctgagtaaggaatagatagaaaacactagtcactgaaggtgattttttattctca

SEQ ID NO: 5301 - DNA, 589 bp, Homo sapiens
gactataaatccctttattcgtcattgtgagtcactaaatatgaactttatttatagctgtgtataattatatagtctttggcttgccataagcaattttgacaggagtaaatatcattagagtagaaaatctttcacctacacagatctatgcttcccagttaatattcgtgactaatatattgtgtagcactatggatgttaggaagcttttctccacgtacacagcaatggttcttgtattatagatattttattggctgataaagtatttttactggtatttatgtagtcttatttcccacatcacaacttccgacttaaatgagtgaagacagtttatttttttcttcagaactaattgaatgaattctgaagacttgctgtttaaattatgcaaacataatattttctcacatttatggctgtcgtaatgtttctgttgctgcctcaggaactgcattgtacttaatgtagttacagataatacaactgtcataactgtcataaagaccacgtgacaagccaggcattcccacagtcacacacctcaagcacatgtagccctataattaaagttggagctctg

SEQ ID NO: 5302 - DNA, 435 bp, Homo sapiens
aggatacacaagacacagatattactaactacctctagaatggggaacttttgtatctttttgcgttttttgaattttgggacttgtaaatatactgcaatcaaagtattaaataaggaataaaatagttcaatttaaaagaattgagatggtactctactcatatttttctttttaaaaaattatttaagataccaaagatcagcattcactaaatggaattaaacacactcagaaatattgataatacagtagataaggctgggtacagtggcttacgcctgtaatccctgcactttgggaggccgaggtgggtggatcacccgaggtcaggagttcaagaccagcctggccaacatgatgaaaccctgtctctactaaaaatacaaaaaattagctgggcgtggtggcccgcacctgtaatcccagctactc

SEQ ID NO: 5303 - DNA, 453 bp, Homo sapiens
gacagaaggggttggctggatcacagtatagaaagtataggtgatcccagccatcagctgaattctgtatgatttagccaagactaggatcccatgggcctaccaccttgtaaaagaatgtgctataataaggtagtgtgaagatttttttgaattcttaaatatagataatctggtgaaagagcttgggataaggaaggaagcacagatttggagtcagaaaagccacttttggtctgaattgccacaggttagcatgtgtcccttggcatgtcacttgactttgttgagaatcagttccttcatcaataaatgcccacttcactatgtgcttgtaaggatctaatgaaataccatccatgtaaattataaagcattatctcattttggggtattggcaatattatcactgtgaagaaggcattttaacaggctatatgggctgggataatg

SEQ ID NO: 5304 - DNA, 437 bp, Homo sapiens
catttgtacatcctgtcttcatgggcctggctgatcatcttcaaatttggagcttggaagtgaattattgtccacagtcccttgaacacttttttctgttgaaactgactttatcatttaggaattagtagtagtaagatcatatcttctgtgtcccctactgcttggaattataaaaaactgaaggctgaatattcaacacccctgttattaagcttatggtactctatttctggtgatggaatttccaagttttcacaactctgaatttgccttacccatttttacatatgtgtatatatctggctggatatatttttttatcactgtgaattatagtctactacaaggagaaaaagaagtactgattttggacagagagaaggagaactatttagaaattagtcccaaaacattagcatgaaaaaaggtcaatt

SEQ ID NO: 5305 - DNA, 432 bp, Homo sapiens
ttcaccgtgttggccaggatggtctcgacccaaagtgctgggattacaggcgtgagccaccgtgcctggcccaatgcatggcactcttattagttgtacacacagagtgggggcaaattaagatattagcttcatgagagatatgtagtgaggaaggctcacccaagggagaaggtcttgattactttcagcttgctcttattggcaaatgtctgaaagatattcaaaggaaggctctaagacatctacagaaaagccagggtacaaagggcagaggggaactataatgtccttcccctgccacgaacctagctcaagcaataaaggtggcacttgtgacataagggagcttggaaagacagggagtcactagacattgtgccaaaacaactcccacaccccaaccaatgttagccatagagaggcaggatg

SEQ ID NO: 5306 - DNA, 654 bp, Homo sapiens
gactgggaaaaaacaaaaaacaaaaaacaaaaaaaacgaacggctagatctagtgaagctaaaataccaggactagggtggttccttcccccatgaagaacaacttgagtcttcacatgtaattattctgcctcagcctggtgcctttttatccttaaccatataattaaatggttcacagctacagtgcaaataaagagttggtgttaacagaatatgtatgccctgtaattttcagctttattggatttcctggtgctaagcgctaatgctgaggcgctcacagtggaagaacaaccttcttgtgggagagttggataccttggaaacatattcactttccatccacctaagatcttcctcttccagcaccgccatcccctctactggccctctgcatagccgacttcatcattgttacctgtgcccatgtggttcctcaagctgagatccgctttccatagtgttccttcttatctgtccctcctcacagcctctccattgatgaatttgtgttgggacaagttgggacaagcaaccttcagagtctttctgccatttacttaactgccatttagtgtcatgaccttggcttcagaatgggttgatataagaaatggcctcggccgggcatggtggctcacgcctgtaatc

SEQ ID NO: 5307 - DNA, 408 bp, Homo sapiens
gtggtgcaatctcggctcactacaacctccacctcccgggatcaagctgttctccagcctcagcctccctagtaggtgtgattacaggtgcccacgaccatgtcaggataatttttgtatttttagttagagacgaggtttccttatgttggccaggcttgtctcgaactgctgacctcaggtgatccgccccacatcagcctcccaaagtgctgggattataggtgtgagccactgtgcccagcctgatgtgagtctataattgattatttaatgggaaaaaaagccaggttaggttctgggctccagcgaacacaaccaggactagagccagagaggcaagaaatattaacaatgtggaaacttacttagagagtatttgtctttcaaatgatctgatccttttgt

SEQ ID NO: 5308 - DNA, 608 bp, Homo sapiens
aatttttgcaagttggacatctctctggataaccatattactctctatccttgtacatctaaggaagatggggacaattcagacagtcatcatttggttctcctctttcttaatacttcagctgttcctagtagttcaatttgaaggaaatatcatggcactggaaacttttcttggcctcacattaaaattggacagaattagtgacactggaatggctggaattttattctgccatacttagcatgtcattggtaataactgttatgatggtacatgacttttaatgtcatgtcctgggattttattactggttggcataagccacagccatatcaaaactaattctgcatcttttggatttcttacagtgtccaggaagttattccagatgaagacttatacttttattttatttattaatttattcattttttgagatggagtctcactctgttgccaggctggagtgcagtggcgttatctcggctcactgcaacctccacctcctgggttcaagcaattctcctgcctcagcctccccagtagctgggactacaggtgtgcaccactacacccagctaatttttgtatttttagttgagact

SEQ ID NO: 5309 - DNA, 466 bp, Homo sapiens
ttcatacacagagacatttgaattaaaaaattaccatacaactctgggtcaacacatgcatgtgtgtggtcactcactacccctcacccagggaaaacatcactgatcaatatagaacatgcttcatttagagctctccccttccccccacacccaccctcacctaaaggccttgtggtttttcagttttttctcaacatgtcactctgggtaattactactcatttccaaaataaggaaaatcaaatgtggatccccatgaagcttattgatcgcaagggcacttgggccagatgaaatctaagaggttcttcatgtcttccgaaagaatcatcagtgtttcctgttctgtagaaacttctctcttctaatttcctttgaataaaatgctttccaactgaattagttatctaggggttgccataacaaagcaggatagagtggatgcggaggatgaaagtcaaag

SEQ ID NO: 5310 - DNA, 587 bp, Homo sapiens
gggctgcttgagctgggatattcatctttctcctgatcttggacatcagaactcctgattctcaagcctttgggtttggactggaggcaccagctttcctgggcctccagcttgcagatggcatatcatggaacttctcagcctccaaattcataactctaatacaccagtacaatggaaagattcctaaattcaaaagccagaaggctgggttcctgttcccaccctgccttttaccttctgtgtgttcctgatgaagacacttcatgctccactatttacttacctctgaaacgaagggctgacccagatcagttgttctctgacctgcttggagggactcagaggctgtggagagtgaatatttccatcagctgatgcccttctcaggcctcaatctcccctggtttgcagactgtggccctccttggcctctgtggaatctggccatttgaatcctgtcagccctgttctccatcaccaaaggactccggaggaactgtgccaagcaggctgtcagccacgggcaagctttctgaaaaagacgtgccaactgcagccacagaaagtccattcccttgaataac

SEQ ID NO: 5311 - DNA, 608 bp, Homo sapiens
ggcacttgccaatgtacaccagctcaccagcaccttccccacaccacagcctcctatgtgctgctttgcaagcatgcaatcacccatggccaccccccacattgcttgaccagcacacatgcacataggtagaccttgcctccacgtccttgctggtgcatgtgtgcatgtgcctcctcactgtgccaatgctgctggcatcagtgctccccactgtgatgccattgtcaatgtgaaagtgcaccaggagaccaatagctctgcccccctgccctgtgccaccattgctacccatgtgatcacatgcacggagaccaccagtcccatgcccactggtttcctgcttccacacagacactattggccccatctcttcacccttcgtgccatgccaccattgctgccactgtaaacacccacaagagggctggcaccctatgcctgccagcaacccccgtcagctgacaagtgcgcaccagactgcactgctactgctactggcaaatgtaaatgagcactgattttgttgccactaccagacaaagcactttggctagccccacccatcagagtgttgtgaccaacagagaacaccttgacctctgtag

SEQ ID NO: 5312 - DNA, 670 bp, Homo sapiens
tctatgtgtgattttcccaagattacatagctaataaatgtcagagctgggtttcaacaccaagagacttagaaaaatgaataccaatacaaattttaaaatatactaggtaataaaacaagggtaaaaacataagagatttattacatccagtggataaaaaaggaaaccaatgaagtgagtaagcaaatgggtcttaaacatagccctctgatgcaaatggctccatggcttctgggacctcggcctaagtgtctaatggagaacctcaaaggcaaagcatgaaggacaaaggatatgaccggaccttattttttgccaagctcatgaccctcaggcatctggctctgcactgtgcgcaaagccagcacgatcaacaatgaatagacctaagtattcaacagctctgcttttgcctggctcataaaagggcgctaacttggccgggcgcggtggctcacgcctgtaatcccagcactttgggaggccgaggcgggcagatcacgaggtcaggacatcgagtccatcctggctaacacggtgaaaccccgtctctactaaagatacaaaaaattagccgggcatggtggcaggcgcctgtagtcccagctactcgggaggctgaggcaggagaatggcgtgaacccgggaggcggagcttgcagtgagc

SEQ ID NO: 5313 - DNA, 528 bp, Homo sapiens
aaacattaatcagggtgatgtgatagacattgacagagactcctttgggttaaatgattataaatatcttcctgatgagtggacatttgcatgaatatagacattacttctctaatatgtaaagatcatacacacatgcaaaatgtaaacctatattaaaatctctagggacttcaagtaagaagtaataaaagcatttatagaggcatgtcttgcagaaaactgtgataatatcttcagagcagaccacctctttgtttttaattctcaaaacgcatacaatgtatgtatctctcaatacaataatattttagctagcagttatgtagggaaaatacatcttcaaatctcactatatcattttagcaaagtattcaggaaaatcctgaatgcatacattttgcactcaaaattctctgtcataaatttgaaaaactttattccatcaaaatattcaaagtaaaataaaacatatctataatttagccaatcattttttcacatacagaatttttaaaatatatagtc

SEQ ID NO: 5314 - DNA, 475 bp, Homo sapiens
gtgaggagacagaagaaccctcagattcatcctttactttgtgtttgacacattcccctttaccttcaacctcagaacccacaactgatcctcaagctagtttatctccaatgtctgaaagcaccctcagcattgctattggcagttctgttatcaatggtttgcctacttataatgggctttcaatagatagatttggtataaatattccttcacctgaacattcaaatacgattgacgtatgtaatactgttgacataaaaactggggatctgtctgacagcctgccacccgtttgtgacacagtagccactgacttatgttttcagtgaagatataaaacctggagactctctgttactgagtgttgaggaagtactccgcagcttagaaactgtttcaaatacagaggtctgttgccctaatttgcagccgaacttggaagccactgtatccaatggaccttttctgcagc

SEQ ID NO: 5315 - DNA, 455 bp, Homo sapiens
atcatccactcatccatctatctatccatcatccactcatccatccatcatccatcatccactcatccatccatctatccatcatccactcatccatccatctatccatcatccactcatccatccatctatccatcatccattcatccatccatcatccatgttacacccatgcaaccacctatcatccacccatacatccacccaccttagcctccatcgacacatgcatccatccatctacccatccacccacccatccatcatccatccacccatccattatccattcacccatccattatctacccatcgtctgtcacccatccattcatctgtctaaacaggtatttcctcccccctcacttgcccttgtcaaaccatcaatctttctggggccatgctgcgtgtctcgggaagactgtgctcacctcaggctttgtgttgtgtggttt

SEQ ID NO: 5316 - DNA, 522 bp, Homo sapiens
tttatcacaattcagggaatcatgtatgggattatgtcaaaactaaacaacatctaggaagtaaaactcctaaaaaatcaaaacagctccaataatcttgggttttgaccagtacccagcctggatataataatctgattaagaatactgcttactcttcaattagaagagtaattgaagaggaagcgggaaaatgaaagatattcatttcttgagatccaagatggacctaaaaccatttttttaatttaatgactgtcactaaaagataattctaaagaaatatattaagcatctattatgaatcagaacatttggtaggtgttgaggacactggtaaaatgtcatacatgtgctttttagaacttactggtgttaaagtgtggtgaacaagagagcagtgaagagatagaaattaattgtaaaagcaaatatttaattttgatacagtttcaaatggtacttctgcctagccattggtcctatgccattccacctcatttatctacactggtgtaatct

SEQ ID NO: 5317 - DNA, 594 bp, Homo sapiens
ttcctgcctcagcctccaaaaatgctaggattacgggcatgagccaccacacctagcctcaaatagttgtcttaacaaataaatggttgaaacctgatatacgggaattagggactctgttttgtgaactgttcatttctggagtcaaaatggctttgatggtgaatttggttatctaacaattgtttccagaagttaggggttaagcagagtgcaccacccacaggccaccttacctgtcctgccttggcgttctcacagacaaaagcttcatagaatctggggaactctggagcattgtcattcacatctaagactttgattgtgacaggaacacttccaacctgggagggattgtctaaagggaacacaaggaaaaccaaatctgagagtttagtaatgccaaaagaaaaaaaaaagagtaatggtttttgctagaagtcggtatttacgactgggcgcagtggctcacgcctgtaatcccagcactttgggaggccgaggcgggaggatcacgatgtcaggagatcgagaccatcctggataacatcctggataacacggagtgaaactccatctctgctaaaaatacaa

SEQ ID NO: 5318 - DNA, 613 bp, Homo sapiens
ttctagtttgtaaacacttctaaagcagaaataattttattcctaattgtattcttcacttcatcccccaccacatacataacacacacacacactctgtctgtggtacatagacagtgtttattaaacatttttttggaatgttactgtaaagatatcagaatatatagacacatgaaaatcagtttggcactttaaggtcacactttttcatgcaggaattgttttacatagaatacagtataatttggccaaaaaaaaagcaagttagttatccaaaaaggctcaattcaataactttcttttcaacagcctgtgtaacatgcctgatattcacaaaaaaactggactttgtcatctgggctcttcaccagatcctccactaaggccattactttcagaatgtacaacctgctagcgaatattcatgataaactgaattaccaggaccactggaacctagctagtggttgccaccactgcatgttctttgctagtgagtagtggaagaagtagtgagagtagagtgttcagaaaggcaagcatggaatgattatttaacagaatatttgacaaatgtcagaaaagctattacgtatataaagctaaaaac

SEQ ID NO: 5319 - DNA, 570 bp, Homo sapiens
gacagaagggggccctttcatagatgattttatcttatttcagctatagttagtagtttaaggggacctaactcagtatatctcaaacctggtaataatggcatcggttagaagtgagtgagaattattatgaaaattattttaggttgggcacagtggctcacagttgtaatcccagcactttgggaggccaaggtgagaggattgtttgagaccaggagttcaaaaccagccttggcaacatggtgagactccatctctataacaaatttagaaattagctaggggctggtcacggtggctcacacctgtaatcccagcactttgggaggccgaggcaggcggatcacttgaggtcaggaattcgagatcagcctggccagcgtggtgaaactccatctctaccaaaaatacaaaaattagctgggcatggtggcgcacgcacacctgtaatcccagctattcaggagggtgaggcaggagaattgcttgaactcgggaggcagaggttgcagtgagctgagattgtactactgcactccagcctcggcaacagagtgagactgtctc

SEQ ID NO: 5320 - DNA, 475 bp, Homo sapiens
agaatcccaaaaagtgtatataaaagaaacgtaagcctcgtccagtttatattaaattgcctttgtctaaaatgggcatccacagctccaagtgtgtttggatttgcgtgttctctcgccatgaagccttgttctgacagtgtgatctattagcaacgcctttaaagtggcctggttttgattatttgtaaatattatggccagtgatggcttttcttcctcaattctgagtgtctcactactaatttcctgtgccagaatactttttcaccaatgtcctgtccttaaagtagcttaagttcataagggacttttaagtacccatttgtagttagcagatttttcagatgtcttttgttaggaatacagattttctgaaaaagccttttgctttctgaacacatgccaaaagattgtggctttgtcattcactttaaggaagaatgctacagtgattttgataggaaattgggag

SEQ ID NO: 5321 - DNA, 542 bp, Homo sapiens
caggggatccaggatcatcaccaaggtcattttcccagacagatgtgctgaggctgtagaaagtgctttttatttggttgggagcttgtgcataaatgcgagaggggctgcacatctgacggactagaggtgactcatggctgaaccggaacaggacatcggggagaagccagcagtcagaattcagaaccccaaagaaaatgacttcattgaaattgaactgagagacaagaactgagttaccaaaacctactaaacgtgagttgctgtgaactggggattaaaccagaacgagtggagaagatcagaaagctaccaaacacactgctcagaaaggacaaagacattcgaagactgcgggactttcaggaagtggaactcattttaatgaaaaatggaagctccagattgacagaatatgtaccatctctgacagaaaggccctgctatgatagcaaagctgcaaaaatgacttattaaatactcccaggaatggccgcgcatggtggctcaccccctgtaatcccagcactttgggaagc

SEQ ID NO: 5322 - DNA, 483 bp, Homo sapiens
tggggggctccagacaagtaatttcaccttggtctcagttttcttgtctgtaaaaaccgaacaaatgcgattggattgtcacaagaattaaatagggaggagacagttgtgattaagaactcaggatctggagtcagggagatctgagttcaaattccagctctgacagttagtaaactaagtgagttctcagatgaatctcagagtctgtattcctcatctgtaagtgaatatattgatcctactcatctcaaagggatatcgaaattgtttagaaaggtaatgtacataaagtaccaaacacaaggtcatgctgtgtgtttttaaatgacagtacatatgacagtactttgaacttacacacacacacacacacacacacaccctgcaaacaaacaaaattcccaatgacacatgtaatgagaatgagataacaggggcctcttatatactattgaattcagcctgtctaaaaatctacta

SEQ ID NO: 5323 - DNA, 549 bp, Homo sapiens
ttagtctctggctagagattggagttcttgctctgcaattgggaaagggccctcataggcagaatcgagccatgaatattatctagcagtagatgctggaattaggctctctcccattgcaggactggagcaggaagagttgctgaagctgatgattctaccaggtggtgagacatgcagccaggaatggctttgaaatatgatctctgtctgcatgtgtaattgccagatgcacccagcctgcttccttggataatcagggtacaaaccagggtataacccttggtgcagttcacctcaaagggagcaggaattgcagcccaccaaagccccttttgggtcaaagaaaacacaagcacagtgccagtcactgaatgcagcatcaccaaagtccaggggaagacacacagaaggtgtcattgcttaccctccatttccgtcctcggtgcacttttgcagactcagcagcagctcttcttgttgggacccaggagtatgggctgaaagacactgcttctcaggcttcttcagtggctccaccaccactga

SEQ ID NO: 5324 - DNA, 541 bp, Homo sapiens
ttaactcaatatagtgttgctaagttcgtacttttgcttggtttattttattttataaataggtatcactcgcatggttccaaatgcgataggcacagagagtatatatgatggaattacatcctccttccctgcactcagcaaccgagatcttcccgctacgggcactcaaaggtttcattgtctgaaatatcagcctaaacgtagtttatgtttaggaagcaacaaccgtaaataggcccacatccaaacggagtggatttaggtttcactttttcaaggaaaaccatcaaagaatttttccacatacttataaaccatcccacgtatagaatccatttttactgacacaaatttagtaccaataaacgactcttcttctcaatttgttttatttaacaataagtcttgaacgtcattcccagttaacattttgaagagtttcctctctttcgttctgttttagctgcaaagtattcttccgtaaggatgaacgtactataatttattagccagccacttagtgatgtacaattaagca

SEQ ID NO: 5325 - DNA, 523 bp, Homo sapiens
atatgttatttagtataagttacaaaaaaagaccaaaggttttcagaatgtgtgtttattcttcaaggttctgctcatttcttttagcattgtagtttgattgtagtttctgatgctgctcttagtggtctgcaatcttcacctcataagatgctctaaattttctgacttttacgtgctggaagtctgttcaaaccagccttatagaatgctggataatactgcttattgtgatttacttccctggagatcaagctcatcttagaatcaagcctttccacatgaatgtgaggattctggatgctttattctttctctcatctctgtctctcttccatcagggggatggttttgactgatgagctatttttcccaattgcaaatcaactatacttctagctgtgagaaagggatctttctaatcaattgggtcttgccttctgcttactatgtgaattctaatgaccaagctctttatttttttaaaaaaagtaaaataagagaatttaaattaattacttga

SEQ ID NO: 5326 - DNA, 586 bp, Homo sapiens
  misc_feature 507: n = A,T,C or G
ccaacccacttgatgctcacccaagagcaaacctggaagtgtgattatggaatgtccaaatgacagagaaatttaggatcatctaccaacactgtcaccatattgataaaaaaaagtggaggcccagttaagtgattggcctaccacatctgaacaattaatgttaagtgattggcctagtacatctgaccagttaatgtagaatccatgtctcctgattcccaattttatgttttttcccttcccctcagatgtcattttcattttggttcttgtataacactgagtcattctggaatctgtatcgatttctttagaccacttagctagctatttcacttcaatggagatatatatacacacacacacatatatatccatatgctgtgtgtatgtgtgtctgtgtgtgtgtgtgcatgtgtgtgtgtagcatatatgtgttttcacccattatatgccaaaacctgtacatgtccacaatgggatgctgagtcagatttgaagttntctggtaaatacctgttcatcatcatgggactggtataatttagcacctaagagtctgacattgcatgacatcaaaaga

SEQ ID NO: 5327 - DNA, 510 bp, Homo sapiens
ataggcttatttttttgctttcaataatcaagattattcatcaaatttaaaaggtaatcactgagctatctatttctcataggaaaacatgagaaacttgaaaattaagaaagcagattgtgagaccattaaggaaaagaggacattacagtaatagagaatgtatggcaccttccactcacgtatcaatgcaatcagggtatatgcagcctttatcctggttcagacaatgtgatagaaaacagaaacaaataaacctaggcatagcttctgtcctcaagtaacaaactgcccagtagacagactgaaatagtaagaaaaatcttaaaactgtgaaaactaacttaatggttcaaaaataagaaataactaattaccttaaatttcagagaaagtttgaatgtatttttaacttaaaaatatgtgaataaggctgggcgtggtggctgacacctgtaattccagacctttgggaggcgaaggcgggtggatcaagaggtcaggagttca

SEQ ID NO: 5328 - DNA, 568 bp, Homo sapiens
cagattgcaatatgcaaccagaatagagagccactggtctagagaaaaagagagttctgttgtgattcagacccaaaagtatggggccagcagcggggcaagtcccagtggaaaagtcagctgtaaggcacggtacagaggaaaactggccagcagtacagtatttaatgtctgattggttgcagaaggtgaggaaaataaaacagaaggtaaagacttaagctaatgttttcagcctcagtgactgaagaaacgcagatttgacacggggaggaagaaacagccagagattagttccatttagacatgttgaggccagcgcggtggctcacacctgtaatcacagcattttgggaggctgaggagggcggatcacttgaggccaggagttcaagaccagcctggccaacatggcgataccctgtctgtaactaaaaatacaaaaattagccgggcgtggtggcacctgcctgtaatcatagctacttgggaggctgaggcaggagaatcacttgaaccctggaggcagaggttgcagtgagccaagactgcaccaacacactccagc

SEQ ID NO: 5329 - DNA, 546 bp, Homo sapiens
tttctatttctgccttcatttggtcacccctaatacatttacagttgttgtcagtgagagagtcagtgtgatttaagttattgattaattacttgaattggaattactgggtctttttactttcatatttacctgtttgctttattatttcatttcatcattagtgtagtcactttgacctaggttggattcctggttctgctgtttattactgtgttactccaaatttctgatcttcagtgttcctgtatgtaaagtggaaatgatcatatgtatctcagagttgctttagaatattaaatgtgaaaatatacgtaaagcatgtgacacataacctagaagttggcacttgtaaatactacttccctttattaccataattattctataaggttggaaggtcaaatattactatatgggatgaatcacttaagaccttactactagataccagaagtacagtttaattatattaaatatgtaaggtaagtttatgcctgccagaggttcatttctatattacacacacatatatatatatatatt

SEQ ID NO: 5330 - DNA, 599 bp, Homo sapiens
ggctcaatgtctatgtcttgtctgcttagaagacagacatgacagctaaactttttaaaaattctcataggattttcctgtgcttttcaggtccctctggccagaccaggttcatttgtaatggagattttgcacagatttcacaagctttgctaatcccctccataagaaagataagctcggggcattcagcttgacatatgtagtttccagaaattttgtcagtgtttcttagaacttgtttaaggtgccatgaaatatagcagtgaaatgtaaagtgttggaattgtttttctaggaaaactcattgtagatggagagcaaggtatctaataggatgtggaagttctaaataaatacaagaagacatgaggcagcagagagaaagagaaagtagcagagagaaagtgaaagtagcagagagaaagtagccaagagaaagtgatggtccattcatttgtttatgtactcaacatcttccagttactgcctactatgtgccaggcaatatgctcgatgtttgggggatatgttggtgaatgacagagacacatccctgtcctaacggaggtttcaccctactgggacacacaggcaag

SEQ ID NO: 5331 - DNA, 112 bp, Homo sapiens
gcagctactagagacagaagagtcattgtgatttagttgtttggtgaattgctcatactttcaagggtcatcggtagcataactgcaccttggtgcttggagaaagcagagt

SEQ ID NO: 5332 - DNA, 440 bp, Homo sapiens
tcataaggtgaggagagggaggtggcgttatcagttccactttttccaggctagagtgcagtggcccgatctcggtgcactgcaacctctgcttcccgggttcaagcgattttcctgcctcagcctctcattttatcttggataaaagagaagctttgaaagattgcctccctatgtgtacagtcactgtaggcatgtatttgtgtactgtttacttagtcatgtcaatgagggcaataaaaaacaaaaatcaggaagcccaacatggattgctacattttaattctttcaaataaggaagatcacctgaggtcaggagtttgagatctgcctgatcaacatggtgaaaccccgtctctactaaaaatacaaaaattagctgagcatggtggtgtgcgcctgtagtcccagctacttgggagactgaggcaggagaatca

SEQ ID NO: 5333 - DNA, 523 bp, Homo sapiens
ggcccattaagtgggtacaagaggattaaggggttatatgagtacccaacagctgcaccagctaagataaaacaaaggttcccaaatcttatgcctattagtatatggaatgaaatgatacattctttatccatgcagtaggatattcatatttaaaaagaaaattaaattagaaataaaagctcattcattcaaatgcaaagcattgtgcgaacacaaatgaagaaatgtagaaagaaatacaaaacatttccccttctcttgagaagcctacagagtctcagtaggcatgatttaaaagttcaaaacattaaataaaattaaagatttaaataaaagcctgagtcaccaaagaaattctgcaagttagttcatgaataactgctgaacaatacacgtggctgcaatgcaagtttcagaagtgagaacatttcagggccagaggttaaaggagaaagttgacgtaatcaagaccttaaagattggtctgaagtgtgtgtacgaaagttggaagtaatctgag

SEQ ID NO: 5334 - DNA, 596 bp, Homo sapiens
gggccaaggtgggcagatgactggaggtcagaagttcgagattagcctggccaacatgaagaaaacctgtctctactaaaaatacaaaaattagccaagtgtcgtggcacatacctgtagtaccagctactagggaggctgaggcggaggttgcagtgacccgagatcgcaccactgcactccagcctgggcgacacagcgagactctgtctcaataaataaataaataaataaataaataaagggagggggcttagtcctgggggcagatgagcctagaaggcgaggggctcaagggaaggtgttagagggaccctagagtgcacatcacctccattctagacgccgccagagacaaaactttgagaaggcagcttgggagtcttcccgagttccgagagtccagctcccagaactgaccatgttgggcccggcgccctctgctggtcactctgggagctgctcctccccttccccaaccaaggtaattccaaacgtgagagacccccaaaaggatcaccttggccaggcaccgtggttcatgcctgtactcccagaactttgggagaccaaggcgggtggatcatctgacgtca

SEQ ID NO: 5335 - DNA, 556 bp, Homo sapiens
acattgcccaggctggcctcaaactcctggcctcaagtgttcctcccgcctcagcctcctgagtagctgagactacagttttgcaacagtacacctggacaatttttttatttttattttttgtagggatgtggtcttgctatgttgctcaggctggtcttaaactcctgacctcaagcagtcctcttgtcttggcctcccaaagtgttatgattacaggtgtgagtcaccacacccaacatgtgtctatatctgtagatacagatacacacaccatttctacctgaatatatagcaatatatatgtgcttccacattctttgtctacatgtttttttttcctccaggatgaatctgtgatgatgaataaaaaagtgaataaaaaagttatttttattcaggtgtagataaactacttctgtttctctcaagctgctataacatgggccatcttgtttggttagaatgtatagtcaattccttagaatccagaagaggagtcattaattcttgctggaagataagggccaagctgtaacttctggcatatggagga

SEQ ID NO: 5336 - DNA, 439 bp, Homo sapiens
cctgacctcgtgatcctcctgcctcggcctcccaaagtgctgggattacagacatgagccaccgcgcccggccctggttctattttaaataaataaatacatgaaactaaaacacaattggaactttatttgctctttgatgacccttcatagcacctcaatttctcatggcatgcctcttgcttggtttacatcatagaatttctggcataatagtgggtcacctgaggtgaggagttcgagaccagcctggccaacatggtgaaaccccaactctactaaagatataaaaattagccaggagtggtggtggcacctgtagtcccagctacttgggaagctgaggcaggagaattgcttgaacctgggcacagaggttgcagtaagccaagatcacgccacttcactccagcctgggcaaaagggcgaaactccatct

SEQ ID NO: 5337 - DNA, 542 bp, Homo sapiens
tgagaaaaactgaagacagcagtatgttgttcgactttgtttaaatctctcttcaaatgataccataccttaccttacaatgaatgaaaaaacagcttctgtagacactaactagtttggggattatttgtacaggaatcttcttcaggccaggcaaatatttttgtttctttgtttcaatgtccttatattttactggaatttcatttttgctatgtatttcacgtgaggttttgagtttgtttctccacacttttaaagactcatttttaatccttaagaagtaaaatagccaaactgaaataatttttttaaattgtgccaggaggatcaggaagccacagagaagacccttggtagtggttagttctccctgggctcagtcctcagaaggtagggctggaagggaccttttgggggtcgcagatttccacccacttactccaggcagcccaggtgtctcttgtctttggcctgctgtcattttcaggacaggcttttcaggagttggactaatcttttgtgccagtttgcttctctta

SEQ ID NO: 5338 - DNA, 554 bp, Homo sapiens
cattttgtcatccaggctggagtgcagtgatgcaatcttggctcactacaacctccatctcccaggttcaagcaattctcctgcctcagtctcccgagtagctgggattacaggcacccaccaccacacctggctattttttttcgtatttttggtggagacggggtttcaccatgttgaccaggctggtctcgaactcctgacctcaagtgatccacccacatcagcctcccaaagtgctgggattacaggtgtgagccactgcactgggttccctctgagggttttaattccctggcatttctggtctgtcatagcagagtagcctttggtataaggcaccccagtccagagatggagatactattggcgatgggaaaacatcaggagcacaccaactggggcagcccaataaaaagaggcatggatatcacatcatcagcttccctgactttttatcataaaagtggttaatgcacatagtaaaaagctcaaacaccatgaaaacgcactaataaaagtatatctcggctgggcatggtggcttacacctg

SEQ ID NO: 5339 - DNA, 553 bp, Homo sapiens
agttctgctctttctgcctctcagactgtggacaagtaaatctttgcagccatcttatcacctgtaaaacggaaatgacaacagtccctacctgataggtgacttcctctctgctctccaggcctttgctgatgccccatcactctggtcctcttctcccgaccagactgtgctccagatggcagggtccaggttagtctggaatcattggcatctagcccagtgctggctgggaccatgtgttactaagtgcaggctctgcagccagacagaccaagtttatcaccctggttcccctgctaccagtcatgcgacctcgggaaagtagtttactttaagcctcagtttccttatccaaaaatggagacagtaggactatgaaaggacataaattaggtaattcacatgaaagcacaaagatgacagctgccaaacggtaagtattctacaaaatgctggctataattagtggtagtgacaggcagctgatacactgctgtttaataaatgtttccgaggccgggtgcggtggctcatgcctgtaatcccaaca

SEQ ID NO: 5340 - DNA, 540 bp, Homo sapiens
ctcactgcaagctgcgcctcccgggttcacaccattctcctgcctcagcctcccaagtagctgggactgcaggcatccaccaccacacccagctaattttttgtatttttagtagagacgggtttcaccgtgttagccaggatggtctcgatctcctgacctcatgatcaaccctcctcagcctctcaaagtgccgggattacaggcgtgagccaccgcacccggccatacccagttactctttataaactaaggtctctgtggttttgcatgtaattttcttcctctatggaatgtctttttacccttctctatttggaaaatcatacagtctctactaacttgttctaaatataagctatctctattcccctaaccttaacatgctcccccaaattcgatctgtattttcatccccacccttaccatcaagacaagcagaattaatgtcttccattgtttctccatagtcctaagtacctactggtactataccgtatgtcacattgtttaggcctgtgttaggtggtgagatatact

SEQ ID NO: 5341 - DNA, 586 bp, Homo sapiens
tacaggaagtgcctgtgccttgtgggaaaggaactgaccctcgggtcctggaggacaggaaatagaatggctgagtgggcctgggaatattatatgatggaaaggcaggaggtcatagctagtggcaagagacagatgctgtctcattgtatatgggaggaattaaactgccataggagtgaataataggactgataagtaacatttattgaatacttactataagttagacactcttctaatatatttacatgtattagctccattaatccttataataactccatatggttattataaggaaactgaggcacaaatagattaagcacatctaggaaacaactgagccaggatatgaagtcaggtcctctgactccagagtatacatcactctggagccaaagtaggctcctagcctctatgctggcagacctgaaactccagtgtgcgttagaatcacaggagggctgatgaaagcactgttgctgttccaaacctcctagtttctgactcagtaggtctgtgtggggcctgaggatttgtgtacttaagagttcccagataaggctgggtgcggtggatcgcg

SEQ ID NO: 5342 - DNA, 587 bp, Homo sapiens
aaggccccaggaggagactcaagccgtaggtggatgcccagaccccaggtaattacaaggccccaggtggatatcagattccagatgaacattaggccccaagtggatacctaggcccctagtaaacctcagattctaggttgacattgaggcccccagtagtcatttggacccatgttgacactcaggtgccaggttcacatgatgtcttaactggacaccaaggggccagtttgatacccaagtcctgtgtgggtgccaggtccagggttacactcaagccccaagtggacaccaggccctaggtgaataacacaacccaggtggtcattaggccccagaatgacaccatcccccaggttaacaggaagcccccaatgggtacctaggccccaggtggacatcaggcctaatgtggacacccaggatcaagatggacatcaggactcaggtggacatctggtgacaggtggacaacaagcctggtgtgtaccttgtccccgggtggtcatcaggccccagttcaacaccagtccctgggtggattcctcggctccaggtggacatccggtcttcagctgaacatc

SEQ ID NO: 5343 - DNA, 579 bp, Homo sapiens
acagaagggtggtaatggatctgccataactcatgtgacaaaggccactattagttattccattgaacagcaggagctggagcatgaaaagggtaacgatcagttcaagttcattcagaaatccttgactctactgtctcagcctcactctgaaatacatttttataggccaaggatcagcaaacttcaaccagcaatccaaatctacctccatgcctatctttataaataaagttttattagaacacagctatacccagttgtttacatattatctgtggctgctttccacactgtgtcagagtcgagtggctacaatagagactgtatgacccacaaaacctaaattatttgctctctggacctttacataaaataatttgtgacctctaatctagaccaccaatagttttgtttcttcctgcccttcttaaaattctgatcacaggccgggcgcggtggctcaagcctgtaatcccagcactttgggaggacgaggcgggcggatcacaaggtcaggagatggagaccatcctggctaacatggtgaaaccccgtctctactaaaaatacaaaaaa

SEQ ID NO: 5344 - DNA, 534 bp, Homo sapiens
ggtctcagacaattttaacaaatatttagagtacttaatttttctttgaattctaaatattatccttctttagttcaccatagttggatattttgagataactgtggaggaaacagcactgatcctggggccatgaaacctgatttcaagatctagtcccttctttaattttgcacaactaatttaatcacattcatccttaatttcatcatcattaaaatagcagagaataattcccgtttcatggagttgatatgcaatgaaatagcatatcaatgtatgtatgaatgtccccccacatagagtactacacaaatgaaacgtgtcactcagcataacgttatgtgctccttcctgcaactggattgcactccagtgggatttcgtgctggtgagatggctgtgctgctggacttcatgggacaccaatctttgaaaataagcctgatctggctgggcgtggtggcttatgcctgtaatcccagcactgtgggaggctgagacgggcggatcacctgaagtcaggagtttgag

SEQ ID NO: 5345 - DNA, 571 bp, Homo sapiens
aaggtatcactgaggtgagacgcagggctctggtggggggtgaaactcctggattttgaattagacagggctccgatcctgcctctgctgtgtggcctgagccagtctctgggagctcccatgagaatggggaggctgcagcagcccagagcgggcacacaggaacacaggcggagaggcaggctcactgtgatgaaaagtaagagcgctggggtcaagttgcctggggccaagtcctggctctgccactgcagagtgaccttgccctgcctgagcctcctggtcagcatcagcccagtggagaggcctccttaagacgcggggctgtgagaattaaatgaggctgtggtcccgcagcacctggtatggaaggggttctcaacacggcaaggtaatgacgattgttactaatatttacttgggtaaggtcggtgggggatgctggaacctcagcagcctgggatgggaaaagagacacagggaatctgggaggggctaggtggggtgtgccctggccatgggactgccctctaaggggctggtcaacaaagcaggcagacacctcaggctc

SEQ ID NO: 5346 - DNA, 597 bp, Homo sapiens
tacttttcaaaaatgttcctgcctattgtaagttccttgtgagcagtgactgtttcatggtattgtcacctgcacagttcctggcatttattcatgccttgataatgttaatgaagtgaatgaattaatatttggatgtctgtatccttcagaataattgtactgaacagcggcggtatatatattcatcgaataattcctgctcatagtagcaagcctccagtgtttcacctccaaaaatgtccagaataacaacagctatccttagtcaacattttccattaccaaacatttggctaaggaattcacactattgtttcatctgtttgcttcaacaatcccatgagcttagatagagtaacttgctcaaggctattaagtgaggtggtttgtaagtgacagaggtaggttttgaacccaagtccatagactgtattcatggccactatactataagagctggctatttggccgggcgcagtggctcacgcgtgtaatcccagcactttgggagtccgaggtgggtggatcacctgagattgggagtttgagaccagcctgaccaacataaagaaaccccgtctctactaaaaatac

SEQ ID NO: 5347 - DNA, 563 bp, Homo sapiens
acagagtctcagtgtgttgcccaggctggtctccaactcctggcttcaggtgatcctcttgtctcagcctcccaaagtattgagattacagatgtgagccactgcgcctggcctatagcagttatttataaccttgtattatatatgtaaaaatatttgttcctactttgtcattgagtcattaattcattcttgagacagggtctcgctttgtcacacaggctggagtgcagtggcaataacagctcactgcagcctcggcctcccaggctcaagcgatcctcctgcctcatcccctccccaaaccccagtagctgggaccacaaatcatgctactttgtcctttatcttttaactctgcttatgatattttttggccatacaaagttgtttaatttttaccttatcatttatccatcttttatgttatagttcaggttttgttatgcatagaaaaccctttcaaattcagtgattagtggccgggcacagtggctcacgccaaatcacgaggtcaggagtttgagaccagcctggccaacatagtgaaaccctgtctctac

SEQ ID NO: 5348 - DNA, 572 bp, Homo sapiens
gggctctccccgcggccaagatggcggcagaagcagctggtgggaaatacagaagcacagtcagcaaaagcaaagacccctcggggctgctcatctctgtgatcaggactctgtctactagtgacgatgtcgaagacagggaaaatgaaaagggtcgccttgaagaagcctacgagaaatgtgaccgtgacctggatgaattgattgtacagcactacacagaattgacgacagccattcgcacataccagagcatcacagagcgcatcactaactcccgaaataaaataaagcaggtaaaagagaacctgctttcatgcaagatgctgctgcactgcaaacgggatgagcttcggaaactgtggattgaaggaattgagcataagcatgtcctgaacttgttggatgaaattgagaatatcaagcaagtgcctcaaaagctggaacagtgcatggccagcaagcactatctcagtgccactgacatgttggtgtcagcagttgagtctttggagggccccctgctccaggtggaaggactgagtgaccttcgactagagcttcacagcaag

SEQ ID NO: 5349 - DNA, 582 bp, Homo sapiens
gaggtcgatcttaggctactaggcctaagttatggcaccgggctgtctgcttgtagattttatttctgccttttagtttttactttttctttctttagaggcagaaattaggcataagacaatatgaaaggtagtctcctcctttactaaaaatgcaaaaaaattagccggcgtggtgctacacacctgtaatcctaggtactggggagggtgaagtgggcagatcgcttgagccccagaggccaggtcgcagtgagccaagatcgcgccactgtacaccagccttggtgacagagtgagactctgtctcaaaataaataaataaataatagtatctcctctgctcagaagtgtctcagaatgctaggcatggtggcccatgcctgtaatgtggcctctccatcaccacatctctcttctcacctcctgcgcgtgccccactagggcctctgggctgttcctcagacaactccagaacctcttttaggtcttctggactcaaatattatcttcctagtgaaatcttccctgcgaatcccatttaaaattgaaccacatggctgggtgctatactcccaatgc

SEQ ID NO: 5350 - DNA, 583 bp, Homo sapiens
gacagaagggcgaggtcaagagatcgagaccatcctggctaacatggtgaaaccccatctttactaaaaatacaaaaagtttgctgggcgtggtggcgcatgcctatagtcccagctactcgggaggctgaggcaggagaatcgcttgaacctgggaggtggacattgcagtgagccgagatcacactccagcctggggacagagtgagactctgtctcaaaaaataaataaataaataaataaataaataaaataaaaagaaaaatgggagtcagaatccagttggaaatgggaaaataattgtcataatcattgcaaaaaggctaagtgagttaagatcattttgcatgagtgaattaaacaatgaactcaaatctctgtagaaaatctcggtttcacttagaggaactttttgaccacagagaatataaactgttggaacacatgtcatctcaagtggttacaaaccaaaggaaaaggaagtctgtgggtcacgtgtgcctgggttgatgtgtagatgggttcgtacttgaagaggggatgagcagaagctctgggagctgagtgaaagtagtggcagct

SEQ ID NO: 5351 - DNA, 529 bp, Homo sapiens
cccagtgggacacagatctaaggcagacattaggccccaggtggatctgggtggaattcaccctgagggggacattcggccccaggtacgcatcaggcctcagctgaataaccagtccccaggtggacattaacccacaggtcaaccacagtccccaggttgatacctggtccccaggtggctactcaatctgcagggtaacattaggcccctgtaggatcccaggccccaagtggattcctaggcccctggtgaacatcaggtgcaggtgtccaagtaggccctgggtggacataactgtgtacaggtaaggagttgacctgtggggaggatgagcagtcagaagcccactggggtcctgcgtaggtcttctggaagggggaggctgaggggatggaaccttaaagaagcaacctcacttctttggcaacagaccctaacagaacttagaattctggtaaccaggcgaggcacggtggctcacacctgtaatcccagcactttgggaggctgaggcaggaggatcatg

SEQ ID NO: 5352 - DNA, 436 bp, Homo sapiens
ggacttgatgcagaattggtgcattaacatatgtatgcattacatatgtatacttgtgccatgctggtgtgctgcacccattaactcaacatttagccttaggcatatctcctaatgctatccctccccgctctccccaccccacaacagtccccagagtgtgatgttccccttcctgtgtccgtgtgttctcattgttcaattcctacctatgagtgagaacatgcggtgtttggttttttgtccttgcgatagttgactgagaatgatgaattaaaataaaaatgcatgcactttcaaatgtacttagtgcaacatattgaacttacattccagttttcctggaattacttgtgtcttgagctaaaggctgtatttggtataacagggaaggaaagaaattatttttcctataaaattagtttaaaaacacata

SEQ ID NO: 5353 - DNA, 549 bp, Homo sapiens
gcaagagataaatgaggagtaagagtgtcttaaatcatagaaaatgcatttcttgggaaactaagtggcagatcactatgggttacattcttcttgcatttgcctatctttattaagagatgaaattagcccaagaaagttctagccgaagacagaagggagcagtatcagctttcatgtatacactaaagggaaacaaagttggatcaggtgtgctgataaatgtttaacaacaggctttccaggtagaaaaagcccctatatgacattcctgatgacctgggaaaataccaccaaagtggagatggaaataagtgtgtacaactagctcttgtgatccggtatgaactgactgcggtgcactggttgtatgtaaaggaaacattatttagaaagtaaatattttgattttcattttcagcaatggaaacagaggcttagcaggatggacatcttgattaattttatacagctagaccatgagggagacagaagattaagaatagcagttatacatgccaacctctgcattagctttaatcctgattc

SEQ ID NO: 5354 - DNA, 547 bp, Homo sapiens
ctttctctctatgtattacacacacacacacatatagatagatagatagatagatagatagatagatagataggatattacatatatatatatttagagacgagagtctcactatgttgagtatatatgtatatatatatgtgtgtgtgggtatatatatccacacacatacatgtaaactatatagatatattacagataactatagcatctgtcccaacactctctaatatacatgtatatgatatacatatatacacgtgtagtatacatatatgtatattagagacagcattgagacagatgctgtaatttatatgtgtatatgatatattgctttagataaataacacttattttgtgtataatcagaaacaaatttagaaaacttagaaaagcataaaaataaagattgcttataattctgcgggtagatcacctgagatcaggagttcgagaccagcctggccaacatggtgaaaccctgtctctactaaaaatacaaaaattaggccaggtctggtggctcacaactgtaatcccagca

SEQ ID NO: 5355 - DNA, 493 bp, Homo sapiens
tagttgactattttgtatttcacttatctcttctagactattatacttccttgttttatcatttcattagctgcaatagggtttatgatatgcatatttaacttatttatgattgattggatgtaggaggaatggggggagaaagattccaaaatgacactgacatatgtggcctgggtaacaagaggaaccactctctgagatggagactttgaaggaagattagtttggggagtgatgaaagggctggatgatgtggtcagttttggacaagttgcatttaaagtgcttctgaggcatccaagaggagatacctggtagacatttctttacaaggtccagagctcagggcagtgtccggggctggggctggctctaggggtgaagggcagaggggtgactgttgaatgaatgggaacaaggtagtctgtggatgcagaacgtgcgatgggacaggaagagtccaggaccaaaccctgaggagccccaacat

SEQ ID NO: 5356 - DNA, 594 bp, Homo sapiens
agctgtggtatggctccaccatggcttcctgatccccagatcccagctgaagcgctttcttcttggtaccaccatgtgcaggggtggccttgtggtttccagatggtgacctctttttcttctttccttttactttttgtgtaacatactctgtaccagcctgggtgccatagcaagaacctgtctctataaaaacttcttaaaattggccaggcatggtggcacaggcctgtagttccagctactccagagactgaggtaggaggatcgcttgagcccaggaggttgaggctgcagtgagcagagatggcaccactgcactccagcctgggcaacagggcaagaccgtatctcacacagaaaacaaaaatacatttaaacaaaacaaaacaaaaatacatttaaaaactcatttataaaaataggacaggggaagctgtaggtataagaatgtatgctgggaagccgggtgcggtggctcacacctgtaattccagcactttgggaggctgaggtgggtggatcatgaggtcaggagatcgatatcatcctggctaacatggtgaaaccccgtctctactaagaatgcaaaaa

SEQ ID NO: 5357 - DNA, 563 bp, Homo sapiens
aatggacaacaaaaatgcctgctggtctaattagactggcccaccccatactctcaggtggaccctccctaacttgatgtgttctcagggctctgtgacaaggggtacgagcttggtaccaagctcctaggcagactttggaaagaatcgctgacccaactctattcagtagcttcttgccaggcctcctagaagggatggaagagcagcgcccagctaaaagtggtgtgccagacccaggctggtctcttcttgccggctgaccttagggactgactttgtccccccatctgctgtgctttcttccctgtaacacacagtggggctgggaaggcactaaagcctgaaggctgttggaggaccgccctgggctcagggctgagagaggaagggaggagtgcaacaaaggtcacagcaggtctgcctttgttccccagtgtggaggtagagtcccagctcctggagagagtcacatgtccataaagaagcttggcctggccgggcacagtggctcacgcctgtaatcccagcattttgggaggccaaggtaggtggatcatttg

SEQ ID NO: 5358 - DNA, 569 bp, Homo sapiens
acctcccaaagtgctgggattacaaacctgagccaccacgcctaaacttaaattcatttttatccagattagaatctatgcagggtaactgtgttgcaaaatgcaatgtgccttctgcaattgtgccatgctgtggtactgatcctgtgttccatcatcataatcactcccttgcacacaccttccatgtccttattcctttccccttctaatatttaatctggcaacaactactgattaaacctacatctacccacctactctgtacctagttctggaaggtaacaagcaactatgctgactgatttccttcgaaatgtatgtggcttcagtatgctcagcaatcctactctatttctctatcagttcattctaccacctttcaaagcaactgattcacaccttcctctctgcaaatccctagccttccccgagcgactcctttctcaattggtggattcccttctattctactggggacaatagaatccaacagtggagagctttctcattcacccaccaccaaatccactaaactccttgaatctgtagtactgtatattcttagc

SEQ ID NO: 5359 - DNA, 619 bp, Homo sapiens
agtgagtgaatcagtgatgtaaggggagtgtggcccaagatatgtgtgctgagatggactgcaatgacatgtggttactaactgcagaaagcaatgtctgcacctcaagtaactgattatttagtgcccttttctgtgttttcttctatgtacaatggaattatctaaagctatcgtatagttaatatttaagtgataaatatttttatatcatcatcaacacatttattgtggcttcattaaacaaaactatgtcacactgtcttaaagagattataggtatcttagtgagagctagtgtttaaataacaacttgtccagatcttccagtccatcatgtagtatcatttctctttgcatagaaacaaatactttcaaatgtttacccaaatcttatgacttgacatttttttaccaccagacctgcattacaagaggttctgaaaggagcactaaatatggaaaggaaaaactgtcaccagccactacaaaaatacacttaggtacacaggccagtggtgctataaagcaatcacaaaaacaagtctgcataataaccagctaacaacatgatgacagatcatatctgcacatatcaagactaaccttggatgtaaat

SEQ ID NO: 5360 - DNA, 525 bp, Homo sapiens
catttaatgagtgccttgtttgtgcaagatcacgtgctggccaacggagttatagagagaaaagaagtctcaatcccagctttgtgatcttctgatgggggagatagagaatagtgtgatgagtgctatgaaacagagggatgctggagcatcagagaggaaacaaggggcagggctggggaaatgttcctccccgaagggatgaggtctgggtggagtattagaactaaaaggagttgtacagacaaagaaggggaaaagcgagagttattttaagctggagtgtgtgtacagtgtggtggctcagtgtgtgcgaagaatgggtgtctggaagcattgtgcattgagacgactgcaggtaactgcctggtatgtaggagggagaggggttctgtggggtagaaagagattagctggggtagtaacagaggtgagatgcccatgtaaaggagttggattttacattgacagtagttatggatttgcaatttaggaagatcacttcagatttttggaagatggatc

SEQ ID NO: 5361 - DNA, 494 bp, Homo sapiens
catatctatctctgagaagactgtgagctacttgcgagaaggtggatgccttctttattattatttccccgacacctagcatagtgcctggcactagataggcactattcaatcactgtttgatgaatgatggcaaaatgcgtagtattgacaatatagtactggtacttcagagaatgggaagattgatatcggttagaatgctcacagaaagcctcatgaagaagaaactgaggagactcttgaaataagtgggacaacactacaattacagaatctatataaatagaggaaaggaggcaggatgagcttggctatttgcagggaaaacaaaaaggataaagtgtaatgagaatagacagtttatgttgagaatataaggtttgctacagagagagaaaatgtattgaatagtattgataccacatgaattacttagtatttcttctgccaaaaaggcaattttgcttgccttttctgacccttttgaagtc

SEQ ID NO: 5362 - DNA, 75 bp, Homo sapiens
ttccgtaggggggaagatcagtcatgagaagcagaaagtaactctaccttccttgatgccagggagctatgatga

SEQ ID NO: 5363 - DNA, 501 bp, Homo sapiens
catgtgacctaatgttctggagagaggtaaaattaaaagtacatgaaatggagcataggagttatgtgataccagaaaagtttacgttgaagcactcagctaaacaaagagaatgctacctctcagcttctaggcttgctttccagttacaaaattggcatttttcaattttcatacaaaaagttaaaaaaacaaatttatcacagtaaagtatcagatgcttggatgaaaaaataatatgatctatctggcaaggtattcagattatagtgtcaatcaagtgattccttatcaaatttataatttttggctaaaagtatattgcttataaaatataattccacaaaatttgcaattttttctgtgtgaactgtgagtgaatttttaaaagattgatttatttctttaataatcaacagaggctgggctcagtggcccatgcctgtaatcccaacactttgggaggccaaggtgcgtggataacgaggtcaggagtttgag

SEQ ID NO: 5364 - DNA, 459 bp, Homo sapiens
atttaatatatttgtatataactataataggaaccctctacatgcctcccacttttctaatttacttccccttttgccatagcactagtatagcctcatccgcatgggtaatgtgcctattgtcagcctaccaaaagatagtgctgctgctttatgagacaggtgagaagacccaactctcatgcctggggatcctttacggaaggaatagcacacacttttaaaacaacataccacagtctaaaagcatcattttgaaatgtaacaagcactttattgcaattactcattttgataaagtttattcttaggcgttaaccatttctaaaggatccccaaatcatcacttacttaggtgaaattatataaaatgacacatttctgagaaatgtttaggtccagtgaaccgtagttggtttatgggagtgatttcaagatagccaaatgaactttgatttt

SEQ ID NO: 5365 - DNA, 608 bp, Homo sapiens
gggttctgcgccggatccgggagaggggcgggcgccattgtgcttcgctgccgactgcatttcctcagtcacgggcctagaactccaaggagaaaggcggcgaaaaatctttaagaatggagtctaaaccttcaaggattccaagaagaatttctgttcaaccttccagctccttaagtgctaggatgatgtctggaagcagaggaagtagtttaaatgatacctatcactcaagagactcttcatttagattggattctgaatatcagtctacatcagcatcagcatctgcgtcaccatttcaatctgcatggtatagtgaatctgagataactcagggagcacgctcaagatcgcagaaccagcaacgggatcatgattcaaaaagacctaaactttcctgtacaaactgtagtacctcagctgggagaaatgttggaaatggtttaaacacattatcagattcatcttggaggcatagtcaagttcctagatcttcatcaatggtacttggatcatttggaacagacttaatgagagagaggagagatttggagagaagaacagattcctctattagtaatcttatggattatagtcaccgaagt

SEQ ID NO: 5366 - DNA, 589 bp, Homo sapiens
ggaaggtgggggcgggggaagaagacaaacaacttatatcaagtaattacagtagtttgtgctgagagttacaagaggaaaatgcagggcataaagagaacataaagccaagataactaatgttactgaagggtcaagaaaggctttcctggaaagtgccttccaagctgagagctgaatattgaggggaaagggaaagaatgctctggttggagggaattgtatgaataaggtaagagagaacacagaccatttaaggagccaaaagaagctcagcctgtcttaacgtgaaagaagagtgacaagagatgaagttggagacacccgcaggacaagacctcagagctgttcataagtcaggttaaggagtttgggctttaccttgaggcagtgagaagtcaactaagggagcatgtgagtgtgtgcacttgtgtgtgtgtgtgagggaatgtgtgagtgtatgcacttgtgtgtgcatgtgagggagtgtgtgcatgcgagggagtgtgtaagtgtatgcccttctgtgtgtgtgagggagtgtgtgagtgtgtgcacttgtgtgtgcatatgagggagtgtgtgcata

SEQ ID NO: 5367 - DNA, 513 bp, Homo sapiens
cgttcttattattatagaataatctgacctatttagagaggtgtgggcaccaaaggggattaagtctaaaagactccaatcaagaggacattatttctccactccattcaatttaacaaatattgatggtactttgactttgtaccaggcactgtgcacgtcttgttgaagatggaaatatgtatgaaatatggtctctgcccttaagaaatttacaattaagaaacaatgtaattggctgggcacggtggctcatgcctgtaatacctgcactttgggaggctgaggcaggcggatcacctgaggtcaagagttcaagacgagcctggccaacatggcaaaaccctgtctctactaaaaatacaaaaattagcagggcatggtggcaggcacctgtaatcccagctacttgggaggctgaggcaggagaatagcttgaacctgggaggcggaggatgtagtgagccgagatcacgtcactgcactccagcctgacagaatgagactccgtct

SEQ ID NO: 5368 - DNA, 591 bp, Homo sapiens
  misc_feature 510: n = A,T,C or G
ggcttgtatacagagatgtcttaattcttgccttgggtcatggctgtgggacagcatgatcagactgacttctgggagtcctggggccagaaggaagtgctccaaactcctaggggctggttttgaacaacctctgcttggccagcagatgttgggtagggaaggaagtgggtttcctggcttgtttctgacagaaagaagcaggttctgctttgaggagacaaacagcagtctcacttcctaggttcccgtgacctctgacctcagcctaccttctacaccacactgacctgatgaggctgtatcctggcctcaggggataaaattgtcccctgagagaagcttggagccagagacaactttgcagactgcctgttccaaatacatttgtgtctcatctgaggaactcagagagtggaaagtgatcaggaggtcacagggcccgatggtcacaggccaggacagaagccagggtccgtgagccttccgaagctcctcatctaccccggngcttcctccggcccctataaatccttctgtcccagaggctggagaagcctggcaggtagaggctctgggcatctcatcact

SEQ ID NO: 5369 - DNA, 534 bp, Homo sapiens
agctaaacgtaatcaatgttagtcccaaaattagagaactaggccttgcaagaagagttctgagtattttttacatgaagtgacagtccttggctaaatctgacttggagtattacattcaagaaaacacatctgatctgattcttcacactacttcatatgtaactactccaactaaaaagaaacaccagaccactaaaaacataagacaactcgttcacttacaaagtcagagtgcctcactaccctgttaatatctatgctgtcaaaaggcatgatgaggacaaaagctcaaaagctgagtattaaaactcaagttcttaaaacaaatgaggcctcttttccataaagtatcattaagtcaacacataaggaaaaagaccacgaatggtgaaagatgtgttgtaacatacatttaacgaagtgaagagaaagggcaaacaaaacatgacacaccacatgctaaatgaggtgtctgatcatgtcagtggctatgaactacttctttgagtctagcatatctggggaaaaatt

SEQ ID NO: 5370 - DNA, 595 bp, Homo sapiens
catttaatgagtgccttgtttgtgcaagatcacgtgctggccaacggagttatagagagaaaagaagtctcaatcccagctttgtgatcttctgatgggggagatagagaatagtgtgatgagtgctatgaaacagagggatgctggagcatcagagaggaaacaaggggcagggctggggaaatgttcctccccgaagggatgaggtctgggtggagtattagaactaaaaggagttgtacagacaaagaaggggaaaagcgagagttattttaagctggagtgtgtgtacagtgtggtggctcagtgtgtgcgaagaatgggtgtctggaagcattgtgcattgagacgactgcaggtaactgcctggtatgtaggagggagaggggttctgtggggtagaaagagattagctggggtagtaacagaggtgagatgcccatgtaaaggagttggattttacattgacagtagttatggatttgcaatttaggaagatcacttcagatttttggaagatggatcaaaggagttgagattaactaggagtgcaaaatgattggggcctgaaggaaggcagtaccagtgagtatga

SEQ ID NO: 5371 - DNA, 476 bp, Homo sapiens
tttttattggagtgggttggttttaaaacaagataggacttgtgagtttaaactaaagattcttagaacattctggaatgatatttatttttatgaaataatttctagtttaaacacatgaaattgattttagcttgcattctaagtcatctgagatttgaaggatgttccatgtcttagtcttatttattggggcaactttgcaattccaaaaattatatacacaaaatgaactcctcttgtttctgtgtcactttaactagaggctctatgtgcaagacaaaataccaatccttcagatttatttatttatttttagacggagtcttgttacatcgccaggctggagtgcagtggcgtgatctcggctcactgcaacctctgcctcccgggttcaagtgatcctcctgcctcagcttcccaagtagctgggattacaggcacgggccaccacgcccagctaatttttgtatttt

SEQ ID NO: 5372 - DNA, 430 bp, Homo sapiens
gcacataaaaatgttttgctttaagtagaccaggtctagagctagactctcctgggagatgaagttcactaggtgacaaatacaagataaatgttaccctctaaccctctgccccatgctgggacgacactgctggtcttctggtaaccaccgaagacaagtcttggttccttttcaggagcacaatcgtctgtattcctcctgctgcgccttctgggactgtgcggcaggaggctaggcagtgctgactctagggatacactatggccaccaagctctttttcccctttgtgtagatggcccatgatgatagggcagtatgataggagttaggctcctctcaggcggcacccattagacctccaggctataaagaagtagagtcaggccaggcccagtggctcatgcccgtaatcccagcattttggga

SEQ ID NO: 5373 - DNA, 468 bp, Homo sapiens
tgctttattcagactgtatacatatgtgtgtttcagtttcaaaacaaattgaaaccagctttctaagggtttgttgatcacagctttatttagagaagccattttgctactgttgagtcaaggtggaagacttgatgactttactagatcaacaatgaagtgagggtaacttacaactatgtattagaatagaaccatttatttaagggaggtcctgtaactcccatactttaaaaattaagtataacatttaacctagttctcaagatcggcgttggaaagggatgtgagatttcagaaatactctaaacttattggtaggagtagaagttactgacaaagtattcagcggctatacacaatttttaagatgagtgtgtgggaataggttgaaaagctaaatgaagtattttgtttagtaacagtgaactttggaaactaattagtggattaaatacaaaactattg

SEQ ID NO: 5374 - DNA, 551 bp, Homo sapiens
ggctggtacttgggcccgaaacccccatctccggcggagagaccgtccgaggtaattgtctgccacgagtgcacattctgaaaacaggagattttagttcctaaaaatgggaagaacctacattgtagaagagactgttggccagtatctttcaaacataaatctccaaggaaaggcttttgtctctggccttttaataggacagaacgccacccaaagaggagcaaagtgagaacctcaaacatcccaaagctaagttggataacttggatgaagaatgggccacagaacatgcctgccaggtatccagaatgctaccagggggacttttagttcttggagtatttattattactactttagaactggcaaatgattttcaaaatgccctgcgtagactaatgtttgctgtggaaaagtctataaatagaaagagattgtggaatttcacagaggaggaagtctcagaacgagtgacacttcacatttgtgcttctacaaaaaaaatattttgtcgaacttatgatatccatgagccaaagagttcagca

SEQ ID NO: 5375 - DNA, 193 bp, Homo sapiens
tgcaatgtgaaataagcacataagcaaagaacaatgcttttctagttcctcacagaaacatgcctaagttctggtgatcaccgcaggccttacccatggcctatcccacattcatagggagaaaactggtctaatgaggtcagagttgggactagcttttttttttttttttttgaaaaaaaattttgggttt

SEQ ID NO: 5376 - DNA, 552 bp, Homo sapiens
ccctccttgcaacagcacccagattctccttatgagaactgtctctgcttaacccattcttgcggcgcctatgtaggcacttagacgctccctcagactccagaatgagtacagcccacagacaagaggcatctttcttctatctggccacggactcaggcagttccaacacaaggttcttgaaggggaagtttgctctggggctcagctgtgagaaccccagcctagagtggccagtagctcccttggcactacggaaagcaggcctgaaagaaatctcactcccacaggtaaggtgtgcagacctctggaatggcccaaccatcctgctatcaggaattcatggcctcatctaaagccttccctttgtgagggctgatctactggtgggctgatctattgacttgcttctaactattggagtctgacaaaagtgagatgaggtctcaagagacagacctgctgtacatgagacaaagctagagaaaatatccaggtttcaggagttcaagattagcctaggcaacagaatgagatgcagtctctctaaaa

SEQ ID NO: 5377 - DNA, 522 bp, Homo sapiens
cctcatgtggctatttccaattaaaattaaattttaagtttaaaatgcagttcctcagatgcactcattaattaactaattagtgttcctaactaaattagctaataaattaaaataattagctaattaactaaaactgaatgaaatttaaagcacagttcctcagtgtcaccagccaaatttcaagtgcttagtagcctcatgcagtgagcggctattgaacaggacagtacagatattgaatatttccatcactgggaaagttctatcggagaacactggttgtgcagttgaggcacagggtctagggccagacagacgtgggttccacccttgtgtttcacttgacgggagactctgagttagctatggagcctctctaaggttcatctgtaaaatgagaataggacttcacaagcctcctgtgaggatcacagaacatcactgcaaatgacagggcgtggggcaccagggggaccatgagactgagctcctgagtgagccgcttgcaaacaccatgtg

SEQ ID NO: 5378 - DNA, 514 bp, Homo sapiens
acctcaaacattacaagcatggcattttttacacctaggcagatgccttaatttgacctcacttattcatttatttgtttattcaacaactatttattggacatttactctgtgtcaggcacaatgctaagtgctaaggatgtgaagataaatctctgctctactgaatttcagtctagtgggagagagagagacaagtaaatagtctatttctttactatatgttaagttatccaatagaggtagataccaagttttgtgggagcacaaacttcactgttgtcagtgaaggattcctagaggaagtgtatcctggggtgagtcctgaggaataaataagagtagcaagttaggattattcatagaattttactccatcttctgtgaagacggagaatacataccaaattgtggaggcaaaagaaagcatggcatggtctgaggaaaataggataattagggtagaagcaggaaaatgtttgttataagaattgtgtgtaggaatttataatag

SEQ ID NO: 5379 - DNA, 535 bp, Homo sapiens
agaagtggagaaacccaacagtggtttggaatgcacacagaaatactagcatgtaggtgcctcctgacccctcccagcagttggacatcatgctcccacccctttctcccttctaaagcactggccaaaccaaatggcttctttctctgtattgcaagtgtaagtcaatccaagagtacccttttggacataatacaaagccaagaagaaagttgatggatcatattggacggtagaaagtgtacaaatccaacccagcaaattgcttatcattatctacgttccagcctcagtaggtgccaacaaggagcagagatgaatcaatctttctgctcaagccctgtccaaattatggaacctctaagattgggggtggtttgtgacgtaacaatagataaccaaaacatacatcaaccttccacctatggcaaatgccttaaattctgctctggcaagatctggctgccaaatggaccttttggatctaatccttagggtgagatcagtttcacattgttctttgctaagtgctttt

SEQ ID NO: 5380 - DNA, 449 bp, Homo sapiens
ctctctatctccatgacattcctggcctcattccacttctagcttactcctcccctgggagtcattcagttgggtggtgaacttggtgacatcaatttaacatgcataatcctgcctcttcctctcggaagttggccagatcatagagaacgtgaagtttacccagctcctccagagacaggctctgtccccacagcagggtccaatgtggcctgagactggaaaggtaggtcctccccaggctgggatttacagcctcatgtgagtctcacactgagctcatcttagcctttattaaccatgaagatgatactttcattttccatctattgattcttttgtcctatttctcaatgtgttcagaactcaggcaagtaatggagtgctatttattgtgttctcctaaaaatatatatcacacccatctcacgttgggatctctacaaggc

SEQ ID NO: 5381 - DNA, 503 bp, Homo sapiens
gatattttcacttgctattagcagcaaacgtacaactttatctcttatttgacttcattatttggctttcaaattaacaacatgaaaactatacagaaattagtctgtgccctataagacagagatttagataatttgttcaaaacatgagatgatattcagatattctctcaaaggcaggactccaacaccacaggtggaaaaccaacaaaaggaagaaaacagaaaggtgggggagataaggagtagccaggaaaaagaaaatagtgataaaggaagagccaaaaaggaggaaagggaagatgaaagaccgacttcaagaactaaagcagagaacaaaggaaattgaactctctagagacagtcatgtatcaactacagaaacagaggaacaaggggtgtttctacagcaagctgttatttatgaaagagagcctgtagctgagagacacctacatgaaatccaaaaactacaggaaagtattaacaatttggcagataat

SEQ ID NO: 5382 - DNA, 365 bp, Homo sapiens
gtaatatttgcctcttcctgattaaatcatttcctattcaaactggagcatgaactatttcacacttgaaattcttaacccatatgcaactctcaagggctgaattgtgtcccctgccaactcctatgttgaagccccaacggccagtctctcagaatgtgactgtatttggagacaggtcctccaacgtggtaattaaattaaaatgaggcctttggggtaggtcctacttcaatctgactgatgcccttaaaagaaatttggacacacaaaaaggcaccaggatgcgggcatgcagagaagacagaccatgtgagaacacagcaagaaggcggccatctctaagccagagaaagccctattag

SEQ ID NO: 5383 - DNA, 493 bp, Homo sapiens
ggtgactaatagtggggtgtatggcatgtggcaagctcttcctttttaagagcaaaagacatcgcacttgtaaaacaggacaaatgaacttgtcccctcccatcagccccagagggaaaaccaaaggagaattccatcagaatacactcacccttttcatctacttgaactgtggttagcaagggtctaatcagagtcagcctcaggagtgagccttggatctcttgctggtgttttgcaacatgcctcacaggtctgtctgcatcccactgaaatgtgaaacaaaagagcaaaggatggattctacgtctgcagttctctttctgaagctttttattttaaatcaaaaataagctctctggattaaactgatgcactcaggacctgattgtcccccccacaatattgctttccctttagatgtaatgagcaaataaacaagcgggacagttaaacttcacatgaacattacattgacatatgtaatggaaac

SEQ ID NO: 5384 - DNA, 499 bp, Homo sapiens
acatgatatttagcccaaaactttcatttcggtcacatcccaaaagttctttaattaaaaagaagaggatcagggaatttatttattagtttattaatgaacttatttattatttatagatgtgtttataagataatctgttttcaaaagatttaagttgcttatgacagagggaatatagattattcaaaatggaatataaaaaccttccatgttaggtccatggcagatttgcatgtgaagaggaagatgcctgctttccagagttttctgaagaagcaaaagaatgtcatagcattgaaagctggccaggcccagtggctcacgcctgtaacccccagcactttaggatgctgagacgggaagatcacctgaggtcaggagtttgagacaagcctggccaacatggtgaaaccccgtctctactaagaatacaaaaattaaccgggcacagtggcgggcgcctgtaatcccagctactggggagactgaggcagga

SEQ ID NO: 5385 - DNA, 549 bp, Homo sapiens
atgaacacacagctcaaagaggagcaggacagaactgccgtctcatttgaatatctctctgggcctgattatttaaaaggacttgcatttctcacatgaaagttattttcttttctcaatgtccataaatgagaataaatagacgtaaaatagatcttttcgaggatgaagtaaatggaatgaaaaacaaaacccaagctgaccagaaatcatagagggaagaaaaggttataaatatatggatttttcaaagtgattttaagctattaggaatcagttaaatgttgggggattttgtctgagaatgagctaaaggagaatgtcccttttgccttctgaagtttccctgaaaatcactaataggaggcagatacatagtagaaaaggcatacaggtttctgcaatgtgtgtacactggagcccttagatcgaagacccagacacacgatgtgtgcagaagcttatctaccatattaagtttacagaaagaatggggtcttggatcacagggaaaaaaaaacaaggttacgtgagaaaacgaccctggct

SEQ ID NO: 5386 - DNA, 515 bp, Homo sapiens
tcttttccatttacaactgggtattggtttaaaaagcagccaaagactccagttgagaaaaactaagtaattggatatattttaatacataaaatgttacacttgttaaatgttactgaccatagctttctcatccctgcttatgatccttgttggcttttattttctaacattctttaggctgcaggtaacagaaagcaaactccaactaaactgaagcagtaaacaagtggaaggactccgaggtggctgacgagcttgacaaacaagctcacgggccctccctcaaggactagaaggcaaggctgaaaaccatcaggactctgcctctcgctggatgtctgcttcattctcaattttttcccatgaggttggaatcaaggttgtcagccatcactgggacttcttcctttcctgagagaaagtatcttcctagcttcagttggagagatcctagggaaggacacctatgtgacctatttggggtcacattcctgtcctgtggactggtgtct

SEQ ID NO: 5387 - DNA, 571 bp, Homo sapiens
ggaagttggtataggcacctttctgtgtgcttgtgggcctagtaatgtagaagaaccttaaaatggattttttaaagagagttgttcctcccattctttcgggagatgtggttttggatactagtactgaggaaagttccccaagattagttaagatgaaacgtcttagctcactttcatctgagaagacggtggatgagcaaggtggaaccaatttctgtcatagtaattatgacaaatacgaacaccaacaactagcttcagcgccagtcagcaaagtaaataaatactgtgcttcttccaactttcattccacttggggaaaaaaaaatatcatcatgtcaaacattacgattgacccatatgtcaaacctggtgaatatgtcatcaagagcctctttgcagaatttgctgttcaagctgaaaagaaaattgaagttgtaatggccgaacccttggagaagctattgtccagatctcttcagaggggtgaagatcttcagtttgatcagttgataagctctatgagctcagtagcagagcactgtctcccttccttacttcgcacctt

SEQ ID NO: 5388 - DNA, 430 bp, Homo sapiens
aagcctaactcaaggcaatgggcctgctgtgggccctcttcacaagctctaggttctcattcactaggtaccaggcactgattctgtgccaggttgtgcctggcaggaaggatgtaaatatgaaaagatgactaggacaacgtcccagctctcagggaatcgggcactctcctacacaggtgggaatgcaaaggagcagcacttttctagaagcagtttggctgtatctatcaaaaccttcaacgcatacaccctacagcccagtaactccacccttacgactttttcctagggaaatcatggaaaaagtaaacaaaggtcaatgaaaattcacagtcatcatggtactactctaatagcaaaaatcaaacaacacaaatgtcccttaatataccatacatgaattatttaaaaagatattatagcatag

SEQ ID NO: 5389 - DNA, 519 bp, Homo sapiens
aatgatatgatgtctaggattgacttcaacataatctgaggaggaatataggtgaaacacgattggccatgagcagaggcagggaggaggaaatctcctatgaaatagtacaaaaagagaaagagaaggaatgcaagaaagagaggataagagacagatgatacaatgagagaccaccatatgtccagcacggcttctagaaagagagaaaagagagaaaaggggtagagttaatctttgaagaattttccagaaatgaggaaagacattcatcttcagattgcacaggcctaccaggtgttaagatttaaaatcaaaactaaaactcaggcccagatatattctctatagactataaatgataaaaaataaaatcctaaaaaccataagagggaaagccagacaacctacaaacgaacaacgaccggcttgagagtagacttcctgtcagcaacaaaagatgcacaagaccgaggtgactttaaaagtgtcatgggccgggcgcggtggcaacggtgg

SEQ ID NO: 5390 - DNA, 541 bp, Homo sapiens
tacaggcattattggagtcgtgcaatctctcagtgttgtcatctctagacttccatttctagaaatatgacagaatggatatcccaaaaagcctcttactgcaaaacatctagaactgatttatcaagaacaacaagcagacttgtaaaagcaaatctgagctggtgagaaagagaaggaatttcctaggagtgaaaacaacaggaagaaagctgaaggcaaaggaagtcagataagccctaatagctttgtctggcctaccgagttgactgatcccaaccaaggaggctgggttttaaaagccactcagaaaaacaagactaagccttgagccagctccaattagaaagctgaaacttaaatgccaacataaatgtattggaaaagcagcaaggctgaaaaaaaagcactgatcattcatgttgaaaaattggataaagaaaagcaaatgaaatccaatgaaggttgagtgaaggaagttataaagaacagaaattggccgggcacggtggctcatgcctgtaatcccagcactttggga

SEQ ID NO: 5391 - DNA, 89 bp, Homo sapiens
agtgttgggattacagacaggagccaccacacttatttgttcttaccctcaaaatagtcagaatttaatcaaatattatgagacacagc

SEQ ID NO: 5392 - DNA, 546 bp, Homo sapiens
tcttaacttttctgaacctgtttcctcttttctgaaattagaataatccctccttcctagagatgttagcggaaggattcagtggtctacccttggattggaaaacattgtctttagagggtcatattgtaaatgttttctgttttgtgagtcatatagtctctgacactgcaagagcagccttagatagtatgtaaacaaattagcatggtcatatatgcccaggcagcgggtcaaatttgtcccccaggctactttgccaacgctaaatataaagctgttagcacactgcctgtatacagcaggtaattaaatgattccctaccaccaacactaccccctagttccatcgcttctggcaactgcataatcatcaagaggtagactttgggccgggtgcagtggctcacacctgtaatcccagcactttgggaggccgaggcaggtggatcacttgaagtcaggagttccagaccagcctggccaacatggtgaaactctgtctctactaaaaatacaaaaaaaaaaaaaaaaaaaaaaaatttt

SEQ ID NO: 5393 - DNA, 579 bp, Homo sapiens
gacctaagagcctggatatgacaactctacaaagccaatcaagcctttgagcagcctctacgacaagaggtccactgggtcacagcaaagtatagatctactacgggcaaggcattgtaggggacaggcttaagatacgtttcctgctgggcacggtggctcatgcctgtaatcccagcactttgggaggctaaggcaggcacactgcttgacctcaggagtttgagaccatcccagacaacatgacaaaaccccatctctacaaaaattacaaaaattagccgggcataggccgggtgcagtggctcacgcctgtaatctcagcactttgggaggccgaggcaggcggatcatgaggtcaggagttcaagaccagcctgaccgacatggtgaaaccctgtctctactaaaaataaaaaaattagccagtggtggtggcgcatgcctgtaatcacagctactcaggaggctaaggcaggagaatagcttgaacccaggaggtggaggttgcagtgagccaagatcacaccactgcactctagcctgggcaatacatctcgaaaaaaaaaagctgggcct

(The sequence listing continues in the following parts.)

We claim:

1. An isolated polynucleotide comprising a nucleotide sequence which hybridizes under stringent conditions to a sequence selected from the group consisting of SEQ ID NOS: 1-6010.

2. An isolated polynucleotide comprising at least 15 contiguous nucleotides of a nucleotide sequence having at least 90% sequence identity to a sequence selected from the group consisting of:
SEQ ID NOS: 1-6010, a degenerate variant of SEQ ID NOS: 1-6010, an antisense of SEQ ID NOS: 1-6010, and a complement of SEQ ID NOS: 1-6010.

3. An isolated polynucleotide comprising at least 15 contiguous nucleotides of a nucleotide sequence selected from the group consisting of: SEQ ID NOS:1-6010, a degenerate variant of SEQ ID NOS:1-6010, an antisense of SEQ ID NOS:1-6010, and a complement of SEQ ID NOS: 1-6010.

4. The isolated polynucleotide of claim 3, wherein the polynucleotide comprises at least 100 contiguous nucleotides of the nucleotide sequence.

5. The isolated polynucleotide of claim 3, wherein the polynucleotide comprises at least 200 contiguous nucleotides of the selected nucleotide sequence.

6. An isolated polynucleotide comprising a nucleotide sequence of at least 90% sequence identity to a sequence selected from the group consisting of: SEQ ID NOS: 1-6010, a degenerate variant of SEQ ID NOS:1-6010, an antisense of SEQ ID NOS:1-6010, and a complement of SEQ ID NOS:1-6010.

7. The isolated polynucleotide of claim 6, wherein the polynucleotide comprises a nucleotide sequence of at least 95% sequence identity to the selected nucleotide sequence.

8. The isolated polynucleotide of claim 6, wherein the polynucleotide comprises a nucleotide sequence that is identical to the selected nucleotide sequence.

9. A polynucleotide comprising a nucleotide sequence of an insert contained in a clone deposited as ATCC Accession No. PTA-2027, PTA-2028, PTA-2029, PTA-2030, PTA-2031, PTA-2032, PTA-2033, PTA-2034, PTA-2035, PTA-2036, PTA-2037, PTA-2038, PTA-2039, PTA-2040, PTA-2041, PTA-2042, PTA-2043, PTA-2044, PTA-2045, PTA-2046, PTA-2047, PTA-2050, PTA-2051, PTA-2052, PTA-2053, PTA-2054, PTA-2055, PTA-2056, PTA-2057, PTA-2058, PTA-2059, PTA-2060, PTA-2061, PTA-2062, PTA-2048, PTA-2049, PTA-2063, PTA-2064, PTA-2065, PTA-2066, PTA-2067, or PTA-2068.

10. An isolated cDNA obtained by the process of amplification using a polynucleotide comprising at least 15 contiguous nucleotides of a nucleotide sequence of a sequence selected from the group consisting of SEQ ID NOS: 1-6010.

11. The isolated cDNA of claim 10, wherein the polynucleotide comprises at least 25 contiguous nucleotides of the selected nucleotide sequence.

12. The isolated cDNA of claim 10, wherein the polynucleotide comprises at least 100 contiguous nucleotides of the selected nucleotide sequence.

13. The isolated cDNA of claims 10, 11, or 12, wherein amplification is by polymerase chain reaction (PCR) amplification.

14. An isolated recombinant host cell containing the polynucleotide according to claims 1, 2, 3, 6, 9, or 10.

15. An isolated vector comprising the polynucleotide according to claims 1, 2, 3, 6, 9, or 10.

16. A method for producing a polypeptide, the method comprising the steps of:
culturing a recombinant host cell containing the polynucleotide according to claims 1, 2, 3, 6, 9, or 10., said culturing being under conditions suitable for the expression of an encoded polypeptide;
recovering the polypeptide from the host cell culture.

17. An isolated polypeptide encoded by the polynucleotide according to claims 1, 2, 3, 6, 9, or 10.

18. An antibody that specifically binds the polypeptide of claim 17.

19. A method of detecting differentially expressed genes correlated with a cancerous state of a mammalian cell, the method comprising the step of:
detecting at least one differentially expressed gene product in a test sample derived from a cell suspected of being cancerous, where the gene product is encoded by a gene comprising an identifying sequence of at least one of SEQ ID NOS: 1-6010;
wherein detection of the differentially expressed gene product is correlated with a cancerous state of the cell from which the test sample was derived.

20. A library of polynucleotides, wherein at least one of the polynucleotides comprises the sequence information of the polynucleotide according to claims 1, 2, 3, 6, 9, or 10.

21. The library of claim 20, wherein the library is provided on a nucleic acid array.

22. The library of claim 20, wherein the library is provided in a computer-readable format.

23. A method of inhibiting tumor growth by modulating expression of a gene product, the gene product being encoded by a gene identified by a sequence selected from the group consisting of SEQ ID NOS:1-6010.
